United States Patent Application Publication US 2011/0214205 A1 - sequence listing, part 26

SEQ ID NO: 122728 - protein, 61 aa, Setaria italica
  Transcript Sequence Number=SeqID_56754
  Gene Ontology: Mol. function=hydrolase activity, hydrolyzing O -glycosyl compounds; Cellular component=cytoplasm; Biological process= carbohydrate metabolic process
  Homolog annotation: Hit_ID=Q1EMA0; Match level="QueryCoverage=95%, HitCoverage=20%, E-value=2e-18, Identity=72%"; Hit description =Glucan endo-1,3-beta-D-glucosidase
DGTNNQGLIDHVGRGTPKRSGAMETFIFAMFNENQKSGDPTERNFGLFYPNKQPVYSIRFQ

SEQ ID NO: 122729 - protein, 64 aa, Setaria italica; identical to SEQ ID NO: 87405
  Transcript Sequence Number=SeqID_56755
  Gene Ontology: Mol. function=hydrolase activity, hydrolyzing O -glycosyl compounds; Cellular component=cytoplasm; Biological process= carbohydrate metabolic process
  Homolog annotation: Hit_ID=Q02438; Match level="QueryCoverage=98%, HitCoverage=19%, E-value=3e-22, Identity=77%"; Hit description =Glucan endo-1,3-beta-glucosidase GV

SEQ ID NO: 122730 - protein, 91 aa, Setaria italica
  misc_feature (43)..(43): Xaa can be any naturally occurring amino acid
  Transcript Sequence Number=SeqID_56756
  Gene Ontology: Mol. function=hydrolase activity, hydrolyzing O -glycosyl compounds; Cellular component=cytoplasm; Biological process= carbohydrate metabolic process
  Homolog annotation: Hit_ID=Q02438; Match level="QueryCoverage=96%, HitCoverage=27%, E-value=2e-36, Identity=82%"; Hit description =Glucan endo-1,3-beta-glucosidase GV
  Pfam annotation: Domain name=Glyco_hydro_17; Domain location=1-91; Score=-109.0; E_value=9e-05; Accession=PF00332.10; Description =Glycosyl hydrolases family 17
ATVAALEKAGAPNVRIVISESGWPSAGGFGASVENARNYNQGXLIDHVGRGTPKRSGAMETFIFAMFNENQKSGDPTERNFGLFYPNKQPV

SEQ ID NO: 122731 - protein, 67 aa, Setaria italica
  Transcript Sequence Number=SeqID_56757
  Gene Ontology: Mol. function=hydrolase activity, hydrolyzing O -glycosyl compounds; Cellular component=cytoplasm; Biological process= carbohydrate metabolic process
  Homolog annotation: Hit_ID=Q02438; Match level="QueryCoverage=98%, HitCoverage=20%, E-value=5e-24, Identity=78%"; Hit description =Glucan endo-1,3-beta-glucosidase GV
GASVENARNYNQGLIDHVGRGTPKRSGAMETFIFAMFNENQKSGDPTERNFGLFYPNKQPVYSIRFQ

SEQ ID NO: 122732 - protein, 88 aa, Setaria italica
  Transcript Sequence Number=SeqID_56758
  Gene Ontology: Mol. function=hydrolase activity, hydrolyzing O -glycosyl compounds; Cellular component=cytoplasm; Biological process= carbohydrate metabolic process
  Homolog annotation: Hit_ID=Q02438; Match level="QueryCoverage=95%, HitCoverage=26%, E-value=6e-35, Identity=80%"; Hit description =Glucan endo-1,3-beta-glucosidase GV
  Pfam annotation: Domain name=Glyco_hydro_17; Domain location=1-88; Score=-117.5; E_value=0.00027; Accession=PF00332.10; Description =Glycosyl hydrolases family 17
ATVAALEKAGAPNVRIVISESGWPSAGGFGASVENARNYNQGLIDHVGRGTPKRSGAMETFIFAMFNENQKSGDPTERNFGLFYPQQA

SEQ ID NO: 122733 - protein, 44 aa, Setaria italica
  misc_feature (34)..(34): Xaa can be any naturally occurring amino acid
  Transcript Sequence Number=SeqID_56759
  Gene Ontology: Mol. function=hydrolase activity, hydrolyzing O -glycosyl compounds; Cellular component=cytoplasm; Biological process= carbohydrate metabolic process
  Homolog annotation: Hit_ID=Q5JKH9; Match level="QueryCoverage=97%, HitCoverage=13%, E-value=3e-11, Identity=72%"; Hit description=Endo -1,3-beta-glucanase
KRSGAMETFIFAMFNENQKSGDPTERNFGLFYPXKQPVYSIRFQ

SEQ ID NO: 122734 - protein, 58 aa, Setaria italica
  misc_feature (15)..(15): Xaa can be any naturally occurring amino acid
  Transcript Sequence Number=SeqID_56760
  Gene Ontology: Mol. function=hydrolase activity, hydrolyzing O -glycosyl compounds; Cellular component=cytoplasm; Biological process= carbohydrate metabolic process
  Homolog annotation: Hit_ID=Q1W6B9; Match level="QueryCoverage=87%, HitCoverage=15%, E-value=8e-15, Identity=70%"; Hit description=Beta -1,3-glucanase
KGKLKYDHVGRGTPXRSGAMETFIFAMFNENQKSGDPTERNFGLFYPNKQPVYSIRFQ

SEQ ID NO: 122735 - protein, 40 aa, Setaria italica
  Transcript Sequence Number=SeqID_56761
  Gene Ontology: Mol. function=hydrolase activity, hydrolyzing O -glycosyl compounds; Cellular component=cytoplasm; Biological process= carbohydrate metabolic process
  Homolog annotation: Hit_ID=Q1EMA0; Match level="QueryCoverage=97%, HitCoverage=14%, E-value=7e-11, Identity=74%"; Hit description =Glucan endo-1,3-beta-D-glucosidase
AMETFIFAMFNENQKSGDPTERNFGLFYPNKQPVYSIRFQ

SEQ ID NO: 122736 - protein, 51 aa, Setaria italica
  Transcript Sequence Number=SeqID_56762
  Gene Ontology: Mol. function=hydrolase activity, hydrolyzing O -glycosyl compounds; Cellular component=cytoplasm; Biological process= carbohydrate metabolic process
  Homolog annotation: Hit_ID=Q5JKH9; Match level="QueryCoverage=98%, HitCoverage=16%, E-value=9e-12, Identity=61%"; Hit description=Endo -1,3-beta-glucanase
GTTDNAQRRSGAMETFIFAMFNENQKSGDPTERNFGLFYPNKQPVYSIRFQ

SEQ ID NO: 122737 - protein, 96 aa, Setaria italica
  misc_feature (82)..(82): Xaa can be any naturally occurring amino acid
  Transcript Sequence Number=SeqID_56763
  Gene Ontology: Mol. function=hydrolase activity, hydrolyzing O -glycosyl compounds; Cellular component=cytoplasm; Biological process= carbohydrate metabolic process
  Homolog annotation: Hit_ID=Q02438; Match level="QueryCoverage=98%, HitCoverage=30%, E-value=7e-40, Identity=81%"; Hit description =Glucan endo-1,3-beta-glucosidase GV
  Pfam annotation: Domain name=Glyco_hydro_17; Domain location=1-95; Score=-84.0; E_value=3.6e-06; Accession=PF00332.10; Description =Glycosyl hydrolases family 17
NGLTYTNLFDAMVDATVAALEKAGAPNVRIVISESGWPSAGGFGASVENARNYNQGLIDHVGRGTPKRSGAMETFIFAMFNXNQKSGDPTERNFGA

SEQ ID NO: 122738 - protein, 91 aa, Setaria italica
  misc_feature (65)..(65): Xaa can be any naturally occurring amino acid
  Transcript Sequence Number=SeqID_56764
  Gene Ontology: Mol. function=hydrolase activity, hydrolyzing O -glycosyl compounds; Cellular component=cytoplasm; Biological process= carbohydrate metabolic process
  Homolog annotation: Hit_ID=Q02438; Match level="QueryCoverage=76%, HitCoverage=22%, E-value=2e-26, Identity=78%"; Hit description =Glucan endo-1,3-beta-glucosidase GV
  Pfam annotation: Domain name=Glyco_hydro_17; Domain location=3-91; Score=-148.6; E_value=0.015; Accession=PF00332.10; Description =Glycosyl hydrolases family 17
HEPVRRHGGRHRRGAGEGWGGPTVRIVISESGWPSAGGFGASVENARNYNQGLIDHVGRGTPQEXGAMETFIFAMFNENQKSGDPTERNFG

SEQ ID NO: 122739 - protein, 84 aa, Setaria italica
  Transcript Sequence Number=SeqID_56765
  Gene Ontology: Mol. function=hydrolase activity, hydrolyzing O -glycosyl compounds; Cellular component=cytoplasm; Biological process= carbohydrate metabolic process
  Homolog annotation: Hit_ID=Q02438; Match level="QueryCoverage=100%, HitCoverage=26%, E-value=7e-34, Identity=79%"; Hit description =Glucan endo-1,3-beta-glucosidase GV
  Pfam annotation: Domain name=Glyco_hydro_17; Domain location=1-84; Score=-124.4; E_value=0.00065; Accession=PF00332.10; Description =Glycosyl hydrolases family 17
LDATVAALEKAGAPNVRIVISESGWPSAGGFGASVENARNYNQGLIDHVGRGTPKRSGAMETFIFAMFNENQKSGDPTERNFGL

SEQ ID NO: 122740 - protein, 82 aa, Setaria italica
  misc_feature (43)..(43): Xaa can be any naturally occurring amino acid
  misc_feature (70)..(70): Xaa can be any naturally occurring amino acid
  Transcript Sequence Number=SeqID_56766
  Gene Ontology: Mol. function=hydrolase activity, hydrolyzing O -glycosyl compounds; Cellular component=cytoplasm; Biological process= carbohydrate metabolic process
  Homolog annotation: Hit_ID=Q02438; Match level="QueryCoverage=92%, HitCoverage=24%, E-value=7e-30, Identity=80%"; Hit description =Glucan endo-1,3-beta-glucosidase GV
  Pfam annotation: Domain name=Glyco_hydro_17; Domain location=1-82; Score=-153.4; E_value=0.028; Accession=PF00332.10; Description =Glycosyl hydrolases family 17
NERTTRKKAGAPNVRIVISESGWPSAGGFGASVENARNYNQGXIDHVGRGTPKRSGAMETFIFAMFNENXKSGDPTERNFGL

SEQ ID NO: 122741 - protein, 46 aa, Setaria italica
  misc_feature (32)..(32): Xaa can be any naturally occurring amino acid
  misc_feature (39)..(39): Xaa can be any naturally occurring amino acid
  Transcript Sequence Number=SeqID_56767
ISLGYATFQPGTTVRDGGNGLTYTNLFDAMVXDATVAAXEKAWGRP

SEQ ID NO: 122742 - protein, 62 aa, Setaria italica
  misc_feature (36)..(36): Xaa can be any naturally occurring amino acid
  Transcript Sequence Number=SeqID_56768
  Gene Ontology: Mol. function=hydrolase activity, hydrolyzing O -glycosyl compounds; Cellular component=cytoplasm; Biological process= carbohydrate metabolic process
  Homolog annotation: Hit_ID=Q02438; Match level="QueryCoverage=96%, HitCoverage=18%, E-value=8e-20, Identity=75%"; Hit description =Glucan endo-1,3-beta-glucosidase GV
TTRNYNQGLIDHVGRGTPKRSGAMETFIFAMFNENXKSGDPTERNFGLFYPNKQPVYSIRFQ

SEQ ID NO: 122743 - protein, 41 aa, Setaria italica
  Transcript Sequence Number=SeqID_56769
LQQSCPLFIRHTCTLHFYYHCLIISLFRRCMHLPSSSSCIA

SEQ ID NO: 122744 - protein, 47 aa, Setaria italica
  Transcript Sequence Number=SeqID_56770
RRGSHGEELRALLPQQAARVLDPVPVRSSMSDRSIPINPCYAMLCYA

SEQ ID NO: 122745 - protein, 63 aa, Setaria italica
  Transcript Sequence Number=SeqID_56771
NENQKSGDPTERNFGALLPQQAARVLDPVPVRSSMSDRSIPINPMLCYAMLCMKMMMGDACIF

SEQ ID NO: 122746 - protein, 56 aa, Setaria italica
  Transcript Sequence Number=SeqID_56772
  Gene Ontology: Mol. function=hydrolase activity, hydrolyzing O -glycosyl compounds; Cellular component=cytoplasm; Biological process= carbohydrate metabolic process
  Homolog annotation: Hit_ID=Q1EMA0; Match level="QueryCoverage=98%, HitCoverage=19%, E-value=1e-17, Identity=72%"; Hit description =Glucan endo-1,3-beta-D-glucosidase
QGLIDHVGRGTPKRSGAMETFIFAMFNENQKSGDPTERNFGLFYPNKQPVYSIRFQ

SEQ ID NO: 122747 - protein, 53 aa, Setaria italica
  Transcript Sequence Number=SeqID_56773
  Gene Ontology: Mol. function=hydrolase activity, hydrolyzing O -glycosyl compounds; Cellular component=cytoplasm; Biological process= carbohydrate metabolic process
  Homolog annotation: Hit_ID=Q1EMA0; Match level="QueryCoverage=98%, HitCoverage=18%, E-value=9e-16, Identity=71%"; Hit description =Glucan endo-1,3-beta-D-glucosidase
IDHVGRGTPKRSGAMETFIFAMFNENQKSGDPTERNFGLFYPNKQPVYSIRFQ

SEQ ID NO: 122748 - protein, 55 aa, Setaria italica
  Transcript Sequence Number=SeqID_56774
  Gene Ontology: Mol. function=hydrolase activity, hydrolyzing O -glycosyl compounds; Cellular component=cytoplasm; Biological process= carbohydrate metabolic process
  Homolog annotation: Hit_ID=Q02438; Match level="QueryCoverage=100%, HitCoverage=17%, E-value=3e-19, Identity=81%"; Hit description =Glucan endo-1,3-beta-glucosidase GV
SAGGFGASVENARNYNQGLIDHVGRGTPKRSGAMETFIFAMFNENQKSGDPTERN

SEQ ID NO: 122749 - protein, 62 aa, Setaria italica
  misc_feature (7)..(7): Xaa can be any naturally occurring amino acid
  Transcript Sequence Number=SeqID_56775
  Gene Ontology: Mol. function=hydrolase activity, hydrolyzing O -glycosyl compounds; Cellular component=cytoplasm; Biological process= carbohydrate metabolic process
  Homolog annotation: Hit_ID=Q02438; Match level="QueryCoverage=100%, HitCoverage=19%, E-value=1e-22, Identity=80%"; Hit description =Glucan endo-1,3-beta-glucosidase GV
SAGGFGXSVENARNYNQGLIDHVGRGTPKRSGAMETFIFAMFNENQKSGDPTERNFGLFYPN

SEQ ID NO: 122750 - protein, 47 aa, Setaria italica
  Transcript Sequence Number=SeqID_56776
RAGIHGEELRALLPQQAARVLDPVPVRSSMSDRSIPINPCYAMLCYA

SEQ ID NO: 122751 - protein, 49 aa, Setaria italica
  Transcript Sequence Number=SeqID_56777
YFAYRGNPRDISLGYATFQPGTTVRDGGKELAMTLDCTDVDTLMLPSPV

SEQ ID NO: 122752 - protein, 38 aa, Setaria italica
  Transcript Sequence Number=SeqID_56778
AGLHGGDRPVPGDLHHVALREHAAGRREGVGDDVGLHR

SEQ ID NO: 122753 - protein, 78 aa, Setaria italica
  Transcript Sequence Number=SeqID_56779
  Gene Ontology: Mol. function=protein serine/threonine kinase activity; Biological process=protein amino acid phosphorylation
  Homolog annotation: Hit_ID=Q2QMH1; Match level="QueryCoverage=84%, HitCoverage=11%, E-value=3e-20, Identity=78%"; Hit description =Serine/threonine-protein kinase Nek2
  Subcellular localization annotation: CTP_CleavageSite=24; ConfidenceScore=5.35e-01
MILIELVSPPVQLSSRTPLNKSARTARRASLPLPTYGTPSNRTISILDRLDSPDVSVNAPRIDRIAEFPLASSEDPLA

SEQ ID NO: 122754 - protein, 109 aa, Setaria italica
  Transcript Sequence Number=SeqID_56780
  Gene Ontology: Mol. function=protein serine/threonine kinase activity; Biological process=protein amino acid phosphorylation
  Homolog annotation: Hit_ID=Q2QMH1; Match level="QueryCoverage=80%, HitCoverage=14%, E-value=3e-36, Identity=86%"; Hit description =Serine/threonine-protein kinase Nek2
  Subcellular localization annotation: CTP_CleavageSite=76; ConfidenceScore=5.65e-01
LQVQLKSSPSRNMSPIYQSLTDKVKKMTFPSDVTDSVRRRVARRNSLGNERTVTFCKPSPERNSISSTRSIKEYTTTQSVKEFSIDSSLVVNDLEGVLLGVLRMPDVFV

SEQ ID NO: 122755 - protein, 70 aa, Setaria italica
  misc_feature (50)..(50): Xaa can be any naturally occurring amino acid
  Transcript Sequence Number=SeqID_56781
  Homolog annotation: Hit_ID=B6SV15; Match level="QueryCoverage=95%, HitCoverage=14%, E-value=3e-31, Identity=95%"; Hit description=5 -nucleotidase
RSNSRPAQTLAATCMDDHELTESMQKLLIVMQRLDEKIGPMLESDGELFXKRWGWLSRAGLWDKSHLVPS

SEQ ID NO: 122756 - protein, 110 aa, Setaria italica
  misc_feature (33)..(33): Xaa can be any naturally occurring amino acid
  misc_feature (107)..(107): Xaa can be any naturally occurring amino acid
  Transcript Sequence Number=SeqID_56782
  Gene Ontology: Mol. function=hydrolase activity; Biological process =metabolic process
  Homolog annotation: Hit_ID=B6SV15; Match level="QueryCoverage=100%, HitCoverage=23%, E-value=2e-57, Identity=95%"; Hit description=5 -nucleotidase
  Pfam annotation: Domain name=5_nucleotid; Domain location=1-110; Score=-171.1; E_value=0.0032; Accession=PF05761.6; Description=5' nucleotidase family
KLMNHAFNRFLPNDVGWRDLFEMVIVSARKPEXFFQLSHPLYEVVTDDGLMRPCFKANSGGLYSGGSAQMVEKSLEIHGDEILYVGDHIYTDVSQSKVHLRWRTALXCRE

SEQ ID NO: 122757 - protein, 69 aa, Setaria italica
  Transcript Sequence Number=SeqID_56783
GLLVRRCRSGPSCRLCLVGTSVGRWSLLSQGTLLCSRGTVVSLVSVPYVYVLSAAYAGMRIYFREVLIS

SEQ ID NO: 122758 - protein, 56 aa, Setaria italica
  Transcript Sequence Number=SeqID_56784
ATVLVCAALLLCGEWIGRGQASCTLLNTQEQCCTNEDGSCSESCHCQRILLRESLG

SEQ ID NO: 122759 - protein, 115 aa, Setaria italica
  misc_feature (15)..(15): Xaa can be any naturally occurring amino acid
  Transcript Sequence Number=SeqID_56785
  Homolog annotation: Hit_ID=B9SFK7; Match level="QueryCoverage=73%, HitCoverage=7%, E-value=2e-17, Identity=53%"; Hit description=Breast carcinoma amplified sequence, putative
SDCEDSEHSDSTPSXNDGSSGKEITRVRERSSWYLSNAEVQINSWRIPIWQKSKICFYVMDHPAAESGETVSSSGGEIEIEKLPLHEVEIRRRELLPVFKQFHYTERNSSDRYCQ

SEQ ID NO: 122760 - protein, 106 aa, Setaria italica
  Transcript Sequence Number=SeqID_56786
GTKQMGLTVYVQINTKGAASRQAMATSRQHPAPLIVNPRISKLPGGILASDWREELHFWNVNIKHKLYHENMCAPLFHESLLKFHQILYIILHTECCGHCFSLYLK

SEQ ID NO: 122761 - protein, 56 aa, Setaria italica
  misc_feature (33)..(33): Xaa can be any naturally occurring amino acid
  Transcript Sequence Number=SeqID_56787
  Subcellular localization annotation: CTP_CleavageSite=16; ConfidenceScore=5.39e-01
PSYSFSGWLNTVSNVAASASGKLSVPSGSVTAXFHNSIYQGSLPVPSKANALEHLL

SEQ ID NO: 122762 - protein, 46 aa, Setaria italica
  Transcript Sequence Number=SeqID_56788
PPPAKACECSMFICTKQMGLTVSSSGGEIEIEKLPLHEVEISIVEL

SEQ ID NO: 122763 - protein, 50 aa, Setaria italica
  Transcript Sequence Number=SeqID_56789
  Gene Ontology: Cellular component=plasma membrane; Biological process= protein transport
  Homolog annotation: Hit_ID=Q9SZE4; Match level="QueryCoverage=100%, HitCoverage=22%, E-value=5e-18, Identity=80%"; Hit description =Vacuolar protein sorting-associated protein 32 homolog 2
AAIQCLKKKKLYETQIEQLSNFQLRVHDQIIMLESAKATTDTVDALRSGS

SEQ ID NO: 122764 - protein, 73 aa, Setaria italica
  Transcript Sequence Number=SeqID_56790
  Gene Ontology: Mol. function=nucleic acid binding
  Homolog annotation: Hit_ID=Q7F8R0; Match level="QueryCoverage=67%, HitCoverage=18%, E-value=4e-15, Identity=78%"; Hit description=Zinc finger CCCH domain-containing protein 14
MEDVRKRGNGRRRQRGLRRREARASTSGCPFGEGCHFLHCFPGGYQAVSKITNLGGPAVTPPGRMMMDGPPTP

SEQ ID NO: 122765 - protein, 69 aa, Setaria italica
  Transcript Sequence Number=SeqID_56791
  Gene Ontology: Mol. function=DNA binding; Cellular component=nucleus
RRNVWECSKFSTRVQKVDKLQNRKSSKKSRRGGMIKKRRKLSEPEDIGNINSNQTGMQQSQERFGFEPG

SEQ ID NO: 122766 - protein, 49 aa, Setaria italica
  Transcript Sequence Number=SeqID_56792
LISRYRSCQLVPANIQMAKFGGVFSAVILVVLLPCLDVALGQSTDTSEV

SEQ ID NO: 122767 - protein, 58 aa, Setaria italica
  Transcript Sequence Number=SeqID_56793
LLGFCVSGTIKLTRFNGIKQFDQQEMPMPYCGTDKSCLWWDNKSFFLVSPFFTWEQLT

SEQ ID NO: 122768 - protein, 57 aa, Setaria italica
  Transcript Sequence Number=SeqID_56794
LLGFCVSGTIKLTRFNGIKQFDQQEMPMPYCGTDKSCLWWDNTETRNRGKARHTGDR

SEQ ID NO: 122769 - protein, 78 aa, Setaria italica
  misc_feature (50)..(50): Xaa can be any naturally occurring amino acid
  Transcript Sequence Number=SeqID_56795
  Homolog annotation: Hit_ID=B9RNU1; Match level="QueryCoverage=82%, HitCoverage=12%, E-value=5e-20, Identity=67%"; Hit description =Transporter, putative
RCQRVQPSVAQVYQGVTSIPWMVKPLWGLFTDVLPVAGYRRRPYFILAVXGFIGVIAMLIVSLHSKLHALFALLALMA

SEQ ID NO: 122770 - protein, 42 aa, Setaria italica
  misc_feature (27)..(27): Xaa can be any naturally occurring amino acid
  Transcript Sequence Number=SeqID_56796
  Gene Ontology: Cellular component=membrane
  Homolog annotation: Hit_ID=Q2QY42; Match level="QueryCoverage=100%, HitCoverage=12%, E-value=4e-11, Identity=73%"; Hit description =Nodulin, putative
YLQAWIVEMKGPVFFAAWLPLYSVFTXFCSSFFLGEIVHLGR

SEQ ID NO: 122771 - protein, 46 aa, Setaria italica
  Transcript Sequence Number=SeqID_56797
  Subcellular localization annotation: CTP_CleavageSite=40; ConfidenceScore=5.04e-01
CVIAAVVYSYIFFSVSSLSRNTLSLNMYSVSLKLTSATLVAAAGNA

SEQ ID NO: 122772 - protein, 64 aa, Setaria italica
  misc_feature (10)..(10): Xaa can be any naturally occurring amino acid
  misc_feature (34)..(34): Xaa can be any naturally occurring amino acid
  misc_feature (48)..(48): Xaa can be any naturally occurring amino acid
  Transcript Sequence Number=SeqID_56798
LLQGVWFMAXGFALWVPALVPSGCHGVGVEEEGXALRIAASTEEAARXATVMANLQFSWALAVT

SEQ ID NO: 122773 - protein, 79 aa, Setaria italica
  Transcript Sequence Number=SeqID_56799
  Gene Ontology: Mol. function=electron carrier activity; Cellular component=integral to membrane; Biological process=oxidation reduction
  Homolog annotation: Hit_ID=Q2R4L5; Match level="QueryCoverage=75%, HitCoverage=23%, E-value=7e-14, Identity=60%"; Hit description =Cytochrome P450 71C4, putative
KSERLRRRWDELLDRLIDDHESKRHESKNEDDDFIHVLLSVRQEYGLTRENMKAILLDVFFGGIDTAASVLEYTVIELI

SEQ ID NO: 122774 - protein, 69 aa, Setaria italica
  Transcript Sequence Number=SeqID_56800
LVNFWTIIHKYNEMLQLRIYDKLPTLTLPNWELNNSSSSSATNNCRGIKTPAFSASNGRGQRFHAPIRR

SEQ ID NO: 122775 - protein, 132 aa, Setaria italica
  Transcript Sequence Number=SeqID_56801
  Gene Ontology: Mol. function=metal ion binding
  Homolog annotation: Hit_ID=B6TJ47; Match level="QueryCoverage=75%, HitCoverage=18%, E-value=8e-36, Identity=73%"; Hit description =Ankyrin repeat domain-containing protein 28
  Pfam annotation: Domain name=Ank; Domain location=39-71; Score=33.8; E_value=6.9e-07; Accession=PF00023.22; Description=Ankyrin repeat
  Pfam annotation: Domain name=Ank; Domain location=73-104; Score=8.4; E_value=2.2; Accession=PF00023.22; Description=Ankyrin repeat
  Pfam module annotation: Pfam domain module=Ank::Ank; Domain location =39-71::73-104
MDPRLLQFFSSASDILLLSLQVLSMILDHGVPPDVVNRHKQTPLMLAAMHGKIDCVLRLLQAGANILMFDSVHARSCLHHAAYFGHVDCLQAILSAAQTTPVADCLQAILSAAQTTPVADSWGFARFVPDVD

SEQ ID NO: 122776 - protein, 60 aa, Setaria italica
  Transcript Sequence Number=SeqID_56802
RLVLSSTVVLSVLIILMFDSVHAQSCLHHAAYFGHVDCLQAILSDLQSRNVLIRCNSSSS

SEQ ID NO: 122777 - protein, 70 aa, Setaria italica
  Transcript Sequence Number=SeqID_56803
DYLILIKLQRIEPTNSRHMLGLDRMSIFSRKAGGDGCFGFTLPHAGALLCSALLHRSCSGLSRLPLSQST

SEQ ID NO: 122778 - protein, 52 aa, Setaria italica
  Transcript Sequence Number=SeqID_56804
RARLKPDGRLRQWQPGQARARPVKQSRAEQSAGNSRTKVKDRKTSTVTKPYL

SEQ ID NO: 122779 - protein, 30 aa, Setaria italica
  Transcript Sequence Number=SeqID_56805
IKLQVIEGSQVIMSVPGAHSRKPPLESILH

SEQ ID NO: 122780 - protein, 53 aa, Setaria italica
  Transcript Sequence Number=SeqID_56806
YNFFRILRWLRDEEEQQKDQKLAKIEFLIVKLSRKNIILSQTRQYSFYNINYR

SEQ ID NO: 122781 - protein, 45 aa, Setaria italica
  Transcript Sequence Number=SeqID_56807
  Gene Ontology: Mol. function=secondary active sulfate transmembrane transporter activity; Cellular component=integral to membrane; Biological process=sulfate transport
  Homolog annotation: Hit_ID=B9RJF8; Match level="QueryCoverage=86%, HitCoverage=5%, E-value=3e-14, Identity=94%"; Hit description =Sulfate transporter, putative
MLVCTSDVHKEMVALGTMNIVGSMTSCYVATGSFSRSAVNYMAGC

SEQ ID NO: 122782 - protein, 82 aa, Setaria italica
  Transcript Sequence Number=SeqID_56808
ARFWAAYIDDKVRNKSLKVPNDRIKRLNLLQDGFVDRSGTRAVDLQMLAAWTQASRGKTEEDRAEGMKQSLATVETLEGALR

SEQ ID NO: 122783 - protein, 50 aa, Setaria italica
  Transcript Sequence Number=SeqID_56809
MFCRSMQLYVAELPKWCEISYMQGCDGSILLDRSDGEKFAQPNLNSVRGY

SEQ ID NO: 122784 - protein, 41 aa, Setaria italica
  Transcript Sequence Number=SeqID_56810
KDKNECSSPENLGRVVQASSCSEKGKLVVSDNIFISDLKPV

SEQ ID NO: 122785 - protein, 57 aa, Setaria italica
  Transcript Sequence Number=SeqID_56811
  Homolog annotation: Hit_ID=B9RK89; Match level="QueryCoverage=85%, HitCoverage=6%, E-value=8e-10, Identity=57%"; Hit description=Dead box ATP-dependent RNA helicase, putative
MLFLHIADCRSGKCTQVVRPVKNKAFQSSWVSCVAIDASESWLACGTSSGISVWSLL

SEQ ID NO: 122786 - protein, 51 aa, Setaria italica
  Transcript Sequence Number=SeqID_56812
ENLCFFLMHIIRCQVQVITVLLITHLLYHVSILLLLLHLFFSKTHLVNNFN

SEQ ID NO: 122787 - protein, 99 aa, Setaria italica
  misc_feature (59)..(59): Xaa can be any naturally occurring amino acid
  Transcript Sequence Number=SeqID_56813
  Homolog annotation: Hit_ID=Q5DVL6; Match level="QueryCoverage=54%, HitCoverage=15%, E-value=3e-14, Identity=79%"; Hit description=C2 domain-containing protein
ARLPLRDVLDDAGVGGKVSRTLRLKRPSGRPQGKLDARVAIREAPPPRYHHDPSPYPAXPYAAPPVGYPAGAYGYGGGPQPAYGAPPSAPAYAAAPVVG

SEQ ID NO: 122788 - protein, 93 aa, Setaria italica
  misc_feature (63)..(63): Xaa can be any naturally occurring amino acid
  Transcript Sequence Number=SeqID_56814
LALSALIKLMSPKEVKDVFSILKDCAADANQNTSVELQITYGVLFSLVATFISDALSTSHEKXSLSSSDSSFRHEFHEKYLGHQMMTMILHEK

SEQ ID NO: 122789 - protein, 83 aa, Setaria italica
  misc_feature (4)..(4): Xaa can be any naturally occurring amino acid
  Transcript Sequence Number=SeqID_56815
HGAXFHGQCEFFTSSSNYDLIPIYVGITTQRELIILASTGCQPIHEGQHMYHIYFGGNCSRNISTIATGSHHQLQLATEKHIN

SEQ ID NO: 122790 - protein, 81 aa, Setaria italica
  Transcript Sequence Number=SeqID_56816
KDLYEPIIRDEIPTGVMEEDRIVLNWKAVGMIRLYINHNIFYHVANDTDAFKLSQNFESMYEQKTAVNNASMVKRLAKLEY

SEQ ID NO: 122791 - protein, 61 aa, Setaria italica
  Transcript Sequence Number=SeqID_56817
CEFFTSSSNYDLIPIYVGITTQRELIILASTGCQPHQRVVEHQIGGTKAKSGGTTDWRHQG

SEQ ID NO: 122792 - protein, 78 aa, Setaria italica
  Transcript Sequence Number=SeqID_56818
SHTSRFHYLGQQQQDLGLQARVWKDLTKEWWNTRLEALRQRVVEQQIGGTKDEDLLLLNLADESLLLSRKFSSPISLL

SEQ ID NO: 122793 - protein, 55 aa, Setaria italica
  Transcript Sequence Number=SeqID_56819
  Gene Ontology: Mol. function=calcium ion binding
  Homolog annotation: Hit_ID=B6U193; Match level="QueryCoverage=87%, HitCoverage=8%, E-value=5e-18, Identity=89%"; Hit description=EH -domain-containing protein 1
PPVMEGVDELVARSKAVVKRVHPEDNGTPQVQASSIYHWFGSKSAQKVLDWRVDL

SEQ ID NO: 122794 - protein, 136 aa, Setaria italica
  Transcript Sequence Number=SeqID_56820
DLHQQERRDRSQKNDAQHQTRQGMLALNAMASASALVLEGRGEERSGGGGRRGWWCLPRYYSVASPVRRFRPSGTPSDHERRRGVGGRRVGRTEERGCEGGRRVGRWMTMDRRRSGDPQTHETGRPGRPSFRLLTL

SEQ ID NO: 122795 - protein, 67 aa, Setaria italica
  Transcript Sequence Number=SeqID_56821
LASLVRIDRPLWPDDRWFAWLRSLAGPQPEARPSPTYRGTCVAIIRNIIWWPLITSWMNEPGKQGAH

SEQ ID NO: 122796 - protein, 70 aa, Setaria italica
  misc_feature (16)..(16): Xaa can be any naturally occurring amino acid
  Transcript Sequence Number=SeqID_56822
  Homolog annotation: Hit_ID=Q5VSV6; Match level="QueryCoverage=77%, HitCoverage=19%, E-value=6e-12, Identity=66%"; Hit description =OSJNBa0009P12.20 protein
MGREERFPVWEAALGXGVAAAFAAGLVGVYLSMPDSDYSFLKLPRNLEELQILTYVSRAPSFLVPVGVLS

SEQ ID NO: 122797 - protein, 147 aa, Setaria italica
  Transcript Sequence Number=SeqID_56823
  Gene Ontology: Mol. function=transferase activity, transferring acyl groups, acyl groups converted into alkyl on transfer; Cellular component=cytoplasm; Biological process=cellular carbohydrate metabolic process
  Homolog annotation: Hit_ID=Q0E2K1; Match level="QueryCoverage=84%, HitCoverage=22%, E-value=2e-60, Identity=91%"; Hit description =Citrate synthase (Fragment)
  Pfam annotation: Domain name=Citrate_synt; Domain location=1-146; Score=-134.5; E_value=2e-05; Accession=PF00285.13; Description =Citrate synthase
LPAKSQVGSSCYRWCLPKYSHNLLIPHLLDSLGNKSYKPNPRLARALDILFILHAEHEMNCSTAAVRHLASSGVDVFTALSGGVGALYGPLHGGANEAVLKMLNEIGSVENIPDFIEGVKNRKRKMSGFGHRVYKNYDPRAKSSGNW

SEQ ID NO: 122798 - protein, 153 aa, Setaria italica
  misc_feature (14)..(14): Xaa can be any naturally occurring amino acid
  Transcript Sequence Number=SeqID_56824
  Gene Ontology: Mol. function=transferase activity, transferring acyl groups, acyl groups converted into alkyl on transfer; Cellular component=cytoplasm; Biological process=cellular carbohydrate metabolic process
  Homolog annotation: Hit_ID=Q0E2K1; Match level="QueryCoverage=81%, HitCoverage=23%, E-value=4e-62, Identity=93%"; Hit description =Citrate synthase (Fragment)
ELAESSSFVEVAYXLMYGNLPTQSQLASWEFAISQHSAVPQGLLDIIQSMPHDAHPMGVLASAMSTLSVFHPDANPALRGQDLYKSKQVRDKQIVRVLGKAPTIAAAAYLRLAGRPPILPSTPLEARCLTAAVEQFISCSACRMNRISRARAS

SEQ ID NO: 122799 - protein, 91 aa, Setaria italica
  Transcript Sequence Number=SeqID_56825
  Gene Ontology: Mol. function=transferase activity, transferring acyl groups, acyl groups converted into alkyl on transfer; Cellular component=cytoplasm; Biological process=cellular carbohydrate metabolic process
  Homolog annotation: Hit_ID=Q0E2K1; Match level="QueryCoverage=97%, HitCoverage=16%, E-value=3e-42, Identity=93%"; Hit description =Citrate synthase (Fragment)
FLYMLDSLGNKSYKPNPRLARALDILFILHAEHEMNCSTAAVRHLASSGVDVFTALSGGVGALYGPLHGGANEAVLKMLNEIGSVGNIPSI

SEQ ID NO: 122800 - protein, 82 aa, Setaria italica
  misc_feature (69)..(69): Xaa can be any naturally occurring amino acid
  Transcript Sequence Number=SeqID_56826
  Gene Ontology: Mol. function=protein serine/threonine kinase activity; Biological process=protein amino acid phosphorylation
  Homolog annotation: Hit_ID=B6U0Y9; Match level="QueryCoverage=98%, HitCoverage=12%, E-value=1e-31, Identity=76%"; Hit description=ATP binding protein
  Pfam annotation: Domain name=Pkinase_Tyr; Domain location=1-81; Score= -173.3; E_value=0.033; Accession=PF07714.9; Description=Protein tyrosine kinase
YCSQDVAIKVVMPERISADMYQDFAQEVYIMRKVRHRNVVQFIGACTRQPNLYIVTDFMSGGSVYDYLXKKNSAFKLPEILR

SEQ ID NO: 122801 - protein, 60 aa, Setaria italica
  Transcript Sequence Number=SeqID_56827
  Gene Ontology: Mol. function=protein serine/threonine kinase activity; Biological process=protein amino acid phosphorylation
  Homolog annotation: Hit_ID=B9R8H0; Match level="QueryCoverage=86%, HitCoverage=6%, E-value=7e-22, Identity=94%"; Hit description =Protein kinase, putative
NNIIHRDLKTVNLLMDENKVVKVADFGVARVKDQSGVMTAETGTYRWMAPEVYIVHMHIS

SEQ ID NO: 122802 - protein, 55 aa, Setaria italica
  Transcript Sequence Number=SeqID_56828
LYLIKSSWIVHTVRKDEKYEDVHLNPVPTTVVRNTVTYAQEQNTKTGSVHLSSVS

SEQ ID NO: 122803 - protein, 58 aa, Setaria italica
  Transcript Sequence Number=SeqID_56829
LGRGKLQDGCAGTTLHWVVMSNPETLHVMCFTISYYYTTSDHRPVDELVGRTGGGRSA

SEQ ID NO: 122804 - protein, 40 aa, Setaria italica
  Transcript Sequence Number=SeqID_56830
QSTACLDYYTGFLLKDILPYLTIYFINNLLHVLIITQASY

SEQ ID NO: 122805 - protein, 70 aa, Setaria italica
  Transcript Sequence Number=SeqID_56831
  Subcellular localization annotation: CTP_CleavageSite=49; ConfidenceScore=5.17e-01
TAAVRTGAVVQPHNAKGGAPGGGNQPGPGKKGGGAVGVGGPMGGMLPQQAMMRPNMMGGDRTYPGRRGQE

SEQ ID NO: 122806 - protein, 82 aa, Setaria italica
  Transcript Sequence Number=SeqID_56832
MMRGKGRRWHMRCGKGKWWRMRCGRESSHVLQKKVKATVYTSSSRPPSVSVPPQRMHQAVLTRPIINQFAHLPQHMIAPPLL

SEQ ID NO: 122807 - protein, 28 aa, Setaria italica
  Transcript Sequence Number=SeqID_56833
WGASDLWRLQGDYTFGSLTWHNDQKTVR

SEQ ID NO: 122808 - protein, 106 aa, Setaria italica
  Transcript Sequence Number=SeqID_56834
  Gene Ontology: Mol. function=heat shock protein binding; Biological process=protein folding
MKETRPSRRKCLVCLGAVTLISATGPTISTPNGLAADMMNKPGIQKAVCRNCNGSGAVICKGLTSLDRFVCSLLMLNDLSVLDSIRFTFLKIATVLSNRESSFNRK

SEQ ID NO: 122809 - protein, 53 aa, Setaria italica
  Transcript Sequence Number=SeqID_56835
  Gene Ontology: Mol. function=heat shock protein binding; Biological process=protein folding
  Homolog annotation: Hit_ID=A8JFP5; Match level="QueryCoverage=58%, HitCoverage=15%, E-value=3e-10, Identity=83%"; Hit description=DnaJ -like zinc-finger protein
SFFLEWIHFQLDSGDMCGGTGKWKALNRKRAKDVYEFTECPNCYGTLVPSIVI

SEQ ID NO: 122810 - protein, 84 aa, Setaria italica
  misc_feature (45)..(45): Xaa can be any naturally occurring amino acid
  Transcript Sequence Number=SeqID_56836
  Gene Ontology: Mol. function=serine-type carboxypeptidase activity; Cellular component=extracellular region; Biological process =proteolysis
  Homolog annotation: Hit_ID=B6U5U4; Match level="QueryCoverage=100%, HitCoverage=22%, E-value=8e-37, Identity=74%"; Hit description =Virulence-related protein Nf314
IVGTYWADSPRSMLPIYQELIAAGMKIWVFSGDTDAVVPVTATRXGGWSQVYKGLTLVTIAGAGHEVPLHRPRQALIMFRHFLK

SEQ ID NO: 122811 - protein, 45 aa, Setaria italica
  Transcript Sequence Number=SeqID_56837
  Gene Ontology: Cellular component=membrane
  Homolog annotation: Hit_ID=B6TRP3; Match level="QueryCoverage=82%, HitCoverage=8%, E-value=3e-11, Identity=94%"; Hit description =Nodulin-like protein
CRIACIWVFQGIVTSSIAYYVQGLVIQKTGPVFASAFSPLMMIIV

SEQ ID NO: 122812 - protein, 146 aa, Setaria italica
  misc_feature (55)..(55): Xaa can be any naturally occurring amino acid
  Transcript Sequence Number=SeqID_56838
  Gene Ontology: Mol. function=protein serine/threonine kinase activity; Cellular component=peroxisome; Biological process=protein amino acid phosphorylation
  Homolog annotation: Hit_ID=B9SYH0; Match level="QueryCoverage=92%, HitCoverage=50%, E-value=2e-54, Identity=74%"; Hit description=ATP binding protein, putative
PNILLTADYEPQISDFGLARWLPSEWTHHAIAPIEGTFGCLAPEYFTHGIVDEKXRNVFAFGVFLLELISGRKPVDGSHKSLIAWAKPYLSDGVVQGLVDPRLGDGYDAGQLRRLMFVASLCVRAAAAWRPTMTQVRTETDNFLCT

SEQ ID NO: 122813 - protein, 69 aa, Setaria italica
  Transcript Sequence Number=SeqID_56839
  Gene Ontology: Mol. function=electron carrier activity; Biological process=oxidation reduction
  Homolog annotation: Hit_ID=Q6ATT7; Match level="QueryCoverage=100%, HitCoverage=13%, E-value=1e-24, Identity=78%"; Hit description =Cytochrome P450, putative
VVSSAEAAREVMKTHDLAFCSRHLSATIGIISCGGKDIIFSNYNERWRELRKLCMLELFSQRRVLSFRP

SEQ ID NO: 122814 - protein, 48 aa, Setaria italica
  Transcript Sequence Number=SeqID_56840
  Gene Ontology: Mol. function=microtubule binding
  Homolog annotation: Hit_ID=B6T577; Match level="QueryCoverage=68%, HitCoverage=10%, E-value=5e-11, Identity=93%"; Hit description =Microtubule-associated protein RP/EB family member 3
  Pfam annotation: Domain name=EB1; Domain location=2-42; Score=49.2; E_ value=1.6e-11; Accession=PF03271.9; Description=EB1-like C-terminal motif
DSLEKERDFYFSKLRDIEILCQNPEVEHVPVSSCSVATIWWKPPEQYC

SEQ ID NO: 122815 - protein, 71 aa, Setaria italica
  Transcript Sequence Number=SeqID_56841
PSLSKHLEAIIQLLATNQVRSNQRELHNKSTVPFNGNIILEEYILSHLDLVAGVDDDGVLEGLDVDPAAVG

SEQ ID NO: 122816 - protein, 65 aa, Setaria italica
  Transcript Sequence Number=SeqID_56842
ISPNLCSKWMRHQYFRTKANLLLHFWFVLVHLEPLVILSPELYFFPASDSRDSSSFSELLNQTRR

SEQ ID NO: 122817 - protein, 79 aa, Setaria italica
  Transcript Sequence Number=SeqID_56843
MTPLGKKKKDISIAIDSEDDLSNVNAKNIMNPTFEQLPKEVRQMLEERKKKRDAEDLQAAIASFEVDRRGTVKKIKEIV

SEQ ID NO: 122818 - protein, 78 aa, Setaria italica
  misc_feature (28)..(28): Xaa can be any naturally occurring amino acid
  Transcript Sequence Number=SeqID_56844
  Gene Ontology: Mol. function=cation transmembrane transporter activity; Cellular component=membrane
  Homolog annotation: Hit_ID=Q84ND4; Match level="QueryCoverage=94%, HitCoverage=20%, E-value=2e-11, Identity=43%"; Hit description =Cation diffusion facilitator 10
LDLLSGFILWFTAHAMKRPNKYSYPIGXRRMQPVNIMNPTFEQLPKEVRQMLEERKKKRDAEDLQAGDCVVLKFDRRG

SEQ ID NO: 122819 - protein, 124 aa, Setaria italica
  Transcript Sequence Number=SeqID_56845
  Gene Ontology: Mol. function=catalytic activity; Cellular component =peroxisome; Biological process=metabolic process
  Homolog annotation: Hit_ID=Q69RG7; Match level="QueryCoverage=96%, HitCoverage=21%, E-value=3e-54, Identity=80%"; Hit description=4 -coumarate--CoA ligase-like 7
MFFSSTLAGYVGDDEANASTFDSEGWLKTGDLCYVDQDGFLFVVDRLKELIKYKGYQVPPAELELVLQTLPEVVEAAVMPYPHEEAGQIPIALVVRKPGSKVTEAQVMDHVAKRVSSYKKIRKV

SEQ ID NO: 122820 - protein, 44 aa, Setaria italica
  misc_feature (43)..(43): Xaa can be any naturally occurring amino acid
  Transcript Sequence Number=SeqID_56846
  Homolog annotation: Hit_ID=A7U1X4; Match level="QueryCoverage=79%, HitCoverage=6%, E-value=4e-09, Identity=82%"; Hit description=ABP-1
KFNCICRYPDEEAGQIPIALVVRQPGSKVTEAQVMDHVAKRVXS

SEQ ID NO: 122821 - protein, 33 aa, Setaria italica
  Transcript Sequence Number=SeqID_56847
NVEVKIVDHITGYVGDDEANASTFDSEGWLKTG

SEQ ID NO: 122822 - protein, 59 aa, Setaria italica
  Transcript Sequence Number=SeqID_56848
  Homolog annotation: Hit_ID=Q2QM66; Match level="QueryCoverage=96%, HitCoverage=7%, E-value=7e-29, Identity=100%"; Hit description =Pentatricopeptide, putative
  Pfam annotation: Domain name=PPR; Domain location=13-47; Score=30.9; E_value=5.3e-06; Accession=PF01535.12; Description=PPR repeat
TSSEEEWWTPSDITYSVVMHGFRREGKLKESCDVVVQMLQKGFFPTTVEINLLIHALCK

SEQ ID NO: 122823 - protein, 117 aa, Setaria italica
  Transcript Sequence Number=SeqID_56849
  Gene Ontology: Mol. function=transcription regulator activity; Cellular component=nucleus; Biological process=regulation of transcription
  Homolog annotation: Hit_ID=B9R6V4; Match level="QueryCoverage=91%, HitCoverage=26%, E-value=2e-42, Identity=75%"; Hit description=DNA binding protein, putative
  Pfam annotation: Domain name=HLH; Domain location=12-62; Score=39.0; E_value=1.9e-08; Accession=PF00010.18; Description=Helix-loop-helix DNA-binding domain
DYVHIRAKRGQATNSHSLAERLRRKKISERMKLLQDLVPGCSKITGKAVMLDEIINYVQSLQRQVEFLSMKLATVNPELGFDIEQILSQQMMLSQDRHFAIYGADPGSSSLAAQFNQ

SEQ ID NO: 122824 - protein, 50 aa, Setaria italica
  Transcript Sequence Number=SeqID_56850
YSHHVITSHEESFLITKRSFDPCPFYSPQPLHNSLQGSFSFTRVSNMSFC

SEQ ID NO: 122825 - protein, 72 aa, Setaria italica
  misc_feature (13)..(13): Xaa can be any naturally occurring amino acid
  Transcript Sequence Number=SeqID_56851
  Homolog annotation: Hit_ID=B6UCL1; Match level="QueryCoverage=93%, HitCoverage=9%, E-value=6e-09, Identity=52%"; Hit description =Nucleolar protein 10
  Pfam annotation: Domain name=NUC153; Domain location=43-72; Score =53.1; E_value=1.1e-12; Accession=PF08159.4; Description=NUC153 domain
KVTRQIFDSIIEXEMNADTENADKSSKKKKDRRLKVNKDLLEDERFKEMFENKDFQIDEESREYLALLFLLS

SEQ ID NO: 122826 - protein, 84 aa, Setaria italica
  misc_feature (64)..(84): Xaa can be any naturally occurring amino acid
  Transcript Sequence Number=SeqID_56852
RAPRMAFGYAIACLSARSHATKCGACRICSIRPLSSQARGKTCNIICIAIIFVADICIFKNNPXXXXXXXXXXXXXXXXXXXXX

SEQ ID NO: 122827 - protein, 81 aa, Setaria italica
  Transcript Sequence Number=SeqID_56853
  Gene Ontology: Mol. function=transcription regulator activity; Cellular component=nucleus; Biological process=regulation of transcription
  Homolog annotation: Hit_ID=Q70KS8; Match level="QueryCoverage=80%, HitCoverage=31%, E-value=1e-28, Identity=93%"; Hit description=TA1 protein (Fragment)
VHDAGVGVLGLEAGDLDLVPGCNKVVGKAVMLDEIINYVQSLQRQVEFLSMKLATVNPQLDFNNLPNLLPKDIQQSCGPLQ

SEQ ID NO: 122828 - protein, 130 aa, Setaria italica
  Transcript Sequence Number=SeqID_56854
  Gene Ontology: Mol. function=transcription regulator activity; Cellular component=nucleus; Biological process=regulation of transcription
  Homolog annotation: Hit_ID=Q70KS8; Match level="QueryCoverage=100%, HitCoverage=63%, E-value=3e-60, Identity=88%"; Hit description=TA1 protein (Fragment)
  Pfam annotation: Domain name=HLH; Domain location=29-79; Score=36.5; E_value=1.1e-07; Accession=PF00010.18; Description=Helix-loop-helix DNA-binding domain
GGSGGFDVSFPCFLPPKDYIHVRARRGEATDSHSLAERVRREKISQRMKLLQDLVPGCNKVVGKAVMLDEIINYVQSLQRQVEFLSMKLATVNPQLDFNNLPNLLPKDIQQSCGPLQNSHFPLETSGAPL

SEQ ID NO: 122829 - protein, 44 aa, Setaria italica
  Transcript Sequence Number=SeqID_56855
  Gene Ontology: Mol. function=transcription regulator activity; Cellular component=nucleus; Biological process=regulation of transcription
GTLLGQDDLQSVVHMDIGQNQEIAATSSNSYNGSLQTVHMKMEL

SEQ ID NO: 122830 - protein, 67 aa, Setaria italica
  Transcript Sequence Number=SeqID_56856
  Gene Ontology: Mol. function=citrate transmembrane transporter activity; Cellular component=integral to membrane; Biological process=citrate transport
MTEDISTKHPWFMQCTEQRRKLFLKSFAYIVTVGMVIAYMVGLNMSWTAITTTIDLSAQTPKNRTET

SEQ ID NO: 122831 - protein, 72 aa, Setaria italica
  Transcript Sequence Number=SeqID_56857
  Gene Ontology: Mol. function=citrate transmembrane transporter activity; Cellular component=integral to membrane; Biological process=citrate transport
  Homolog annotation: Hit_ID=B6SY85; Match level="QueryCoverage=77%, HitCoverage=10%, E-value=1e-19, Identity=75%"; Hit description =Arsenite transport subunit B
ADDVEDDHEHGAEQGTYLKNAGMFKHLGTLLAWKSQGGRDLLCRVCIVTALASALFTNDTCCVVLTEFVLEL

SEQ ID NO: 122832 - protein, 64 aa, Setaria italica
  misc_feature (35)..(35): Xaa can be any naturally occurring amino acid
  Transcript Sequence Number=SeqID_56858
  Gene Ontology: Mol. function=peptidase activity; Cellular component =signal peptidase complex; Biological process=signal peptide processing
  Homolog annotation: Hit_ID=Q84KA8; Match level="QueryCoverage=96%, HitCoverage=36%, E-value=4e-21, Identity=77%"; Hit description =Signal peptidase protein-like protein
  Pfam annotation: Domain name=SPC22; Domain location=2-64; Score= -49.3; E_value=0.0059; Accession=PF04573.4; Description=Signal peptidase subunit
RRRPTGNDEVSMTLNISADLSSLFTWNTKQVFVFXVAAEYETSQNALNQVSLWDGIIPAKELLS

SEQ ID NO: 122833 - protein, 148 aa, Setaria italica
  misc_feature (109)..(109): Xaa can be any naturally occurring amino acid
  Transcript Sequence Number=SeqID_56859
  Gene Ontology: Mol. function=methyltransferase activity; Cellular component=nucleus; Biological process=metabolic process
  Homolog annotation: Hit_ID=B6T5Y7; Match level="QueryCoverage=87%, HitCoverage=33%, E-value=1e-58, Identity=86%"; Hit description =Protein arginine N-methyltransferase 6
AREIVKANNLTDQVVVIHGRVEDVDLEEKVDVIISEWMGYMLLYESMLPSVLFARDKWLKPGGLILPSHATLFMAPITNPERYEGSVDFWCDVYGINMSALVPLAKKFXSEEPSIETIGGENVISWPSVVSLGEVSSSQKCQEIIMFY

SEQ ID NO: 122834 - protein, 55 aa, Setaria italica
  Transcript Sequence Number=SeqID_56860
  Gene Ontology: Mol. function=hydrolase activity, hydrolyzing O -glycosyl compounds; Biological process=carbohydrate metabolic process
  Homolog annotation: Hit_ID=B4FBN8; Match level="QueryCoverage=74%, HitCoverage=14%, E-value=7e-15, Identity=95%"; Hit description =Chitinase 1
MTNGYLFREYIGAQFTGVRFSDVPINAFVSFHFILSFAIDYTPVNQQPTPVPTNG

SEQ ID NO: 122835 - protein, 45 aa, Setaria italica
  Transcript Sequence Number=SeqID_56861
VNQITNKDKTRVEAPSDHRSMVGNDLLPLDLVLEAVAALLGSCPL

SEQ ID NO: 122836 - protein, 69 aa, Setaria italica
  Transcript Sequence Number=SeqID_56862
TFVLRCNELGATRVPNIVNMKLCSHTVLLHHFFTVFSVIIFVHAGVLKISQCLGVIQPRCDGIFISFIS

SEQ ID NO: 122837 - protein, 68 aa, Setaria italica
  Transcript Sequence Number=SeqID_56863
  Gene Ontology: Mol. function=oxidoreductase activity; Cellular component=extracellular region; Biological process=lignin catabolic process
  Homolog annotation: Hit_ID=Q10ND7; Match level="QueryCoverage=97%, HitCoverage=11%, E-value=2e-22, Identity=77%"; Hit description =Laccase-10
  Pfam annotation: Domain name=Cu-oxidase_2; Domain location=1-68; Score=75.8; E_value=1.6e-19; Accession=PF07731.6; Description =Multicopper oxidase
SHPLHLHGFDFFVVGQGFGNYDSSKDPAKFNLVDPVQRNTVGVPAGGWVAIRFFADNPGVWFMHCHSW

SEQ ID NO: 122838 - protein, 81 aa, Setaria italica
  Transcript Sequence Number=SeqID_56864
  Gene Ontology: Mol. function=oxidoreductase activity; Cellular component=extracellular region; Biological process=lignin catabolic process
  Homolog annotation: Hit_ID=Q2PAJ2; Match level="QueryCoverage=87%, HitCoverage=12%, E-value=5e-30, Identity=91%"; Hit description =Putative laccase
  Pfam annotation: Domain name=Cu-oxidase; Domain location=3-81; Score =2.6; E_value=0.00034; Accession=PF00394.14; Description=Multicopper oxidase
  Subcellular localization annotation: CTP_CleavageSite=52; ConfidenceScore=5.22e-01
MDAANLVPLGPNVSDAYTFNGLPGPTYNACSAGDTFRLRVRPGRTYMLRLVNAALNDELFFAVANHTLTVVGADASYVKPF

SEQ ID NO: 122839 - protein, 37 aa, Setaria italica
  Transcript Sequence Number=SeqID_56865
TCIFYQEHPDISKTDKKKICSLVDVKKLSTDASMHAT

SEQ ID NO: 122840 - protein, 57 aa, Setaria italica
  Transcript Sequence Number=SeqID_56866
  Gene Ontology: Mol. function=thiamin pyrophosphate binding
  Homolog annotation: Hit_ID=A0FHC1; Match level="QueryCoverage=70%, HitCoverage=6%, E-value=2e-17, Identity=100%"; Hit description =Pyruvate decarboxylase
FAFTRYEFQMQYGSIGWSVGATLGYAQAAKDKRVIACIGDGSFQVQNNQSYAIHMNF

SEQ ID NO: 122841 - protein, 131 aa, Setaria italica
  misc_feature (124)..(124): Xaa can be any naturally occurring amino acid
  Transcript Sequence Number=SeqID_56867
  Gene Ontology: Mol. function=nucleic acid binding; Cellular component= nucleus; Biological process=mRNA processing
  Homolog annotation: Hit_ID=C0J4I8; Match level="QueryCoverage=67%, HitCoverage=20%, E-value=7e-29, Identity=70%"; Hit description=RBP50
ANLSSLRFFILFLLDAGFQALIQYHSRQEAVEAFGSLHGRNIYDGCCQLDIQYSNLSELQVHYNNDRSRDFTNPSLPTEQRPRTSQQGYPDPAGLYAFQQPGASYAQMGRAAMIAAAFGGTLPXHGVTGTN

SEQ ID NO: 122842 - protein, 56 aa, Setaria italica
  Transcript Sequence Number=SeqID_56868
  Gene Ontology: Mol. function=nucleic acid binding; Cellular component= nucleus; Biological process=mRNA processing
  Homolog annotation: Hit_ID=B9SE84; Match level="QueryCoverage=100%, HitCoverage=12%, E-value=4e-19, Identity=75%"; Hit description =Polypyrimidine tract binding protein, putative
MAEPSKVIHIRNVGHEIAESDLLQLLQPFGLVSKIVMLRAKNQALLQMEDIHASVT

SEQ ID NO: 122843 - protein, 50 aa, Setaria italica
  misc_feature (43)..(43): Xaa can be any naturally occurring amino acid
  Transcript Sequence Number=SeqID_56869
  Gene Ontology: Mol. function=nucleic acid binding; Cellular component= nucleus; Biological process=mRNA processing
  Homolog annotation: Hit_ID=B9SE84; Match level="QueryCoverage=92%, HitCoverage=10%, E-value=2e-09, Identity=65%"; Hit description =Polypyrimidine tract binding protein, putative
LAATIIYSNLSELQVHYNNDRSRDFTNPSLPTEQRPRTSQQGXPDPAGLY

SEQ ID NO: 122844 - protein, 45 aa, Setaria italica
  Transcript Sequence Number=SeqID_56870
  Gene Ontology: Mol. function=nucleic acid binding; Cellular component= nucleus; Biological process=mRNA processing
  Homolog annotation: Hit_ID=B9SE84; Match level="QueryCoverage=93%, HitCoverage=9%, E-value=2e-13, Identity=78%"; Hit description =Polypyrimidine tract binding protein, putative
MAEPSKVIHIRNVGHEIAESDLLQLLQPFGLVSKIVMLRAKEPSS

SEQ ID NO: 122845 - protein, 51 aa, Setaria italica
  Transcript Sequence Number=SeqID_56871
  Gene Ontology: Mol. function=nucleic acid binding; Cellular component= nucleus; Biological process=mRNA processing
  Homolog annotation: Hit_ID=Q84L59; Match level="QueryCoverage=100%, HitCoverage=11%, E-value=5e-17, Identity=80%"; Hit description =Polypyrimidine track-binding protein homologue
RQEAVEAFGSLHGRNIYDGCCQLDIQYSNLSELQVHYNNDRSRDFTNPSLP

SEQ ID NO: 122846 - protein, 54 aa, Setaria italica
  Transcript Sequence Number=SeqID_56872
  Gene Ontology: Mol. function=nucleic acid binding; Cellular component= nucleus; Biological process=mRNA processing
  Homolog annotation: Hit_ID=Q5TKN2; Match level="QueryCoverage=72%, HitCoverage=10%, E-value=7e-14, Identity=94%"; Hit description =Putative polypyrimidine track-binding protein
ILLVTIHHMIYPITVEVLHQVFKAYGFVEKIVTFQKSAGQIFLLSLSFTTHTFT

SEQ ID NO: 122847 - protein, 46 aa, Setaria italica
  Transcript Sequence Number=SeqID_56873
  Gene Ontology: Mol. function=nucleic acid binding; Cellular component= nucleus; Biological process=mRNA processing
  Homolog annotation: Hit_ID=A6N126; Match level="QueryCoverage=80%, HitCoverage=30%, E-value=2e-10, Identity=86%"; Hit description=Ab1 polypyrimidine tract-binding protein (Fragment)
ETDKEGQGLLVMFETEEEATEALVSKHASTLEGNTIRISFSQMQSI

SEQ ID NO: 122848 - protein, 58 aa, Setaria italica
  Transcript Sequence Number=SeqID_56874
MQKMVMALSKDKAVWHAVMENEVVQEFKRSFQDAKETDLNGRSTAPPGFMMWVLENTQ

SEQ ID NO: 122849 - protein, 68 aa, Setaria italica
  Transcript Sequence Number=SeqID_56875
  Homolog annotation: Hit_ID=Q08123; Match level="QueryCoverage=85%, HitCoverage=50%, E-value=5e-12, Identity=62%"; Hit description=H1flk- 3 (Fragment)
PGEIVHLPVALGDGARLYSTNSMGSAQLIAWKDGINSSLLVEPGEIDCLEKVSRLNEDATSVHDLYPD

SEQ ID NO: 122850 - protein, 32 aa, Setaria italica
  Transcript Sequence Number=SeqID_56876
AIPGMLLALVLFFDNRKHKDVNVPSDVSSSKR

SEQ ID NO: 122851 - protein, 76 aa, Setaria italica
  misc_feature (28)..(28): Xaa can be any naturally occurring amino acid
  Transcript Sequence Number=SeqID_56877
  Gene Ontology: Mol. function=aspartic-type endopeptidase activity; Cellular component=integral to membrane
  Homolog annotation: Hit_ID=B9RIX2; Match level="QueryCoverage=77%, HitCoverage=15%, E-value=2e-15, Identity=75%"; Hit description=D -alanyl-D-alanine endopeptidase, putative
FLNLFYLVSFLVLFLLQKASNPVHTVAXNKLSLPGLQLITKKLELPVKLVSRGIVGGIVPGSSPGDYMMLGLGDMI

SEQ ID NO: 122852 - protein, 41 aa, Setaria italica
  Transcript Sequence Number=SeqID_56878
MMRQGARNFARRFSRLAAAAETAFDHVPLPYDGPSAAEIAR

SEQ ID NO: 122853 - protein, 86 aa, Setaria italica
  Transcript Sequence Number=SeqID_56879
  Homolog annotation: Hit_ID=B6TQD1; Match level="QueryCoverage=100%, HitCoverage=30%, E-value=2e-30, Identity=80%"; Hit description=Sec20 family protein
  Pfam annotation: Domain name=Sec20; Domain location=17-86; Score =69.7; E_value=1.1e-17; Accession=PF03908.5; Description=Sec20
ESTIRRRNLQTKTGMTSSAESITESLRRSRQMMVQEVERSASTLATFDESTSVLRKAEGEYQGHRSLLSRTRGLLSTMQRQDVLDR

SEQ ID NO: 122854 - protein, 94 aa, Setaria italica
  Transcript Sequence Number=SeqID_56880
INHLIKGTGLCECQGCIVWSSYAVSTPAMETFYLHHISVAGGTSSRYFWAQITLLSFKLIMKGIRFSFSTSRQDAFMLCSNKNTECIHAMNCSV

SEQ ID NO: 122855 - protein, 51 aa, Setaria italica
  Transcript Sequence Number=SeqID_56881
  Gene Ontology: Mol. function=transferase activity, transferring hexosyl groups; Biological process=carbohydrate metabolic process
  Homolog annotation: Hit_ID=B6TJ06; Match level="QueryCoverage=100%, HitCoverage=11%, E-value=3e-20, Identity=96%"; Hit description =Glycosyltransferase family 28 C-terminal domain containing protein
SSSLTSAVHEIFGDEKLMADMSQKALTAARPNASADIIRHICSLIGSTYPT

SEQ ID NO: 122856 - protein, 74 aa, Setaria italica
  Transcript Sequence Number=SeqID_56882
VHCTSSRNYNIRSSICHFQFMQKSSQEGSIQNMRITLVHRVLNRCNAEIHGIDIHENCLSRWNHSMNPRTSNAD

SEQ ID NO: 122857 - protein, 69 aa, Setaria italica
  Transcript Sequence Number=SeqID_56883
IDVDLSSIFNVEFNELSASKRAYICIYPAKMDVMQTAEPTANPANSPTCIHDSTRRTRQVGFTTKKKKT

SEQ ID NO: 122858 - protein, 61 aa, Setaria italica
  Transcript Sequence Number=SeqID_56884
  Homolog annotation: Hit_ID=B6U001; Match level="QueryCoverage=68%, HitCoverage=11%, E-value=6e-15, Identity=90%"; Hit description =Solute carrier family 35, member F1
PTQSILFLTWIFLKTKYGLRKFFGVGVCVAGLILVVFSDVHASDRASKNMLLPSYFESHSI

SEQ ID NO: 122859 - protein, 49 aa, Setaria italica
  Transcript Sequence Number=SeqID_56885
MQVWPLDIDLKFLEPFGRELHSMKKVRHSSRLFHTFVSFYKCTICLIIK

SEQ ID NO: 122860 - protein, 62 aa, Setaria italica
  Transcript Sequence Number=SeqID_56886
GEANSGGWLVSPQHPDPIGEGLAMEAFAEAAGPECIVPGQQAPLRLMGLKVHLAPSMLEIPP

SEQ ID NO: 122861 - protein, 74 aa, Setaria italica
  Transcript Sequence Number=SeqID_56887
  Gene Ontology: Mol. function=transferase activity, transferring hexosyl groups; Biological process=metabolic process
  Homolog annotation: Hit_ID=Q2R4X7; Match level="QueryCoverage=63%, HitCoverage=9%, E-value=2e-10, Identity=70%"; Hit description =Flavonol 3-O-glucosyltransferase, putative, expressed
MPGGGRKDAAAGEAIHVVMLPWLAFGHISPFAQLARKLVSVEGAHIRVTFLTADGNLPRVQAMLAPAAGAAAVV

SEQ ID NO: 122862 - protein, 71 aa, Setaria italica
  Transcript Sequence Number=SeqID_56888
  Subcellular localization annotation: CTP_CleavageSite=53; ConfidenceScore=5.26e-01
SVIIILYFPTFKPLWIILYFSCPLFQSMLVFFNPVKFGVTFTLGNLMALGRSVSQAVKILLNIYLFCFGSL

SEQ ID NO: 122863 - protein, 99 aa, Setaria italica
  Transcript Sequence Number=SeqID_56889
SGAHGLKSDVRDITNHIENLSLSELLDGTYKYSSLGRDKGKKVLRTKDELLVSVRKAFSMLSDMDYCNGKDANLILSPKLPSASTSSYDIKEQCGDKPP

SEQ ID NO: 122864 - protein, 130 aa, Setaria italica
  misc_feature (60)..(60): Xaa can be any naturally occurring amino acid
  Transcript Sequence Number=SeqID_56890
CDGRYNLCGMESTSGSLVQNIHSRKIGSENGSQQLQSLDHGDSSDGFQKHDSEHSLLKNXQVSPKIQRAAEILCDMRRSTESWGCFVSSIRPRSDLTGEAPSSIGTGHLIVPLLGLFKRADHSSCQLFLV

SEQ ID NO: 122865 - protein, 105 aa, Setaria italica
  Transcript Sequence Number=SeqID_56891
  Gene Ontology: Mol. function=nucleic acid binding
  Homolog annotation: Hit_ID=B6U9Q3; Match level="QueryCoverage=51%, HitCoverage=11%, E-value=2e-12, Identity=59%"; Hit description=F-box domain containing protein
NNEKDYDLSTREDGDSQAVPNFQSYEVLHLSYTASVKLFDSISWALVCLSIQDILCHIHSLMPLRDAARSACLSRAFLHSWRCRPNLTLNSDTLCSKAHVHKEDF

SEQ ID NO: 122866 - protein, 68 aa, Setaria italica
  Transcript Sequence Number=SeqID_56892
  Gene Ontology: Mol. function=nucleoside-triphosphatase activity
  Homolog annotation: Hit_ID=Q2R029; Match level="QueryCoverage=97%, HitCoverage=9%, E-value=8e-15, Identity=57%"; Hit description=AAA -type ATPase family protein, putative, expressed
FLGTGLHETNRSATKSMEHLNDLFPNKIIIELPQNEAQLSNLKKQLERDTETLKAKANVLNIHKFLTS

SEQ ID NO: 122867 - protein, 41 aa, Setaria italica
  Transcript Sequence Number=SeqID_56893
  Gene Ontology: Mol. function=protein serine/threonine kinase activity; Biological process=protein amino acid phosphorylation
DGGWDGVECSNGRVQSLRLSSVNIQGTLSNSIGQLSQLVYL

SEQ ID NO: 122868 - protein, 80 aa, Setaria italica
  Transcript Sequence Number=SeqID_56894
MYAKSPYRLSGNPVCSVDPDFSGKPYCSVQQENIIAYTTSLSKCTSTPRCSNDHEFEPCKLNPKSQQKFASFLRPTNSET

SEQ ID NO: 122869 - protein, 78 aa, Setaria italica
  Transcript Sequence Number=SeqID_56895
  Subcellular localization annotation: CTP_CleavageSite=28; ConfidenceScore=5.48e-01
DRPEYPRRYVVSFSSAPPTPSARAGRIRTSSRAEMAALAASSTAGVPAAFCAINPQDASALNSLKSQWTSFPSSWSSN

SEQ ID NO: 122870 - protein, 73 aa, Setaria italica
  Transcript Sequence Number=SeqID_56896
  Homolog annotation: Hit_ID=B6SJ34; Match level="QueryCoverage=79%, HitCoverage=47%, E-value=2e-17, Identity=75%"; Hit description =Keratinocytes-associated protein 2
  Pfam annotation: Domain name=Keratin_assoc; Domain location=1-61; Score=17.6; E_value=4e-08; Accession=PF09775.1; Description =Keratinocyte-associated protein 2
ASGDRTGWGAVVVAQLVALIVAGTVHRVCITTCFLFSAGLLYEVDKLSGMILARSESEGGCWTAEISLFDLQT

SEQ ID NO: 122871 - protein, 59 aa, Setaria italica
  Transcript Sequence Number=SeqID_56897
RRPTPPLVMLVLVLLAAGVPAAFCAINPQDASALNSLKSQWTSFPSSWSSNSDPCGRGL

SEQ ID NO: 122872 - protein, 115 aa, Setaria italica
  Transcript Sequence Number=SeqID_56898
  Gene Ontology: Mol. function=serine-type endopeptidase activity
  Homolog annotation: Hit_ID=B6U134; Match level="QueryCoverage=40%, HitCoverage=6%, E-value=7e-11, Identity=67%"; Hit description=Prolyl endopeptidase
  Subcellular localization annotation: CTP_CleavageSite=11; ConfidenceScore=5.38e-01
TTTTAWCRRTRSSSSRYVRDTTVQLGVCLCSFFPPRRARSRLNLSNPPILQTLQHVLRAGAEGSPQTNPIIGRIERKSGHGCGRSTQKIVCSASLERLCNGATPDLVLAPIPYLT

SEQ ID NO: 122873 - protein, 65 aa, Setaria italica
  misc_feature (60)..(60): Xaa can be any naturally occurring amino acid
  Transcript Sequence Number=SeqID_56899
  Subcellular localization annotation: CTP_CleavageSite=30; ConfidenceScore=5.01e-01
SYRRLFYLQALSSPYVGGSNDGGGAGSSISSSSKHQQQLHIHESSVSSTAPPTAVAHGYXPLSSP

SEQ ID NO: 122874 - protein, 134 aa, Setaria italica
  misc_feature (33)..(33): Xaa can be any naturally occurring amino acid
  misc_feature (51)..(51): Xaa can be any naturally occurring amino acid
  Transcript Sequence Number=SeqID_56900
  Gene Ontology: Mol. function=catalytic activity; Biological process =carbohydrate biosynthetic process
FHCFPLPPDSNSSERLLRAKLPGFRRIVRGRRXRDGQRVLGTKGRRQAPPXGAPRQHPGHHQAGDPEAGQEGRRQAHLRPHLRGDPRSAQDLPRERHPRRRHLHRARPPQDRHRHGRRLRAQAPGPHPLRPLAA

SEQ ID NO: 122875 - protein, 103 aa, Setaria italica; identical to SEQ ID NO: 87876
  Transcript Sequence Number=SeqID_56901
  Gene Ontology: Mol. function=DNA binding; Cellular component =nucleosome; Biological process=nucleosome assembly
  Homolog annotation: Hit_ID=B6T0P4; Match level="QueryCoverage=79%, HitCoverage=55%, E-value=5e-40, Identity=100%"; Hit description =Histone H4
  Pfam annotation: Domain name=CBFD_NFYB_HMF; Domain location=28-91; Score=5.0; E_value=0.061; Accession=PF00808.15; Description=Histone -like transcription factor (CBFNF-Y) and archaeal histone
  Pfam annotation: Domain name=Histone; Domain location=25-94; Score =64.2; E_value=4.9e-16; Accession=PF00125.16; Description=Core histone H2AH2BH3H4
  Pfam annotation: Domain name=TAF; Domain location=28-92; Score=-6.7; E_value=0.027; Accession=PF02969.9; Description=TATA box binding protein associated factor (TAF)
  Pfam module annotation: Pfam domain module=CBFD_NFYB_HMF::Histone::TAF ; Domain location=28-91::25-94::28-92

SEQ ID NO: 122876 - protein, 46 aa, Setaria italica
  Transcript Sequence Number=SeqID_56902
ARRCASRRHLHRARPPQDRHRHGRRLRAQAPGPHPLRLRRLEADAP

SEQ ID NO: 122877 - protein, 46 aa, Setaria italica
  misc_feature (1)..(18): Xaa can be any naturally occurring amino acid
  Transcript Sequence Number=SeqID_56903
XXXXXXXXXXXXXXXXXXFFFFFLSTNLQHDYYHFFAAGMFNPHTC

SEQ ID NO: 122878 - protein, 49 aa, Setaria italica
  misc_feature (48)..(48): Xaa can be any naturally occurring amino acid
  Transcript Sequence Number=SeqID_56904
MEGTNQPPGSRMQGAPFGSLDLHGNSMETHAPNLGKQILSTLKIPGTXT

SEQ ID NO: 122879 - protein, 64 aa, Setaria italica
  Transcript Sequence Number=SeqID_56905
RSQMASDSERSCASGRVKGGGLSEYSDNHFCAYYLVLCGVLVGPPACNIPLLGSSSIRLDVLCL

SEQ ID NO: 122880 - protein, 53 aa, Setaria italica
  Transcript Sequence Number=SeqID_56906
LCEYDACCLCDMLQSLDTYSSCERIHVWGDGKSSYLVCSLDGYPFRNPVPVCY

SEQ ID NO: 122881 - protein, 40 aa, Setaria italica
  Transcript Sequence Number=SeqID_56907
FCAYYLVLCGVLVGPPACNIPSWAVAVPRHSSSYGLTDTA

SEQ ID NO: 122882 - protein, 49 aa, Setaria italica
  Transcript Sequence Number=SeqID_56908
  Homolog annotation: Hit_ID=B5SVV3; Match level="QueryCoverage=63%, HitCoverage=4%, E-value=8e-10, Identity=96%"; Hit description=Mutant low phytic acid protein 1
VKLSVVTFLFCLPSTVPIRIKERKESVTILLCGTSGCGKSTLSSLLGSR

SEQ ID NO: 122883 - protein, 39 aa, Setaria italica
  Transcript Sequence Number=SeqID_56909
FACEIMCHMQYLQSNNALTLSAYEGVLSLWQRRRSRRPS

SEQ ID NO: 122884 - protein, 94 aa, Setaria italica
  misc_feature (78)..(78): Xaa can be any naturally occurring amino acid
  Transcript Sequence Number=SeqID_56910
  Homolog annotation: Hit_ID=B5SVV3; Match level="QueryCoverage=82%, HitCoverage=10%, E-value=3e-18, Identity=65%"; Hit description =Mutant low phytic acid protein 1
MPLEPKVLAAHWFLYSSSTKAWHVGTSDGNGDLNDITNSKKSAENPMLDPSQIGKAEAVNLQFGPFGISAWMSDTGGXLANTGSVEDLRVDSVE

SEQ ID NO: 122885 - protein, 49 aa, Setaria italica
  Transcript Sequence Number=SeqID_56911
TSRGWEGGGGGRLEEGGGGAGFQPQLTTSFPGWIHTVEYPWPMGHIHCC

SEQ ID NO: 122886 - protein, 62 aa, Setaria italica
  Transcript Sequence Number=SeqID_56912
REEDWRHGGDAGLDEPADAGSGLVERGQRGLGVVVERLEQAMQVEGWLMACHYYPPCPEPAR

SEQ ID NO: 122887 - protein, 98 aa, Setaria italica
  Transcript Sequence Number=SeqID_56913
  Gene Ontology: Mol. function=zinc ion binding
  Homolog annotation: Hit_ID=Q9SRZ1; Match level="QueryCoverage=86%, HitCoverage=6%, E-value=4e-12, Identity=43%"; Hit description =F22D16.1 protein
  Subcellular localization annotation: CTP_CleavageSite=45; ConfidenceScore=5.14e-01
LSKGSSSKDANSPQVAGNHLLLAARNQPHLMRLLAYTNDVNGAFEATRKSQLAISSAAGNHENRADGLSSVRTVLDFNFRSVNDLLRLVRISMESISC

SEQ ID NO: 122888 - protein, 84 aa, Setaria italica
  Transcript Sequence Number=SeqID_56914
ASLDGEPHNLHHVGRERSGASHFPNNNVVDSSLSTAGSEAPPSTSKLLEVLSRAELIFSCIPYLIQIIQVDGTQLVYIVAHPLG

SEQ ID NO: 122889 - protein, 67 aa, Setaria italica
  Transcript Sequence Number=SeqID_56915
HCWSPSFLHHSRSIQCSRTRFHLTHFREQATTEMYNPINEHNISKGTCMNFIQKTWHHRKGERKKNC

SEQ ID NO: 122890 - protein, 104 aa, Setaria italica
  Transcript Sequence Number=SeqID_56916
EGQKGENRLEEEPTENNLGGNKDARLKERAIKSDSLTIKVEPPKAEVTECLENSSFGSSEMEFSASKGEPKPKTEKGETILEERNTTNDKKPNNWIGSKKENKT

SEQ ID NO: 122891 - protein, 48 aa, Setaria italica
  Transcript Sequence Number=SeqID_56917
LEVHPRQQQMLPQNLPFTSLLRACLKTLRLCQFHLSPKIMVLWCPFLV

SEQ ID NO: 122892 - protein, 74 aa, Setaria italica
  Transcript Sequence Number=SeqID_56918
  Subcellular localization annotation: CTP_CleavageSite=49; ConfidenceScore=5.30e-01
VFVGKALASSGISPLAKSGFLSLSKRCRSSFLILDRKQEKKIKPESKSNASNFEGNNVINERAPVVSRSMGKFL

SEQ ID NO: 122893 - protein, 82 aa, Setaria italica
  Transcript Sequence Number=SeqID_56919
MRKEIDIETVAGQKIVSEALNIALLSDSRAMEAKGENRLEEEPTENNLGFGSPFDAENSISELPKLLFSKHSVTSALGGSTL

SEQ ID NO: 122894 - protein, 50 aa, Setaria italica
  Transcript Sequence Number=SeqID_56920
  Gene Ontology: Mol. function=molecular_function; Cellular component =cellular_component; Biological process=cell proliferation
  Homolog annotation: Hit_ID=A4QP78; Match level="QueryCoverage=66%, HitCoverage=7%, E-value=1e-09, Identity=93%"; Hit description =Zgc:163002 protein
  Pfam annotation: Domain name=DUF2363; Domain location=3-50; Score= -51.0; E_value=0.073; Accession=PF10155.1; Description=Uncharacterized conserved protein (DUF2363)
MQIKSMAYYEPQHPFFLQYQDKYMQNRLVRLVCVFLQSLIRNKIINVQDL

SEQ ID NO: 122895 - protein, 65 aa, Setaria italica
  misc_feature (32)..(32): Xaa can be any naturally occurring amino acid
  Transcript Sequence Number=SeqID_56921
  Gene Ontology: Cellular component=membrane
  Homolog annotation: Hit_ID=O80600; Match level="QueryCoverage=100%, HitCoverage=26%, E-value=4e-13, Identity=55%"; Hit description =T27I1.11 protein
DAVVFNRIMVFSIRIFSLAAILCVFGVLPLNXFGQDMHHVRIPSASLETFTIGNVQERSRWLWVH

SEQ ID NO: 122896 - protein, 65 aa, Setaria italica
  Transcript Sequence Number=SeqID_56922
SGAYSSTHGETASTCVKLIIGRSTISSIHRNCVQKVKFIAGAVVHLWQFVQIAYFFGSTLLVLAM

SEQ ID NO: 122897 - protein, 53 aa, Setaria italica
  Transcript Sequence Number=SeqID_56923
KIKQKPKGKILTDLMIQHDLVGNLFRYLDINIVHTAGAESEVHRWCCGAFVAV

SEQ ID NO: 122898 - protein, 100 aa, Setaria italica
  Transcript Sequence Number=SeqID_56924
  Gene Ontology: Mol. function=transferase activity, transferring groups other than amino-acyl groups; Cellular component=chloroplast; Biological process=fatty acid biosynthetic process
  Homolog annotation: Hit_ID=B6SJZ0; Match level="QueryCoverage=94%, HitCoverage=18%, E-value=3e-33, Identity=76%"; Hit description=3 -oxoacyl-synthase I
  Pfam annotation: Domain name=Ketoacyl-synt_C; Domain location=3-57; Score=-23.3; E_value=0.00077; Accession=PF02801.14; Description=Beta- ketoacyl synthase, C-terminal do
LRRSYSLRLFSVQNPQLRVNSTKSMTGHLIGAAGGIEAVASIQAIRTGWVHPNLNLENPEDVVDVGVLVGPKKERCEVNVALSNSFGFGGHNSSILFAPL

SEQ ID NO: 122899 - protein, 98 aa, Setaria italica
  Transcript Sequence Number=SeqID_56925
YSFLRSFLTSLSITSRPAYRRLVDSVTSSTPHILMMEVQAEGRTLCHTRLNYVKTRGPCKVKLYQNCKYIHPTTYCIWASVFAFTVNAHCQYYFLDFG

SEQ ID NO: 122900 - protein, 111 aa, Setaria italica
  misc_feature (98)..(98): Xaa can be any naturally occurring amino acid
  Transcript Sequence Number=SeqID_56926
  Gene Ontology: Mol. function=transferase activity, transferring groups other than amino-acyl groups; Cellular component=chloroplast; Biological process=fatty acid biosynthetic process
  Homolog annotation: Hit_ID=B6SJZ0; Match level="QueryCoverage=71%, HitCoverage=15%, E-value=9e-27, Identity=73%"; Hit description=3 -oxoacyl-synthase I
  Subcellular localization annotation: CTP_CleavageSite=35; ConfidenceScore=5.09e-01
MVLCNEHEAFGFILIAMNTSLPFTTTAVSVFLAFNASMVGSSWGIPLRCSLQAIRTGWVHPNLNLENPEDVVDVGVLVGPKKERCEVNVALSNSFGFXGGHNSSILFAPFK

SEQ ID NO: 122901 - protein, 52 aa, Setaria italica
  Transcript Sequence Number=SeqID_56927
  Gene Ontology: Mol. function=transferase activity; Cellular component= chloroplast; Biological process=fatty acid biosynthetic process
  Homolog annotation: Hit_ID=B6SJZ0; Match level="QueryCoverage=92%, HitCoverage=9%, E-value=8e-17, Identity=85%"; Hit description=3 -oxoacyl-synthase I
ERVRASNSFKSPILAMDLGWMGPNYSISTACATSNFCILNAANHIRKGEADV

SEQ ID NO: 122902 - protein, 67 aa, Setaria italica
  Transcript Sequence Number=SeqID_56928
  Gene Ontology: Mol. function=transferase activity, transferring groups other than amino-acyl groups; Biological process=fatty acid biosynthetic process
  Homolog annotation: Hit_ID=Q8RX91; Match level="QueryCoverage=49%, HitCoverage=13%, E-value=7e-13, Identity=93%"; Hit description=Beta -ketoacyl-ACP synthase II (Fragment)
LGLGGFVACRALSQRNSDPTKASRPWDVDRDGFVMGEGSGVLVLEELEHAKVLFMQFSRVHCLVGLG

SEQ ID NO: 122903 - protein, 57 aa, Setaria italica
  Transcript Sequence Number=SeqID_56929
  Gene Ontology: Mol. function=transferase activity, transferring groups other than amino-acyl groups; Biological process=fatty acid biosynthetic process
  Homolog annotation: Hit_ID=Q40028; Match level="QueryCoverage=70%, HitCoverage=8%, E-value=6e-15, Identity=87%"; Hit description=Beta -ketoacyl-ACP synthase
GFWPKQRVRTGWLHPNINLDNPEKNVDVSLLVGQQKERCDVKVALSNSFGFGGHNSS

SEQ ID NO: 122904 - protein, 54 aa, Setaria italica
  Transcript Sequence Number=SeqID_56930
TEETYKVNRKTPATTDCSGIDPDDHFTSFLLIRYGNRGGGGYGGGVAGGDEGNF

SEQ ID NO: 122905 - protein, 136 aa, Setaria italica
  misc_feature (64)..(64): Xaa can be any naturally occurring amino acid
  Transcript Sequence Number=SeqID_56931
  Pfam annotation: Domain name=MtN3_slv; Domain location=1-88; Score= -13.1; E_value=0.049; Accession=PF03083.8; Description=MtN3saliva family
TRSVEYMPFSLSFFLFLNGGVWSVYSVLVKDYFIGVRVSITISIPKTSEPDAVRAGGTYAPHRXPNAIGFVLGTAQLVLYMAYRKAAPARKDDDDEAASEEADEEEGLAHLMGQVEMAQRRVRLAQGGSACPSRPA

SEQ ID NO: 122906 - protein, 73 aa, Setaria italica
  Transcript Sequence Number=SeqID_56932
RDGRGRDRDGRGRDSDRDSRGRDSDRERDRRRRSRERSSGHSDKEKSRRQSSRDRGDYYSSHSSREKDRHRHH

SEQ ID NO: 122907 - protein, 27 aa, Setaria italica
  Transcript Sequence Number=SeqID_56933
MIYTAIDTFYLTDEQLRDSPSRKDGID

SEQ ID NO: 122908 - protein, 36 aa, Setaria italica
  Transcript Sequence Number=SeqID_56934
ELGLGIHGEPGAAVTELQPVDVVVTRVLKQILSPVS

SEQ ID NO: 122909 - protein, 66 aa, Setaria italica
  Transcript Sequence Number=SeqID_56935
  Gene Ontology: Mol. function=glycerone kinase activity; Biological process=glycerol metabolic process
  Homolog annotation: Hit_ID=O04059; Match level="QueryCoverage=98%, HitCoverage=10%, E-value=2e-23, Identity=81%"; Hit description =Putative 3,4-dihydroxy-2-butanone kinase
ETSDRLGPEQIELGLGIHGEPGAAVTELQPVDVVVTRVLKQILSPETQYVPITRGDRVILLTNGLG

SEQ ID NO: 122910 - protein, 54 aa, Setaria italica
  Transcript Sequence Number=SeqID_56936
  Pfam annotation: Domain name=DnaJ; Domain location=3-50; Score=-2.2; E_value=0.0074; Accession=PF00226.23; Description=DnaJ domain
LQDYYKVLEVDYDASDDTIKLSYRRLALVSCCPTSVLQANIIHDKKRFVDKLIA

SEQ ID NO: 122911 - protein, 35 aa, Setaria italica
  Transcript Sequence Number=SeqID_56937
SECRPACITETSVSRRRYRQPLVGQDINHYWKSTL

SEQ ID NO: 122912 - protein, 50 aa, Setaria italica
  Transcript Sequence Number=SeqID_56938
PSKIPFAHGMGIISDEIYESYKKSCSVGDNSHQSIELRHATGERQGTQGI

SEQ ID NO: 122913 - protein, 29 aa, Setaria italica
  Transcript Sequence Number=SeqID_56939
VGVALKKLFEDGVVKREDLFITSKLWPGN

SEQ ID NO: 122914 - protein, 46 aa, Setaria italica
  Transcript Sequence Number=SeqID_56940
FFPEKAAMLADRVLGELVKELKIRPVPVAFASFSGGPKGCTYKVLQ

SEQ ID NO: 122915 - protein, 67 aa, Setaria italica
  Transcript Sequence Number=SeqID_56941
GQFLTLIQAELQVTERVLTRQTSMKKVTEIHAGQFSWKLTVEQAGYDELLKSSVRSRRRSRASSALK

SEQ ID NO: 122916 - protein, 85 aa, Setaria italica
  Transcript Sequence Number=SeqID_56942
  Homolog annotation: Hit_ID=B6SRE4; Match level="QueryCoverage=37%, HitCoverage=29%, E-value=5e-09, Identity=91%"; Hit description=SPR1
GVGVDGKQGGGEREREGAVGEIGGVRSGREERRSHVSLTAVHVRSAAAAAAGHDDEKLKGIPAGVRGSQTNNYFRAQGQNCGNFL

SEQ ID NO: 122917 - protein, 63 aa, Setaria italica
  Transcript Sequence Number=SeqID_56943
  Gene Ontology: Mol. function=nucleoside-triphosphatase activity
  Homolog annotation: Hit_ID=Q7XI02; Match level="QueryCoverage=69%, HitCoverage=12%, E-value=2e-09, Identity=68%"; Hit description=ABC transporter family protein-like
GITVVAAVHQPSAEVFDLFNGLCLLANGRMVYFGRIPEAAEVGIVLFFSGSTSCLLTRDYSLL

SEQ ID NO: 122918 - protein, 63 aa, Setaria italica
  misc_feature (42)..(42): Xaa can be any naturally occurring amino acid
  Transcript Sequence Number=SeqID_56944
  Homolog annotation: Hit_ID=B6TCT5; Match level="QueryCoverage=63%, HitCoverage=16%, E-value=2e-09, Identity=59%"; Hit description =Catalytic/ hydrolase
IQPPPSKVPGAPGGPPVTAPRTRLRDGRHLAYLESGVPKEEXQGLLQELGIYLLSFDRPGYAE

SEQ ID NO: 122919 - protein, 32 aa, Setaria italica
  Transcript Sequence Number=SeqID_56945
CVMAHPCTLGKSHILQIELSLPVELNLPLEAY

SEQ ID NO: 122920 - protein, 54 aa, Setaria italica
  Transcript Sequence Number=SeqID_56946
  Gene Ontology: Mol. function=magnesium ion binding; Biological process=Mo-molybdopterin cofactor biosynthetic process
  Homolog annotation: Hit_ID=Q309F9; Match level="QueryCoverage=100%, HitCoverage=8%, E-value=2e-20, Identity=96%"; Hit description =Molybdenum cofactor biosynthesis protein
KDSIVLKSGELIGPAEIGLLATVGVTTVKVYLRPTIAVFSTGDELVQPATATLS

SEQ ID NO: 122921 - protein, 48 aa, Setaria italica
  Transcript Sequence Number=SeqID_56947
KLGGATVVATAVVPDEVDKIKGILVQWSDIDCVNLILTLGNMILFFRL

SEQ ID NO: 122922 - protein, 43 aa, Setaria italica
  Transcript Sequence Number=SeqID_56948
GSGTSIQAILISDIISYPSNKPPAASDPPPVVVRFVIPTAPCF

SEQ ID NO: 122923 - protein, 68 aa, Setaria italica
  Transcript Sequence Number=SeqID_56949
  Homolog annotation: Hit_ID=B6TT96; Match level="QueryCoverage=75%, HitCoverage=11%, E-value=7e-18, Identity=86%"; Hit description =Transferase
WPAGAGYVMPMPSARGDGDWVVYVHVAPELAKVMEEEPTVFRALENSYAFQKHSYYQRDKLVALQSTP

SEQ ID NO: 122924 - protein, 28 aa, Setaria italica
  Transcript Sequence Number=SeqID_56950
NAQYNFLNFSVNNQYIISSQVSLPERSH

SEQ ID NO: 122925 - protein, 83 aa, Setaria italica
  Transcript Sequence Number=SeqID_56951
  Gene Ontology: Mol. function=oxidoreductase activity; Biological process=oxidation reduction
  Homolog annotation: Hit_ID=B4FZ24; Match level="QueryCoverage=69%, HitCoverage=17%, E-value=1e-20, Identity=82%"; Hit description =Gibberellin 20 oxidase 2
FRELGFRLYATILESLGLEPSYMKETLGEQEQHMAVNFYPSCPLPELTYGLPTHTDDDVWMRAASPMRRRRRVPSEEEIKGAV

SEQ ID NO: 122926 - protein, 89 aa, Setaria italica
  Transcript Sequence Number=SeqID_56952
  Gene Ontology: Mol. function=oxidoreductase activity; Biological process=oxidation reduction
  Homolog annotation: Hit_ID=Q0H3G8; Match level="QueryCoverage=93%, HitCoverage=26%, E-value=7e-39, Identity=89%"; Hit description =Flavanone 3-hydroxylase (Fragment)
GDQLQALSNGAYKSVWHRAVVNAARERMSVASFLCPCNSAVISPAAGLVGDGDPPVYRSYTYDEYYKRFWSRNLDQEHCLELFRSAQLQ

SEQ ID NO: 122927 - protein, 98 aa, Setaria italica
  misc_feature (33)..(33): Xaa can be any naturally occurring amino acid
  Transcript Sequence Number=SeqID_56953
  Homolog annotation: Hit_ID=B9RD27; Match level="QueryCoverage=100%, HitCoverage=30%, E-value=1e-32, Identity=67%"; Hit description =Import inner membrane translocase subunit tim21, mitochondrial, putative
DSQVTARIGHPITGYGQETRNRAATANEIPNKXWTDEDGVEHVEVNFLIRGPHGAGKVYSEMFKDNSDRTWKFTYLVVEIVSPQHGKTQLMLESYLPA

SEQ ID NO: 122928 - protein, 138 aa, Setaria italica
  Transcript Sequence Number=SeqID_56954
  Gene Ontology: Mol. function=acyl-[acyl-carrier-protein] desaturase activity; Cellular component=chloroplast; Biological process=fatty acid metabolic process
  Homolog annotation: Hit_ID=B6UI69; Match level="QueryCoverage=83%, HitCoverage=30%, E-value=4e-61, Identity=95%"; Hit description=Acyl -desaturase
  Pfam annotation: Domain name=FA_desaturase_2; Domain location=3-138; Score=17.7; E_value=1.1e-07; Accession=PF03405.6; Description=Fatty acid desaturase
GRRGRLLPLLKPVEECWQPTDFLPDSSSEMFEHEVRELRARAAGLPDEYFVVLVGDMITEEALPTYQTMINTLDGVRDETGASACPWAVWTRTWTAEENRHGDILGKYMYLSGRVDMRMVEKTVQLPSIRSSGLLVPG

SEQ ID NO: 122929 - protein, 52 aa, Setaria italica
  Transcript Sequence Number=SeqID_56955
  Subcellular localization annotation: CTP_CleavageSite=28; ConfidenceScore=5.30e-01
YLACMSRSCQHSFAYPSFVLVQSYRLLRANVTGLTSFRLLVFPVLVLTLTSS

SEQ ID NO: 122930 - protein, 82 aa, Setaria italica
  Transcript Sequence Number=SeqID_56956
LVNVRTSTGNTKRRKLVRIGGSWRVETNWRILSCGLCSVVSTHPSKALACSLNRSSGFLVCALLFGVHVYVHDYSDQKYHML

SEQ ID NO: 122931 - protein, 42 aa, Setaria italica
  Transcript Sequence Number=SeqID_56957
GLKYISIQSRYARGVILMRLEHAGKIQSASLISAAAAEVAED

SEQ ID NO: 122932 - protein, 120 aa, Setaria italica
  misc_feature (17)..(17): Xaa can be any naturally occurring amino acid
  misc_feature (26)..(26): Xaa can be any naturally occurring amino acid
  misc_feature (44)..(44): Xaa can be any naturally occurring amino acid
  misc_feature (65)..(65): Xaa can be any naturally occurring amino acid
  Transcript Sequence Number=SeqID_56958
  Gene Ontology: Mol. function=DNA topoisomerase (ATP-hydrolyzing) activity; Cellular component=mitochondrion; Biological process=DNA topological change
  Homolog annotation: Hit_ID=Q7XZF7; Match level="QueryCoverage=87%, HitCoverage=11%, E-value=4e-27, Identity=60%"; Hit description =Probable DNA gyrase subunit A, chloroplastic/mitochondrial
  Pfam annotation: Domain name=DNA_gyraseA_C; Domain location=63-112; Score=35.3; E_value=2.5e-07; Accession=PF03989.5; Description=DNA gyrase C-terminal domain, beta-propeller
PETYNSRSRDLSPPWLXFIAETVLGXRVPLNAFRQSRFNLEVLXGYKLPEDCRLAAVFVAGLSLXVVLVSQSGTVNRIKVKDISIQSRYARGVILMRLEHAGKIQSASLISAAAAEVAED

SEQ ID NO: 122933 - protein, 40 aa, Setaria italica
  Transcript Sequence Number=SeqID_56959
EGLRQYYHATEYSGQSLHLDRLMATGDLSTKSSATNYAYI

SEQ ID NO: 122934 - protein, 59 aa, Setaria italica
  misc_feature (42)..(42): Xaa can be any naturally occurring amino acid
  misc_feature (47)..(47): Xaa can be any naturally occurring amino acid
  Transcript Sequence Number=SeqID_56960
  Subcellular localization annotation: CTP_CleavageSite=29; ConfidenceScore=5.41e-01
APTPAPRSAPTPAPRAPQAPSPTPAPTPVPMLAPTPVPCPPXTPPPXPPPPPPPPTSPA

SEQ ID NO: 122935 - protein, 61 aa, Setaria italica
  misc_feature (61)..(61): Xaa can be any naturally occurring amino acid
  Transcript Sequence Number=SeqID_56961
MCVWSKIIMSSWDTKVGQDLPANLKIILECIFDTYKDIEHELETEQKYRLSYLKFVTIDWX

SEQ ID NO: 122936 - protein, 45 aa, Setaria italica
  Transcript Sequence Number=SeqID_56962
  Gene Ontology: Mol. function=magnesium ion binding
  Homolog annotation: Hit_ID=Q5GAS4; Match level="QueryCoverage=80%, HitCoverage=5%, E-value=5e-09, Identity=77%"; Hit description=Stc
TVYQVHRKTIDWVRAYTTEVKWRDQRYVPATVEEHLQLSVRSGAC

SEQ ID NO: 122937 - protein, 65 aa, Setaria italica
  Transcript Sequence Number=SeqID_56963
AYYYSIIEVCRIQNENAFKKYQPVSNSHYICNYRVTSTAFYESWLYQKDHFFIEEYGTSGKYYVI

SEQ ID NO: 122938 - protein, 47 aa, Setaria italica
  Transcript Sequence Number=SeqID_56964
EMLELGQETQKYFTDDYDLFTKNEVKFFFHPCLPDYKNKKDKNRSIL

SEQ ID NO: 122939 - protein, 117 aa, Setaria italica
  misc_feature (67)..(67): Xaa can be any naturally occurring amino acid
  Transcript Sequence Number=SeqID_56965
  Gene Ontology: Mol. function=nucleotide binding; Biological process =defense response
EGIRCYEMIKVLEIGSRSNLHLTFGSLAMKNLELLTAGSCSNGSQLRFDGLKHLSKLKDVRVIGSKXETLKKNLKDQFADHTSKPALKLEEVIPPTQASTGRNDQHYYSFPFNCTTR

SEQ ID NO: 122940 - protein, 108 aa, Setaria italica
  Transcript Sequence Number=SeqID_56966
  Gene Ontology: Mol. function=histone-lysine N-methyltransferase activity; Cellular component=nucleus; Biological process=chromatin modification
  Homolog annotation: Hit_ID=B6TYP5; Match level="QueryCoverage=90%, HitCoverage=28%, E-value=1e-46, Identity=91%"; Hit description =Histone-lysine N-methyltransferase SUVR3
  Pfam annotation: Domain name=SET; Domain location=1-108; Score=22.3; E_value=2.3e-05; Accession=PF00856.20; Description=SET domain
DVRRRPTCKKGWGLHAAEALGRRQFVCEYAGEFLTTEEARRRHRLYDELASAGKLSPALIVIREHLPSGKACLRVNIDATKVGNVARFINHSCDGGNLHPVLVRSSGS

SEQ ID NO: 122941 - protein, 77 aa, Setaria italica
  Transcript Sequence Number=SeqID_56967
  Gene Ontology: Mol. function=pyridoxal phosphate binding
  Homolog annotation: Hit_ID=A5HUN0; Match level="QueryCoverage=67%, HitCoverage=15%, E-value=6e-13, Identity=71%"; Hit description =Serine racemase
SLYFRPVVRDLVDDVIVVDDNAIVDAMKMCYEILKVAVEPSGAIGLAAVMSDEFKQSSAWHGSSKIGIIVSGGNVDL

SEQ ID NO: 122942 - protein, 116 aa, Setaria italica
  Transcript Sequence Number=SeqID_56968
HSVVHCHQEPVCLHTHWEKYLKNVLVSIECMKVLTSSLPAKKFLILPCFGASSSFCFYKKLQKPKISPKRGYYFQKQKLEKLVLHYQPKSSSPVISRAFPPNCFPYLFSSLNPSLP

SEQ ID NO: 122943 - protein, 53 aa, Setaria italica
  Transcript Sequence Number=SeqID_56969
ENQFQEDMSSHAKLNDQMEGILQQCLKKGGQSVSYWSQTQSSMHDLCKSSIME

SEQ ID NO: 122944 - protein, 45 aa, Setaria italica
  Transcript Sequence Number=SeqID_56970
MIVFVTSKIQTVHLSSSCSEQDCYDFIRVDCQENCNGFSICRTAE

SEQ ID NO: 122945 - protein, 56 aa, Setaria italica
  Transcript Sequence Number=SeqID_56971
DDFEDSMQSFGACFSAHCCVSAFGMHRRLVSLSHHAFSLTFYEISSTFCNFHLYCI

SEQ ID NO: 122946 - protein, 50 aa, Setaria italica
  Transcript Sequence Number=SeqID_56972
TFSFASSLPPASVHTAAASEKGATASGDMVKTNDYGRYDPTPAFAKPRFK

SEQ ID NO: 122947 - protein, 33 aa, Setaria italica
  Transcript Sequence Number=SeqID_56973
RKKMFTRYELNKKIDGSKTSKVLLRICLETKKD

SEQ ID NO: 122948 - protein, 131 aa, Setaria italica
  misc_feature (8)..(8): Xaa can be any naturally occurring amino acid
  misc_feature (91)..(91): Xaa can be any naturally occurring amino acid
  misc_feature (112)..(112): Xaa can be any naturally occurring amino acid
  Transcript Sequence Number=SeqID_56974
  Gene Ontology: Mol. function=serine-type endopeptidase activity; Cellular component=chloroplast envelope; Biological process =proteolysis
  Homolog annotation: Hit_ID=B4FNF5; Match level="QueryCoverage=100%, HitCoverage=49%, E-value=1e-54, Identity=75%"; Hit description=ATP -dependent Clp protease proteolytic subunit
  Pfam annotation: Domain name=CLP_protease; Domain location=2-131; Score=-24.1; E_value=1.1e-06; Accession=PF00574.15; Description=Clp protease
FLRGTAWXQPPPDLASFLYKNRIVYLGMCLVPSVTELMLAEFLYLQYDDAEKPIYLYINSTGTTKNGEKLGYETEALAVYDAMRYVKVPIXFTLCVGNAWGEAALLLAAGAXKPIGRFQGQATDVDIARKE

SEQ ID NO: 122949 - protein, 60 aa, Setaria italica
  Transcript Sequence Number=SeqID_56975
  Gene Ontology: Mol. function=ATPase activity, coupled to transmembrane movement of ions, phosphorylative mechanism; Cellular component=membrane; Biological process=calcium ion transport
  Homolog annotation: Hit_ID=Q7EZ84; Match level="QueryCoverage=96%, HitCoverage=5%, E-value=2e-12, Identity=62%"; Hit description =Putative calcium-transporting ATPase 8, plasma membrane-type
NFMDFNLVLLFQVVRWGRSVYANIQKFIQFQLTVNVAALVINVVAAVSSGDVPLNAVELL

SEQ ID NO: 122950 - protein, 34 aa, Setaria italica
  Transcript Sequence Number=SeqID_56976
SAYGMVPVALSPPLTWMPLLLLGVAAYCTKLHAD

SEQ ID NO: 122951 - protein, 67 aa, Setaria italica
  Transcript Sequence Number=SeqID_56977
  Homolog annotation: Hit_ID=A7LN87; Match level="QueryCoverage=76%, HitCoverage=10%, E-value=5e-22, Identity=94%"; Hit description =Pentatricopeptide repeat protein 5
AAAEGVDEAAEAAELVRSLLRRTGGGKERLVPVLDRHVRVVRTEHCFLLFEELGRRDGWLQCLEVSA

SEQ ID NO: 122952 - protein, 119 aa, Setaria italica
  Transcript Sequence Number=SeqID_56978
ETSSPVSVDDDVELTVEDLLSIAEEYVNADKQKQHEFEAMKTNRRKENFSCPTEAGTGVSAVNDPPKKGLLQCTTATRNTRSSEHTEENKSHQELQCSSRCETTEDVAQDMLNLFLGTY

SEQ ID NO: 122953 - protein, 77 aa, Setaria italica
  Transcript Sequence Number=SeqID_56979
  Gene Ontology: Mol. function=metal ion binding; Cellular component =nucleus; Biological process=regulation of transcription, DNA -dependent
  Homolog annotation: Hit_ID=Q6H509; Match level="QueryCoverage=67%, HitCoverage=21%, E-value=8e-16, Identity=81%"; Hit description =Squamosa promoter-binding-like protein 4
SCRRRLSDHNARRRKPQPDAYAFASARLPSSLFDDRRQISFVWNKAPLSHVKYLFYFLPYLGYLVSFLLFFFLFYFL

SEQ ID NO: 122954 - protein, 154 aa, Setaria italica
  misc_feature (87)..(87): Xaa can be any naturally occurring amino acid
  misc_feature (116)..(116): Xaa can be any naturally occurring amino acid
  Transcript Sequence Number=SeqID_56980
GIHVLTELEQHPEIRGFEQKLLPNDSVPAPYFGLQSGMVPFGSSIPRGYTSYQLPRESCTRPISGTSSELGPPLGSSHRTKSKKVKXSHYRSSCPTSTSDEKFMGSQGKDGLLCPXSTDIRNNQASVVPERCPKDSNGRSLPLEASKLPCLVVQ

SEQ ID NO: 122955 - protein, 69 aa, Setaria italica
  Transcript Sequence Number=SeqID_56981
MTSTSHQSVTAQDWPAPFPTFLLRKMDQIADEGVETQAEEPEVEEKKKGRGRKRKAKPQYNDKAKQQWQ

SEQ ID NO: 122956 - protein, 56 aa, Setaria italica
  Transcript Sequence Number=SeqID_56982
  Gene Ontology: Mol. function=ATPase activity, coupled to transmembrane movement of ions, phosphorylative mechanism; Cellular component=membrane; Biological process=calcium ion transport
  Homolog annotation: Hit_ID=Q94IN0; Match level="QueryCoverage=71%, HitCoverage=6%, E-value=2e-13, Identity=87%"; Hit description=P-type ATPase (Fragment)
VLHCFYDVTAFNLPLFQVFNEINSREMEKINVFRGIFKNWIFIGVLSATVLFQVII

SEQ ID NO: 122957 - protein, 39 aa, Setaria italica
  Transcript Sequence Number=SeqID_56983
  Homolog annotation: Hit_ID=B9S0H0; Match level="QueryCoverage=87%, HitCoverage=37%, E-value=3e-09, Identity=91%"; Hit description=Bud site selection protein, putative
PLYCCRVKVMSGPAPHTQLDADLAAGMGMPDNGLKLMSM

SEQ ID NO: 122958 - protein, 41 aa, Setaria italica
  Transcript Sequence Number=SeqID_56984
MGGKCPHRKVKKRRLSHKTARRGKFLLKADDAVYEELVKLA

SEQ ID NO: 122959 - protein, 54 aa, Setaria italica
  Transcript Sequence Number=SeqID_56985
LLSQANFKMYDSKKNMEQLLTRGPLVPSHGHELQAIVTAFPLATEPSKLQMYDS

SEQ ID NO: 122960 - protein, 61 aa, Setaria italica
  Transcript Sequence Number=SeqID_56986
LPTKKEAYLRRMSTCLAADGIVINMVVGGELATLKALEETSGLLIVETVIISLKHVLASQQ

SEQ ID NO: 122961 - protein, 35 aa, Setaria italica
  Transcript Sequence Number=SeqID_56987
  Gene Ontology: Cellular component=extracellular region; Biological process=sexual reproduction
  Homolog annotation: Hit_ID=Q56TP8; Match level="QueryCoverage=91%, HitCoverage=11%, E-value=4e-11, Identity=90%"; Hit description=Beta -expansin TaEXPB4
KHTNQYPFMSMTSCGNQPLFKDGQGCGACYQVSPF

SEQ ID NO: 122962 - protein, 89 aa, Setaria italica
  Transcript Sequence Number=SeqID_56988
  Gene Ontology: Cellular component=extracellular region; Biological process=cell wall organization and biogenesis
  Homolog annotation: Hit_ID=C3SAC4; Match level="QueryCoverage=78%, HitCoverage=26%, E-value=4e-21, Identity=68%"; Hit description =Triticum beta-expansin
  Pfam annotation: Domain name=Pollen_allerg_1; Domain location=3-80; Score=64.2; E_value=5e-16; Accession=PF01357.13; Description=Pollen allergen
PCVVPFCFPFIPLLRVSDANKEGTVSQMDLLESGSRYWTPMRRSWGSVWRLDSNHPLRAPFSLRIRGESRRTLVAYNVIPANWRPNTDY

SEQ ID NO: 122963 - protein, 107 aa, Setaria italica
  misc_feature (5)..(5): Xaa can be any naturally occurring amino acid
  misc_feature (48)..(48): Xaa can be any naturally occurring amino acid
  misc_feature (54)..(54): Xaa can be any naturally occurring amino acid
  Transcript Sequence Number=SeqID_56989
  Gene Ontology: Mol. function=nucleotide binding; Cellular component =intracellular; Biological process=small GTPase mediated signal transduction
  Homolog annotation: Hit_ID=O80501; Match level="QueryCoverage=78%, HitCoverage=39%, E-value=3e-32, Identity=86%"; Hit description=Ras -related protein RABH1B
  Pfam annotation: Domain name=Ras; Domain location=1-69; Score=-81.6; E_value=0.0037; Accession=PF00071.14; Description=Ras family
KFRTXRGSDVIIVLVGNKTDLVDKRQVSIEEGEGKAKDLGVMFIETSXAKAGFXTIKALFRKIAAALPGMETLSSAKQEDMVDVNLRSGNANSSQSQAQARGNRQVS

SEQ ID NO: 122964 - protein, 54 aa, Setaria italica
  Transcript Sequence Number=SeqID_56990
AWSTHIDLLRLISECCVVLTKVDPAAADAPPPEDAPVGGLRHAKGDRQGTQGIG

SEQ ID NO: 122965 - protein, 50 aa, Setaria italica
  misc_feature (49)..(49): Xaa can be any naturally occurring amino acid
  Transcript Sequence Number=SeqID_56991
QMHRSIDHVICLIRIRVDGKAIRAFKNYQDQGVPYRRGSSSGCTAACGXR

SEQ ID NO: 122966 - protein, 67 aa, Setaria italica
  Transcript Sequence Number=SeqID_56992
  Gene Ontology: Mol. function=transferase activity, transferring glycosyl groups; Cellular component=cell wall
  Homolog annotation: Hit_ID=Q7XZZ4; Match level="QueryCoverage=82%, HitCoverage=5%, E-value=4e-23, Identity=96%"; Hit description=C2 domain-containing protein, putative, expressed
  Pfam annotation: Domain name=PRT_C; Domain location=1-67; Score=-3.7; E_value=6.4e-08; Accession=PF08372.2; Description=Plant phosphoribosyltransferase C-ter
RQRRTRNRYRHTVGMDPRLSHVDSVSPDELDEEFDGLPSSRPADVVRMRYDRLRAVAGRAQTLLGDV

SEQ ID NO: 122967 - protein, 80 aa, Setaria italica
  misc_feature (15)..(15): Xaa can be any naturally occurring amino acid
  misc_feature (20)..(20): Xaa can be any naturally occurring amino acid
  Transcript Sequence Number=SeqID_56993
  Gene Ontology: Mol. function=DNA binding; Cellular component=nucleus; Biological process=regulation of transcription
  Homolog annotation: Hit_ID=B4G152; Match level="QueryCoverage=90%, HitCoverage=12%, E-value=2e-19, Identity=65%"; Hit description=Myb -like DNA-binding domain containing protein
ERALINAHRVHGNKXWARNXTKALPGRTDNSIKNHWNSSLRKRLDAYGANSFLAAQNLLAHDDFKDQMRPIAMGKPYLEY

SEQ ID NO: 122968 - protein, 88 aa, Setaria italica
  Transcript Sequence Number=SeqID_56994
  Gene Ontology: Mol. function=oxidoreductase activity; Biological process=oxidation reduction
  Homolog annotation: Hit_ID=B6TK78; Match level="QueryCoverage=77%, HitCoverage=20%, E-value=6e-34, Identity=94%"; Hit description =Flavonol synthase-like protein
MTRQSGYRGYQKLGENITKEKRDMHEAINCLTPIAPGKYGDLGKTLEGYNLWPEYPSNFKVVLENYISLLKGPLLDLLKLYPFSFSYH

SEQ ID NO: 122969 - protein, 91 aa, Setaria italica
  Transcript Sequence Number=SeqID_56995
  Gene Ontology: Mol. function=oxidoreductase activity; Cellular component=cytoplasm; Biological process=oxidation reduction
  Homolog annotation: Hit_ID=B6TD57; Match level="QueryCoverage=60%, HitCoverage=14%, E-value=2e-16, Identity=74%"; Hit description =Alcohol dehydrogenase 1
TNVANVVKLGAALPPEMACLLSCGVSTGVGAAWKVAAVEPGSTVAVFGLGTVGLAVTTSESPKRDVALLEQYLNLTPVYFSRSANLLNETS

SEQ ID NO: 122970 - protein, 39 aa, Setaria italica
  Transcript Sequence Number=SeqID_56996
  Homolog annotation: Hit_ID=B6TDF9; Match level="QueryCoverage=89%, HitCoverage=18%, E-value=1e-10, Identity=97%"; Hit description =Membrane protein
MPHQVATVLLLFTLSGPVKASSYLLMHGVVGLIMGTVWR

SEQ ID NO: 122971 - protein, 78 aa, Setaria italica
  Transcript Sequence Number=SeqID_56997
  Gene Ontology: Mol. function=electron carrier activity
MAMGMKGFLVLTLGLAMAATSSAVTYKVGDSSGWTILGNINYTDWTTKKNFHVGDIIGKFGLSLAQELLQVHNSCQCL

SEQ ID NO: 122972 - protein, 38 aa, Setaria italica
  Transcript Sequence Number=SeqID_56998
  Gene Ontology: Mol. function=binding
  Homolog annotation: Hit_ID=Q8H0P3; Match level="QueryCoverage=100%, HitCoverage=10%, E-value=4e-12, Identity=86%"; Hit description =Transportin (Fragment)
EVCQILYGYKQLLGNGGWEQCMATLEPAVVQRLARYGV

SEQ ID NO: 122973 - protein, 121 aa, Setaria italica
  Transcript Sequence Number=SeqID_56999
  Gene Ontology: Mol. function=binding; Cellular component=nuclear pore; Biological process=protein import into nucleus, docking
  Homolog annotation: Hit_ID=Q8H0P3; Match level="QueryCoverage=98%, HitCoverage=31%, E-value=3e-59, Identity=90%"; Hit description =Transportin (Fragment)
KGLQEFLTVAAKQLNPQSVKDAVSVANNACWAIGELAIKIGKEIEPVVISVVTCLIPILKSPEGLNKSLIENSAITLGRLSWVCPDIMAPHMDHFMQAWCRALCMIRDDFEKEDAFHGLCA

SEQ ID NO: 122974 - protein, 54 aa, Setaria italica
  Transcript Sequence Number=SeqID_57000
  Gene Ontology: Mol. function=protein transporter activity; Cellular component=nuclear pore; Biological process=protein import into nucleus, docking
  Homolog annotation: Hit_ID=Q9ZVW8; Match level="QueryCoverage=96%, HitCoverage=6%, E-value=1e-11, Identity=63%"; Hit description =Putative transportin
ESLLCVQVTLQHLMCTYWLSVLQEAAEELVPHLEVILQHLMCAYGKYQRRNLRI

SEQ ID NO: 122975 - protein, 44 aa, Setaria italica
  Transcript Sequence Number=SeqID_57001
LLRPPLGGPVCRRPLGLDAGAPPGPVAGAAGASASHTSSSLQRA

SEQ ID NO: 122976 - protein, 80 aa, Setaria italica
  Transcript Sequence Number=SeqID_57002
  Subcellular localization annotation: CTP_CleavageSite=49; ConfidenceScore=5.03e-01
ADLLANSSDLYNAIAFPLSAWFVHRRPQPHSRQALLSLPNTGSFMDGVQGSKNDYDSTQDKQGATVSGLDSYKDVGFNGV

SEQ ID NO: 122977 - protein, 56 aa, Setaria italica
  Transcript Sequence Number=SeqID_57003
RRPQPHSRQALLSLPNTGSFMDGVQGSKNDYDSTQDKQGATVSGLDSYKDVGFNGV

SEQ ID NO: 122978 - protein, 106 aa, Setaria italica
  Transcript Sequence Number=SeqID_57004
  Gene Ontology: Cellular component=integral to membrane
  Homolog annotation: Hit_ID=B6SGJ3; Match level="QueryCoverage=91%, HitCoverage=34%, E-value=3e-47, Identity=96%"; Hit description =Membrane protein
VGRTRQLRLLGATPRQATLQQVKRSLVIALSPVIDNAKTVGLIALPGAMTGLIMGGASPLEAIQLQIVVMNMLMGASTVSSILSTYLCWPAFFTKAFQLEDKVFAD

SEQ ID NO: 122979 - protein, 85 aa, Setaria italica
  misc_feature (12)..(12): Xaa can be any naturally occurring amino acid
  Transcript Sequence Number=SeqID_57005
  Gene Ontology: Cellular component=integral to membrane
  Homolog annotation: Hit_ID=B6SGJ3; Match level="QueryCoverage=100%, HitCoverage=29%, E-value=2e-38, Identity=95%"; Hit description =Membrane protein
KRSLVIALSPVXIDNAKTVGLIALPGAMTGLIMGGASPLEAIQLQIVVMNMLMGASTVSSILSTYLCWPAFFTKAFQLEDKVFAD

SEQ ID NO: 122980 - protein, 52 aa, Setaria italica
  Transcript Sequence Number=SeqID_57006
CLRVCYIYIYMYVCVEVYLQTIKEHTYNWPGLKPSQTTGWRRRATVRRRRRP

SEQ ID NO: 122981 - protein, 64 aa, Setaria italica
  Transcript Sequence Number=SeqID_57007
TSTFQTTNETTKLACFFSQGWRSAREGYGIRRGWLWLWLQLRLRLQLQPLQLLKRPGCTHTCLT

SEQ ID NO: 122982 - protein, 107 aa, Setaria italica
  misc_feature (6)..(6): Xaa can be any naturally occurring amino acid
  Transcript Sequence Number=SeqID_57008
  Gene Ontology: Mol. function=endodeoxyribonuclease activity, producing 5'-phosphomonoesters; Cellular component=cytoplasm; Biological process=DNA catabolic process
  Homolog annotation: Hit_ID=B6TDE6; Match level="QueryCoverage=57%, HitCoverage=19%, E-value=4e-22, Identity=80%"; Hit description =Deoxyribonuclease tatD
SHSFTXSAADRDRLLSFEKMFIGVNGCSLKTNENLEVLRGIPVERLMIETDSPHLAKQQTNGNLSEGNCSADQLSWTVVPLSSCASADASRSWGKKSLHVFWYSSFT

SEQ ID NO: 122983 - protein, 60 aa, Setaria italica
  misc_feature (17)..(17): Xaa can be any naturally occurring amino acid
  Transcript Sequence Number=SeqID_57009
SVSHHCCFVVLDADFFXNSYFEILYTTYFLNSFIRIILSDGVAPSQTWLDDQLALQKKIL

SEQ ID NO: 122984 - protein, 82 aa, Setaria italica
  misc_feature (14)..(14): Xaa can be any naturally occurring amino acid
  Transcript Sequence Number=SeqID_57010
  Gene Ontology: Mol. function=unfolded protein binding; Cellular component=cell wall; Biological process=protein folding
  Homolog annotation: Hit_ID=Q43638; Match level="QueryCoverage=65%, HitCoverage=6%, E-value=6e-23, Identity=92%"; Hit description=Heat -shock protein
EEEENKETKQEFTXLCDWVKQQLGDKVAKVQISKRLSSSPCVLVSGKFGWSANMERLMKAQTLGEQRQRLRKFNRRGEGRNF

SEQ ID NO: 122985 - protein, 30 aa, Setaria italica
  Transcript Sequence Number=SeqID_57011
AKVQIIKDGLSSSPCVLVSGKFGWSANMER

SEQ ID NO: 122986 - protein, 57 aa, Setaria italica
  Transcript Sequence Number=SeqID_57012
QGGEINIMGLGALFGYKSFYTGYFHGNFCRCRLARHFHFNVGWGSGLILIKVYCKYS

SEQ ID NO: 122987 - protein, 93 aa, Setaria italica
  Transcript Sequence Number=SeqID_57013
  Gene Ontology: Mol. function=unfolded protein binding; Cellular component=cell wall; Biological process=protein folding
  Homolog annotation: Hit_ID=Q43638; Match level="QueryCoverage=81%, HitCoverage=9%, E-value=6e-25, Identity=76%"; Hit description=Heat -shock protein
KVVLSIILVRTFVLASCFPRYLSFVKGVVDSNDLPLNVSREILQESRIVRIMRKRLVRKTFDMIEEIAEKDDKEDYKKFWESFGKFMKLGCIE

SEQ ID NO: 122988 - protein, 125 aa, Setaria italica
  Transcript Sequence Number=SeqID_57014
  Gene Ontology: Mol. function=unfolded protein binding; Cellular component=cell wall; Biological process=protein folding
  Homolog annotation: Hit_ID=Q43638; Match level="QueryCoverage=99%, HitCoverage=15%, E-value=7e-38, Identity=63%"; Hit description=Heat -shock protein
SPKADKQYVWEAEADSSSYVIKEETNPEKMLTRGTQITLYLRDDDKYEFADPARIQGLVKNYSQFVSFPIYTWQEKSRTVEVEEEEESKEGEEATEGEKQKKKKTITEKYWDWELANETKPIWVS

SEQ ID NO: 122989 - protein, 71 aa, Setaria italica
  Transcript Sequence Number=SeqID_57015
  Gene Ontology: Mol. function=metal ion binding; Cellular component =plasma membrane; Biological process=sensory organ precursor cell fate determination
  Homolog annotation: Hit_ID=B3SGL6; Match level="QueryCoverage=67%, HitCoverage=4%, E-value=1e-20, Identity=81%"; Hit description =Putative Glu-rich protein
  Pfam annotation: Domain name=zf-C3HC4; Domain location=19-57; Score =13.9; E_value=0.0027; Accession=PF00097.17; Description=Zinc finger, C3HC4 type (RING finger)
SKEIIDDGSKWINVRKGTCCICCETPIDSLLYRCGHMCTCSKCANELVRGGGKCPLCRAPIIEVIRAYFIM

SEQ ID NO: 122990 - protein, 46 aa, Setaria italica
  Transcript Sequence Number=SeqID_57016
LDIHFNGSNNCLLVFHLRLLLLPLKCISSLPSIEGDSIYTSIVATI

SEQ ID NO: 122991 - protein, 62 aa, Setaria italica
  Transcript Sequence Number=SeqID_57017
  Gene Ontology: Mol. function=electron carrier activity; Biological process=response to oxidative stress
  Homolog annotation: Hit_ID=Q9FEQ8; Match level="QueryCoverage=80%, HitCoverage=14%, E-value=4e-19, Identity=86%"; Hit description =Peroxidase 2
VALSPLKQCQSNQYYKNVLAHRVLFTSDAALLTSPETAKMVSDNANIPGWWEDRFKKAMVKM

SEQ ID NO: 122992 - protein, 74 aa, Setaria italica
  Transcript Sequence Number=SeqID_57018
EIVCKGGVCSAVDVPAARDVTEPEERGVTVHDITTDRGIDVRLYLPAAAAAKAPHRRRRPVLLHLHGGGFCVTR

SEQ ID NO: 122993 - protein, 145 aa, Setaria italica
  misc_feature (57)..(57): Xaa can be any naturally occurring amino acid
  misc_feature (105)..(105): Xaa can be any naturally occurring amino acid
  misc_feature (132)..(132): Xaa can be any naturally occurring amino acid
  Transcript Sequence Number=SeqID_57019
  Gene Ontology: Mol. function=beta-N-acetylhexosaminidase activity; Cellular component=cell wall; Biological process=carbohydrate metabolic process
  Homolog annotation: Hit_ID=B9RM00; Match level="QueryCoverage=100%, HitCoverage=22%, E-value=9e-47, Identity=62%"; Hit description=Beta -hexosaminidase, putative
LWPSATCKEPLDVSNDFTFQVINGILSDFSKIFKFKFVHLGGDEVNTSKLAEICNLXSKIMYVRIYSCYIMISGCWTTTPRIKSWLIKHGMNESDAYRYFVLRAXKKIAISHGYDIINWEETFNNFGDKLDXRKTVVHNWLGSGV

SEQ ID NO: 122994 - protein, 49 aa, Setaria italica
  misc_feature (23)..(23): Xaa can be any naturally occurring amino acid
  Transcript Sequence Number=SeqID_57020
  Gene Ontology: Mol. function=beta-N-acetylhexosaminidase activity; Cellular component=cell wall; Biological process=carbohydrate metabolic process
  Homolog annotation: Hit_ID=B9RM00; Match level="QueryCoverage=97%, HitCoverage=9%, E-value=1e-11, Identity=68%"; Hit description=Beta -hexosaminidase, putative
IEKLAKDAGSVTARLARFRCLLXQRGVAAAPLAGYGRSAPSDPGSCLRQ

SEQ ID NO: 122995 - protein, 102 aa, Setaria italica
  Transcript Sequence Number=SeqID_57021
EPFRAEDFEDAGLQTCYLLDFIGPKKFAFELSQFVPSVIAFDHRQSTLARIPKLGQCPSNVELHIDTSKSSVRSVFDYFSKKLAGTKSDSQMCENLFNQEDE

SEQ ID NO: 122996 - protein, 54 aa, Setaria italica
  Transcript Sequence Number=SeqID_57022
SNFSFREDCKIANSLLHKLQSSLWKVCNLRVDMFLSFDSSIQKQLLFLSIVGSG

SEQ ID NO: 122997 - protein, 132 aa, Setaria italica
  misc_feature (25)..(25): Xaa can be any naturally occurring amino acid
  Transcript Sequence Number=SeqID_57023
  Gene Ontology: Cellular component=anchored to membrane
VLSSLFLLLFLLGWGQTLFGSSSIXGSVAGIDVVSDCKGVVHSWLSMKLSSEEANSAFRVLSGCKVNKVCPLEFDEPSSVVKACAKASSSTPSCCAALHSYIGTRQKQIFVTNLQAINCATMFGSMLQKAGV

SEQ ID NO: 122998 - protein, 68 aa, Setaria italica
  Transcript Sequence Number=SeqID_57024
DGGRTAFTFDKVGTRYFACAAGSHCTQGQKVAITVTDGASLATVLLDAQRPTAQPTRRGISIDQKAAS

SEQ ID NO: 122999 - protein, 107 aa, Setaria italica
  Transcript Sequence Number=SeqID_57025
LNNNTSSKYSSSLSKVTTKEDYLSNFWGKLEESRRAHIGSSGGSVDAPKFWNYGSTSRLFENDTAIFSLGTDEKVGEPTKTNNGETSLHFLGFLYFKIALHALIFFG

SEQ ID NO: 123000 - protein, 108 aa, Setaria italica
  misc_feature (63)..(63): Xaa can be any naturally occurring amino acid
  Transcript Sequence Number=SeqID_57026
SNFWGKLEESRRAHIGSSGGSVDAPKFWNYGSTSRLFENDTAIFSLGTDEKVGEPTKTNNGSXKVAATEPISGYSIPITPAEDRIDGIGEPVELAKDNGNASENYKPE

SEQ ID NO: 123001 - protein, 48 aa, Setaria italica
  Transcript Sequence Number=SeqID_57027
  Gene Ontology: Cellular component=membrane
MDEASTSASGGATRRAFPPARSGVYYRFTQQNLPAWKPAMTPGCVSWL

SEQ ID NO: 123002 - protein, 80 aa, Setaria italica
  misc_feature (39)..(39): Xaa can be any naturally occurring amino acid
  Transcript Sequence Number=SeqID_57028
  Gene Ontology: Mol. function=zinc ion binding; Cellular component =intracellular; Biological process=regulation of transcription, DNA -dependent
  Homolog annotation: Hit_ID=Q8VXK3; Match level="QueryCoverage=88%, HitCoverage=28%, E-value=2e-19, Identity=66%"; Hit description=WIP1 protein (Fragment)
FRTLQTHYKRKHGAKPFCCRRCAKPFAVKGDWRTHAQNXACRSSSRACGSDFKHKRSLNDHVRSFGADHRPVDDDAAAPA

SEQ ID NO: 123003 - protein, 47 aa, Setaria italica
  Transcript Sequence Number=SeqID_57029
  Gene Ontology: Mol. function=zinc ion binding; Cellular component =intracellular; Biological process=regulation of transcription, DNA -dependent
  Homolog annotation: Hit_ID=Q9SYC5; Match level="QueryCoverage=100%, HitCoverage=15%, E-value=1e-17, Identity=82%"; Hit description =F11M15.9 protein
  Pfam annotation: Domain name=zf-C2H2; Domain location=16-38; Score =18.2; E_value=0.035; Accession=PF00096.18; Description=Zinc finger, C2H2 type
RTLQTHYKRKHGDKHFGCRRCGKPFAVKGDWRTHEKNCGKRWFCACG

SEQ ID NO: 123004 - protein, 64 aa, Setaria italica
  Transcript Sequence Number=SeqID_57030
  Gene Ontology: Mol. function=phosphoenolpyruvate carboxylase activity; Cellular component=cytoplasm; Biological process=carbon utilization by fixation of carbon dioxide
  Homolog annotation: Hit_ID=P29193; Match level="QueryCoverage=85%, HitCoverage=5%, E-value=1e-10, Identity=63%"; Hit description =Phosphoenolpyruvate carboxylase, housekeeping isozyme
KAQEELIKVAKLYGVKLTMFHGRGGTVGRGGGPTHLAILSQPPENIQQSVALQIQLIDTPLWQQ

SEQ ID NO: 123005 - protein, 70 aa, Setaria italica
  Transcript Sequence Number=SeqID_57031
  Subcellular localization annotation: CTP_CleavageSite=32; ConfidenceScore=5.48e-01
PPPSISPQPRDQSSSLSHHTYSDSSSSPATPLASIGRSIRSLRRDHNQIHSFPTPHPHSDLDAADAFQRR

SEQ ID NO: 123006 - protein, 46 aa, Setaria italica
  Transcript Sequence Number=SeqID_57032
TGDRPSSRQAELLGLTMNFICPMVQMKFIVKPKSSAGHQLSRSVVA

SEQ ID NO: 123007 - protein, 103 aa, Setaria italica
  misc_feature (57)..(57): Xaa can be any naturally occurring amino acid
  Transcript Sequence Number=SeqID_57033
  Gene Ontology: Cellular component=plasma membrane
  Homolog annotation: Hit_ID=Q9SGJ0; Match level="QueryCoverage=83%, HitCoverage=8%, E-value=4e-13, Identity=40%"; Hit description =F28J7.14 protein
AVEKSIRKEVCPSIGLQLVTRILCNFTPDEFCPDPVPSTVLEELNSESLLERCTDKXVISAFPCIAAPVVYCAPSTLDAAEKVADIGGGAKLDRKASLVQEER

SEQ ID NO: 123008 - protein, 83 aa, Setaria italica
  Transcript Sequence Number=SeqID_57034
  Gene Ontology: Mol. function=ubiquitin protein ligase binding; Cellular component=cullin-RING ubiquitin ligase complex; Biological process=ubiquitin-dependent protein catabolic process
  Homolog annotation: Hit_ID=Q9SGJ0; Match level="QueryCoverage=71%, HitCoverage=6%, E-value=1e-18, Identity=74%"; Hit description =F28J7.14 protein
RSHEFSHYQVMEQCVARLDVAMFNAILRESASEIPTDPISDPIVDPKVLPIPAGDLSFGSGAQLKNSVCADSVLCAFQVVFPL

SEQ ID NO: 123009 - protein, 93 aa, Setaria italica
  misc_feature (38)..(38): Xaa can be any naturally occurring amino acid
  Transcript Sequence Number=SeqID_57035
  Gene Ontology: Cellular component=plasma membrane
  Homolog annotation: Hit_ID=Q9SGJ0; Match level="QueryCoverage=96%, HitCoverage=9%, E-value=3e-18, Identity=53%"; Hit description =F28J7.14 protein
LQIGNWSRWLTDKFGIDDDDSDIGNDDDERRGAAESKXFQLLNELSDLLMLPKDMLLEKSIRKEVCPSIGLQLVTRILCNFTPDEFCPDPVPS

SEQ ID NO: 123010 - protein, 67 aa, Setaria italica
  Transcript Sequence Number=SeqID_57036
  Gene Ontology: Mol. function=ubiquitin protein ligase binding; Cellular component=plasma membrane; Biological process=ubiquitin -dependent protein catabolic process
  Homolog annotation: Hit_ID=Q9SGJ0; Match level="QueryCoverage=70%, HitCoverage=5%, E-value=4e-15, Identity=80%"; Hit description =F28J7.14 protein
LSYSFRCNSASEIPTDPISDPIVDPKVLPIPAGDLSFGSGAQLKNSIGNWSRWLTDKFGIDDDDSDI

SEQ ID NO: 123011 - protein, 85 aa, Setaria italica
  Transcript Sequence Number=SeqID_57037
RAVDWQTFHLLDSNLPIPCCVSQEPHEGRAGPVRPAHGSPRLGRDEPRRRRRRRRGHDEHHHRRHGLRRRNCTGCHRVRDSSSTL

SEQ ID NO: 123012 - protein, 84 aa, Setaria italica
  Transcript Sequence Number=SeqID_57038
  Gene Ontology: Mol. function=endonuclease activity
STRARGSDGGAKADAPPPRSAAAASAAAVAADLDELLLTAPPSSASEPRSFPYAVKQQCWEKAERVPGRDPERWRRDALGNIVF

SEQ ID NO: 123013 - protein, 125 aa, Setaria italica
  misc_feature (78)..(78): Xaa can be any naturally occurring amino acid
  misc_feature (90)..(90): Xaa can be any naturally occurring amino acid
  Transcript Sequence Number=SeqID_57039
  Gene Ontology: Mol. function=protein serine/threonine kinase activity; Cellular component=myosin complex; Biological process =protein amino acid phosphorylation
  Homolog annotation: Hit_ID=B8K1X4; Match level="QueryCoverage=89%, HitCoverage=14%, E-value=4e-57, Identity=94%"; Hit description =Putative ethylene constitutive triple response protein
  Pfam annotation: Domain name=Pkinase; Domain location=1-124; Score= -105.5; E_value=0.033; Accession=PF00069.17; Description=Protein kinase domain
  Pfam annotation: Domain name=Pkinase_Tyr; Domain location=1-124; Score=-167.2; E_value=0.013; Accession=PF07714.9; Description =Protein tyrosine kinase
  Pfam module annotation: Pfam domain module=Pkinase::Pkinase_Tyr; Domain location=1-124::1-124
ASFAHGTRCCKGINYLHCLNPPIVHWDLKTPNMLVDKNWSVKVSDFGLSRFKANTFISSKSVAGTPEWMAPEFLRGEXPSNEKCDVYSFXVILWELLTMQQPWNGLGPAQVVGAVAFQNRRLRFR

SEQ ID NO: 123014 - protein, 119 aa, Setaria italica
  Transcript Sequence Number=SeqID_57040
RSYSRLFLEAHEDPCKLPWLPLVSTSVSRSFSVSVNAMIAEAAQMQCCLEFDRSLSLFLLMQNHKIIAFALPCRPGVAIVQRFLVLIEVSHASGLGGWSEYLLVSLNVPNDSIGCALGL

SEQ ID NO: 123015 - protein, 61 aa, Setaria italica
  misc_feature (25)..(25): Xaa can be any naturally occurring amino acid
  Transcript Sequence Number=SeqID_57041
MDRAQLLLVGLPALLFFSDLTHIFXHPPHHPHPHPPHHHPHPPHHHHHPDPAAAAIQEPRV

SEQ ID NO: 123016 - protein, 137 aa, Setaria italica
  misc_feature (16)..(16): Xaa can be any naturally occurring amino acid
  misc_feature (105)..(105): Xaa can be any naturally occurring amino acid
  Transcript Sequence Number=SeqID_57042
  Gene Ontology: Mol. function=substrate-specific transmembrane transporter activity; Cellular component=integral to membrane; Biological process=transmembrane transport
  Homolog annotation: Hit_ID=Q39416; Match level="QueryCoverage=86%, HitCoverage=23%, E-value=2e-49, Identity=80%"; Hit description =Integral membrane protein
IIGWLAISFAKDSSFXFMGRLLEGFGVGVISYTVPVYIAEIAPQDQRGALGAVFQLSVTIGILLSYLFGMFVPWRILAVLGVLPCTILIPGLFFVPESPRWLAKXWGKTEDFEYSRDVRSSGDGFTLRTYVRTTTND

SEQ ID NO: 123017 - protein, 111 aa, Setaria italica
  misc_feature (37)..(37): Xaa can be any naturally occurring amino acid
  misc_feature (68)..(68): Xaa can be any naturally occurring amino acid
  misc_feature (93)..(93): Xaa can be any naturally occurring amino acid
  Transcript Sequence Number=SeqID_57043
  Gene Ontology: Mol. function=riboflavin kinase activity; Biological process=riboflavin biosynthetic process
  Homolog annotation: Hit_ID=Q109K4; Match level="QueryCoverage=99%, HitCoverage=29%, E-value=1e-42, Identity=77%"; Hit description=HAD -superfamily hydrolase, subfamily IA, variant 3 containing protein, expressed
PTALASNSPRPNIEAKISCHQGWKESFSAIVGGDEIXKGKPYPDIFLEAAKRMNTTPSNCLVIEDSLXTAGKAAGMHVIAVPSVPKKTAEFSXADEVINPIIKWWQTPVSG

SEQ ID NO: 123018 - protein, 71 aa, Setaria italica
  misc_feature (16)..(16): Xaa can be any naturally occurring amino acid
  Transcript Sequence Number=SeqID_57044
  Gene Ontology: Mol. function=riboflavin kinase activity; Biological process=riboflavin biosynthetic process
  Homolog annotation: Hit_ID=Q109K4; Match level="QueryCoverage=60%, HitCoverage=10%, E-value=8e-15, Identity=88%"; Hit description=HAD -superfamily hydrolase, subfamily IA, variant 3 containing protein, expressed
ESFSAIVGGDEIEKGXPYPDIFLEAAKRMNTTPSNCLVIEDSLKASKDHAVDALVETQILTSNGNAFLDAI

SEQ ID NO: 123019 - protein, 31 aa, Setaria italica
  Transcript Sequence Number=SeqID_57045
  Homolog annotation: Hit_ID=B6SHI6; Match level="QueryCoverage=100%, HitCoverage=7%, E-value=3e-09, Identity=100%"; Hit description =Haloacid dehalogenase-like hydrolase domain-containing protein 1A
MAAPKPISRLISHVILDLDGTLLNTDSVVSK

SEQ ID NO: 123020 - protein, 80 aa, Setaria italica
  Transcript Sequence Number=SeqID_57046
  Homolog annotation: Hit_ID=Q94LQ9; Match level="QueryCoverage=98%, HitCoverage=3%, E-value=1e-14, Identity=56%"; Hit description =Putative transcription regulatory protein
VDVCHDLKILSAVLDSTPFAFSIKLAAAASRKDYSYLEKWLTEKLSVYRKGFLEECVNFLKGTMSNTDYILVATTQQPRA

SEQ ID NO: 123021 - protein, 87 aa, Setaria italica
  misc_feature (75)..(75): Xaa can be any naturally occurring amino acid
  Transcript Sequence Number=SeqID_57047
  Gene Ontology: Cellular component=chloroplast envelope
  Homolog annotation: Hit_ID=A8J0N1; Match level="QueryCoverage=91%, HitCoverage=20%, E-value=2e-13, Identity=47%"; Hit description =Chloroplast lumenal protein
PSSVFEAERPGSRFTVQQRIGTIFYKGVLYGSVGFVCGIIGQGIANMIMTAKRSVKKSDEDIPVPPLVKSAALWXVFLAVIQSKQRR

SEQ ID NO: 123022 - protein, 93 aa, Setaria italica
  Transcript Sequence Number=SeqID_57048
  Gene Ontology: Mol. function=catalytic activity; Cellular component =plasma membrane; Biological process=cellular metabolic process
  Homolog annotation: Hit_ID=O22809; Match level="QueryCoverage=95%, HitCoverage=27%, E-value=4e-14, Identity=46%"; Hit description =Putative cinnamoyl-CoA reductase
DPEAELLAPAVAGTVNVLKACSEAKVKRVVVVSSLSTVLVNPTWPEGKAMDEACWSDVEVCRNTEGEKSSLSRTLAELQGMPGGPRHTLVPAS

SEQ ID NO: 123023 - protein, 47 aa, Setaria italica
  Transcript Sequence Number=SeqID_57049
GITAPVILSWDIRHSSHSRSYSHQAYRCPNEFYTSFFLMIFIAFKIV

SEQ ID NO: 123024 - protein, 45 aa, Setaria italica
  Transcript Sequence Number=SeqID_57050
  Gene Ontology: Mol. function=hydrolase activity, acting on ester bonds; Biological process=lipid metabolic process
  Homolog annotation: Hit_ID=B6TB52; Match level="QueryCoverage=93%, HitCoverage=10%, E-value=1e-15, Identity=88%"; Hit description=Alpha- L-fucosidase 2
YHNSMLQEELERLRNLYPDVTIIYADYYGASLNIFRAPLQFGEYH

SEQ ID NO: 123025 - protein, 41 aa, Setaria italica
  Transcript Sequence Number=SeqID_57051
LYRYIKICVLLSIRNQELDDSGCLDIQLLSCSCVLLSIRNQ

SEQ ID NO: 123026 - protein, 50 aa, Setaria italica
  misc_feature (43)..(43): Xaa can be any naturally occurring amino acid
  Transcript Sequence Number=SeqID_57052
  Gene Ontology: Mol. function=zinc ion binding; Cellular component =intracellular
  Homolog annotation: Hit_ID=A4Q7P3; Match level="QueryCoverage=100%, HitCoverage=6%, E-value=3e-24, Identity=94%"; Hit description=AT -rich interaction region; Zinc finger, FYVE/PHD-type
GVGNTLKRHYETYLLEYELAHDDVDGECCLLCHSSAPGDWVNXGLCGEWA

SEQ ID NO: 123027 - protein, 121 aa, Setaria italica
  misc_feature (25)..(25): Xaa can be any naturally occurring amino acid
  misc_feature (55)..(55): Xaa can be any naturally occurring amino acid
  Transcript Sequence Number=SeqID_57053
  Gene Ontology: Mol. function=zinc ion binding; Cellular component =intracellular
  Homolog annotation: Hit_ID=B9RR31; Match level="QueryCoverage=82%, HitCoverage=14%, E-value=6e-31, Identity=64%"; Hit description=DNA binding protein, putative
TWDAFQLAHASFRLYCVRNNHVQSXKLGPRLLGDAPKINISAPETETVDEEGSSXVTPAIKIYDEEITMKLLLCGVPCTLDPCLLGSLEDGLNALLNIEVWTKNSSSTVSVVLKLFFYGKD

SEQ ID NO: 123028 - protein, 32 aa, Setaria italica
  Transcript Sequence Number=SeqID_57054
  Gene Ontology: Mol. function=nucleotide binding; Cellular component =nucleus; Biological process=small GTPase mediated signal transduction
  Homolog annotation: Hit_ID=Q6V8M6; Match level="QueryCoverage=100%, HitCoverage=17%, E-value=3e-12, Identity=93%"; Hit description=Small Ras-like GTP-binding protein (Fragment)
YPLDFSTNCGKIRFYCWDTAGQEKFGGLRDGY

SEQ ID NO: 123029 - protein, 62 aa, Setaria italica
  Transcript Sequence Number=SeqID_57055
  Subcellular localization annotation: CTP_CleavageSite=26; ConfidenceScore=5.05e-01
TPLSSSSPPRSAVPHPQTRVPLSRVAEMALPNQQVVDYPSFKLVIVGDGGTGDFLRPFLRLT

SEQ ID NO: 123030 - protein, 53 aa, Setaria italica
  Transcript Sequence Number=SeqID_57056
RKLAGDQNLHFVEAVALKPPEVQIDMAMQQQHEAELAAAAAQPLPDDDDDLIE

SEQ ID NO: 123031 - protein, 67 aa, Setaria italica
  Transcript Sequence Number=SeqID_57057
  Gene Ontology: Mol. function=nucleotide binding; Cellular component =nucleus; Biological process=small GTPase mediated signal transduction
  Homolog annotation: Hit_ID=P41916; Match level="QueryCoverage=83%, HitCoverage=25%, E-value=2e-26, Identity=91%"; Hit description=GTP -binding nuclear protein Ran-1
VNYCSPYLFGCLKFHPLDFSTNCGKIRFYCWDTAGQEKFGGLRDGYYIHGQCAIIMFDVTSRLTYKN

SEQ ID NO: 123032 - protein, 47 aa, Setaria italica
  Transcript Sequence Number=SeqID_57058
FFFLSRTNKKLVINYERRLGFSHQQTSATSDRNFITHSHQIHQGEHP

SEQ ID NO: 123033 - protein, 53 aa, Setaria italica
  Transcript Sequence Number=SeqID_57059
  Gene Ontology: Mol. function=metal ion binding; Cellular component =integral to membrane
  Homolog annotation: Hit_ID=B6SSN5; Match level="QueryCoverage=69%, HitCoverage=9%, E-value=2e-12, Identity=100%"; Hit description =Protein binding protein
CRTLSLFHQKAPWGQHLACIIGIAVCCCLPCIIAILYAVSDQEGASEDDIRQI

SEQ ID NO: 123034 - protein, 63 aa, Setaria italica
  misc_feature (43)..(43): Xaa can be any naturally occurring amino acid
  Transcript Sequence Number=SeqID_57060
VCGGGVLLVGEALIMRRTGMATCIGSGECIDPSIHPSTPLHPXLLLLQFTLSFFVNFFSFFFF

SEQ ID NO: 123035 - protein, 60 aa, Setaria italica
  Transcript Sequence Number=SeqID_57061
  Subcellular localization annotation: CTP_CleavageSite=37; ConfidenceScore=5.05e-01
LVPHLPIILHHRTLTDTSLSSFSLLLLLFPHFISPKKASWLSTGLGGLRFLVGRTCALRR

SEQ ID NO: 123036 - protein, 45 aa, Setaria italica
  Transcript Sequence Number=SeqID_57062
MLWNCIAGEVPLAAASMGHCMILAVLLQLQCTDEWKQISQFGFIR

SEQ ID NO: 123037 - protein, 66 aa, Setaria italica
  misc_feature (58)..(58): Xaa can be any naturally occurring amino acid
  Transcript Sequence Number=SeqID_57063
  Homolog annotation: Hit_ID=B4FSP2; Match level="QueryCoverage=71%, HitCoverage=8%, E-value=6e-13, Identity=72%"; Hit description=HECT domain and RCC1-like domain-containing protein 2
LICFHSSVHCNCNSTARIMQCPMDAAANGTSPAMQFHSIADDSTLHSSPLPTALESSXRHCYGDGI

SEQ ID NO: 123038 - protein, 53 aa, Setaria italica
  Transcript Sequence Number=SeqID_57064
GRHGASKSQGIKRETVRSPYSDLSDESVHPILAGRSVGTLGDWVGARSGGEVS

SEQ ID NO: 123039 - protein, 123 aa, Setaria italica
  Transcript Sequence Number=SeqID_57065
  Gene Ontology: Mol. function=alpha-1,3-mannosylglycoprotein 2-beta-N -acetylglucosaminyltransferase activity; Cellular component=Golgi membrane; Biological process=protein amino acid N-linked glycosylation
  Homolog annotation: Hit_ID=B6TLH4; Match level="QueryCoverage=100%, HitCoverage=27%, E-value=3e-59, Identity=90%"; Hit description=N -acetylglucosaminyltransferase I
LIDQVSMQQEKIVALEEMKIRQDEERAQLKILIQDLEKRSVQKLLNKNVVPVAAVVIMACNRPDYLERTVESILKYQTSVASKFPLFISQDGTNGAVKKKALDYKQITYMQHMDLEPVRAERP

SEQ ID NO: 123040 - protein, 68 aa, Setaria italica
  Transcript Sequence Number=SeqID_57066
RKQSQLGLKNKGNHLKAGVLVVHVDLPVSKTDGGRAPPPPPPPVPVLPFPQICLQPLEKDRSSRVACG

SEQ ID NO: 123041 - protein, 146 aa, Setaria italica
  Transcript Sequence Number=SeqID_57067
  Gene Ontology: Mol. function=alpha-1,3-mannosylglycoprotein 2-beta-N -acetylglucosaminyltransferase activity; Cellular component=Golgi membrane; Biological process=protein amino acid N-linked glycosylation
  Homolog annotation: Hit_ID=B6TLH4; Match level="QueryCoverage=92%, HitCoverage=30%, E-value=1e-73, Identity=94%"; Hit description=N -acetylglucosaminyltransferase I
  Pfam annotation: Domain name=GNT-I; Domain location=1-144; Score= -106.4; E_value=1.6e-09; Accession=PF03071.7; Description=GNT-I family
LWHLRTIMAVSSWNDNGQKQFVNDPKALYRSDFFPGLGWMLTKSTWIELSPKWPKAYWDDWVRLKEVHGNRQFIHPEICRTYNFGKHGSSLGQFFEQYLEPIKLNDVHIDWNSEDLSYLREDKFLTKFGKEVASAMPLQWNRNSCV

SEQ ID NO: 123042 - protein, 83 aa, Setaria italica
  Transcript Sequence Number=SeqID_57068
KTAAAARRRRRRSQGLRAISAKAGVLVVHVDLPVSKTDGGRAPPPPPPPVPVLPFPQICLQPRVACGRRREAARAEKERHGRR

SEQ ID NO: 123043 - protein, 116 aa, Setaria italica
  Transcript Sequence Number=SeqID_57069
  Gene Ontology: Mol. function=alpha-1,3-mannosylglycoprotein 2-beta-N -acetylglucosaminyltransferase activity; Cellular component=Golgi membrane; Biological process=protein amino acid N-linked glycosylation
  Homolog annotation: Hit_ID=B6TLH4; Match level="QueryCoverage=82%, HitCoverage=21%, E-value=1e-46, Identity=92%"; Hit description=N -acetylglucosaminyltransferase I
  Pfam annotation: Domain name=GNT-I; Domain location=1-114; Score= -262.7; E_value=0.078; Accession=PF03071.7; Description=GNT-I family
NRPDYLERTVESILKYQTSVASKFPLFISQDGTNGAVKKKALDYKQITYMQHMDLEPVRAERPGELTAYYKIAKHYKWALDQLFIKHNFARVIILEGLTSMMWLFIITYFRFQHFP

SEQ ID NO: 123044 - protein, 57 aa, Setaria italica
  misc_feature (21)..(21): Xaa can be any naturally occurring amino acid
  Transcript Sequence Number=SeqID_57070
  Gene Ontology: Mol. function=transcription factor activity; Cellular component=nucleus
  Homolog annotation: Hit_ID=Q25A26; Match level="QueryCoverage=75%, HitCoverage=8%, E-value=2e-11, Identity=81%"; Hit description =H0721B11.5 protein
MMPRVCGDCLSGECRAYDRAXAIKCNGKDAVTNFDPSIYAEELEPAAATTGGGDEHN

SEQ ID NO: 123045 - protein, 56 aa, Setaria italica
  Transcript Sequence Number=SeqID_57071
  Homolog annotation: Hit_ID=A6XA55; Match level="QueryCoverage=66%, HitCoverage=16%, E-value=3e-09, Identity=78%"; Hit description=AP2 -like protein (Fragment)
RRVEADINFNLEDYEDDMKQQMGNLSKEEFVHVLRRRRAQPGPVAGKLGREQEGQP

SEQ ID NO: 123046 - protein, 44 aa, Setaria italica
  misc_feature (32)..(32): Xaa can be any naturally occurring amino acid
  Transcript Sequence Number=SeqID_57072
LRVKGYNNVFAIGDITDIPVSLYVKLTVLIFXTVVFFTPIPLVS

SEQ ID NO: 123047 - protein, 70 aa, Setaria italica
  misc_feature (63)..(63): Xaa can be any naturally occurring amino acid
  Transcript Sequence Number=SeqID_57073
  Gene Ontology: Mol. function=electron carrier activity; Cellular component=integral to membrane; Biological process=oxidation reduction
  Homolog annotation: Hit_ID=Q2QN16; Match level="QueryCoverage=84%, HitCoverage=11%, E-value=2e-18, Identity=76%"; Hit description =Cytochrome P450 family protein, expressed
YFCRHVYVHAQSLLQAGTDTSSSTVEWAMALLLSNLGVLKKATTEIHSVVGTSQLMNESDLAXLPYLRCI

SEQ ID NO: 123048 - protein, 45 aa, Setaria italica
  Transcript Sequence Number=SeqID_57074
CNDVSRDESCSSVDKIHYISNLLGYNCIAVIVFEYFPFVDRLPCT

SEQ ID NO: 123049 - protein, 84 aa, Setaria italica
  misc_feature (33)..(33): Xaa can be any naturally occurring amino acid
  misc_feature (61)..(61): Xaa can be any naturally occurring amino acid
  Transcript Sequence Number=SeqID_57075
AHELVSGLLGMFRDSVFTVLLQAAVHVKEKKVXQKAEEVLSQYAEKHPENSTGILLALAQXIAANANHFSLLLTHCPKIPEIQH

SEQ ID NO: 123050 - protein, 106 aa, Setaria italica
  misc_feature (92)..(92): Xaa can be any naturally occurring amino acid
  Transcript Sequence Number=SeqID_57076
  Gene Ontology: Mol. function=7S RNA binding; Cellular component =signal recognition particle; Biological process=SRP-dependent cotranslational protein targeting to membrane
  Homolog annotation: Hit_ID=B9RMK3; Match level="QueryCoverage=95%, HitCoverage=13%, E-value=1e-20, Identity=53%"; Hit description =Signal recognition particle subunit srp72, putative
ETAAILQLESQILYRLGRMNDCMNSYEKLKKFKIDSMDLKINIIAALVAAGRASEVQAAMKALKVDLTTRALRDARSFELAYNSACSLIENXKYSEAKEQLDLAKR

SEQ ID NO: 123051 - protein, 58 aa, Setaria italica
  Transcript Sequence Number=SeqID_57077
  Gene Ontology: Mol. function=7S RNA binding; Cellular component =signal recognition particle; Biological process=SRP-dependent cotranslational protein targeting to membrane
MVNGKSDDSSPLADSSSLAVATTNLISLKGTKDTADSLKKLDRLIEKSNAPNQLQLID

SEQ ID NO: 123052 - protein, 111 aa, Setaria italica
  misc_feature (90)..(90): Xaa can be any naturally occurring amino acid
  misc_feature (104)..(104): Xaa can be any naturally occurring amino acid
  Transcript Sequence Number=SeqID_57078
  Gene Ontology: Mol. function=7S RNA binding; Cellular component =signal recognition particle; Biological process=SRP-dependent cotranslational protein targeting to membrane
  Pfam annotation: Domain name=SRP72; Domain location=29-111; Score =31.4; E_value=3.5e-06; Accession=PF08492.4; Description=SRP72 RNA -binding domain
ELGNGLSFFSYCSAFSRLVATAARTNLEKAEQYEKKLKPLPGLKGVNVESLEKTSGARHVEGPQDMKVDTPEEVKKQKARKRKRKPRYPXGFDPANPGSQPDPXERWLPRR

SEQ ID NO: 123053 - protein, 29 aa, Setaria italica
  Transcript Sequence Number=SeqID_57079
RKKIQKAEEVLSQYAEKHPENSKGVLLAT

SEQ ID NO: 123054 - protein, 71 aa, Setaria italica
  Transcript Sequence Number=SeqID_57080
VTDRCGIIDQLNSNFLIFFLLAVTLNLQPSKMISSKAYQISSLTRGTLSLFPLYFLIPFLNTTYVLVSVLF

SEQ ID NO: 123055 - protein, 95 aa, Setaria italica
  misc_feature (47)..(47): Xaa can be any naturally occurring amino acid
  Transcript Sequence Number=SeqID_57081
  Gene Ontology: Mol. function=catalytic activity; Cellular component =plasma membrane; Biological process=metabolic process
  Homolog annotation: Hit_ID=B6SVK5; Match level="QueryCoverage=83%, HitCoverage=12%, E-value=2e-35, Identity=91%"; Hit description=ACS -like protein
LEISTALTVHCCSNSILIFKVKERLGGKLRVIVSGGAPLAVPVEEFXLRVVTCAYVIQGYGLTETCAGSIVSIPNEYPMLGTVGPPIQHIDVRLE

SEQ ID NO: 123056 - protein, 39 aa, Setaria italica
  misc_feature (31)..(31): Xaa can be any naturally occurring amino acid
  Transcript Sequence Number=SeqID_57082
  Gene Ontology: Mol. function=catalytic activity; Biological process =metabolic process
  Homolog annotation: Hit_ID=B6SVK5; Match level="QueryCoverage=97%, HitCoverage=5%, E-value=5e-13, Identity=86%"; Hit description=ACS -like protein
WQLLKTCHATSKYLKTIISFGGVTNDHKEEXKNHGLSIF

SEQ ID NO: 123057 - protein, 64 aa, Setaria italica
  Transcript Sequence Number=SeqID_57083
  Gene Ontology: Mol. function=catalytic activity; Cellular component =plasma membrane; Biological process=metabolic process
  Homolog annotation: Hit_ID=B6SVK5; Match level="QueryCoverage=95%, HitCoverage=9%, E-value=3e-22, Identity=75%"; Hit description=ACS -like protein
ITGSFAELCKNPRAKDHILAELIKIGKEKKLRGFELIKAIHLDPLPFDIERDLITPTSETRNSG

SEQ ID NO: 123058 - protein, 65 aa, Setaria italica
  Transcript Sequence Number=SeqID_57084
  Gene Ontology: Mol. function=acid-amino acid ligase activity; Cellular component=intracellular; Biological process=ubiquitin -dependent protein catabolic process
  Homolog annotation: Hit_ID=Q6YU89; Match level="QueryCoverage=95%, HitCoverage=3%, E-value=2e-27, Identity=96%"; Hit description =Putative HECT ubiquitin-protein ligase 3
MTQVYGSSVNAPIRHKCLSIIGKLMYYSSAETIQSLLGTTNISSFLAGILAWKDPQVLIPAFPSL

SEQ ID NO: 123059 - protein, 53 aa, Setaria italica
  Transcript Sequence Number=SeqID_57085
  Gene Ontology: Mol. function=protein serine/threonine kinase activity; Cellular component=plasma membrane; Biological process =protein amino acid phosphorylation
  Homolog annotation: Hit_ID=B6U7V0; Match level="QueryCoverage=96%, HitCoverage=9%, E-value=3e-22, Identity=96%"; Hit description =Calcium-dependent protein kinase, isoform 1
NCLKPENFLLQDKDDDLSIKVIDFGLSVFFKPGDVFTEVVGSPYYIAPEVLQK

SEQ ID NO: 123060 - protein, 61 aa, Setaria italica
  Transcript Sequence Number=SeqID_57086
VEENEGNSPPQVVELSQNPVFDSFIDLLGIEIEWMIRGLKCESQAAHHLVTLNKCGTWINS

SEQ ID NO: 123061 - protein, 117 aa, Setaria italica
  misc_feature (26)..(26): Xaa can be any naturally occurring amino acid
  Transcript Sequence Number=SeqID_57087
GSGIFAAGGEVEEDESANASATPIRXTAPKNYQAISTISHISFAEEESVSPKKPTSIAEVAKQRELSGTLLSEDDSKMKRQISDLKSKELSGHDIFAPPEDPRPRNFGSNGLRTFLT

SEQ ID NO: 123062 - protein, 58 aa, Setaria italica
  Transcript Sequence Number=SeqID_57088
GTLLSEDDSKMKRQISDLKSKELSGHDIFAPPEDPRPRNSENGSTSTSTTGSKNVFIV

SEQ ID NO: 123063 - protein, 80 aa, Setaria italica
  misc_feature (56)..(56): Xaa can be any naturally occurring amino acid
  misc_feature (73)..(73): Xaa can be any naturally occurring amino acid
  Transcript Sequence Number=SeqID_57089
  Gene Ontology: Mol. function=transporter activity; Cellular component= integral to membrane; Biological process=transport
  Homolog annotation: Hit_ID=Q25AI7; Match level="QueryCoverage=97%, HitCoverage=15%, E-value=3e-21, Identity=65%"; Hit description =H0702G05.6 protein
AKRGTWMVVFHCCWTVGTILEALLAWAVMPGLGWRWLLALSSAPCFVLLIFFPLTXPESPRYLCSRGRTMDAXTVILERI

SEQ ID NO: 123064 - protein, 81 aa, Setaria italica
  Transcript Sequence Number=SeqID_57090
  Gene Ontology: Mol. function=racemase and epimerase activity, acting on carbohydrates and derivatives; Biological process=carbohydrate metabolic process
  Homolog annotation: Hit_ID=Q6B6L8; Match level="QueryCoverage=93%, HitCoverage=19%, E-value=2e-39, Identity=100%"; Hit description=UDP -D-glucuronate decarboxylase
MIVGAGVRSCYDEGKRTAETLTMDYHRGANLEVRIARIFNTYGPRMCIDDGRVVSNFVAQALRKEPLTVYGDGKQTRSFQY

SEQ ID NO: 123065 - protein, 42 aa, Setaria italica
  Transcript Sequence Number=SeqID_57091
LDDLFRLCVMYREHQLSPRRCNGLITCTGLLITTKININYNV

SEQ ID NO: 123066 - protein, 52 aa, Setaria italica
  Transcript Sequence Number=SeqID_57092
QSTSRELGNSRASREQVNPTQVPHKVSRIRSLYSLNFLVRCILFVTLVYLIR

SEQ ID NO: 123067 - protein, 27 aa, Setaria italica
  Transcript Sequence Number=SeqID_57093
EGLPALGPGGRPCVWQFNFRGFDPRTD

SEQ ID NO: 123068 - protein, 81 aa, Setaria italica
  Transcript Sequence Number=SeqID_57094
  Gene Ontology: Mol. function=intramolecular transferase activity, phosphotransferases; Biological process=carbohydrate metabolic process
LPSQRRSGSPGAYLLLCESRAKLYDENKKPVGMVHVRQSVHNPNIALNMQSYVPDGCKFMARDLHKRYIILSTSLIFLKCS

SEQ ID NO: 123069 - protein, 65 aa, Setaria italica
  misc_feature (18)..(18): Xaa can be any naturally occurring amino acid
  Transcript Sequence Number=SeqID_57095
  Gene Ontology: Mol. function=metal ion binding
  Homolog annotation: Hit_ID=B9RY52; Match level="QueryCoverage=95%, HitCoverage=9%, E-value=1e-20, Identity=66%"; Hit description=DNA binding protein, putative
MSYDDPEDWDYRQLDNPXHLLHGIVHDNGFGHLVRINGREGGSGLLTGTQLMDFWDRLCRYLRVR

SEQ ID NO: 123070 - protein, 71 aa, Setaria italica
  Transcript Sequence Number=SeqID_57096
  Gene Ontology: Mol. function=metal ion binding
  Homolog annotation: Hit_ID=B9S1T6; Match level="QueryCoverage=97%, HitCoverage=9%, E-value=1e-22, Identity=62%"; Hit description=DNA binding protein, putative
QGRQLMDFWDRLCRYLRVRKVSLMDVSKKYGTDYRILHAVTTGHSWYGQWGFKLSKGSFGITSKEYFEAID

SEQ ID NO: 123071 - protein, 43 aa, Setaria italica
  Transcript Sequence Number=SeqID_57097
  Gene Ontology: Mol. function=indole-3-glycerol-phosphate synthase activity; Cellular component=chloroplast; Biological process =tryptophan metabolic process
  Homolog annotation: Hit_ID=Q7XJW1; Match level="QueryCoverage=90%, HitCoverage=9%, E-value=2e-12, Identity=89%"; Hit description =OSJNBa0016O02.9 protein
FVGALKASYDRTGLPALIAEVKKASPSRGVLREDFDPVSSGYG

SEQ ID NO: 123072 - protein, 68 aa, Setaria italica
  misc_feature (20)..(20): Xaa can be any naturally occurring amino acid
  Transcript Sequence Number=SeqID_57098
  Gene Ontology: Mol. function=sequence-specific DNA binding; Cellular component=nucleus; Biological process=regulation of transcription, DNA-dependent
  Homolog annotation: Hit_ID=Q94LW3; Match level="QueryCoverage=98%, HitCoverage=21%, E-value=4e-31, Identity=97%"; Hit description =Homeobox protein knotted-1-like 3
LGDTTSILKQWWQQHSKWPXYPTEDDKAKLVEETGLQLKQINNWFINQRKRNWHNNSQTSTLKSKRKR

SEQ ID NO: 123073 - protein, 77 aa, Setaria italica
  Transcript Sequence Number=SeqID_57099
RSRPHHGLPPRQTDEEEVIRDKAAMRAWSRRRRAEGKVVALVPTMGFLHDGHLSLVSAAVAADDGDGAGVVSIYVNP

SEQ ID NO: 123074 - protein, 83 aa, Setaria italica
  misc_feature (19)..(19): Xaa can be any naturally occurring amino acid
  Transcript Sequence Number=SeqID_57100
  Gene Ontology: Mol. function=SNAP receptor activity; Cellular component=integral to membrane; Biological process=intracellular protein transport
  Homolog annotation: Hit_ID=B9SIA7; Match level="QueryCoverage=86%, HitCoverage=23%, E-value=2e-23, Identity=79%"; Hit description =Syntaxin, putative
  Pfam annotation: Domain name=SNARE; Domain location=41-83; Score =10.0; E_value=0.02; Accession=PF05739.11; Description=SNARE domain
VPDEETIDDMIETGKSEQXIFKDAIQQGRGQILDTVAEIQERHDAVRDLERKLLELQQIFMDMAVLVEAQGDMNTNKQLEEQQ

SEQ ID NO: 123075 - protein, 54 aa, Setaria italica
  Transcript Sequence Number=SeqID_57101
AVKKKLKERMDDFQALREAIRQEYREVVERRVFTVTGNRPDEETIDELFFFQFI

SEQ ID NO: 123076 - protein, 74 aa, Setaria italica
  Transcript Sequence Number=SeqID_57102
  Gene Ontology: Mol. function=ubiquinol-cytochrome-c reductase activity; Cellular component=mitochondrial respiratory chain; Biological process=mitochondrial electron transport, ubiquinol to cytochrome c
  Homolog annotation: Hit_ID=Q2RA72; Match level="QueryCoverage=72%, HitCoverage=71%, E-value=5e-15, Identity=68%"; Hit description =Ubiquinol-cytochrome c reductase complex 7.8 kDa protein, putative, expressed
  Pfam annotation: Domain name=UCR_hinge; Domain location=26-73; Score =36.3; E_value=1.2e-07; Accession=PF02320.8; Description=Ubiquinol -cytochrome C reductase hinge protein
MVDIQFFLCFNSLDLVLCYRADEEVSDPKALLEDRTKAKCVSQWYEYQKCVKRIENDETGQKHCTGQYFDYWKC

SEQ ID NO: 123077 - protein, 85 aa, Setaria italica
  Transcript Sequence Number=SeqID_57103
  Subcellular localization annotation: CTP_CleavageSite=29; ConfidenceScore=5.21e-01
VISSRTSPSSLSLIQDQQRARRVELGSVDVNRARGRRNRAWGRWNRARGGFPWRQRWPEARRTPVTQGRRGQKRRGKLRPGAGGL

SEQ ID NO: 123078 - protein, 55 aa, Setaria italica
  misc_feature (26)..(26): Xaa can be any naturally occurring amino acid
  Transcript Sequence Number=SeqID_57104
  Homolog annotation: Hit_ID=B6TSC4; Match level="QueryCoverage=72%, HitCoverage=11%, E-value=2e-10, Identity=80%"; Hit description =Ubiquitin-protein ligase
IGRACPQLKRFRLNERWSILQSEFAXPYEGMDDDNSITHVAMQRAKCNFKLLELR

SEQ ID NO: 123079 - protein, 32 aa, Setaria italica
  Transcript Sequence Number=SeqID_57105
HTPVLQHPNGRCHEVGDGVMRKLQISYPSTFR

SEQ ID NO: 123080 - protein, 44 aa, Setaria italica
  Transcript Sequence Number=SeqID_57106
  Homolog annotation: Hit_ID=A2Q1P1; Match level="QueryCoverage=95%, HitCoverage=9%, E-value=1e-10, Identity=68%"; Hit description =Dynamin central region; Dynamin GTPase effector
EVPFEILVRKQIGRLLDPSLQCAQFIYDELIKVCVITLLYAYIL

SEQ ID NO: 123081 - protein, 51 aa, Setaria italica
  Transcript Sequence Number=SeqID_57107
VSPGMVIGSNSPLPLNAPSRDAQRYGVPRPTLLQGDEQSRIHYSQMVNGEI

SEQ ID NO: 123082 - protein, 55 aa, Setaria italica
  Transcript Sequence Number=SeqID_57108
  Gene Ontology: Mol. function=transferase activity, transferring nitrogenous groups; Biological process=cellular amino acid and derivative metabolic process
  Homolog annotation: Hit_ID=Q2R2Q2; Match level="QueryCoverage=61%, HitCoverage=8%, E-value=4e-10, Identity=85%"; Hit description =Tyrosine/nicotianamine aminotransferases family protein
PYKILRETSDICWEKLKGISAITCPSKPEGSMFVMVCESLHILFHFERHPFSNQM

SEQ ID NO: 123083 - protein, 60 aa, Setaria italica
  Transcript Sequence Number=SeqID_57109
IGLRERCAITLKTLRNGSESWQVHSLPCKNNSYQLKKGSLVSPALSIFFLPGKNDSLNFN

SEQ ID NO: 123084 - protein, 45 aa, Setaria italica
  Transcript Sequence Number=SeqID_57110
MAAAMGAVIRRMHAAAAAAHPPRLTKLALHPPKSVSLLHLRSYLP

SEQ ID NO: 123085 - protein, 62 aa, Setaria italica
  Transcript Sequence Number=SeqID_57111
LKEDYAFLQPLGDRLFDYSLVFLGLQPLSGYKFIGHYIKTYIPGSATTERVQISWALHKNLY

SEQ ID NO: 123086 - protein, 49 aa, Setaria italica
  Transcript Sequence Number=SeqID_57112
VGGGAVDGEAPALVVVSFYRFADFPDHAVFRRPLKELCEELLRKSSIGA

SEQ ID NO: 123087 - protein, 56 aa, Setaria italica
  Transcript Sequence Number=SeqID_57113
IMRLLRFMVDLLSVGEFMILNHALCHQYPCMCGCMDGRKMSTLARILMAQCMIQDH

SEQ ID NO: 123088 - protein, 79 aa, Setaria italica
  Transcript Sequence Number=SeqID_57114
PPTPSPVATHGSSSPTCDTSSCTCGYLGGGAPAALGRAIDEPPTSHDELTTSRGTGDDLAARGRAAEELLDVIDYVRLR

SEQ ID NO: 123089 - protein, 91 aa, Setaria italica
  Transcript Sequence Number=SeqID_57115
  Subcellular localization annotation: CTP_CleavageSite=60; ConfidenceScore=5.59e-01
IEGGGALGFTPFWRNSSAAPPTPSPVATHGSSSLACDASSLHVWIPWRCCACSTWTSRRRATTSRGTGGDLAACGRAAEELLDVIDYVRLR

SEQ ID NO: 123090 - protein, 79 aa, Setaria italica
  Transcript Sequence Number=SeqID_57116
  Subcellular localization annotation: CTP_CleavageSite=52; ConfidenceScore=5.62e-01
SINVVVRSRSRPAAPQQLVHVHSKIASGAAARRRLVVGSSWLVGGSSMTRPSAAGATPQRYPHVQGGSVASRIARSASC

SEQ ID NO: 123091 - protein, 53 aa, Setaria italica
  Transcript Sequence Number=SeqID_57117
CSAARCHLITRRTTGAEDVDMRRCSEDDHVVVRSRSRQRPAAPQQLVHVQQDR

SEQ ID NO: 123092 - protein, 58 aa, Setaria italica
  Transcript Sequence Number=SeqID_57118
  Subcellular localization annotation: CTP_CleavageSite=39; ConfidenceScore=5.16e-01
QARRPSSMQKGPRRRGRSPLQLPQHHGSSRMPLLILTPSQRRVSNLKYLRTYLNLLST

SEQ ID NO: 123093 - protein, 79 aa, Setaria italica
  Transcript Sequence Number=SeqID_57119
  Subcellular localization annotation: CTP_CleavageSite=50; ConfidenceScore=5.50e-01
PDIAAPILDAIALRNPSSSPGSPLPSLFSASPSDAAAALASPPLLLDALSAAPPSSPAPSSPPHPPNPPSGNTKLRELS

SEQ ID NO: 123094 - protein, 95 aa, Setaria italica
  misc_feature (24)..(24): Xaa can be any naturally occurring amino acid
  Transcript Sequence Number=SeqID_57120
  Gene Ontology: Mol. function=DNA binding
  Homolog annotation: Hit_ID=Q7X5W7; Match level="QueryCoverage=100%, HitCoverage=13%, E-value=5e-41, Identity=88%"; Hit description =Homeobox transcription factor Hox7-like protein
FWIRSLNSLTWVEILRQVLVASGXGSKQHMLNRDFFNKEKNQMVKYGLRPRTLKGELFALLSKAGSGGLKVSVLAKSSEIVDLNVSGTLELEQLI

SEQ ID NO: 123095 - protein, 126 aa, Setaria italica
  misc_feature (88)..(88): Xaa can be any naturally occurring amino acid
  misc_feature (109)..(109): Xaa can be any naturally occurring amino acid
  Transcript Sequence Number=SeqID_57121
  Gene Ontology: Mol. function=structural constituent of ribosome; Cellular component=ribonucleoprotein complex
SPTSGRDDDGNKPWSFAGVSGDPDPFPHEEAAADAGEALPVGPAAVADEPWAKGFGVEDGDSGDVFEGIYKEAASAAPASGEAAPAGXEEQWTLSGDEKDPFADAVLGXGSDGIQGEGGGLDELDA

SEQ ID NO: 123096 - protein, 62 aa, Setaria italica
  Transcript Sequence Number=SeqID_57122
YAGRNILSTDSLDHGLLFREKSTDRRPLCMIPRAHSRCGIDRVVAPGQQARNVPCWLEGVGL

SEQ ID NO: 123097 - protein, 70 aa, Setaria italica
  Transcript Sequence Number=SeqID_57123
SRRNILSTDSLDHGLLFREKSTDRRPLCMIPRAHSRRCETSSGHISCLCFRCGIDRVVAPGQQARNSLVG

SEQ ID NO: 123098 - protein, 68 aa, Setaria italica
  Transcript Sequence Number=SeqID_57124
FLSAEQCDQSALPSSGLLLCSDKPVEVLRRAKPRSDARRSPLSTIRRHLQHLRVRPPCFALFFAPGWL

SEQ ID NO: 123099 - protein, 63 aa, Setaria italica
  Transcript Sequence Number=SeqID_57125
  Gene Ontology: Mol. function=metal ion binding
  Homolog annotation: Hit_ID=B9SVW1; Match level="QueryCoverage=88%, HitCoverage=13%, E-value=2e-17, Identity=75%"; Hit description =Ubiquitin-protein ligase, putative
LVRCPYCKTLNYAVEYRGVKTKEEKGIEQLEEQRVIEAQIGMRQQELQEDAERMKNKQTAAST

SEQ ID NO: 123100 - protein, 47 aa, Setaria italica
  Transcript Sequence Number=SeqID_57126
QIVEGAESSNDQWSEIAEDGTSHAGSDVTAEAIAANSAASVRTMNST

SEQ ID NO: 123101 - protein, 45 aa, Setaria italica
  Transcript Sequence Number=SeqID_57127
LTAQVLFIIQTLRHEIQRHQKSKQGVERCLLQVANLLLPTIAAAA

SEQ ID NO: 123102 - protein, 52 aa, Setaria italica
  Transcript Sequence Number=SeqID_57128
RSVWIMNNTCAVNYLQIVLCDVTSYPPSHEIQRHQKSKQGVERCLLQVANLL

SEQ ID NO: 123103 - protein, 67 aa, Setaria italica
  Transcript Sequence Number=SeqID_57129
KKRGPVFCQRKPIHHNLLHCFERAMTLKFIEFGFSAILALMTFAASCEQVSNRRSDHTSITEEQLKK

SEQ ID NO: 123104 - protein, 143 aa, Setaria italica
  Transcript Sequence Number=SeqID_57130
  Homolog annotation: Hit_ID=A6YTC8; Match level="QueryCoverage=79%, HitCoverage=11%, E-value=5e-12, Identity=40%"; Hit description =Nucleolar GTPase
YRVCTDFILLNIPGSADPGMLSKMLVCLDRCINAWTSGLEMALKRVVDSNHVDASVAKALLESINNINELEVPSLQNFLPTNKTTCRLSLLPPSSVPGMKLIMWNDNHYIVKVANLWANWISSYPPQMSRTPVIEEQRSNTWQ

SEQ ID NO: 123105 - protein, 82 aa, Setaria italica
  Transcript Sequence Number=SeqID_57131
FRQTTVDIGTHESTGECVKASGYSPPNNSAILNLYEESVRADVIRIEESSAESVQNSYDLFSNNEMNSSFETDENRSSSSTG

SEQ ID NO: 123106 - protein, 43 aa, Setaria italica
  Transcript Sequence Number=SeqID_57132
IPSVKINDHPKTNDKALLIVQNIYTFRNHSVADICMTRFLPNR

SEQ ID NO: 123107 - protein, 71 aa, Setaria italica
  Transcript Sequence Number=SeqID_57133
MSGSYGSDDYRGGGGGYGGGGGRGGGGGGGFGGGGRGGGGGGRGGGGRGGGREGDWVCPDASCGNVNFARR

SEQ ID NO: 123108 - protein, 48 aa, Setaria italica
  Transcript Sequence Number=SeqID_57134
GSAGGCVAAAAVDAARLGRRRIRKTPTWAHDAPRVWDRSRRRGNRVFV

SEQ ID NO: 123109 - protein, 67 aa, Setaria italica
  Transcript Sequence Number=SeqID_57135
  Subcellular localization annotation: CTP_CleavageSite=27; ConfidenceScore=5.66e-01
FFFYFFVLFSFNFWVWFVPVSLSSIVSASSPRPRTRRHQQPHPCPSPGTTPTGKRTATPPALKSGSR

SEQ ID NO: 123110 - protein, 62 aa, Setaria italica
  Transcript Sequence Number=SeqID_57136
PDWPLDEFFGFSEFNAGLGFTENGTSKVSTDFFFQHVTTEWTSQFLKFYLQSFLGTHFPLEI

SEQ ID NO: 123111 - protein, 65 aa, Setaria italica
  Transcript Sequence Number=SeqID_57137
SGSSTRNYKCYLCLLHLIFSKQPSLSILSYELLTPHHGSTRQQIFVSLSKSLLLTLSLLYLLLFL

SEQ ID NO: 123112 - protein, 104 aa, Setaria italica
  Transcript Sequence Number=SeqID_57138
  Gene Ontology: Mol. function=hydrolase activity, acting on glycosyl bonds; Cellular component=vacuole; Biological process=cell wall organization and biogenesis
  Homolog annotation: Hit_ID=Q9LMA9; Match level="QueryCoverage=96%, HitCoverage=18%, E-value=4e-42, Identity=73%"; Hit description =T29M8.4 protein
IGHNGSINGQGEVWWMKHRRRMLNNTRPPLVQLMWSKDIIVANITLRNSPFWHFHPYDCTNVTVSNVTILSPISGAPNTDGIDPDSCQDVLIENCYISVGDCIV

SEQ ID NO: 123113 - protein, 36 aa, Setaria italica
  Transcript Sequence Number=SeqID_57139
PLHSAVAAARLTSRLSTDSSCRALSQGILCRTYPGL

SEQ ID NO: 123114 - protein, 134 aa, Setaria italica
  Transcript Sequence Number=SeqID_57140
SSEMAATGMPSAYSCGRSWRRCAAASAGAGGIGEHVGAQGTEEHLVSHRSLSSEPAPRTRWRALVRWGRAANPDGDRRRAGEKVRERLERISGVLAPEAERTTPIRILRWWTPHEPPTCHLIKVRYNRTSTRAL

SEQ ID NO: 123115 - protein, 52 aa, Setaria italica
  Transcript Sequence Number=SeqID_57141
PSTSKSIQLGTNYLQEVTDFSLQYFASEDNHLRWLPPEIALCLFLRTILETL

SEQ ID NO: 123116 - protein, 64 aa, Setaria italica
  misc_feature (56)..(56): Xaa can be any naturally occurring amino acid
  Transcript Sequence Number=SeqID_57142
  Gene Ontology: Mol. function=dihydrodipicolinate synthase activity; Cellular component=chloroplast; Biological process=diaminopimelate biosynthetic process
  Homolog annotation: Hit_ID=B4FK44; Match level="QueryCoverage=76%, HitCoverage=13%, E-value=1e-14, Identity=82%"; Hit description =Dihydrodipicolinate synthase 2
RIVRKVSKCHHLHGIGRGRFPVAAISDDYLPMRSTEAKNRTSKDDITSLRLITAVXTPYLPDGR

SEQ ID NO: 123117 - protein, 56 aa, Setaria italica
  Transcript Sequence Number=SeqID_57143
LRPVGIEATYTGLKAQRCWIDHGAWIHVCVCALSHLEHGHDAGRVAGGHERHEHPS

SEQ ID NO: 123118 - protein, 71 aa, Setaria italica
  misc_feature (66)..(66): Xaa can be any naturally occurring amino acid
  Transcript Sequence Number=SeqID_57144
  Gene Ontology: Mol. function=ATPase activity; Biological process =protein transport
  Homolog annotation: Hit_ID=B6SSC5; Match level="QueryCoverage=80%, HitCoverage=10%, E-value=3e-17, Identity=75%"; Hit description=ATP -dependent Clp protease ATP-binding subunit clpX
LAKHDNKESLLRFHVGSANQHGIGAKILCGEGALELYLAKHDNKESMHQQLEKSNGESEIDAEAPXRVASM

SEQ ID NO: 123119 - protein, 37 aa, Setaria italica
  Transcript Sequence Number=SeqID_57145
IDLRFPIRFLQLLMMSSFDQHKQIHVNHPSPNAWSLH

SEQ ID NO: 123120 - protein, 81 aa, Setaria italica
  misc_feature (7)..(7): Xaa can be any naturally occurring amino acid
  misc_feature (20)..(20): Xaa can be any naturally occurring amino acid
  Transcript Sequence Number=SeqID_57146
  Gene Ontology: Mol. function=oxidoreductase activity; Cellular component=chloroplast envelope
  Homolog annotation: Hit_ID=B6U2Y9; Match level="QueryCoverage=100%, HitCoverage=19%, E-value=5e-37, Identity=92%"; Hit description=Aldo -keto reductase/ oxidoreductase
NRSRKRXMDVAALDMLQFHXWDYTNPGYLDALKHITDLKEEGKIKTVALTNFDTERLQIILENGIPVVSNQVQHSIVDMRP

SEQ ID NO: 123121 - protein, 35 aa, Setaria italica
  Transcript Sequence Number=SeqID_57147
MLQMEEEFELLESTFMKAGFQEELTTCILRKKKKK

SEQ ID NO: 123122 - protein, 76 aa, Setaria italica
  Transcript Sequence Number=SeqID_57148
  Gene Ontology: Mol. function=protein tyrosine kinase activity; Cellular component=integral to membrane; Biological process=protein amino acid phosphorylation
  Homolog annotation: Hit_ID=B9RW50; Match level="QueryCoverage=85%, HitCoverage=9%, E-value=7e-12, Identity=50%"; Hit description=Lrr receptor-linked protein kinase, putative
QIGASFTHDRRVEVQTFVHLVAEYGQRLLVYNHFSRTTLDDALHDAEETGSALSWNARLQVALGSGKALEYLHESL

SEQ ID NO: 123123 - protein, 58 aa, Setaria italica
  Transcript Sequence Number=SeqID_57149
  Gene Ontology: Mol. function=hydrolase activity
  Homolog annotation: Hit_ID=B4G027; Match level="QueryCoverage=100%, HitCoverage=13%, E-value=2e-23, Identity=93%"; Hit description=Acid phosphatase
GTPVDCVSLALSGRLFPWSAPALVVISGINAGPNCGYEMFHSSAIAAAREALVYGVPS

SEQ ID NO: 123124 - protein, 122 aa, Setaria italica
  misc_feature (23)..(23): Xaa can be any naturally occurring amino acid
  Transcript Sequence Number=SeqID_57150
  Gene Ontology: Mol. function=translation elongation factor activity
  Homolog annotation: Hit_ID=UPI000034EE6E; Match level="QueryCoverage =82%, HitCoverage=21%, E-value=9e-30, Identity=53%"; Hit description =ankyrin repeat family protein
ILCARSPFFEKKFKTDWKDRKEXVDDMENLARACKVCKCEELQKILDSEVVHQKYAEYKSARELDLDNSQKRFILQAQSLPEEDRLPSTLQRILHTCLANSREEGYYSEDSNEMRKNLEEDL

SEQ ID NO: 123125 - protein, 41 aa, Setaria italica
  misc_feature (16)..(41): Xaa can be any naturally occurring amino acid
  Transcript Sequence Number=SeqID_57151
SYFRHGMSCNDIYLTXXXXXXXXXXXXXXXXXXXXXXXXXX

SEQ ID NO: 123126 - protein, 90 aa, Setaria italica
  misc_feature (33)..(33): Xaa can be any naturally occurring amino acid
  Transcript Sequence Number=SeqID_57152
  Gene Ontology: Mol. function=protein serine/threonine kinase activity; Cellular component=integral to membrane; Biological process=protein amino acid phosphorylation
  Homolog annotation: Hit_ID=Q0ZA03; Match level="QueryCoverage=68%, HitCoverage=5%, E-value=3e-14, Identity=59%"; Hit description =Brassinosteroid-insensitive 1
  Pfam annotation: Domain name=LRR_1; Domain location=23-45; Score =13.1; E_value=0.95; Accession=PF00560.25; Description=Leucine Rich Repeat
  Pfam annotation: Domain name=LRR_1; Domain location=47-69; Score=5.7; E_value=25; Accession=PF00560.25; Description=Leucine Rich Repeat
  Pfam module annotation: Pfam domain module=LRR_1::LRR_1; Domain location=23-45::47-69
RVISLRRPTIKQARYLQLSRMLALEKLILDYNXFSGSIPPSLADCIELKWMSLASNRLPGPVPPWFGRFLKLQILRLNIAKGLHLRLWHS

SEQ ID NO: 123127 - protein, 70 aa, Setaria italica
  Transcript Sequence Number=SeqID_57153
  Gene Ontology: Mol. function=phosphoribosylformylglycinamidine synthase activity; Cellular component=chloroplast; Biological process='de novo' IMP biosynthetic process
  Homolog annotation: Hit_ID=Q9M8D3; Match level="QueryCoverage=80%, HitCoverage=4%, E-value=2e-20, Identity=85%"; Hit description =Probable phosphoribosylformylglycinamidine synthase, chloroplastic
VCLVLLLLYCLVLFALADCMVELGIAIDGGKDSLSMAAQCDGEVVKAPGNLVISTYVTCPDITLTVTPDL

SEQ ID NO: 123128 - protein, 35 aa, Setaria italica
  Transcript Sequence Number=SeqID_57154
GAQGGRLGSVPALEGDAIGKARSHPVLPCLHGMPE

SEQ ID NO: 123129 - protein, 61 aa, Setaria italica
  misc_feature (26)..(26): Xaa can be any naturally occurring amino acid
  Transcript Sequence Number=SeqID_57155
  Gene Ontology: Mol. function=electron carrier activity; Biological process=oxidation reduction
  Homolog annotation: Hit_ID=A4D8H9; Match level="QueryCoverage=70%, HitCoverage=8%, E-value=5e-13, Identity=79%"; Hit description=P450 monooxygenase
TMVVLSMHPEWQDRAREEVLGLFGKXKPEYEGLSRLKTVSQYLGYLFFWKRPCNEQMCDFF

SEQ ID NO: 123130 - protein, 64 aa, Setaria italica
  Transcript Sequence Number=SeqID_57156
  Gene Ontology: Mol. function=binding; Biological process=cell redox homeostasis
  Homolog annotation: Hit_ID=B6U8P1; Match level="QueryCoverage=89%, HitCoverage=8%, E-value=1e-23, Identity=89%"; Hit description =Electron transporter
AHSRLAGVCLRLGMIDKARRNFTQAGHLQQSDPAEWQKLQEVEMHLGRSTDARKIGDLEVVVYL

SEQ ID NO: 123131 - protein, 81 aa, Setaria italica
  misc_feature (36)..(36): Xaa can be any naturally occurring amino acid
  misc_feature (46)..(46): Xaa can be any naturally occurring amino acid
  Transcript Sequence Number=SeqID_57157
  Gene Ontology: Mol. function=metal ion binding; Cellular component =intracellular
  Homolog annotation: Hit_ID=Q7F9L7; Match level="QueryCoverage=66%, HitCoverage=8%, E-value=3e-10, Identity=62%"; Hit description =OSJNBa0006A01.7 protein
PTCRQTISKRSENNNHLFCWACQKTFFVPCAIKPVXKTAQHYGPKXGCKQHTSESLKMKVFPNNVQSNNRTTNRNQVKLIK

SEQ ID NO: 123132 - protein, 45 aa, Setaria italica
  Transcript Sequence Number=SeqID_57158
RKLECVEVIQTREAVQKLDICGDKILVLTQNNVLKVLIDLLCTRR

SEQ ID NO: 123133 - protein, 124 aa, Setaria italica
  Transcript Sequence Number=SeqID_57159
  Gene Ontology: Mol. function=magnesium ion binding; Cellular component=integral to membrane; Biological process=photosynthesis, light harvesting
  Homolog annotation: Hit_ID=P12330; Match level="QueryCoverage=68%, HitCoverage=32%, E-value=7e-43, Identity=97%"; Hit description =Chlorophyll a-b binding protein 1, chloroplastic
  Pfam annotation: Domain name=Chloroa_b-bind; Domain location=40-124; Score=43.6; E_value=7.9e-10; Accession=PF00504.13; Description =Chlorophyll A-B binding protein
  Subcellular localization annotation: CTP_CleavageSite=38; ConfidenceScore=5.01e-01
RLPRPRLRPGRPRRRLSQPRRRRRKPSPWQLRLRPRPRKQSPSYLTGEFPGDYGWDTAGLSADPETFAKNRELEVIHSRWAMLGALGCVFPELLARNGVKFGEAVWFKAGSQIFSEGGLDYLGN

SEQ ID NO: 123134 - protein, 58 aa, Setaria italica
  Transcript Sequence Number=SeqID_57160
DFLRCVTSCICCCSGYLPPIVSPAPRCFILPLEVLPLQVLQFPWKQWYCTCQIKKLDN

SEQ ID NO: 123135 - protein, 126 aa, Setaria italica
  Transcript Sequence Number=SeqID_57161
HYKAAILADSTPAVPVALRVEPKPKSDIRQQDLLKHIVGIKPKRPKVSSPSQPADSNKTNQCEEDSVSKLSSSQNQLEPPLGEKGSSHGTVNAEYTVPRPDEPSVAKQQNTAGSLLGLAYESSDEE

SEQ ID NO: 123136 - protein, 90 aa, Setaria italica
  Transcript Sequence Number=SeqID_57162
RSCPSLPKLPICTCTQGRTPHSGIRCENPKGKKQGWGNSGIGGSERRRTPLGSLRLVYSRTSRPDMAGVPGADDRRGRNPNPGSERKLRD

SEQ ID NO: 123137 - protein, 75 aa, Setaria italica
  Transcript Sequence Number=SeqID_57163
  Gene Ontology: Cellular component=vacuole
  Homolog annotation: Hit_ID=B6TM82; Match level="QueryCoverage=93%, HitCoverage=45%, E-value=4e-29, Identity=84%"; Hit description=ML domain protein
  Pfam annotation: Domain name=E1_DerP2_DerF2; Domain location=2-69; Score=-15.1; E_value=0.038; Accession=PF02221.7; Description=ML domain
NSTSNFFFSVHSETRDICGETTCPATGNFVLSHGQTLPSFTPPGSYTITMKMLGDNNEELSCISFGFSIGWVASS

SEQ ID NO: 123138 - protein, 83 aa, Setaria italica
  Transcript Sequence Number=SeqID_57164
  Gene Ontology: Cellular component=vacuole
  Homolog annotation: Hit_ID=B6TM82; Match level="QueryCoverage=84%, HitCoverage=44%, E-value=2e-24, Identity=80%"; Hit description=ML domain protein
  Pfam annotation: Domain name=E1_DerP2_DerF2; Domain location=16-83; Score=-7.8; E_value=0.009; Accession=PF02221.7; Description=ML domain
EQRVHESPWRASRASAATSVEYCNKGKKYPVKVSGVEIVPDPVQPGQPATFKISASTDKTIKTGKLQIDVKYFFFSVHSETRD

SEQ ID NO: 123139 - protein, 70 aa, Setaria italica
  misc_feature (8)..(8): Xaa can be any naturally occurring amino acid
  Transcript Sequence Number=SeqID_57165
  Gene Ontology: Mol. function=6-phosphofructokinase activity; Cellular component=6-phosphofructokinase complex; Biological process=glycolysis
  Homolog annotation: Hit_ID=B6SXT5; Match level="QueryCoverage=70%, HitCoverage=9%, E-value=6e-21, Identity=100%"; Hit description=6 -phosphofructokinase 2
SGGAGVRXAVVGVPKTIDNDIAVIDKSFGFDTAVEEAQRAINAAHVEAESAENGVGVVKLMGWRAWRTWR

SEQ ID NO: 123140 - protein, 29 aa, Setaria italica
  Transcript Sequence Number=SeqID_57166
PLDVFLEKIPSIPSKLSRPFCAIENIAIP

SEQ ID NO: 123141 - protein, 84 aa, Setaria italica
  Transcript Sequence Number=SeqID_57167
  Gene Ontology: Mol. function=biotin-[acetyl-CoA-carboxylase] ligase activity; Biological process=protein modification process
  Homolog annotation: Hit_ID=Q8S4V8; Match level="QueryCoverage=91%, HitCoverage=21%, E-value=3e-21, Identity=58%"; Hit description =Holocarboxylase synthetase 1
  Subcellular localization annotation: CTP_CleavageSite=17; ConfidenceScore=5.30e-01
FADWGLGFPLFLLYFASASARVCRNFAKLPVGVVCVADVQFKGRGRSKNVWESPPGCLMLSFTSQMQDARKLPLMQYVVCLSMT

SEQ ID NO: 123142 - protein, 126 aa, Setaria italica
  Transcript Sequence Number=SeqID_57168
  Gene Ontology: Mol. function=biotin-[acetyl-CoA-carboxylase] ligase activity; Biological process=protein modification process
  Homolog annotation: Hit_ID=B9RJ98; Match level="QueryCoverage=92%, HitCoverage=34%, E-value=6e-44, Identity=68%"; Hit description =Biotin protein ligase, putative
  Pfam annotation: Domain name=BPL_LipA_LipB; Domain location=7-126; Score=73.5; E_value=7.5e-19; Accession=PF03099.11; Description =Biotinlipoate AB protein ligase family
  Subcellular localization annotation: CTP_CleavageSite=27; ConfidenceScore=5.06e-01
PPSGHLLPQATIKTESWNFAKLPVGVVCVADVQFKGRGRSKNVWESPPGCLMFSFTSQMQDARKLPLMQYVVCLSMTEAIKELCRAKGLPELDVRIKWPNDLYLKGLKVGGILCTSSYEPKVYNIC

SEQ ID NO: 123143 - protein, 143 aa, Setaria italica
  Transcript Sequence Number=SeqID_57169
  Gene Ontology: Mol. function=nucleic acid binding; Cellular component= nucleus; Biological process=response to stress
  Homolog annotation: Hit_ID=B6TDT8; Match level="QueryCoverage=58%, HitCoverage=41%, E-value=3e-36, Identity=88%"; Hit description =Glycine-rich RNA-binding protein 2
  Pfam annotation: Domain name=RRM_1; Domain location=13-83; Score =98.0; E_value=3.2e-26; Accession=PF00076.14; Description=RNA recognition motif. (a.k.a. RRM, RBD, o
EAEMAASDVEYRCFVGGLAWATDDNSLHNAFSPFGEVLESKIILDRDTQRSRGFGFVTFASEQAMRDAIEGMNGKELDGRSITVNEAQSRGGPRSAAAAAPPEPPPRSWRTAGRRRTRSSWPPRPVPSPWGRACRPGSSPFAS

SEQ ID NO: 123144 - protein, 62 aa, Setaria italica
  Transcript Sequence Number=SeqID_57170
  Gene Ontology: Mol. function=binding
  Homolog annotation: Hit_ID=Q2R9P0; Match level="QueryCoverage=80%, HitCoverage=2%, E-value=4e-20, Identity=92%"; Hit description =Armadillo/beta-catenin-like repeat family protein, expressed
NCIFLLLLTRKPKSSIAKKAVVDAGGLPILIGAVVAPSKECMQGETCHSLQSHAVHALSNIC

SEQ ID NO: 123145 - protein, 73 aa, Setaria italica
  Transcript Sequence Number=SeqID_57171
  Subcellular localization annotation: CTP_CleavageSite=33; ConfidenceScore=5.50e-01
KPIALPPAPIRGGGCCFWAASPSPVAAARLRVSASAASSDVPDFLSSNWSVPPFQLPLPLAASCSARVRGRLG

SEQ ID NO: 123146 - protein, 81 aa, Setaria italica
  Transcript Sequence Number=SeqID_57172
RDVLWRIQGKTANSTMVKAKELRVLLFLCNLRCKLKAIRERYAENHMKVKVTVFSVSRKPMQFLSLFILLSSRFRSKSNGK

SEQ ID NO: 123147 - protein, 39 aa, Setaria italica
  Transcript Sequence Number=SeqID_57173
SYCYCKHFMCTTTEVKCREHAEAKHPKSDVYQCFPHLKK

SEQ ID NO: 123148 - protein, 66 aa, Setaria italica
  Transcript Sequence Number=SeqID_57174
  Pfam annotation: Domain name=DUF1909; Domain location=4-62; Score =59.0; E_value=1.8e-14; Accession=PF08927.2; Description=Domain of unknown function (DUF1909)
TTTEVKCREHAEAHGLLVGIKLAMSIQCKVCMQTFMCTTTEVKCREHAEAKHPKSDVYQCFPHLKK

SEQ ID NO: 123149 - protein, 70 aa, Setaria italica
  Transcript Sequence Number=SeqID_57175
  Pfam annotation: Domain name=DUF1909; Domain location=4-60; Score =84.6; E_value=3.5e-22; Accession=PF08927.2; Description=Domain of unknown function (DUF1909)
MGGGNGQKSRMARERNAEKNKAAKGSQLDTNKKAMSIQCKVCMQTFMCTTTEVKCREHAEVLSLISLKFL

SEQ ID NO: 123150 - protein, 42 aa, Setaria italica
  misc_feature (12)..(12): Xaa can be any naturally occurring amino acid
  Transcript Sequence Number=SeqID_57176
  Pfam annotation: Domain name=DUF1909; Domain location=1-42; Score =20.4; E_value=0.00041; Accession=PF08927.2; Description=Domain of unknown function (DUF1909)
NKKAMSIQCKYXYATFMCTTTEVKCREHAEAKHPKSDVYQCF

SEQ ID NO: 123151 - protein, 50 aa, Setaria italica
  Transcript Sequence Number=SeqID_57177
  Gene Ontology: Mol. function=protein serine/threonine kinase activity; Biological process=protein amino acid phosphorylation
  Homolog annotation: Hit_ID=Q33AH2; Match level="QueryCoverage=96%, HitCoverage=4%, E-value=2e-10, Identity=58%"; Hit description =Calcium binding EGF domain containing protein, expressed
  Pfam annotation: Domain name=EGF_CA; Domain location=1-42; Score =21.5; E_value=0.0014; Accession=PF07645.7; Description=Calcium binding EGF domain
DIDECKTTPGICKELLCNNTVGSYHCTECPDKTKYDTATMQCIKVKRQRG

SEQ ID NO: 123152 - protein, 52 aa, Setaria italica
  Transcript Sequence Number=SeqID_57178
VPQYGYLKFKILNIIAGRILWEQTRQEWTEIRSLRPKVKQVREPVLRYERIR

SEQ ID NO: 123153 - protein, 80 aa, Setaria italica
  misc_feature (15)..(15): Xaa can be any naturally occurring amino acid
  Transcript Sequence Number=SeqID_57179
  Gene Ontology: Mol. function=protein binding
  Homolog annotation: Hit_ID=B3TM33; Match level="QueryCoverage=92%, HitCoverage=42%, E-value=4e-11, Identity=39%"; Hit description =Holocarboxylase synthetase
RPEEEVEEEMHLAFXGAANALSQVYTHAVAHQKASFLAGERRAMENVYRWLSSQHEEASENEIEHRTEETLASPQHPGPQ

SEQ ID NO: 123154 - protein, 100 aa, Setaria italica
  Transcript Sequence Number=SeqID_57180
PKQDHDPTVTTVGGELLSADPFAQVVPCMPPVPHENNYSCTTKAGSWTMVPMYHLIYPELEFHHALRLLIQVNPGVSGSSDIYIPRQLFRTCSPGRLSWL

SEQ ID NO: 123155 - protein, 102 aa, Setaria italica
  Transcript Sequence Number=SeqID_57181
  Homolog annotation: Hit_ID=Q6YYY6; Match level="QueryCoverage=90%, HitCoverage=18%, E-value=7e-37, Identity=82%"; Hit description =Putative auxin-regulated protein
NKELKYNLVESISVKEHRGFGIIPTYRPRFTQVEFPSPVFSTPVALRHLDKIPCNARTIGMRAPESECFSGSLVETKKQDESGRGISALKRSSSYDEDRYSI

SEQ ID NO: 123156 - protein, 104 aa, Setaria italica
  misc_feature (85)..(85): Xaa can be any naturally occurring amino acid
  Transcript Sequence Number=SeqID_57182
  Gene Ontology: Mol. function=drug transporter activity; Cellular component=membrane; Biological process=multidrug transport
  Homolog annotation: Hit_ID=B9S6S4; Match level="QueryCoverage=95%, HitCoverage=22%, E-value=1e-19, Identity=49%"; Hit description=DNA -damage-inducible protein f, putative
KLPSYLLLVGLGNISAVVLLPFFVYSLKLGLTGAALATIASQYLGMFLLLWSLSRRAVLLPPKIEDLEFVGYIKSGGMLLGRTLXVLITMTLGTAMAARQGALA

SEQ ID NO: 123157 - protein, 48 aa, Setaria italica
  misc_feature (38)..(38): Xaa can be any naturally occurring amino acid
  Transcript Sequence Number=SeqID_57183
VKASGLLQTLYFIIHLCSDAAVVMLSGQLADGFTTIFXGELMDRFGHF

SEQ ID NO: 123158 - protein, 87 aa, Setaria italica
  Transcript Sequence Number=SeqID_57184
  Gene Ontology: Mol. function=sugar:hydrogen symporter activity
  Subcellular localization annotation: CTP_CleavageSite=48; ConfidenceScore=5.63e-01
TCNCSFISLLSLCLCLWFQHFIFSKRVAKGFNVSFAGVFFIFIRSMVNCMTSSPTSRVSLVSCRNAFTMVANLSLYGIALLIFTLLL

SEQ ID NO: 123159 - protein, 65 aa, Setaria italica
  Transcript Sequence Number=SeqID_57185
  Gene Ontology: Mol. function=sugar:hydrogen symporter activity
  Subcellular localization annotation: CTP_CleavageSite=18; ConfidenceScore=5.43e-01
SGNFKLWHAGGSILVAISFSSVFGSCVPCKLMGTNSSTLETVGYSTFASIQQSPNLWGLIHLTFG

SEQ ID NO: 123160 - protein, 64 aa, Setaria italica
  Transcript Sequence Number=SeqID_57186
LYILESYQGNTHITPNVGTAFGYSVTRLGLGLVPAACSLLSAIVAYTMDLPDTRRRPLVEPLLA

SEQ ID NO: 123161 - protein, 59 aa, Setaria italica
  Transcript Sequence Number=SeqID_57187
LSRQQIYLTEASDPAHLPCTGLEASKQRAIREESSRDHTKSGDQMTDAFKAGKKNDWTN

SEQ ID NO: 123162 - protein, 78 aa, Setaria italica
  Transcript Sequence Number=SeqID_57188
  Homolog annotation: Hit_ID=B6SWA1; Match level="QueryCoverage=94%, HitCoverage=15%, E-value=3e-21, Identity=74%"; Hit description=Dek protein
  Pfam annotation: Domain name=DEK_C; Domain location=1-45; Score=48.9; E_value=2e-11; Accession=PF08766.3; Description=DEK C terminal domain
VSILKEVDFNTATLADILRQLGTHFEMDLMDRKAEVKRIIEEVINSMSDDDDGEEASEDEAEDNGKEEKSKGDPDEEK

SEQ ID NO: 123163 - protein, 79 aa, Setaria italica
  Transcript Sequence Number=SeqID_57189
YYSQASYLSNKAIKRTAIVHDQQLGYRSLPSQAQQLGVYGCEMVNNLVLVGHQFVVMVRKLQKMKQKTMVRKRSQRVIL

SEQ ID NO: 123164 - protein, 75 aa, Setaria italica
  Transcript Sequence Number=SeqID_57190
LPKQQAIKRTAIVHDQQLGYRSLPSQAQQLGVYGCEMVNNLVLVGHQFVVMVPQLYRTNKIVLARSIQTTDITRD

SEQ ID NO: 123165 - protein, 57 aa, Setaria italica
  Transcript Sequence Number=SeqID_57191
  Gene Ontology: Mol. function=binding
  Homolog annotation: Hit_ID=B9RQE4; Match level="QueryCoverage=87%, HitCoverage=4%, E-value=8e-11, Identity=57%"; Hit description=DNA repair/transcription protein met18/mms19, putative
SAAGAFHVMMSDSEVCLNKKFHARIKPLYKQRFFSIMMPIFLSKIKEATSMTTRLRN

SEQ ID NO: 123166 - protein, 61 aa, Setaria italica
  Transcript Sequence Number=SeqID_57192
RWHCLSMKNQIPLVLYLIYCKDWHCLSMKNEGGNVLHWVPWSCLFTRRKHHSPVPLTEQVL

SEQ ID NO: 123167 - protein, 57 aa, Setaria italica
  Transcript Sequence Number=SeqID_57193
  Pfam annotation: Domain name=DUF581; Domain location=4-54; Score =67.2; E_value=5.9e-17; Accession=PF04570.6; Description=Protein of unknown function (DUF581)
SKDEVRTYNRRLLRPTQCNKQLGYGSDIFIYRGDKAFCSSECRYQEMLFDETVDNLR

SEQ ID NO: 123168 - protein, 67 aa, Setaria italica
  Transcript Sequence Number=SeqID_57194
  Pfam annotation: Domain name=DUF581; Domain location=14-64; Score =44.5; E_value=4.1e-10; Accession=PF04570.6; Description=Protein of unknown function (DUF581)
ESCGDVLVEKMDKGAGAGDGGFAAVASGFMSSCHACNKQLGYGSDIFIYRECRYQEMLFDETVDNLR

SEQ ID NO: 123169 - protein, 51 aa, Setaria italica
  Transcript Sequence Number=SeqID_57195
GRKGPALADGGFAAVASGFMSSCHACNKQLVSVIQDHHAFSSTNILFSFIV

SEQ ID NO: 123170 - protein, 51 aa, Setaria italica
  misc_feature (49)..(49): Xaa can be any naturally occurring amino acid
  Transcript Sequence Number=SeqID_57196
LQYYVSAVSVYATIFLISRGSIGLDKILNGFAIWITPMVLTQDPAEKKXLE

SEQ ID NO: 123171 - protein, 71 aa, Setaria italica
  misc_feature (33)..(33): Xaa can be any naturally occurring amino acid
  misc_feature (61)..(61): Xaa can be any naturally occurring amino acid
  Transcript Sequence Number=SeqID_57197
  Gene Ontology: Mol. function=metalloendopeptidase activity; Biological process=proteolysis
  Homolog annotation: Hit_ID=B6SU43; Match level="QueryCoverage=88%, HitCoverage=13%, E-value=2e-20, Identity=74%"; Hit description=O -sialoglycoprotein endopeptidase
QQPVILCCCICIGVMIAWTGIEHFVAGRFEDPXAADEPDDMQYELRPRWPLGEEYSEGRSXARSLKTARVH

SEQ ID NO: 123172 - protein, 39 aa, Setaria italica
  Transcript Sequence Number=SeqID_57198
WSVLFSFVCHIEVCPLIVVAVFTTLFLIISIFFTKRPSW

SEQ ID NO: 123173 - protein, 69 aa, Setaria italica
  Transcript Sequence Number=SeqID_57199
  Gene Ontology: Mol. function=metalloendopeptidase activity; Biological process=proteolysis
  Homolog annotation: Hit_ID=B6SU43; Match level="QueryCoverage=98%, HitCoverage=14%, E-value=7e-32, Identity=94%"; Hit description=O -sialoglycoprotein endopeptidase
YRLVNKDLDFPFLALLISGGHNLLVLAHSLGQYVQLGTTIDDAIGEAYDKSARWLGLDMRKGGGPALEE

SEQ ID NO: 123174 - protein, 76 aa, Setaria italica
  misc_feature (65)..(65): Xaa can be any naturally occurring amino acid
  Transcript Sequence Number=SeqID_57200
ITVYRRNKWWYNLLALLGLESIVPRRNEKSFADWWRKSYKKVGKAQRKGFNSTVILGAWMLWNHXRNKGVFDGAAP

SEQ ID NO: 123175 - protein, 51 aa, Setaria italica
  Transcript Sequence Number=SeqID_57201
TRQLGTVDLTITETTCPVCRYELPTDDPEYERRRARRRSISTAQLGGLMQM

SEQ ID NO: 123176 - protein, 49 aa, Setaria italica
  Transcript Sequence Number=SeqID_57202
VAPIICIYKCYDNCSYHSTPKNKQLNPEKSHLNSTAGWPDANVNKVDLW

SEQ ID NO: 123177 - protein, 66 aa, Setaria italica
  Transcript Sequence Number=SeqID_57203
NMPEQRDFIRFWWKEKLHNFIQLFDHYMEKKLTISFDHLSKSLPFPFRGIEPSSSTVDIKKAYRKA

SEQ ID NO: 123178 - protein, 62 aa, Setaria italica
  Transcript Sequence Number=SeqID_57204
NTLLGRNNCKENMSMPSEKVESIRSNLNRANLRFSSLGTGCQGKGGPIKCVYDIVSLCPLQF

SEQ ID NO: 123179 - protein, 96 aa, Setaria italica
  Transcript Sequence Number=SeqID_57205
LSFYSINCSSFLVVVLQDLHFCRPYQYHYPYEVLGVNASPVITDVSFWCSLGSGVESAEYMRQAFVCKGVVHISDVVHSVLEQFGFWNGINKTGIL

SEQ ID NO: 123180 - protein, 79 aa, Setaria italica
  Transcript Sequence Number=SeqID_57206
  Gene Ontology: Mol. function=binding
  Homolog annotation: Hit_ID=B6SU39; Match level="QueryCoverage=88%, HitCoverage=19%, E-value=1e-19, Identity=71%"; Hit description =Ubiquitin-protein ligase
  Pfam annotation: Domain name=Arm; Domain location=12-52; Score=33.5; E_value=8.6e-07; Accession=PF00514.15; Description=Armadillobeta -catenin-like repeat
ALLALLNLAVRDERNKTKIVDAGALEPLLGYLQSSDLNLQEYATAAVLTLSASSTNKPIISSSGAIPLLVKVLKEGNPQ

SEQ ID NO: 123181 - protein, 61 aa, Setaria italica
  Transcript Sequence Number=SeqID_57207
  Gene Ontology: Mol. function=oxidoreductase activity; Biological process=metabolic process
  Homolog annotation: Hit_ID=B6SSC2; Match level="QueryCoverage=72%, HitCoverage=8%, E-value=5e-16, Identity=93%"; Hit description =Oxidoreductase
  Subcellular localization annotation: CTP_CleavageSite=40; ConfidenceScore=5.60e-01
MSTEPSSLIAKFTNFFTSGGSSTPLTAVYGSTKCGLRQFQASLLKESRRSKVGVHTASPGM

SEQ ID NO: 123182 - protein, 88 aa, Setaria italica
  misc_feature (23)..(23): Xaa can be any naturally occurring amino acid
  Transcript Sequence Number=SeqID_57208
REEQRASQASAPPPPRPPPPPPXGPPPPHPPIQSPIADPRIASPRGNIWNPCHRSPHAAPASRFAKPPPPLPPSAAARADDQRPAGMG

SEQ ID NO: 123183 - protein, 47 aa, Setaria italica
  Transcript Sequence Number=SeqID_57209
  Homolog annotation: Hit_ID=Q5ZCG1; Match level="QueryCoverage=97%, HitCoverage=5%, E-value=7e-11, Identity=67%"; Hit description =Katanin p80 (WD40-containing) subunit B 1-like protein
CRLQRCTRCFNHLQKIQQVLHPLIMRGGQSAQLAQELSLSLQDLVVI

SEQ ID NO: 123184 - protein, 137 aa, Setaria italica
  Transcript Sequence Number=SeqID_57210
  Gene Ontology: Mol. function=nucleoside-triphosphatase activity; Biological process=proteolysis
  Homolog annotation: Hit_ID=Q8H6B2; Match level="QueryCoverage=96%, HitCoverage=11%, E-value=8e-70, Identity=93%"; Hit description =Bromodomain protein 103
  Pfam annotation: Domain name=Bromodomain; Domain location=81-137; Score=0.3; E_value=0.0022; Accession=PF00439.17; Description =Bromodomain
YLFDRYQVDQPSYDDRLRYFNILFESLLSFQTEESRNKSKKQKSAIDLPKAPKEVEGPKISELKAKAEAEQHAVRRMRMCLRDICNRILYNKRFNVFHFPVSEEEVPDYRSVIHKPMDMATVLQRVDSGQYLTRAAF

SEQ ID NO: 123185 - protein, 124 aa, Setaria italica
  Transcript Sequence Number=SeqID_57211
  Gene Ontology: Mol. function=nucleoside-triphosphatase activity; Biological process=proteolysis
  Homolog annotation: Hit_ID=Q8H6B2; Match level="QueryCoverage=91%, HitCoverage=9%, E-value=3e-50, Identity=84%"; Hit description =Bromodomain protein 103
SRCLFRQGAITDKIMERISDIFPFLSSVDVSKFSALSYGSSIPLVYRPRLLICGGESVGLDHVGPAVLHELEKFSVHSLGLPSLLSDPSAKTPEEALVHIFGEAKRTTPSILYLPQFHLWWDTA

SEQ ID NO: 123186 - protein, 93 aa, Setaria italica
  Transcript Sequence Number=SeqID_57212
  Gene Ontology: Mol. function=nucleoside-triphosphatase activity
  Homolog annotation: Hit_ID=Q8H6B2; Match level="QueryCoverage=89%, HitCoverage=6%, E-value=1e-25, Identity=72%"; Hit description =Bromodomain protein 103
LSYLVFLPCNPMETDSSEVATTLTTGDDLLGQLEALKQRFMELTAGYGVPQLERLYSRIMKGAIELTSKESNEDHRGLVVRYLLTFVENSDNF

SEQ ID NO: 123187 - protein, 97 aa, Setaria italica
  Transcript Sequence Number=SeqID_57213
  Gene Ontology: Mol. function=nucleoside-triphosphatase activity
  Homolog annotation: Hit_ID=Q8H6B2; Match level="QueryCoverage=85%, HitCoverage=6%, E-value=5e-11, Identity=50%"; Hit description =Bromodomain protein 103
SGHAKDAAARDERSPEDVDLSKPISPEEAPKEPDSNGTLKETDNSPAEAPEVPAPPEPMETDSSEVATTLTTGDDLLGQLEALKQRFMELTARTNRT

SEQ ID NO: 123188 - protein, 32 aa, Setaria italica
  Transcript Sequence Number=SeqID_57214
TGIEDRRYWNFIPNDESRCFHLLAIKISLVNF

SEQ ID NO: 123189 - protein, 40 aa, Setaria italica
  Transcript Sequence Number=SeqID_57215
  Homolog annotation: Hit_ID=B4FHK5; Match level="QueryCoverage=90%, HitCoverage=8%, E-value=5e-11, Identity=86%"; Hit description=NPL4 family protein
MLCPVQDFHLLLKIATFLDVKADVPTLAACVKTQSRVPEG

SEQ ID NO: 123190 - protein, 69 aa, Setaria italica
  Transcript Sequence Number=SeqID_57216
  Homolog annotation: Hit_ID=B6TV83; Match level="QueryCoverage=57%, HitCoverage=11%, E-value=9e-09, Identity=75%"; Hit description =Brassinazole-resistant 1 protein
EMANGIDGNPILPWLKTLSNGTPSKKHPLLPPLLIHGGFIRGVRADGELSGGVTGALMEPPWINSGGRS

SEQ ID NO: 123191 - protein, 64 aa, Setaria italica
  Transcript Sequence Number=SeqID_57217
SLLIFLQESVPLIRLGITFHIYLDGAPLFYGFSVCRKREGIQRSYRGPLEMISILFQGSELVLA

SEQ ID NO: 123192 - protein, 105 aa, Setaria italica
  Transcript Sequence Number=SeqID_57218
  Gene Ontology: Mol. function=nucleic acid binding; Cellular component= intracellular; Biological process=transport
  Homolog annotation: Hit_ID=B4FXN6; Match level="QueryCoverage=82%, HitCoverage=18%, E-value=5e-43, Identity=91%"; Hit description =UPF0737 protein 7
  Subcellular localization annotation: CTP_CleavageSite=55; ConfidenceScore=5.10e-01
MGSAIRPGIAPNVKFGGSGSYPDLPWVSTTGTGPNGRTISGVTYKFGRNEVKIVCACHGTHMSPEEFMRHANADAPAQENSETLPVYFPLFGKTKPKKQKKNLTK

SEQ ID NO: 123193 - protein, 46 aa, Setaria italica
  Transcript Sequence Number=SeqID_57219
SMFPPAISYRVTVKILPLSYPRYLLQDDGLNVKDYTIVWSMLSLVC

SEQ ID NO: 123194 - protein, 57 aa, Setaria italica
  Transcript Sequence Number=SeqID_57220
MQMLQPKKIVKLYQQKLLGCRQGMLKTNLPVSERMTNNCCPICVYITNSLHHYQFIS

SEQ ID NO: 123195 - protein, 55 aa, Setaria italica
  Transcript Sequence Number=SeqID_57221
VSPDMLTVSSAWHAYGLWPIISLQLQYYNRQYETTRYGIGTTTGTKRTQVRLRLD

SEQ ID NO: 123196 - protein, 82 aa, Setaria italica
  misc_feature (34)..(34): Xaa can be any naturally occurring amino acid
  Transcript Sequence Number=SeqID_57222
  Gene Ontology: Mol. function=protein transporter activity; Cellular component=nuclear pore; Biological process=protein import into nucleus, docking
  Homolog annotation: Hit_ID=Q9FJD4; Match level="QueryCoverage=91%, HitCoverage=8%, E-value=3e-29, Identity=84%"; Hit description =Importin beta
YGYVTGRDAGESRLRTAAYETLNEVVRCSTEETXPIVMQLVPVIMMELHQTLEAEKLSTDEREKRSELQGLLCGCLQVIIQK

SEQ ID NO: 123197 - protein, 100 aa, Setaria italica
  misc_feature (51)..(51): Xaa can be any naturally occurring amino acid
  misc_feature (81)..(81): Xaa can be any naturally occurring amino acid
  Transcript Sequence Number=SeqID_57223
  Gene Ontology: Mol. function=protein transporter activity; Cellular component=nuclear pore; Biological process=protein import into nucleus, docking
  Homolog annotation: Hit_ID=Q9FJD4; Match level="QueryCoverage=97%, HitCoverage=11%, E-value=1e-32, Identity=71%"; Hit description =Importin beta
KKGDNGESRLRTAAYETLNEVVRCSTEETAPIVMQLVPVIMMELHQTLEAXKLSTDEREKRSELQGLLCGCLQVIIQKVGXMESTKYSFLQYADHLICIL

SEQ ID NO: 123198 - protein, 84 aa, Setaria italica
  Transcript Sequence Number=SeqID_57224
PGNKLICTQGLHLYKQRAVPDRTGHKFCPEKKNSYKTGPRMKCKTMQVDKGEKNARRKKQANSNQQGGQVHYVKTYPPCWLLLA

SEQ ID NO: 123199 - protein, 59 aa, Setaria italica
  Transcript Sequence Number=SeqID_57225
  Gene Ontology: Mol. function=protein transporter activity; Cellular component=nuclear pore; Biological process=protein import into nucleus, docking
  Homolog annotation: Hit_ID=Q9FJD4; Match level="QueryCoverage=94%, HitCoverage=6%, E-value=8e-26, Identity=89%"; Hit description =Importin beta
MHCGANFAKYMPQFYQYLEMGLQNFEEYQVCAITVGVVGDLCRALEDKILPFCDGIMTQ

SEQ ID NO: 123200 - protein, 40 aa, Setaria italica
  Transcript Sequence Number=SeqID_57226
INIKWLHEQVQVITLTLLLHIWFSYFFSRYRRISNVLIIS

SEQ ID NO: 123201 - protein, 63 aa, Setaria italica
  Transcript Sequence Number=SeqID_57227
  Subcellular localization annotation: CTP_CleavageSite=43; ConfidenceScore=5.22e-01
CRRHRWAGSYGAAVSASLLAARGVAVTLFDSGRGAGGRMSQRRCSTKLTRCWCEGGITVLSLI

SEQ ID NO: 123202 - protein, 81 aa, Setaria italica
  Transcript Sequence Number=SeqID_57228
  Pfam annotation: Domain name=F-box; Domain location=33-80; Score =28.8; E_value=2.3e-05; Accession=PF00646.25; Description=F-box domain
MYTGTCRKRELQPASLQGHTSQDEQCLQVMGHFMLDRLPEDIVDNLFSYLPIEDAARAACVSRRYLRSWRRSRSQTHTDDR

SEQ ID NO: 123203 - protein, 42 aa, Setaria italica
  Transcript Sequence Number=SeqID_57229
SASLQGHTSQDEQCLQVMGHFMLDRLPEMLPVLPVSLVDIYV

SEQ ID NO: 123204 - protein, 53 aa, Setaria italica
  Transcript Sequence Number=SeqID_57230
QKKGSCCCCDAVSFCFHQPTALYELNWHLEWKRRRPRIRDAAAPRGTIDCLST

SEQ ID NO: 123205 - protein, 97 aa, Setaria italica
  Transcript Sequence Number=SeqID_57231
  Gene Ontology: Mol. function=RNA-directed RNA polymerase activity
  Homolog annotation: Hit_ID=B6DZR9; Match level="QueryCoverage=93%, HitCoverage=8%, E-value=2e-43, Identity=91%"; Hit description=RNA -directed RNA polymerase 6a (Fragment)
VYCLLSFESTHTVLEVVSWTKFQPGFLNRQIITLLSSLNVPDAIFSQMQEAMLSNLNNILSDTDVAFDVVTTSCAEQGNTAALMLSAGFSPGTEPHL

SEQ ID NO: 123206 - protein, 103 aa, Setaria italica
  misc_feature (17)..(17): Xaa can be any naturally occurring amino acid
  Transcript Sequence Number=SeqID_57232
  Gene Ontology: Mol. function=phosphoprotein phosphatase activity; Cellular component=chloroplast
  Homolog annotation: Hit_ID=B9R7R1; Match level="QueryCoverage=100%, HitCoverage=18%, E-value=5e-34, Identity=69%"; Hit description =Protein phosphatase 2c, putative
RDGRTVLRSPSQQHDFXFTYQLESGGGSDLPSSAQVFHFPVAPGDVIVAGTDGLFDNLYNNEISGVIVEALRVGLEPQIAAQKIAATRTTNKRRLTEQRNKDK

SEQ ID NO: 123207 - protein, 62 aa, Setaria italica
  Transcript Sequence Number=SeqID_57233
IQRTCFRDQGISPLLNLLRDYAPVHTRAISLGQDLCTLHPKECLHHAAQALFTYDTTTVISS

SEQ ID NO: 123208 - protein, 54 aa, Setaria italica
  Transcript Sequence Number=SeqID_57234
GIYCCNHVSVEAEEYLAGNPVLLDINPQRYEIFFCFNSISFNRNMITTIDAMNE

SEQ ID NO: 123209 - protein, 41 aa, Setaria italica
  Transcript Sequence Number=SeqID_57235
  Gene Ontology: Mol. function=binding
  Homolog annotation: Hit_ID=Q10D20; Match level="QueryCoverage=97%, HitCoverage=1%, E-value=2e-10, Identity=82%"; Hit description=WD-40 repeat family protein, putative, expressed
DPTQSRRLEIEGSVIHIMKALSSHQSAAPSLIEDDALQVLF

SEQ ID NO: 123210 - protein, 67 aa, Setaria italica
  Transcript Sequence Number=SeqID_57236
MATPTPLTVEDVLRVNGSRRFAAAMAAASPFTSLADALLAARRIWLNEVGRLLAFALASTPFLLEIL

SEQ ID NO: 123211 - protein, 80 aa, Setaria italica
  Transcript Sequence Number=SeqID_57237
  Gene Ontology: Mol. function=steroid binding; Cellular component =plasma membrane; Biological process=transport
  Homolog annotation: Hit_ID=B4FXD7; Match level="QueryCoverage=90%, HitCoverage=20%, E-value=4e-25, Identity=79%"; Hit description =Transthyretin
  Pfam annotation: Domain name=OHCU_decarbox; Domain location=1-79; Score=-15.0; E_value=0.00096; Accession=PF09349.2; Description=OHCU decarboxylase
SLLAFWFRWSKEEQSAAISTATDSTSQELAEWNAKYREKFGFVFMICASGRTAPEVLAELKRRYVNRPIVELEAAAQEEL

SEQ ID NO: 123212 - protein, 80 aa, Setaria italica
  misc_feature (71)..(71): Xaa can be any naturally occurring amino acid
  Transcript Sequence Number=SeqID_57238
  Gene Ontology: Mol. function=steroid binding; Cellular component =plasma membrane; Biological process=transport
  Homolog annotation: Hit_ID=B4FXD7; Match level="QueryCoverage=95%, HitCoverage=21%, E-value=4e-30, Identity=80%"; Hit description =Transthyretin
KITRIKDKQEYDNNGIIGAHLGALPQPCANKAPDITGSSNRSRPPITTHVLDVARGSPASGIEVHLEMWKXCSAPPSFSN

SEQ ID NO: 123213 - protein, 95 aa, Setaria italica
  Transcript Sequence Number=SeqID_57239
  Gene Ontology: Mol. function=protein serine/threonine kinase activity; Biological process=protein amino acid phosphorylation
  Homolog annotation: Hit_ID=Q6Z8Z4; Match level="QueryCoverage=97%, HitCoverage=15%, E-value=1e-19, Identity=51%"; Hit description =Putative receptor protein kinase PERK1
HCQQDEDGGTGSWNCTCASDKTLLKEEHAVLRDRSCFTSCNCTSGSSEEGKRHVSSKTVIITLLVCVVLTTTAFLVTTVYYFRRKESSSCENHTH

SEQ ID NO: 123214 - protein, 103 aa, Setaria italica
  misc_feature (23)..(23): Xaa can be any naturally occurring amino acid
  Transcript Sequence Number=SeqID_57240
  Gene Ontology: Mol. function=protein serine/threonine kinase activity
NVDRVDAQSLHDSEVTFKPVHDXYTQMKGAGNLGESRSVDVDTFSQCSSVYNIEKAGSSYSEDYSYSSSGPARKGSSPYAYSASPLVGLPELLLFANRFVASY

SEQ ID NO: 123215 - protein, 66 aa, Setaria italica
  Transcript Sequence Number=SeqID_57241
  Gene Ontology: Mol. function=protein serine/threonine kinase activity; Cellular component=plasma membrane; Biological process =protein amino acid phosphorylation
  Homolog annotation: Hit_ID=Q8W3E7; Match level="QueryCoverage=59%, HitCoverage=7%, E-value=1e-14, Identity=94%"; Hit description =Putative kinase
NNVGQAEKEFRVEVEAIGHVRHKNLVRLLGYCVEGIHRLAFHTFGTSFLLSSFTFVMEDHKSYKDQ

SEQ ID NO: 123216 - protein, 37 aa, Setaria italica
  Transcript Sequence Number=SeqID_57242
QPVMCIYALVKLQKEKCPTAKKRINSIVYFNMSNFGI

SEQ ID NO: 123217 - protein, 59 aa, Setaria italica
  misc_feature (15)..(15): Xaa can be any naturally occurring amino acid
  Transcript Sequence Number=SeqID_57243
TSAYSPSSCNNCDHXAFVDNRFGEVEISCDETRTCLGKWRVRQQRYGFSAQVVFYWYRS

SEQ ID NO: 123218 - protein, 117 aa, Setaria italica
  misc_feature (27)..(27): Xaa can be any naturally occurring amino acid
  Transcript Sequence Number=SeqID_57244
  Gene Ontology: Mol. function=protein tyrosine kinase activity; Biological process=protein amino acid phosphorylation
  Homolog annotation: Hit_ID=Q01IH7; Match level="QueryCoverage=100%, HitCoverage=15%, E-value=6e-41, Identity=71%"; Hit description =OSIGBa0159I10.8 protein
IAVVSLSVSVPYWNDYVELYFQKEARXTSSILTELTFLESYLIACSNSSGDEMARLSHENVAKMVGYCKESEPFSRMLVFQYPPNGTLYEHLHDGEGWQLSWPRRMKLALAIARALR

SEQ ID NO: 123219 - protein, 43 aa, Setaria italica
  Transcript Sequence Number=SeqID_57245
DLHANRLDGAIPPEVGKLGNLLELRLSNNRLTGIIPASNDSNM

SEQ ID NO: 123220 - protein, 86 aa, Setaria italica
  Transcript Sequence Number=SeqID_57246
  Gene Ontology: Mol. function=nucleic acid binding; Cellular component= nucleosome; Biological process=methylation-dependent chromatin silencing
  Homolog annotation: Hit_ID=Q8W121; Match level="QueryCoverage=75%, HitCoverage=8%, E-value=3e-27, Identity=87%"; Hit description =Chromatin complex subunit A101
ERMKEDVEQMLPRKKEIIIYANMTEHQKQIQDHLVEKTFDDYLHEESDIVLKRPGIRSKLHNLLIQTEGKKLDKPIPRILLGNTTV

SEQ ID NO: 123221 - protein, 100 aa, Setaria italica
  Transcript Sequence Number=SeqID_57247
  Gene Ontology: Mol. function=polynucleotide adenylyltransferase activity; Cellular component=nucleus; Biological process=RNA 3'-end processing
  Homolog annotation: Hit_ID=B6UBW8; Match level="QueryCoverage=83%, HitCoverage=15%, E-value=4e-38, Identity=87%"; Hit description=Poly
  Pfam annotation: Domain name=PAP_RNA-bind; Domain location=37-100; Score=-57.3; E_value=0.089; Accession=PF04926.7; Description=Poly(A) polymerase predicted RNA binding domain
MACMFSLSGRLILSHLFLPQDTRTTDFDWSWLFAPFPYGARYKCFLRIVLSAPMAEELRDWVGWVKSRFRNLILKLESLGVSVDPDPSEQVDHTINEPNV

SEQ ID NO: 123222 - protein, 67 aa, Setaria italica
  Transcript Sequence Number=SeqID_57248
  Gene Ontology: Mol. function=polynucleotide adenylyltransferase activity; Cellular component=nucleus; Biological process=RNA 3'-end processing
  Homolog annotation: Hit_ID=B6UBW8; Match level="QueryCoverage=74%, HitCoverage=9%, E-value=6e-21, Identity=92%"; Hit description=Poly
FDWSWLFAPFPYGARYKCFLRIVLSAPMAEELRDWVGWVKSRFRNLILKVYLFLSMCTFVLHISGLC

SEQ ID NO: 123223 - protein, 64 aa, Setaria italica
  Transcript Sequence Number=SeqID_57249
LYTNCYAVYMNIHVPAQASEVLAVFLDVGACSCLWHKERGSFFMELDVESWIFLQASSTKWVIR

SEQ ID NO: 123224 - protein, 106 aa, Setaria italica
  Transcript Sequence Number=SeqID_57250
  Gene Ontology: Mol. function=protein serine/threonine kinase activity; Biological process=protein amino acid phosphorylation
  Homolog annotation: Hit_ID=Q65X23; Match level="QueryCoverage=91%, HitCoverage=15%, E-value=5e-40, Identity=84%"; Hit description =Probable serine/threonine-protein kinase WNK2
QNIIQGCHERTGSMSDSHPNDNYGHDTVDPHASIGRSITVESQRKDLNTIFLKLRIADSTGHAQNIHFPFDIEADTSISVATEMVVQLDLTDQDVTAIAEMIDAEE

SEQ ID NO: 123225 - protein, 42 aa, Setaria italica
  Transcript Sequence Number=SeqID_57251
FRVSLLQKWKIKLITVRESRSEDGKTIGVDCNYAVVSTTPEQ

SEQ ID NO: 123226 - protein, 63 aa, Setaria italica
  Transcript Sequence Number=SeqID_57252
  Homolog annotation: Hit_ID=B6T2L1; Match level="QueryCoverage=61%, HitCoverage=13%, E-value=4e-13, Identity=92%"; Hit description =Membrane protein
AFTSIMAIFIIERVDDRAGAKSLAPLVIAGALSILYWRQVFSSVQIFFPFGIFPLLPPPPFFM

SEQ ID NO: 123227 - protein, 64 aa, Setaria italica
  Transcript Sequence Number=SeqID_57253
VEGTLAFRDRVDEFLPHLFLQASARRLVLKLKTRKLTCFQNKQNIAQTIRKDCRVRISMTTHTE

SEQ ID NO: 123228 - protein, 70 aa, Setaria italica
  misc_feature (36)..(36): Xaa can be any naturally occurring amino acid
  misc_feature (51)..(51): Xaa can be any naturally occurring amino acid
  Transcript Sequence Number=SeqID_57254
  Gene Ontology: Mol. function=ATP-dependent helicase activity; Cellular component=cytoplasm; Biological process=mRNA transport
  Homolog annotation: Hit_ID=B6SLS0; Match level="QueryCoverage=81%, HitCoverage=11%, E-value=1e-14, Identity=68%"; Hit description=ATP -dependent RNA helicase DBP5
PWFILTYCTIVLIKFGTRDEPDYEVYLHRIGRAGRXFGRKGAVFNMLCGEXDNVVMKKIENYFQHQVPEC

SEQ ID NO: 123229 - protein, 77 aa, Setaria italica
  Transcript Sequence Number=SeqID_57255
  Gene Ontology: Mol. function=carbohydrate binding; Biological process= carbohydrate metabolic process
  Homolog annotation: Hit_ID=A2Q5N9; Match level="QueryCoverage=76%, HitCoverage=16%, E-value=5e-13, Identity=62%"; Hit description =Galactose mutarotase-like
MAASSILPLHLPSGAHTAELSVRNGSSLQLRLGDGLVTSYRPKVYWKDDGCREVLHTVAEPGGDPAKVKGGVGLVLN

SEQ ID NO: 123230 - protein, 52 aa, Setaria italica
  Transcript Sequence Number=SeqID_57256
  Homolog annotation: Hit_ID=B6SL47; Match level="QueryCoverage=100%, HitCoverage=9%, E-value=3e-18, Identity=86%"; Hit description =Carboxyl-terminal proteinase
KTIKYVQSDAYEATGCYNALCPGFVQTSSRIAIGASISPVSSPGGAQYDMTL

SEQ ID NO: 123231 - protein, 109 aa, Setaria italica
  misc_feature (24)..(24): Xaa can be any naturally occurring amino acid
  Transcript Sequence Number=SeqID_57257
  Gene Ontology: Mol. function=binding; Cellular component=chloroplast; Biological process=nuclear mRNA splicing, via spliceosome
  Homolog annotation: Hit_ID=Q9FMF9; Match level="QueryCoverage=100%, HitCoverage=8%, E-value=1e-53, Identity=88%"; Hit description =Nuclear protein-like
LGVAGLGCEDALVHLLNYVWPKHXFETSPHVINAVMEAIEGMRVALGAAVILNYCLQGLFHPARKVREVYWKIYNSLYIGAQDALVAAYPALEDDGDNIFSRPELAMFV

SEQ ID NO: 123232 - protein, 38 aa, Setaria italica
  Transcript Sequence Number=SeqID_57258
  Gene Ontology: Mol. function=binding; Cellular component=chloroplast
  Homolog annotation: Hit_ID=Q9FMF9; Match level="QueryCoverage=100%, HitCoverage=2%, E-value=1e-10, Identity=78%"; Hit description =Nuclear protein-like
KIYNSLYIGAQDALVAAYPALEDDGDNIFSRPELAMFV

SEQ ID NO: 123233 - protein, 103 aa, Setaria italica
  Transcript Sequence Number=SeqID_57259
  Gene Ontology: Mol. function=protein serine/threonine kinase activity; Biological process=protein amino acid phosphorylation
  Homolog annotation: Hit_ID=Q8RVT2; Match level="QueryCoverage=96%, HitCoverage=20%, E-value=2e-13, Identity=34%"; Hit description =Protein kinase
  Pfam annotation: Domain name=EGF_CA; Domain location=19-61; Score =18.1; E_value=0.0029; Accession=PF07645.7; Description=Calcium binding EGF domain
GCSKGYEGNPYVTGGCKNINECKLGDFNACGSGSICHDLDGGFECKCKFWYRRDGRSGTSCQRIFSTTTIWTIIECELKKVTDGYKKVIGEGAFGKVYKGTIK

SEQ ID NO: 123234 - protein, 28 aa, Setaria italica
  Transcript Sequence Number=SeqID_57260
LRPRLQDSQEQCQFLCQIVSLYLSVTCL

SEQ ID NO: 123235 - protein, 125 aa, Setaria italica
  misc_feature (78)..(78): Xaa can be any naturally occurring amino acid
  misc_feature (119)..(119): Xaa can be any naturally occurring amino acid
  Transcript Sequence Number=SeqID_57261
  Gene Ontology: Mol. function=heat shock protein binding
  Homolog annotation: Hit_ID=Q2R254; Match level="QueryCoverage=99%, HitCoverage=11%, E-value=4e-13, Identity=40%"; Hit description=DnaJ domain containing protein, expressed
GFVPRLVAITSSERTPVFSQDPLFHFQLSYKRGSCEKTGNEKVGVPGGFLELDSASLPTDLDAAFPSVALDSYKSTNXMSVGLRTDSMNVGMDPGTEHIVLEKNHCEAHLPMENHKYTXFEQDTF

SEQ ID NO: 123236 - protein, 117 aa, Setaria italica
  misc_feature (26)..(26): Xaa can be any naturally occurring amino acid
  Transcript Sequence Number=SeqID_57262
TYLPLLYDFEELEGELNFLNRVVALXFHPSAISRTPITLGEIEVLGISLPWADMLNNSGRAPEFMELLHKKSSAHCDLGSKSFANSSGPVNDSLGSEGSYTKSHITKEGKCSLEHWA

SEQ ID NO: 123237 - protein, 95 aa, Setaria italica
  misc_feature (52)..(52): Xaa can be any naturally occurring amino acid
  Transcript Sequence Number=SeqID_57263
  Gene Ontology: Mol. function=protein binding
  Homolog annotation: Hit_ID=Q7XZU0; Match level="QueryCoverage=87%, HitCoverage=5%, E-value=6e-18, Identity=58%"; Hit description=SAC domain protein 9
RAPFLARYIWWRGTIPVMVGCRIKNAVSVEAEIYVADDPYNGSLQYYQRLSXRYGNKSSEANVSRQKKSGMVPIVCVNLLRYAEGKTEWLKSYAQ

SEQ ID NO: 123238 - protein, 64 aa, Setaria italica
  misc_feature (46)..(46): Xaa can be any naturally occurring amino acid
  Transcript Sequence Number=SeqID_57264
  Gene Ontology: Mol. function=protein binding
  Homolog annotation: Hit_ID=Q7XZU0; Match level="QueryCoverage=100%, HitCoverage=3%, E-value=1e-12, Identity=62%"; Hit description=SAC domain protein 9
EAEIYVADDPYNGSLQYYQRLSRRYGNKSSEENVSRQKKSGMVPIXVCVNLLRYAEGKTESVLV

SEQ ID NO: 123239 - protein, 33 aa, Setaria italica
  Transcript Sequence Number=SeqID_57265
RSPVRENSEERRAKIEQWNREREESKGESLQGG

SEQ ID NO: 123240 - protein, 81 aa, Setaria italica
  Transcript Sequence Number=SeqID_57266
  Gene Ontology: Mol. function=nucleic acid binding
  Homolog annotation: Hit_ID=Q9M9L2; Match level="QueryCoverage=95%, HitCoverage=9%, E-value=3e-12, Identity=45%"; Hit description =F10A16.15 protein
  Pfam annotation: Domain name=MULE; Domain location=1-79; Score=57.6; E_value=4.6e-14; Accession=PF10551.1; Description=MULE transposase domain
FDADDGVFPVAFNVVEDENYDSWGWFLMQLKMALQIHNYPCTDMTFLSSGQKGLDAAVSQVFEDSQHAFCLHHIMEEFKGE

SEQ ID NO: 123241 - protein, 78 aa, Setaria italica
  misc_feature (41)..(41): Xaa can be any naturally occurring amino acid
  Transcript Sequence Number=SeqID_57267
NEIDEVEKAFEALDGQMTKDSGGRLQKHVLMKRDNGDCGEXFLRSGKYWLYSSQPNQFEVPKKRPQPTEDADPHRHVL

SEQ ID NO: 123242 - protein, 130 aa, Setaria italica
  Transcript Sequence Number=SeqID_57268
  Gene Ontology: Mol. function=exonuclease activity; Cellular component= intracellular
  Homolog annotation: Hit_ID=B9SFZ8; Match level="QueryCoverage=93%, HitCoverage=25%, E-value=4e-32, Identity=52%"; Hit description =Exonuclease, putative
  Pfam annotation: Domain name=Exonuc_X-T; Domain location=21-130; Score=-20.3; E_value=0.097; Accession=PF00929.16; Description =Exonuclease
QEGWKVLRIGDVSSLVSSSAMLAIDCEMVLCHDGTEAVVRVCVVDNNLEVKLDTLVNPSKAITDYRTHITGVSKKDLEGVTSSLVDVQKSLKRILSKGKILIGHSLYRDLCGKVIDTAYIFKYANLPTTA

SEQ ID NO: 123243 - protein, 54 aa, Setaria italica
  Transcript Sequence Number=SeqID_57269
CNYSMCPLCLFEHASFFVCSVAVNSISTMFFSFAALKIDCSQVIDTAYIFKYAN

SEQ ID NO: 123244 - protein, 48 aa, Setaria italica
  Transcript Sequence Number=SeqID_57270
MAKRLAAAEKEVLVEVVRFTQKNGLKGSDGAWKDFLARNDRKFGASVS

SEQ ID NO: 123245 - protein, 31 aa, Setaria italica
  Transcript Sequence Number=SeqID_57271
YMDHDLTGLSDRPGMQFTIPQIKVKTIHICV

SEQ ID NO: 123246 - protein, 129 aa, Setaria italica
  misc_feature (112)..(112): Xaa can be any naturally occurring amino acid
  Transcript Sequence Number=SeqID_57272
  Gene Ontology: Mol. function=transition metal ion binding; Cellular component=endoplasmic reticulum membrane; Biological process =electron transport chain
  Homolog annotation: Hit_ID=B6TTI9; Match level="QueryCoverage=87%, HitCoverage=60%, E-value=1e-54, Identity=92%"; Hit description =Cytochrome b5
  Pfam annotation: Domain name=Cyt-b5; Domain location=3-73; Score =45.7; E_value=1.8e-10; Accession=PF00173.20; Description=Cytochrome b5-like HemeSteroid binding doma
FTLTLPLRLRYFVLVFIIGGKVYNVTKFLEDHPGGDDVLLSSTAKDATDDFEDVGHSTTARAMMDEYLVGEIDATTIPTKVKYMPPKQPHYNQDKTPEFIIKILQFLVPLAXILGLAVAVRIYTKSEST

SEQ ID NO: 123247 - protein, 93 aa, Setaria italica
  Transcript Sequence Number=SeqID_57273
  Gene Ontology: Mol. function=transition metal ion binding; Cellular component=endoplasmic reticulum membrane; Biological process =electron transport chain
  Homolog annotation: Hit_ID=B6TTI9; Match level="QueryCoverage=89%, HitCoverage=44%, E-value=5e-39, Identity=92%"; Hit description =Cytochrome b5
HPGGDDVLLSSTAKDATDDFEDVGHSTTARAMMDEYLVGEIDATTIPTKVKYMPPKQPHYNQDKTPEFIIKILQFLVPLTILGGFRLGIDPYS

SEQ ID NO: 123248 - protein, 98 aa, Setaria italica
  misc_feature (80)..(80): Xaa can be any naturally occurring amino acid
  misc_feature (93)..(93): Xaa can be any naturally occurring amino acid
  Transcript Sequence Number=SeqID_57274
HRKEGGLSGRRPPTPQSREEGETPGLGSCRAEEAKDDGEGRPGGAPRRRQGPLRQRFLRCVRARAASRLSSPNRARPPGXVHSGCFVSFLRFXVGARG

SEQ ID NO: 123249 - protein, 76 aa, Setaria italica
  Transcript Sequence Number=SeqID_57275
ELASSALHWCKRHPVPSYNVSPLGLGAIASPYSPSIPSECRTSFSSCLPLICYWYPSSPLSFLPFTYEKLFVGLVV

SEQ ID NO: 123250 - protein, 68 aa, Setaria italica
  Transcript Sequence Number=SeqID_57276
  Gene Ontology: Mol. function=peptidase activity; Biological process =lipid transport
  Pfam annotation: Domain name=Tryp_alpha_amyl; Domain location=3-68; Score=13.7; E_value=0.015; Accession=PF00234.14; Description =Protease inhibitorseed storageLTP f
RTRTELDDVTTLLSLGTTPLKSCCDSLREEQKGCLCVYARDPQYSGFLTTSTTVRNALAYCKVAYPSC

SEQ ID NO: 123251 - protein, 45 aa, Setaria italica
  Transcript Sequence Number=SeqID_57277
TNSLREEQKGCLCVYARDPQYSGFLTTSTTVRNALAYCKVAYPSC

SEQ ID NO: 123252 - protein, 95 aa, Setaria italica
  Transcript Sequence Number=SeqID_57278
  Subcellular localization annotation: CTP_CleavageSite=76; ConfidenceScore=5.04e-01
GSPIYSNPFVTSHKYVVVVVVYRCEANRTARTRTARRGRLAAWVGDLAVGERVADGAATACARSRRGASACTRATRSTAASSPPAPPSVVCGNGC

SEQ ID NO: 123253 - protein, 58 aa, Setaria italica
  misc_feature (51)..(51): Xaa can be any naturally occurring amino acid
  Transcript Sequence Number=SeqID_57279
  Gene Ontology: Mol. function=catalytic activity; Biological process =guanosine tetraphosphate metabolic process
  Homolog annotation: Hit_ID=Q67UU0; Match level="QueryCoverage=84%, HitCoverage=6%, E-value=2e-17, Identity=83%"; Hit description =Putative plastid (P)ppGpp synthase
RGSEAGLVVDPYLQHCVETAVHLAKIGATATVVSAGLLHDTIDDSFMDYDXFFRMFGA

SEQ ID NO: 123254 - protein, 51 aa, Setaria italica
  Transcript Sequence Number=SeqID_57280
  Gene Ontology: Mol. function=hydrolase activity, acting on glycosyl bonds; Cellular component=extracellular region; Biological process =carbohydrate metabolic process
  Homolog annotation: Hit_ID=P00693; Match level="QueryCoverage=100%, HitCoverage=11%, E-value=2e-14, Identity=78%"; Hit description=Alpha- amylase type A isozyme
  Pfam annotation: Domain name=Alpha-amyl_C2; Domain location=1-48; Score=90.7; E_value=5.1e-24; Accession=PF07821.4; Description=Alpha -amylase C-terminal beta-sheet dom
LEHDGDAYVAEIDGKVIMKIGSRLDVGHLIPAGFEVAAHGNDYAVWENGAA

SEQ ID NO: 123255 - protein, 62 aa, Setaria italica
  Transcript Sequence Number=SeqID_57281
  Gene Ontology: Mol. function=hydrolase activity, acting on glycosyl bonds; Cellular component=extracellular region; Biological process =carbohydrate metabolic process
  Homolog annotation: Hit_ID=Q4U1I7; Match level="QueryCoverage=98%, HitCoverage=41%, E-value=2e-24, Identity=77%"; Hit description=Alpha- amylase (Fragment)
AVTFVDNHDTGSTQAVWPFPSDKVMQGYAYILTHPGNPCIDEIAALMAVRKRNGITATSELT

SEQ ID NO: 123256 - protein, 66 aa, Setaria italica
  Transcript Sequence Number=SeqID_57282
NFVQQTYNPLIGGIKDHDYKNGKTVPEQLYITFEMARHDHFIHRTICTMMLYLYMPQRSNIQCLNT

SEQ ID NO: 123257 - protein, 42 aa, Setaria italica
  Transcript Sequence Number=SeqID_57283
MTILFTEQYVLDEVEIRQLLIDHVGHRCCWGSRPARTWKITS

SEQ ID NO: 123258 - protein, 111 aa, Setaria italica
  Transcript Sequence Number=SeqID_57284
  Gene Ontology: Mol. function=nucleoside-triphosphatase activity
  Homolog annotation: Hit_ID=Q7XI12; Match level="QueryCoverage=99%, HitCoverage=15%, E-value=4e-34, Identity=72%"; Hit description =ATPase-like protein
DTIRDDFAPSKDKQKDKSMPRMELGDDLLYKETKGKKSAPGKSLVRVYTYQISEADILQVATVMGFDDELDVTDDIGAADVILASSSEMKQNPWIHNVAKYHKLPIFVVKV

SEQ ID NO: 123259 - protein, 72 aa, Setaria italica
  Transcript Sequence Number=SeqID_57285
  Gene Ontology: Mol. function=nucleoside-triphosphatase activity
  Homolog annotation: Hit_ID=Q7XI12; Match level="QueryCoverage=84%, HitCoverage=8%, E-value=2e-26, Identity=95%"; Hit description=ATPase- like protein
RVYTYQISEADILQVATVMGFDDELDVTDDIGAADVILASSSEMKQNPWIHNVAKYHKLPIFDGELSLPTII

SEQ ID NO: 123260 - protein, 55 aa, Setaria italica
  Transcript Sequence Number=SeqID_57286
  Gene Ontology: Mol. function=nucleoside-triphosphatase activity
  Homolog annotation: Hit_ID=Q7XI12; Match level="QueryCoverage=90%, HitCoverage=7%, E-value=1e-16, Identity=84%"; Hit description=ATPase- like protein
MVLAAIASSSEMKQNPWIHNVAKYHKLPIFVVKSNTMAQIVKAVRMIVGRDNSPS

SEQ ID NO: 123261 - protein, 74 aa, Setaria italica
  Transcript Sequence Number=SeqID_57287
  Homolog annotation: Hit_ID=B4FWG7; Match level="QueryCoverage=51%, HitCoverage=9%, E-value=5e-09, Identity=86%"; Hit description=AT -hook protein 1
  Subcellular localization annotation: CTP_CleavageSite=64; ConfidenceScore=5.13e-01
TGVAAMSIPATPVQVVVASFIAEGKKSKPAEARKVEPMSAPPPQMPTFVPPPVATSPPSEGTSSASSDDSGSPI

SEQ ID NO: 123262 - protein, 80 aa, Setaria italica
  Transcript Sequence Number=SeqID_57288
  Gene Ontology: Mol. function=transposase activity; Biological process= transposition, DNA-mediated
  Homolog annotation: Hit_ID=Q7FA01; Match level="QueryCoverage=56%, HitCoverage=6%, E-value=9e-13, Identity=75%"; Hit description =OSJNBa0079C19.15 protein
MMMMSQRVKSSSTDEDEVNRNALGQLELVHQFGAVACIFGSVHDMRVFNDAINKYGDKFPHPPQGKFYLVDSGYPNRTGV

SEQ ID NO: 123263 - protein, 56 aa, Setaria italica
  Transcript Sequence Number=SeqID_57289
MRDQDFDMCDQDEEYMPMPTTAASQASGATNLLGDEDIDMNAFRDAIANALFHNEE

SEQ ID NO: 123264 - protein, 135 aa, Setaria italica
  misc_feature (116)..(116): Xaa can be any naturally occurring amino acid
  Transcript Sequence Number=SeqID_57290
  Gene Ontology: Mol. function=transposase activity; Biological process= transposition, DNA-mediated
  Homolog annotation: Hit_ID=Q7FA01; Match level="QueryCoverage=99%, HitCoverage=18%, E-value=2e-53, Identity=73%"; Hit description =OSJNBa0079C19.15 protein
AENRFERSIETVSRKFEQVLDSVFRLSADVIKPRDPHFRTVHPRLRNPRFSPHFDNCIGAIDGTHIPVVVPSSKVLQHVGRHGYSSQNVLAICDFDMRFTFAVAGWPGSVHDMRVXFNDAINKYGDKFPHPPQGK

SEQ ID NO: 123265 - protein, 94 aa, Setaria italica
  Transcript Sequence Number=SeqID_57291
  Gene Ontology: Mol. function=transposase activity; Biological process= transposition, DNA-mediated
  Homolog annotation: Hit_ID=Q7FA01; Match level="QueryCoverage=68%, HitCoverage=8%, E-value=2e-12, Identity=50%"; Hit description =OSJNBa0079C19.15 protein
MTYSSSDDDDESASKSSSTDEDEVNRNALGQLELVHQFGAVACIFGMYYESAFMNKTKKVKTGLSGYEWVMTTLSNPTACYDMFRMSRELFWRL

SEQ ID NO: 123266 - protein, 76 aa, Setaria italica
  Transcript Sequence Number=SeqID_57292
PRPAGGQSSGATPSGADDAFDVGLQNPSTSTWSLNPSNEEADDLQDIDASTDDLFDKADWANSANNAAFLLSFCCL

SEQ ID NO: 123267 - protein, 69 aa, Setaria italica
  misc_feature (40)..(40): Xaa can be any naturally occurring amino acid
  Transcript Sequence Number=SeqID_57293
  Gene Ontology: Mol. function=transposase activity; Biological process= transposition, DNA-mediated
  Homolog annotation: Hit_ID=Q10N80; Match level="QueryCoverage=82%, HitCoverage=18%, E-value=4e-14, Identity=61%"; Hit description =Transposon protein, putative, CACTA, En/Spm sub-class
MANSASLTTSAISFGVLKMKWRMLLDLPSYPLNKQSKIIXASMALHNFIRESNMRDQDFGMYSSSWSHI

SEQ ID NO: 123268 - protein, 64 aa, Setaria italica
  misc_feature (20)..(20): Xaa can be any naturally occurring amino acid
  misc_feature (37)..(37): Xaa can be any naturally occurring amino acid
  Transcript Sequence Number=SeqID_57294
  Gene Ontology: Mol. function=voltage-gated potassium channel activity; Cellular component=integral to membrane; Biological process=ion transport
  Homolog annotation: Hit_ID=Q9LM04; Match level="QueryCoverage=98%, HitCoverage=8%, E-value=9e-17, Identity=60%"; Hit description=Cyclic nucleotide-gated calmodulin-binding ion channel
SSRSAGVITETARAGAAFNXFTYMLASHVLGAIWYLXFSIQRQESCWRQECRNNATCDAKYIYC

SEQ ID NO: 123269 - protein, 67 aa, Setaria italica
  Transcript Sequence Number=SeqID_57295
MAVCIVTELQCNLKAIFQLLQVLGAIWYLLSIQRQESCWRQECRNNATCDAKYIYCGAVNNNEKMLF

SEQ ID NO: 123270 - protein, 128 aa, Setaria italica
  misc_feature (93)..(93): Xaa can be any naturally occurring amino acid
  misc_feature (121)..(121): Xaa can be any naturally occurring amino acid
  Transcript Sequence Number=SeqID_57296
  Gene Ontology: Mol. function=transferase activity, transferring glycosyl groups; Cellular component=integral to membrane
  Homolog annotation: Hit_ID=B6SS28; Match level="QueryCoverage=100%, HitCoverage=21%, E-value=3e-69, Identity=94%"; Hit description =Xyloglucan galactosyltransferase KATAMARI 1
  Pfam annotation: Domain name=Exostosin; Domain location=1-127; Score=- 39.4; E_value=0.00044; Accession=PF03016.7; Description=Exostosin family
WNSNDFGIPYPTYFHPAKDADVFLWQDRMRSLERPWLFSFAGAPRPGDPMSIRGQLIDQCRSSSVCKLLECDLGESKCHSPSTVMKMFQSSLXCLQPQGDSYTRRSAFDSMLAGCIPVFFXPGSAYVQ

SEQ ID NO: 123271 - protein, 93 aa, Setaria italica
  Transcript Sequence Number=SeqID_57297
LIKYKMIISRSSQLLLLLLLILLAPASTCAAAANATRSAKQQQHRPNADDKPHQAAALIRLRTNYQYVGTPDKQTNGQYKQPIQYKGQELTRP

SEQ ID NO: 123272 - protein, 45 aa, Setaria italica
  Transcript Sequence Number=SeqID_57298
PYDYSVAVNSRYFLFLIYFIKCLAFQIKYCVGSSFLNNQSYCWSC

SEQ ID NO: 123273 - protein, 51 aa, Setaria italica
  Transcript Sequence Number=SeqID_57299
EGFFPCVCRNSSPVIVVHIAKKAFFHVFVYHASSVEPQFKHNSYTTQNLIS

SEQ ID NO: 123274 - protein, 76 aa, Setaria italica
  Transcript Sequence Number=SeqID_57300
  Gene Ontology: Mol. function=phosphoprotein phosphatase activity; Cellular component=nucleus
  Homolog annotation: Hit_ID=Q60EX6; Match level="QueryCoverage=97%, HitCoverage=8%, E-value=3e-16, Identity=62%"; Hit description =Serine/threonine protein phosphatase BSL1 homolog
INCGTANNAGAILVVGRGLVVVPKLIHPLPPPVNSPESSPERGDATWMQELNIQRPPTPTRGRPQAAGDRNSLAYI

SEQ ID NO: 123275 - protein, 82 aa, Setaria italica
  Transcript Sequence Number=SeqID_57301
FFFFFFVYLTQEQFEHFIKEENERTLLLPVNYTSPRSQLQMDPPNEIQYPKQETTLPVDPILSRREALIDEPPEPILIKHFP

SEQ ID NO: 123276 - protein, 125 aa, Setaria italica
  Transcript Sequence Number=SeqID_57302
  Gene Ontology: Mol. function=hydrolase activity, hydrolyzing O -glycosyl compounds; Cellular component=cell wall; Biological process= carbohydrate metabolic process
  Homolog annotation: Hit_ID=Q8W012; Match level="QueryCoverage=96%, HitCoverage=15%, E-value=3e-58, Identity=90%"; Hit description=Alpha- L-arabinofuranosidase/beta-D-xylosidase isoenzyme ARA-I
PGHHHNFITLMRLGFFDGDPRKLPFGSLGPSDVCTSSNQELAREAARQGIVLLKNSGALPLSAKNIKSMAIIGPNANASFTMIGNYEGTPCKYTTPLQGLGANVATVYQPGCTNVACSGNSLQLD

SEQ ID NO: 123277 - protein, 125 aa, Setaria italica
  misc_feature (28)..(28): Xaa can be any naturally occurring amino acid
  misc_feature (67)..(67): Xaa can be any naturally occurring amino acid
  misc_feature (89)..(89): Xaa can be any naturally occurring amino acid
  misc_feature (102)..(102): Xaa can be any naturally occurring amino acid
  Transcript Sequence Number=SeqID_57303
  Gene Ontology: Mol. function=hydrolase activity, hydrolyzing O -glycosyl compounds; Cellular component=cell wall; Biological process= carbohydrate metabolic process
  Homolog annotation: Hit_ID=Q8W012; Match level="QueryCoverage=82%, HitCoverage=13%, E-value=6e-43, Identity=85%"; Hit description=Alpha- L-arabinofuranosidase/beta-D-xylosidase isoenzyme ARA-I
GGGAQDRRGGGRGGRRGRARAMHNVGLXGLTFWSPNINIFRDPPVGRGQETPGEDPLLTSKYAVGYXVTGLQDAGSGAGGDSLKVAACXCKHYTAYDVDNWXGVERYTFNAVVSQQDLDDTFQPR

SEQ ID NO: 123278 - protein, 82 aa, Setaria italica
  misc_feature (73)..(73): Xaa can be any naturally occurring amino acid
  Transcript Sequence Number=SeqID_57304
  Subcellular localization annotation: CTP_CleavageSite=61; ConfidenceScore=5.11e-01
VVAPSGMLGRLVGCCPSDLVRQVYPSKSSAPNLPGFTQPTVCQLRGQSYYVEVALGFPAASADRVSESEQITXKKGMDSVKD

SEQ ID NO: 123279 - protein, 119 aa, Setaria italica
  misc_feature (29)..(29): Xaa can be any naturally occurring amino acid
  misc_feature (77)..(77): Xaa can be any naturally occurring amino acid
  Transcript Sequence Number=SeqID_57305
  Gene Ontology: Mol. function=nucleoside-triphosphatase activity; Cellular component=nucleus
MKCLCGPFSLDLDAVHSTVPKMLPWEFPXKLSETVYMEVDKTILVAEEKKKQMEASYLEGLQLQVIAPSVKGRSSSXTRKAKKSKLKRGQAAERNDISPCKNDLDDFHDLPDIPLPSDQ

SEQ ID NO: 123280 - protein, 70 aa, Setaria italica
  Transcript Sequence Number=SeqID_57306
ADHGATIQLPSVSYPLLHSLLEYIYTGSTQVIKLLSFCILHSALSINTTYQSLDTGKPSFPCLSRLLNVY

SEQ ID NO: 123281 - protein, 63 aa, Setaria italica
  Transcript Sequence Number=SeqID_57307
  Gene Ontology: Mol. function=aspartic-type endopeptidase activity; Biological process=DNA integration
  Homolog annotation: Hit_ID=Q2QMW4; Match level="QueryCoverage=100%, HitCoverage=3%, E-value=1e-22, Identity=82%"; Hit description =Retrotransposon protein, putative, Ty1-copia subclass
PSVFSVFQSTITWWLDTGANVHVCADASLFSSYKVTRDSSVLMGNGSHASVHDVGTVDLKFTS

SEQ ID NO: 123282 - protein, 88 aa, Setaria italica
  Transcript Sequence Number=SeqID_57308
ASDRRHGHASSKLQRLFGGLGQVKPEKGGENPFQHIFPVESKKKKVAIRSQHGTQMERCHPTDLSNPRSKQEPFLEDLTATLIINSGG

SEQ ID NO: 123283 - protein, 70 aa, Setaria italica
  Transcript Sequence Number=SeqID_57309
PKTRPCFFQTPKALRRSRTSQGHKILAGHHQSITPEGQSFQVKSCVPLPLPDAAGCIGEKQLELTSDLVA

SEQ ID NO: 123284 - protein, 130 aa, Setaria italica
  misc_feature (13)..(13): Xaa can be any naturally occurring amino acid
  Transcript Sequence Number=SeqID_57310
  Gene Ontology: Mol. function=protein kinase activity; Cellular component=integral to membrane; Biological process=protein amino acid phosphorylation
  Homolog annotation: Hit_ID=B9T6G8; Match level="QueryCoverage=93%, HitCoverage=19%, E-value=3e-45, Identity=68%"; Hit description =Nodulation receptor kinase, putative
  Pfam annotation: Domain name=Pkinase; Domain location=1-130; Score= -101.7; E_value=0.019; Accession=PF00069.17; Description=Protein kinase domain
  Pfam annotation: Domain name=Pkinase_Tyr; Domain location=1-130; Score=-142.8; E_value=0.00031; Accession=PF07714.9; Description =Protein tyrosine kinase
  Pfam module annotation: Pfam domain module=Pkinase::Pkinase_Tyr; Domain location=1-130::1-130
LVFDYVPSGSLAXVLHGNKSAGRAPLDWETRVKISLDVARGIAHLHAEGGGKFIHGNIKASNVLLSQNQDGCVSEFGLAQLMTTPQAAPRLVGYRAPEVLETKKSTQKSDVYSFGVLLLEMLNLVKVPFF

SEQ ID NO: 123285 - protein, 107 aa, Setaria italica
  misc_feature (36)..(36): Xaa can be any naturally occurring amino acid
  Transcript Sequence Number=SeqID_57311
  Gene Ontology: Mol. function=protein kinase activity; Cellular component=integral to membrane; Biological process=protein amino acid phosphorylation
  Homolog annotation: Hit_ID=B9T6G8; Match level="QueryCoverage=83%, HitCoverage=13%, E-value=8e-21, Identity=55%"; Hit description =Nodulation receptor kinase, putative
SAGRAPLDWETRVKISLDVARGIAHLHAEGGGKFIXNGNIKASNVLLSQNQDGCVSEFGLAQLMTTPQAAPRLVGYRAPEVLETKKSTQKFRTFLLSSFGLFLLFFP

SEQ ID NO: 123286 - protein, 63 aa, Setaria italica
  Transcript Sequence Number=SeqID_57312
  Gene Ontology: Mol. function=hydrolase activity, acting on glycosyl bonds; Biological process=cell wall organization and biogenesis
RPGESRMWEDWELPFYVTSFLTVVILGVGLNAKPDLTIETWAHQKALERLQQQELAAAEAHAE

SEQ ID NO: 123287 - protein, 114 aa, Setaria italica
  Transcript Sequence Number=SeqID_57313
  Gene Ontology: Mol. function=histone-lysine N-methyltransferase activity; Cellular component=nucleus; Biological process=chromatin modification
  Homolog annotation: Hit_ID=B9S7M5; Match level="QueryCoverage=89%, HitCoverage=16%, E-value=3e-34, Identity=64%"; Hit description=Set domain protein, putative
DKLDLVLAPIPCACARETGGEFAYTPGGLVKTTFLYECFSMNLFPEKHHKFFCKPLERPRNEALPEPSRRHLVRKVIRECWSKCGCNMQCGNRVVQRGIACNLQVTSNASVNLC

SEQ ID NO: 123288 - protein, 97 aa, Setaria italica
  misc_feature (81)..(81): Xaa can be any naturally occurring amino acid
  Transcript Sequence Number=SeqID_57314
  Gene Ontology: Mol. function=kinase activity
MWNEAMAPDGGSSTFRGLYGNIHTPAVVTGAAFAVVALLISLWLILQHLRSYNNPAEQKWIIAVLFMVPVYASESFSILFXIISLWNSKFSLACDIL

SEQ ID NO: 123289 - protein, 73 aa, Setaria italica
  Transcript Sequence Number=SeqID_57315
  Homolog annotation: Hit_ID=Q10JU8; Match level="QueryCoverage=64%, HitCoverage=9%, E-value=5e-16, Identity=85%"; Hit description=Von Willebrand factor type A domain containing protein, expressed
MFLTFKLFFSNQVDSEYIPDISAKYPLCVSGRYHGKLPETLIAKGHLADMSEISIEIRKVPNNSKRNNNLLRT

SEQ ID NO: 123290 - protein, 44 aa, Setaria italica
  Transcript Sequence Number=SeqID_57316
  Homolog annotation: Hit_ID=Q10JU9; Match level="QueryCoverage=100%, HitCoverage=5%, E-value=4e-11, Identity=72%"; Hit description=Von Willebrand factor type A domain containing protein, expressed
GSILGAEVTVGKRSYNTHVIDTEDNSAVKISLPENGGLLKQEWF

SEQ ID NO: 123291 - protein, 127 aa, Setaria italica
  Transcript Sequence Number=SeqID_57317
  Gene Ontology: Mol. function=kinase activity
  Homolog annotation: Hit_ID=O49309; Match level="QueryCoverage=77%, HitCoverage=26%, E-value=2e-14, Identity=46%"; Hit description =T26J12.15 protein
  Pfam annotation: Domain name=DUF300; Domain location=1-127; Score= -154.5; E_value=0.06; Accession=PF03619.8; Description=Domain of unknown function
CFHFGYPLFLILQGTDTVTRIGIPFQFFDSFQIISLWNSKFSLACDILRNCYEAFALYAFGRYLVACLGGERQVFRLLENRKREELSERLLESQDKTQAHNQSRVWNFFRDPNAMGESLYTIINYSH

SEQ ID NO: 123292 - protein, 60 aa, Setaria italica
  Transcript Sequence Number=SeqID_57318
  Homolog annotation: Hit_ID=Q10JU9; Match level="QueryCoverage=96%, HitCoverage=7%, E-value=2e-15, Identity=68%"; Hit description=Von Willebrand factor type A domain containing protein, expressed
NRKGHYAAAFDTGSIEGRMVQWFQKASSTVVSNISIDAIKHIQDFEVSYFSVLSRFCWCP

SEQ ID NO: 123293 - protein, 33 aa, Setaria italica
  Transcript Sequence Number=SeqID_57319
GHLADMSEISIELKVQHVKDIPLDKVRYPILFI

SEQ ID NO: 123294 - protein, 42 aa, Setaria italica
  misc_feature (14)..(14): Xaa can be any naturally occurring amino acid
  Transcript Sequence Number=SeqID_57320
  Homolog annotation: Hit_ID=Q10JU9; Match level="QueryCoverage=90%, HitCoverage=5%, E-value=2e-10, Identity=76%"; Hit description=Von Willebrand factor type A domain containing protein, expressed
MAFLTLSDLIQGDXFNIIAFNDELHSFSSCLEQVNDKTMKVL

SEQ ID NO: 123295 - protein, 76 aa, Setaria italica
  Transcript Sequence Number=SeqID_57321
  Subcellular localization annotation: CTP_CleavageSite=41; ConfidenceScore=5.59e-01
SGHTKANHPSTLSSSLNAGKTGGQTIIKGLISKKRPSRTLNSSYTFSLLLFRCICMRTALDLSHRNTTSCCHLERR

SEQ ID NO: 123296 - protein, 54 aa, Setaria italica
  Transcript Sequence Number=SeqID_57322
ADDLPECMKHALGKILDSYETMDNELAQEEKYRMPLSEKLRKLHFFYFYLTYIS

SEQ ID NO: 123297 - protein, 75 aa, Setaria italica
  Transcript Sequence Number=SeqID_57323
  Homolog annotation: Hit_ID=UPI0000162DB7; Match level="QueryCoverage =98%, HitCoverage=3%, E-value=7e-20, Identity=66%"; Hit description =tRNA-splicing endonuclease positive effector-related
HAALAKQLEKDSQTECPGTTERFAKGRALICAQSNAAVDELVSRLSEGLYGTDGNMYRPYIVRVGNAKTVHSNSL

SEQ ID NO: 123298 - protein, 69 aa, Setaria italica
  misc_feature (12)..(12): Xaa can be any naturally occurring amino acid
  Transcript Sequence Number=SeqID_57324
  Gene Ontology: Mol. function=hydrogen ion transporting ATPase activity, rotational mechanism; Cellular component=proton -transporting two-sector ATPase complex; Biological process=proton transport
  Homolog annotation: Hit_ID=A6N1K4; Match level="QueryCoverage=88%, HitCoverage=38%, E-value=4e-22, Identity=85%"; Hit description =Vacuolar proton-translocating atpase subunit e (Fragment)
VDHDVYLPPAPXSHHDAHGQFCYGGVVLASRDGKIVYESTLDARLEVVFRKKLPEIRKLLFWPERSLID

SEQ ID NO: 123299 - protein, 111 aa, Setaria italica
  Transcript Sequence Number=SeqID_57325
  Gene Ontology: Mol. function=hydrogen ion transporting ATPase activity, rotational mechanism; Cellular component=proton -transporting two-sector ATPase complex; Biological process=proton transport
  Homolog annotation: Hit_ID=A6N1K4; Match level="QueryCoverage=100%, HitCoverage=71%, E-value=2e-49, Identity=87%"; Hit description =Vacuolar proton-translocating atpase subunit e (Fragment)
  Pfam annotation: Domain name=vATP-synt_E; Domain location=1-106; Score=11.7; E_value=2e-07; Accession=PF01991.10; Description=ATP synthase (E31 kDa) subunit
QGLLRLKEPAVLLRCRKEDHHHVESVLHSAKHEYASKADVHQPEIHVDHDVYLPPAPSHHDAHGQFCYGGVVLASRDGKIVYESTLDARLEVVFRKKLPEIRKLLFGQNAA

SEQ ID NO: 123300 - protein, 129 aa, Setaria italica
  misc_feature (9)..(9): Xaa can be any naturally occurring amino acid
  misc_feature (93)..(93): Xaa can be any naturally occurring amino acid
  Transcript Sequence Number=SeqID_57326
  Gene Ontology: Mol. function=oxidoreductase activity, acting on the CH-CH group of donors; Cellular component=glyoxysome; Biological process=metabolic process
  Homolog annotation: Hit_ID=B6TNB5; Match level="QueryCoverage=100%, HitCoverage=23%, E-value=1e-46, Identity=73%"; Hit description =Glutaryl-CoA dehydrogenase
KATKIENKXIGLRMVQNGDIVFNKVFVPEEDRLPGVNSFQDISKVLAISRIMVAWQPIGISMGVFDMCHRYGPLYHFTLLLPLAITLQFRQNXTRYLKERKQFGVPLTAFQLNQEKLVRMLGNIQSMLL

SEQ ID NO: 123301 - protein, 60 aa, Setaria italica
  Transcript Sequence Number=SeqID_57327
  Gene Ontology: Mol. function=molecular_function; Cellular component =membrane; Biological process=auxin mediated signaling pathway
  Homolog annotation: Hit_ID=B6TLA9; Match level="QueryCoverage=68%, HitCoverage=10%, E-value=2e-14, Identity=90%"; Hit description =Nodulin-like protein 5NG4
MARDDTLRGHGAGAAAGVAPERARLHVAMLSLQFGYAGFHVVSRLALNMGVSKLVFPVYR

SEQ ID NO: 123302 - protein, 47 aa, Setaria italica
  Transcript Sequence Number=SeqID_57328
  Gene Ontology: Mol. function=receptor activity; Cellular component =integral to membrane
  Homolog annotation: Hit_ID=B6T7B7; Match level="QueryCoverage=100%, HitCoverage=18%, E-value=5e-16, Identity=93%"; Hit description =Transmembrane BAX inhibitor motif-containing protein 4
SKVILESAILTTVVVLSLTAYTFWAVRRGKDFSFLGPFLFASLIVLL

SEQ ID NO: 123303 - protein, 88 aa, Setaria italica
  Transcript Sequence Number=SeqID_57329
MRTWRAVVAVDGDRQEGDPCPTVCSEKINNKSDSPLLVSQPKPTPPAGYVAVGNNLILSLSHTHSFPITYPLFGFMEWEKNGYVIGIE

SEQ ID NO: 123304 - protein, 76 aa, Setaria italica
  Transcript Sequence Number=SeqID_57330
EVASPRFDSSRAFRLLRELGTNVTEDLVVLMPNLLSFLKHDDPAVVKQSIASGTNLFAAVLEEMALQVVLCKDIYQ

SEQ ID NO: 123305 - protein, 77 aa, Setaria italica
  misc_feature (30)..(30): Xaa can be any naturally occurring amino acid
  misc_feature (75)..(75): Xaa can be any naturally occurring amino acid
  Transcript Sequence Number=SeqID_57331
  Gene Ontology: Mol. function=binding
  Homolog annotation: Hit_ID=Q9SXC5; Match level="QueryCoverage=96%, HitCoverage=5%, E-value=1e-22, Identity=77%"; Hit description=T17H3.9
PAEVLIAIHDINPEKDKVALKKLLMETHFXITDACKACFEQRTVFTQQVLEKALNQMVDRIPIPLLFMRTVIQAXYV

SEQ ID NO: 123306 - protein, 67 aa, Setaria italica
  Transcript Sequence Number=SeqID_57332
CLARAESTKPPYQYVFGLNHCLVRRLRALSPGEAMEQNIRQAEKMSRNIERASRTTKDESPAWEMPI

SEQ ID NO: 123307 - protein, 64 aa, Setaria italica
  Transcript Sequence Number=SeqID_57333
FFYFLKRFLFFPHFMLLIVARYQFAITHSWICFRKVVVCDSTELPNVHKGGGREANRKLDQEPP

SEQ ID NO: 123308 - protein, 61 aa, Setaria italica
  Transcript Sequence Number=SeqID_57334
  Subcellular localization annotation: CTP_CleavageSite=29; ConfidenceScore=5.14e-01
FFFLFFSFHPCSDTNAMRNVPYCNAKVISCNQFSPFPFLLPPCCPSHSGEYMFRAHFLPKK

SEQ ID NO: 123309 - protein, 112 aa, Setaria italica
  misc_feature (63)..(63): Xaa can be any naturally occurring amino acid
  misc_feature (83)..(83): Xaa can be any naturally occurring amino acid
  Transcript Sequence Number=SeqID_57335
  Gene Ontology: Mol. function=protein binding; Biological process =plant-type hypersensitive response
  Homolog annotation: Hit_ID=B6U8V8; Match level="QueryCoverage=91%, HitCoverage=21%, E-value=2e-43, Identity=88%"; Hit description =Regulatory protein NPR1
SFFPSRSSLPLYVLDKVEVDNLPLILSVANLCSKSCVKLLERCLEIVVRSNLDMITLEKALPXDVVKQIVDARLSLELVSPEXKGFPNIHVRRVHRALDSDDVELVRMLLKE

SEQ ID NO: 123310 - protein, 46 aa, Setaria italica
  Transcript Sequence Number=SeqID_57336
HLACYFFPPFKLLFFFLFFNLLLFASLTYICFLWSSILEVYCQISC

SEQ ID NO: 123311 - protein, 50 aa, Setaria italica
  Transcript Sequence Number=SeqID_57337
DVLEACALAELRRYRPREQRRVDGRRQDTGGHRADGQPRGAPRRRQQEPP

SEQ ID NO: 123312 - protein, 107 aa, Setaria italica
  Transcript Sequence Number=SeqID_57338
VRQPRGPHVLPVFSLGRSLPPDLGCIPKQPDSLTAPRGETGSGPDGALTLPGVPFQGTWARSVSEDASPDYNSSSEATRFSSWAVPGSLAVTRGILVSFFSSAYLYA

SEQ ID NO: 123313 - protein, 41 aa, Setaria italica
  Transcript Sequence Number=SeqID_57339
TIAIRFAGYKFDEHDRDSAHLRLQFSRFPGPRSAGGPRGRR

SEQ ID NO: 123314 - protein, 56 aa, Setaria italica
  Transcript Sequence Number=SeqID_57340
RTRRRRPGRTATWPMLQVRVPWRMAAVWIEGTDNDNIMSYWGIDSPCKLAFQNAAK

SEQ ID NO: 123315 - protein, 82 aa, Setaria italica
  Transcript Sequence Number=SeqID_57341
  Pfam annotation: Domain name=zf-CCHC; Domain location=30-47; Score =33.1; E_value=1.1e-06; Accession=PF00098.15; Description=Zinc knuckle
PKMNTDDTRYDSGGGRAEYRGGRSDGPPPGNCFECGRPGHWVRDCPNAAGGRSGRFSSKFSGGGGGYDRSGPRGGGSYDRDG

SEQ ID NO: 123316 - protein, 70 aa, Setaria italica
  Transcript Sequence Number=SeqID_57342
VTTHYCISYKLIDLYHLLCHFERSSASLTSENVFCNLVLTIHVLIILQLLAWPTSSLPTRRSSLWRGGIR

SEQ ID NO: 123317 - protein, 128 aa, Setaria italica
  Transcript Sequence Number=SeqID_57343
  Gene Ontology: Cellular component=intracellular; Biological process =signal transduction
  Homolog annotation: Hit_ID=B6TTW3; Match level="QueryCoverage=98%, HitCoverage=26%, E-value=7e-68, Identity=95%"; Hit description=Rac GTPase activating protein 2
  Pfam annotation: Domain name=RhoGAP; Domain location=32-128; Score= -21.9; E_value=0.00025; Accession=PF00620.19; Description=RhoGAP domain
  Subcellular localization annotation: CTP_CleavageSite=21; ConfidenceScore=5.25e-01
RARPVPSASVSVFGVSPTSMQCSYDRRGNSVPTILLTMQRKLYSLGGLQAEGIFRINADNTQELYVRDQLNRGVVPDGVDLHCLAGLIKAWFRELPNGVLDSLTPEQVMHCNTEEECGHLASTLPPVE

SEQ ID NO: 123318 - protein, 63 aa, Setaria italica
  Transcript Sequence Number=SeqID_57344
  Subcellular localization annotation: CTP_CleavageSite=30; ConfidenceScore=5.66e-01
PKTPSPQPAPPSSSFPHRLPLRFPSSPPPTAPSPRPRPRPPPPLGPHREWRPEEAGVLGFFDP

SEQ ID NO: 123319 - protein, 78 aa, Setaria italica
  Transcript Sequence Number=SeqID_57345
RKQLLRNWALNWLDFTWQPIDEIYSYFGTKIATYFAFLGMYTRWLFFPAVFGLATQLIDFGSLQWLVLPAFFIFVISW

SEQ ID NO: 123320 - protein, 78 aa, Setaria italica
  misc_feature (14)..(14): Xaa can be any naturally occurring amino acid
  Transcript Sequence Number=SeqID_57346
  Homolog annotation: Hit_ID=Q9SSM5; Match level="QueryCoverage=71%, HitCoverage=9%, E-value=4e-20, Identity=80%"; Hit description =F3N23.22 protein
  Pfam annotation: Domain name=DUF590; Domain location=1-77; Score= -74.4; E_value=0.018; Accession=PF04547.4; Description=Protein of unknown function, DUF590
MCIPLIFCFAALNXVTEIRADALKLLVMLKRPVPRAAATIGAWLNIFQFLVVMAICTNCLLLVCLYDEEGNLVGIGSP

SEQ ID NO: 123321 - protein, 84 aa, Setaria italica
  Transcript Sequence Number=SeqID_57347
  Gene Ontology: Mol. function=enzyme inhibitor activity; Cellular component=cell wall; Biological process=cell wall modification
  Pfam annotation: Domain name=Pectinesterase; Domain location=1-77; Score=-191.8; E_value=4.8e-07; Accession=PF01095.11; Description =Pectinesterase
AAPSNLGGSSGYFVIRVAAGVYEENVVVPKNKKYVMMIGDGIGQSVITGNRSVVDGWTTFNSATFGECLADLSSFLNLSLVLQK

SEQ ID NO: 123322 - protein, 54 aa, Setaria italica
  misc_feature (16)..(16): Xaa can be any naturally occurring amino acid
  misc_feature (22)..(22): Xaa can be any naturally occurring amino acid
  Transcript Sequence Number=SeqID_57348
  Homolog annotation: Hit_ID=B6U179; Match level="QueryCoverage=100%, HitCoverage=11%, E-value=7e-14, Identity=74%"; Hit description =LEC14B protein
  Pfam annotation: Domain name=WD40; Domain location=13-52; Score=27.7; E_value=4.8e-05; Accession=PF00400.24; Description=WD domain, G-beta repeat
ERSIYVYDLAAKVTAXDIIRMXTDDVNAVTFADESGNILYSGSDDTLCKVWDRR

SEQ ID NO: 123323 - protein, 68 aa, Setaria italica
  Transcript Sequence Number=SeqID_57349
  Homolog annotation: Hit_ID=B6TU02; Match level="QueryCoverage=63%, HitCoverage=14%, E-value=2e-18, Identity=95%"; Hit description =Nucleotide-binding protein-like
  Pfam annotation: Domain name=ParA; Domain location=7-45; Score=-7.9; E_value=7.4e-06; Accession=PF10609.1; Description=ParA family ATPase
MLHLPCLVFLAKLTSLFWQILGLVENMSCFKCPKCGEKSYIFGEGGAKRTAEEMDMKLLGEVSESCQD

SEQ ID NO: 123324 - protein, 71 aa, Setaria italica
  Transcript Sequence Number=SeqID_57350
  Homolog annotation: Hit_ID=B6TU02; Match level="QueryCoverage=66%, HitCoverage=15%, E-value=2e-18, Identity=89%"; Hit description =Nucleotide-binding protein-like
  Pfam annotation: Domain name=ParA; Domain location=7-45; Score=-7.9; E_value=7.4e-06; Accession=PF10609.1; Description=ParA family ATPase
MLHLPCLVFLAKLTSLFWQILGLVENMSCFKCPKCGEKSYIFGEGGAKRTAEEMDMKLLGEGEVEILSTRN

SEQ ID NO: 123325 - protein, 114 aa, Setaria italica
  Transcript Sequence Number=SeqID_57351
  Homolog annotation: Hit_ID=Q9AS88; Match level="QueryCoverage=42%, HitCoverage=9%, E-value=1e-16, Identity=83%"; Hit description =P0028E10.3 protein
LRLRTSCADQVLVKTPLSKNFVQAQAHSERDDAPKGENHKDVAEGVPEMNRGDHIPGSSFSCLVKVYDMPDSQVKLNDVIEFIGVYTFDPELAAPSDNPDDIMLDLIEDVIVQL

SEQ ID NO: 123326 - protein, 117 aa, Setaria italica
  misc_feature (26)..(26): Xaa can be any naturally occurring amino acid
  Transcript Sequence Number=SeqID_57352
  Gene Ontology: Mol. function=aspartic-type endopeptidase activity; Cellular component=chromatin; Biological process=RNA-dependent DNA replication
  Homolog annotation: Hit_ID=Q8SA93; Match level="QueryCoverage=94%, HitCoverage=4%, E-value=2e-31, Identity=51%"; Hit description =Putative polyprotein
LQNQEVSKQQYLVKSAYDNLFIGSTXFGPCDRIWKSWAPGKCKFFLWLAAHNRCWTADRLSRRGLPHPDRCPLCNQEDGTINHLLVSCVFTQQVWFRLLQMVGLQILTPQLDVTSFE

SEQ ID NO: 123327 - protein, 94 aa, Setaria italica
  Transcript Sequence Number=SeqID_57353
  Subcellular localization annotation: CTP_CleavageSite=52; ConfidenceScore=5.61e-01
GKFKVNQSFSDVPKKFLKKTSCGTTNTEEGTSGHKSLSSSTRRGTRNVEPALANERGSFSLLYKSENMKVSRVELTSETALNQLSGASKVNKKR

SEQ ID NO: 123328 - protein, 53 aa, Setaria italica
  Transcript Sequence Number=SeqID_57354
RTVTQWFYLHVCYFPEITYIICRGTRNVEPALANERGSFSLLYKSENMKVKQG

SEQ ID NO: 123329 - protein, 80 aa, Setaria italica
  Transcript Sequence Number=SeqID_57355
  Gene Ontology: Mol. function=protein binding; Biological process =ethylene mediated signaling pathway
  Homolog annotation: Hit_ID=A8IW46; Match level="QueryCoverage=100%, HitCoverage=32%, E-value=2e-27, Identity=71%"; Hit description =Putative ethylene overproducer-like 1 (Fragment)
KDAKLALEEINRLLGFKLALECLELRICLYLALEDYKSAICDIHAILTLSPEYRMLEGRVAASKIGTLLGAHVEQWNTAE

SEQ ID NO: 123330 - protein, 77 aa, Setaria italica
  Transcript Sequence Number=SeqID_57356
  Subcellular localization annotation: CTP_CleavageSite=24; ConfidenceScore=5.00e-01
RRRTIRPHRRRARGGRRLHRSTPRLTNRVQQQISHPPHPGPSVTTRVLYSEPTSSALLSFATVPTLASSSTSLCSPH

SEQ ID NO: 123331 - protein, 72 aa, Setaria italica
  Transcript Sequence Number=SeqID_57357
SWSSHVRAGNLYDEMLLKSANAAALWRAQSTRADSLQCSAAVQGMVFACCSAAAGVPSAFIVDLIVYFFHSD

SEQ ID NO: 123332 - protein, 47 aa, Setaria italica
  Transcript Sequence Number=SeqID_57358
  Homolog annotation: Hit_ID=B9FUS4; Match level="QueryCoverage=78%, HitCoverage=2%, E-value=5e-10, Identity=81%"; Hit description=DNA polymerase
SISCHCHHPSQSIRLLSGKVSIRDFIFAKEVRLGTYSARASTLPPAA

SEQ ID NO: 123333 - protein, 46 aa, Setaria italica
  Transcript Sequence Number=SeqID_57359
  Homolog annotation: Hit_ID=Q9FZ97; Match level="QueryCoverage=91%, HitCoverage=7%, E-value=2e-14, Identity=85%"; Hit description =F3H9.11 protein
FLTPIHRFLWRKKATFAISRHYKRFDVFEEAEANKAAGKYDNASVD

SEQ ID NO: 123334 - protein, 46 aa, Setaria italica
  Transcript Sequence Number=SeqID_57360
  Gene Ontology: Mol. function=translation initiation factor activity; Biological process=biosynthetic process
  Homolog annotation: Hit_ID=Q1PCW7; Match level="QueryCoverage=89%, HitCoverage=11%, E-value=3e-15, Identity=97%"; Hit description=GDP -mannose pyrophosphorylase
SWVFALENMTILGEDVHVCDEIYSNGGVVLPHKEIKSSILKPEIVM

SEQ ID NO: 123335 - protein, 78 aa, Setaria italica
  Transcript Sequence Number=SeqID_57361
  Gene Ontology: Mol. function=translation initiation factor activity; Cellular component=cytoplasm; Biological process=biosynthetic process
  Homolog annotation: Hit_ID=A6N835; Match level="QueryCoverage=74%, HitCoverage=16%, E-value=2e-22, Identity=84%"; Hit description=GDP -mannose pyrophosphorylase
RAHFVHLSDARISLVALLLVKSQVMLNFLKDFESKLGIKITCSQETEPLGTAGPLALARDKLVDGSGDPFFVLNSDVI

SEQ ID NO: 123336 - protein, 86 aa, Setaria italica
  Transcript Sequence Number=SeqID_57362
FLFFSNSQGDLCIIALRRKYSEYNPHTHPKKPRHILADYNSNMNPQKHLHIVSFIRLNSGFKVHQIILAIRKRDLGGLGKVEFSNI

SEQ ID NO: 123337 - protein, 80 aa, Setaria italica
  Transcript Sequence Number=SeqID_57363
  Gene Ontology: Mol. function=small conjugating protein ligase activity; Cellular component=cellular_component; Biological process =ubiquitin-dependent protein catabolic process
  Homolog annotation: Hit_ID=B9G0M2; Match level="QueryCoverage=97%, HitCoverage=21%, E-value=4e-40, Identity=94%"; Hit description =Ubiquitin carrier protein
  Pfam annotation: Domain name=UQ_con; Domain location=1-80; Score =36.5; E_value=8.5e-08; Accession=PF00179.18; Description=Ubiquitin -conjugating enzyme
ISFPNGKDDLMNFEATIKPDEGYYVGGKFVFTFQVPPAYPHEPPKVKCKTKVYHPNIDLEGNVCLNILREDWKPVLNIKP

SEQ ID NO: 123338 - protein, 114 aa, Setaria italica
  Transcript Sequence Number=SeqID_57364
  Gene Ontology: Mol. function=catalytic activity; Cellular component =mitochondrion; Biological process=metabolic process
  Homolog annotation: Hit_ID=B4FQA8; Match level="QueryCoverage=93%, HitCoverage=37%, E-value=7e-47, Identity=80%"; Hit description =Methylglutaconyl-CoA hydratase
TQRLPRIVGRSRAKELIFTGRRFDAAEAVTMGVVNYCVPAGEAYQKALELAREINQKGPLAIKMAKKAINQGAEVDMTSALAVEEECYEQVLHTQDHLKPYFPVYTGFLFSANA

SEQ ID NO: 123339 - protein, 51 aa, Setaria italica
  Transcript Sequence Number=SeqID_57365
  Gene Ontology: Mol. function=catalytic activity; Biological process =metabolic process
  Homolog annotation: Hit_ID=B4FQA8; Match level="QueryCoverage=92%, HitCoverage=15%, E-value=1e-18, Identity=93%"; Hit description =Methylglutaconyl-CoA hydratase
TRAKELIFTGRRFDAAEAVTMGVVNYCVPAGEAYQKALELAREINQKVRSR

SEQ ID NO: 123340 - protein, 56 aa, Setaria italica
  misc_feature (33)..(33): Xaa can be any naturally occurring amino acid
  Transcript Sequence Number=SeqID_57366
  Gene Ontology: Mol. function=catalytic activity; Biological process =metabolic process
  Homolog annotation: Hit_ID=B4FQA8; Match level="QueryCoverage=76%, HitCoverage=13%, E-value=1e-11, Identity=83%"; Hit description =Methylglutaconyl-CoA hydratase
LELAREINQKGPLAIKMGVVNYCVPAGEAYQKXALELAREINQKGPLAIKMAFLAI

SEQ ID NO: 123341 - protein, 46 aa, Setaria italica
  Transcript Sequence Number=SeqID_57367
  Gene Ontology: Cellular component=integral to membrane
  Homolog annotation: Hit_ID=B6TI82; Match level="QueryCoverage=100%, HitCoverage=17%, E-value=5e-18, Identity=97%"; Hit description =Transmembrane protein 56
LKKSSAYLVNGILMFVAWLVARIFLFIYVFYHIYLHYSQIMQMHAF

SEQ ID NO: 123342 - protein, 89 aa, Setaria italica
  Transcript Sequence Number=SeqID_57368
  Gene Ontology: Cellular component=integral to membrane
  Homolog annotation: Hit_ID=B6TI82; Match level="QueryCoverage=100%, HitCoverage=29%, E-value=1e-34, Identity=84%"; Hit description =Transmembrane protein 56
DRIKGPITFRNSVISTCALGVLNTIYYDKVSVGYFITDLAMIFWLYPSLGGMEYVLHHTLSLVAIAYTMLSGEGQFYTYMVLISETTTP

SEQ ID NO: 123343 - protein, 31 aa, Setaria italica
  Transcript Sequence Number=SeqID_57369
VTRKYLVPVECLPFHEIICFKNVSVLQSALI

SEQ ID NO: 123344 - protein, 80 aa, Setaria italica
  Transcript Sequence Number=SeqID_57370
  Gene Ontology: Cellular component=plasma membrane
  Homolog annotation: Hit_ID=B6ST21; Match level="QueryCoverage=90%, HitCoverage=18%, E-value=1e-28, Identity=80%"; Hit description =Membrane protein
LVLGRFRTRRRQIHGVLNAVSWGVLLPMGAIVARYLKTFRSADPAWFYLHVACQLAGYGVGVSGWATGMNLGRESEGVTY

SEQ ID NO: 123345 - protein, 46 aa, Setaria italica
  Transcript Sequence Number=SeqID_57371
ITYSEQKRDVLMQCILVYLLRIKIVAFVHCIKADRVYYPSLNIIYF

SEQ ID NO: 123346 - protein, 47 aa, Setaria italica
  Transcript Sequence Number=SeqID_57372
KGEMICEGYDEGPRLGMQLLDKACFPWPVGVQVTDFIQLTTLPVFQE

SEQ ID NO: 123347 - protein, 70 aa, Setaria italica
  Transcript Sequence Number=SeqID_57373
  Subcellular localization annotation: CTP_CleavageSite=29; ConfidenceScore=5.10e-01
VTATPNLRTLFGFGFGLPSFSIPKLRFLRVLHVEKSEESLFGFGFGLPSFSIPKLRFLRVLHVEKINQDR

SEQ ID NO: 123348 - protein, 42 aa, Setaria italica
  Transcript Sequence Number=SeqID_57374
QVVDYMEKRNMIKKDCVGAISRSYQIMDSGRLHSTYNKAHRG

SEQ ID NO: 123349 - protein, 84 aa, Setaria italica
  Transcript Sequence Number=SeqID_57375
ILMFTITYGSPLMLYLGMVVYISVNNTDDISTARQLTWSYILDKMVTLPCLLPLLINSVALTSYTIVLLLMRNHLFVWSVFSPK

SEQ ID NO: 123350 - protein, 41 aa, Setaria italica
  Transcript Sequence Number=SeqID_57376
  Gene Ontology: Mol. function=transposase activity; Biological process= transposition, DNA-mediated
  Homolog annotation: Hit_ID=Q10PZ8; Match level="QueryCoverage=100%, HitCoverage=4%, E-value=7e-12, Identity=68%"; Hit description =Transposon protein, putative, Mutator sub-class
WPAAKSYTIEKFNWHMARIQEKCPEAIAYLDENHPYLWSRS

SEQ ID NO: 123351 - protein, 88 aa, Setaria italica
  Transcript Sequence Number=SeqID_57377
  Gene Ontology: Mol. function=transposase activity; Biological process= transposition, DNA-mediated
  Homolog annotation: Hit_ID=Q10PZ8; Match level="QueryCoverage=100%, HitCoverage=10%, E-value=6e-37, Identity=75%"; Hit description =Transposon protein, putative, Mutator sub-class
VISTDAGKGIEGAVDDVYPGVEHRECMRHLWKNFKKLYYGPLFNYNMWPAAKSYTIEKFNWHMARIQEKCPEAIAYLDENHPYLWSRS

SEQ ID NO: 123352 - protein, 59 aa, Setaria italica
  Transcript Sequence Number=SeqID_57378
  Gene Ontology: Mol. function=transposase activity; Biological process= transposition, DNA-mediated
  Homolog annotation: Hit_ID=Q10PZ8; Match level="QueryCoverage=91%, HitCoverage=6%, E-value=2e-16, Identity=62%"; Hit description =Transposon protein, putative, Mutator sub-class
PCILPKNHQCMRHLWKNFKKLYYGPLFNYNMWPAAKSYTIEKFNWHMARIQEKCPEAIA

SEQ ID NO: 123353 - protein, 55 aa, Setaria italica
  Transcript Sequence Number=SeqID_57379
ASSGLGLRREAKCGHGIDCSTGWCKSALTQHAILNGYAFRTVKKDKKRFQVKCLR

SEQ ID NO: 123354 - protein, 55 aa, Setaria italica
  misc_feature (22)..(22): Xaa can be any naturally occurring amino acid
  Transcript Sequence Number=SeqID_57380
ALDFDYSSLKENDVILFSDLSXLNDMDEDNEKLDEHANRNRKQELLTTNSTTDYK

SEQ ID NO: 123355 - protein, 93 aa, Setaria italica
  Transcript Sequence Number=SeqID_57381
  Gene Ontology: Mol. function=oxidoreductase activity, acting on sulfur group of donors, disulfide as acceptor; Biological process =protein metabolic process
  Homolog annotation: Hit_ID=B6U8S9; Match level="QueryCoverage=44%, HitCoverage=15%, E-value=1e-15, Identity=100%"; Hit description =Peptide methionine sulfoxide reductase
GGERRHRGRRLCLPSPFVAAWPRSFDGSAPLVGWWLGFPRPVPASDSLLGGPRASEASAALAQGPDEDQPAPGNEFAQFGAGCFWGVELAFQR

SEQ ID NO: 123356 - protein, 55 aa, Setaria italica
  Transcript Sequence Number=SeqID_57382
  Gene Ontology: Mol. function=protein dimerization activity; Cellular component=nucleus; Biological process=regulation of transcription, DNA-dependent
  Homolog annotation: Hit_ID=Q06979; Match level="QueryCoverage=74%, HitCoverage=8%, E-value=3e-17, Identity=97%"; Hit description=Ocs -element binding factor 3.2
ILPVPLYVHVFCSVGALAFDMEYARWLEEHNKHVNELRAAVNAHAGDNDLRGIVD

SEQ ID NO: 123357 - protein, 29 aa, Setaria italica
  Transcript Sequence Number=SeqID_57383
RQYLKLSYYQLIEFRIILGTVSSMSNISP

SEQ ID NO: 123358 - protein, 66 aa, Setaria italica
  misc_feature (19)..(19): Xaa can be any naturally occurring amino acid
  Transcript Sequence Number=SeqID_57384
SAYTKVYSAHQFEQGLVAXPTASDSSDKSRDKLDQKTLRRLAQNREAARKSRLRKKVTWNVFELYN

SEQ ID NO: 123359 - protein, 61 aa, Setaria italica
  Transcript Sequence Number=SeqID_57385
LYLPPPFPILFIVCCTILVRINLQCFIAYFDQAYIQNLESSRLKLTQLEQELQRARQQGYF

SEQ ID NO: 123360 - protein, 83 aa, Setaria italica; identical to SEQ ID NO: 89510
  Transcript Sequence Number=SeqID_57386

SEQ ID NO: 123361 - protein, 48 aa, Setaria italica
  Transcript Sequence Number=SeqID_57387
YAVVSPKLTESSSTNKEIVDAHIREEATEQEIKSVASLAEMCFMVGLS

SEQ ID NO: 123362 - protein, 28 aa, Setaria italica
  Transcript Sequence Number=SeqID_57388
VQYPGLEQRMKIDIMTMSFLSKSVSWVC

SEQ ID NO: 123363 - protein, 76 aa, Setaria italica
  misc_feature (13)..(13): Xaa can be any naturally occurring amino acid
  Transcript Sequence Number=SeqID_57389
  Gene Ontology: Mol. function=receptor activity; Cellular component =nucleus; Biological process=proteolysis
  Homolog annotation: Hit_ID=B8K1X3; Match level="QueryCoverage=96%, HitCoverage=18%, E-value=6e-17, Identity=57%"; Hit description =Putative receptor kinase
SRYVVCNPAAKSXVVLPDSGSHDCMSRLFARLGFDPAVSAHFHVFEFVENTYGTVAGVEIYSSEVGAWSYKESQWN

SEQ ID NO: 123364 - protein, 56 aa, Setaria italica
  Transcript Sequence Number=SeqID_57390
IYSSEVGAWSYKESQWNYETHLFEFSPSVFLNGLLHFSTIQFEVVAVDVVGESWWV

SEQ ID NO: 123365 - protein, 84 aa, Setaria italica
  Transcript Sequence Number=SeqID_57391
  Gene Ontology: Mol. function=protein tyrosine kinase activity; Cellular component=plasma membrane; Biological process=protein amino acid phosphorylation
  Homolog annotation: Hit_ID=B6V3C2; Match level="QueryCoverage=100%, HitCoverage=12%, E-value=9e-43, Identity=98%"; Hit description=PAN1
LRAYYYAPDEKLLIYDYLPNGSLHSALHGGPTASPTPLPWSVRLSIVQGAARGLAYLHECSPRRYVHGCIKSSKILLDDELRAH

SEQ ID NO: 123366 - protein, 53 aa, Setaria italica
  Transcript Sequence Number=SeqID_57392
  Gene Ontology: Mol. function=protein tyrosine kinase activity; Biological process=protein amino acid phosphorylation
  Homolog annotation: Hit_ID=B6V3C2; Match level="QueryCoverage=88%, HitCoverage=7%, E-value=2e-19, Identity=97%"; Hit description=PAN1
RRRVFHLSGGPTASPTPLPWSVRLSIVQGAARGLAYLHECSPRRYVHGCIKSS

SEQ ID NO: 123367 - protein, 77 aa, Setaria italica
  misc_feature (26)..(26): Xaa can be any naturally occurring amino acid
  Transcript Sequence Number=SeqID_57393
  Gene Ontology: Cellular component=cytoplasm
  Homolog annotation: Hit_ID=Q2QV94; Match level="QueryCoverage=88%, HitCoverage=8%, E-value=5e-22, Identity=80%"; Hit description =Exocyst complex component 5
MPAQILCTRLTESIYVAHKDEYTEFXEQASLRQLYQSKMAELKAEAKQQSESTGSIGRAKGASLTTSPQQLISVTTV

SEQ ID NO: 123368 - protein, 70 aa, Setaria italica
  Transcript Sequence Number=SeqID_57394
  Gene Ontology: Cellular component=cytoplasm
  Homolog annotation: Hit_ID=Q2QV94; Match level="QueryCoverage=81%, HitCoverage=7%, E-value=2e-23, Identity=94%"; Hit description =Exocyst complex component 5
TIRNIIGISLQPLIAQKLRSFAEEDVGRHGVTPAVGSANASRGLEVAVANLQEYCNELENRLLARFDAAS

SEQ ID NO: 123369 - protein, 85 aa, Setaria italica
  Transcript Sequence Number=SeqID_57395
  Subcellular localization annotation: CTP_CleavageSite=57; ConfidenceScore=5.21e-01
SPSMNRKNLGEYVGSQLAFGCMAYASRKHATHGFSTFYRRGQSNRSRRLNKVLDVVVCMVNNHTGEPSEGTHRMHFRFITGFEIR

SEQ ID NO: 123370 - protein, 72 aa, Setaria italica
  Transcript Sequence Number=SeqID_57396
  Subcellular localization annotation: CTP_CleavageSite=45; ConfidenceScore=5.50e-01
VGSQLAFGCMAYASRKHATHGFSTFYRRGQSNRSRRLNKVLDVVVCMVNNHTGEPSEGTHRMHFRFITGQHW

SEQ ID NO: 123371 - protein, 67 aa, Setaria italica
  Transcript Sequence Number=SeqID_57397
IKLLGAGDQKVLRFVDVFHSLTWSIAWAVMVPPIALERPALSAELQKHQFMFATETKRPISRVSASV

SEQ ID NO: 123372 - protein, 110 aa, Setaria italica
  Transcript Sequence Number=SeqID_57398
KTLEQSTPKHQIHGRVNKDVKGSIWGAKGTARWLHGLRLEWRHGTTGLLRRVIAVRTARNRRHHSAEHHVFFSTSCNSCSTSLIDPISAYADSIKVLVGSSLCSLLQSIC

SEQ ID NO: 123373 - protein, 34 aa, Setaria italica
  Transcript Sequence Number=SeqID_57399
ITTKPSFQPLVRRYPQQYHDYCQQKASWYHLTAV

SEQ ID NO: 123374 - protein, 69 aa, Setaria italica
  Transcript Sequence Number=SeqID_57400
MSMPAAPVEMREDHCDLADNNGEESARTKRRRLDHPSAAALLIFVQPVAEVTACESSQGLQGGVDHDAK

SEQ ID NO: 123375 - protein, 54 aa, Setaria italica
  Transcript Sequence Number=SeqID_57401
PPPLAAQRSEAPPRRDDPKVPQATIPSPSSSSLLLVDQHEVDLELRLGTTPKVT

SEQ ID NO: 123376 - protein, 38 aa, Setaria italica
  Transcript Sequence Number=SeqID_57402
KILVILNPNSGFRSTRDVFYKKVQSKLNLCMTSICCFD

SEQ ID NO: 123377 - protein, 40 aa, Setaria italica
  Transcript Sequence Number=SeqID_57403
SGSALSSRRHSRALEPSPRVTNHLMCFHHHSIISHRQSVI

SEQ ID NO: 123378 - protein, 83 aa, Setaria italica
  Transcript Sequence Number=SeqID_57404
  Gene Ontology: Mol. function=DNA binding
DIETLADDADVALARDSGGEAERYEAAEAEADLLRDRLRLAVISIATAEGKKAGMTVAEPVVACIADLAYKSAEQLAKDAELF

SEQ ID NO: 123379 - protein, 146 aa, Setaria italica
  misc_feature (90)..(90): Xaa can be any naturally occurring amino acid
  Transcript Sequence Number=SeqID_57405
  Gene Ontology: Mol. function=calcium ion binding; Cellular component =integral to membrane
  Homolog annotation: Hit_ID=B6U1M5; Match level="QueryCoverage=100%, HitCoverage=25%, E-value=7e-63, Identity=78%"; Hit description =Calcium ion binding protein
NAGPNGEAVDLTNTKGFSLTGTCITTDVQTSYAARIMGLSVIPFVIAQFPKMLKTHHGQRLAVLLALIVSFLLVLSYCVYQVFQPWIQRXKLAYAKHKHVISGILRHAQMQSLGRLLNEDGTPNEDVIRKLFHKIDMDESRTLSRS

SEQ ID NO: 123380 - protein, 87 aa, Setaria italica
  misc_feature (35)..(35): Xaa can be any naturally occurring amino acid
  Transcript Sequence Number=SeqID_57406
  Gene Ontology: Mol. function=calcium ion binding; Cellular component =integral to membrane
  Homolog annotation: Hit_ID=B6U1M5; Match level="QueryCoverage=83%, HitCoverage=12%, E-value=4e-31, Identity=94%"; Hit description =Calcium ion binding protein
  Subcellular localization annotation: CTP_CleavageSite=49; ConfidenceScore=5.10e-01
VVLFRTRLRWYYRSYNFSNATHIPSFFISFIALPXLATNSSEAVSAIIFASRKKQRTCSLTFSEVYGGVTMNNTLCLGVFLALIYFR

SEQ ID NO: 123381 - protein, 71 aa, Setaria italica
  Transcript Sequence Number=SeqID_57407
  Gene Ontology: Mol. function=calcium ion binding; Cellular component =integral to membrane
  Homolog annotation: Hit_ID=B6U1M5; Match level="QueryCoverage=85%, HitCoverage=10%, E-value=2e-25, Identity=86%"; Hit description =Calcium ion binding protein
INCLTVWPGVTPNEDVIRKLFHKIDMDESRTLSRSELHALIVGINFEELDFDKMDAVNKVMDDFDTSRNDV

SEQ ID NO: 123382 - protein, 74 aa, Setaria italica
  misc_feature (15)..(15): Xaa can be any naturally occurring amino acid
  misc_feature (54)..(54): Xaa can be any naturally occurring amino acid
  Transcript Sequence Number=SeqID_57408
  Gene Ontology: Mol. function=calcium ion binding; Cellular component =integral to membrane
  Homolog annotation: Hit_ID=B6U1M5; Match level="QueryCoverage=91%, HitCoverage=11%, E-value=2e-26, Identity=83%"; Hit description =Calcium ion binding protein
FYFGSVLLNEDGTPXEDVIRKLFHKIDMDESRTLSRSELHALIVGINFEELDFXDKMDAVNKVMDDFDTSRNDV

SEQ ID NO: 123383 - protein, 83 aa, Setaria italica
  Transcript Sequence Number=SeqID_57409
  Gene Ontology: Mol. function=calcium ion binding; Cellular component =integral to membrane
  Homolog annotation: Hit_ID=B9S836; Match level="QueryCoverage=71%, HitCoverage=10%, E-value=2e-20, Identity=79%"; Hit description =Calcium ion binding protein, putative
GPGACDWWAGLLLASVIRLASPAVAAAVEGKCEQSYGFLPCTTTVLGNLFLILVYGFLMFKAATYLSSGSELLLEIMGPGLVG

SEQ ID NO: 123384 - protein, 74 aa, Setaria italica
  Transcript Sequence Number=SeqID_57410
LMFKAATYLSSGSELLLEIMGPGLVGGLLLPILGALPDALLVLGLLRPRPRLLPSLAHSVLCFDELPSIRPAPS

SEQ ID NO: 123385 - protein, 50 aa, Setaria italica
  Transcript Sequence Number=SeqID_57411
FLILVYGFLMFKAATYLSSGSELLLEIMGPGLVGGLLLPILGALPERSSC

SEQ ID NO: 123386 - protein, 131 aa, Setaria italica
  Transcript Sequence Number=SeqID_57412
  Gene Ontology: Cellular component=cell wall
  Homolog annotation: Hit_ID=B6TWE7; Match level="QueryCoverage=76%, HitCoverage=29%, E-value=1e-25, Identity=56%"; Hit description=PHI-1
  Pfam annotation: Domain name=Phi_1; Domain location=3-127; Score=9.6; E_value=1.4e-10; Accession=PF04674.4; Description=Phosphate-induced protein 1 conserved region
CCRRYPFRPISRFVYVSLRSGRSRSSSVPNADVGVDGMVSVIAHELAELASNPLANAWYAGTDPSFPTEIADLCEGIYGTGGGGAYTGQLLTDARSGAAYNVNGAGGRRFLVQWVWNPVLSYCSGPNALDQ

SEQ ID NO: 123387 - protein, 44 aa, Setaria italica
  Transcript Sequence Number=SeqID_57413
GRAVGGSVQRERRRRAQVPSLSSWVVGNPVVFLVLYFVSFRFTL

SEQ ID NO: 123388 - protein, 86 aa, Setaria italica
  misc_feature (30)..(30): Xaa can be any naturally occurring amino acid
  Transcript Sequence Number=SeqID_57414
  Gene Ontology: Cellular component=integral to membrane
  Homolog annotation: Hit_ID=B6U032; Match level="QueryCoverage=100%, HitCoverage=24%, E-value=8e-40, Identity=93%"; Hit description=Mpv17 / PMP22 family protein
  Pfam annotation: Domain name=Mpv17_PMP22; Domain location=2-65; Score= 57.1; E_value=6.8e-14; Accession=PF04117.4; Description=Mpv17  PMP22 family
RLESPTTIYSELKSTFWPMLTAGWKLWPFXAHLVTYGVIPVEQRLLWVDCVELIWVTILSTYSNEKSEARNSDGTSTPDALKDNSR

SEQ ID NO: 123389 - protein, 43 aa, Setaria italica
  Transcript Sequence Number=SeqID_57415
IQRKEFRMLNNSLYLREWRSTGGLQASLSNNPQPIQRKEFRNA

SEQ ID NO: 123390 - protein, 99 aa, Setaria italica
  Transcript Sequence Number=SeqID_57416
  Homolog annotation: Hit_ID=A6YRS1; Match level="QueryCoverage=78%, HitCoverage=17%, E-value=2e-26, Identity=78%"; Hit description=R -interacting factor 1
KPGRGGPMPGPGRGRGFQKNMSKKDFPPPQNGVGKRSSDDIDILHTESLIKEVEKVFSVNNPDPQEVEKAKKALKEQEQSLIDAIARLAEASDGESGKY

SEQ ID NO: 123391 - protein, 90 aa, Setaria italica
  Transcript Sequence Number=SeqID_57417
SRQQKENLGATSKLYMVSILKYSLPKIQDSPNRSLVTINRHRINVVCLMLVTSIQCIPSPMVVPICSHQEKGTLSNASHESTASLSIHVK

SEQ ID NO: 123392 - protein, 48 aa, Setaria italica
  misc_feature (13)..(13): Xaa can be any naturally occurring amino acid
  Transcript Sequence Number=SeqID_57418
VEKVFSVNNPDPXQEVEKAKKALKEQEQSLIDAIARLAEASDGESGKY

SEQ ID NO: 123393 - protein, 142 aa, Setaria italica
  Transcript Sequence Number=SeqID_57419
  Homolog annotation: Hit_ID=A6YRS1; Match level="QueryCoverage=76%, HitCoverage=24%, E-value=5e-49, Identity=83%"; Hit description=R -interacting factor 1
  Pfam annotation: Domain name=LBR_tudor; Domain location=30-85; Score =14.3; E_value=0.012; Accession=PF09465.2; Description=Lamin-B receptor of TUDOR domain
ASKPMSSAAGPSGRGPHMNRNFPGAAEAQAQNVHPLIGRKVMIRWPEDNSFYEAVISDYNADTGLYALVYDMNTANETWEWVDLKEMGPEDIRWKEDEISGIDLKMYLQGRGPPTSGGRKPGRGGPMPGPGKKERRNSKKKQ

SEQ ID NO: 123394 - protein, 141 aa, Setaria italica
  misc_feature (21)..(21): Xaa can be any naturally occurring amino acid
  Transcript Sequence Number=SeqID_57420
  Gene Ontology: Cellular component=plasma membrane
  Homolog annotation: Hit_ID=UPI0001A8238C; Match level="QueryCoverage =86%, HitCoverage=22%, E-value=5e-56, Identity=82%"; Hit description =plant synaptotagmin
ALVELDTKSLENMLPEIPLWXKNPDFDRIDWLNKFIETMWSYLDKAICKMAKEIAKPIIAENTAKYKIDSVEFETLTLGSLPPTFQGMKVYTTDEQELIMEPSVKWAGNPNITVVVKAYGLKANTCKSITCAVAFSPYALT

SEQ ID NO: 123395 - protein, 102 aa, Setaria italica
  misc_feature (80)..(80): Xaa can be any naturally occurring amino acid
  misc_feature (89)..(89): Xaa can be any naturally occurring amino acid
  Transcript Sequence Number=SeqID_57421
  Gene Ontology: Mol. function=kinase activity; Cellular component =plasma membrane
  Homolog annotation: Hit_ID=UPI0001A8238C; Match level="QueryCoverage =95%, HitCoverage=17%, E-value=3e-35, Identity=78%"; Hit description =plant synaptotagmin
GSLVFLMAIPGLYGFVQETIKTQVANMYLWPKVLEVQIMDPAKAQKKPVGILFVNVVQAVKLTKKDLLGKSDPYVKLKLXTEDKLPSKXTSVKRSNLNPEWN

SEQ ID NO: 123396 - protein, 42 aa, Setaria italica
  Transcript Sequence Number=SeqID_57422
FVFFFFGFYFYFLIVFSSFSRYGSERKELVVINHRIHISSYK

SEQ ID NO: 123397 - protein, 24 aa, Setaria italica
  Transcript Sequence Number=SeqID_57423
INEKYHLIDSKNGRIQLELQWRTS

SEQ ID NO: 123398 - protein, 121 aa, Setaria italica
  Transcript Sequence Number=SeqID_57424
  Gene Ontology: Mol. function=structural constituent of ribosome; Cellular component=intracellular; Biological process=translation
  Homolog annotation: Hit_ID=B9RXF3; Match level="QueryCoverage=100%, HitCoverage=41%, E-value=6e-57, Identity=85%"; Hit description=50S ribosomal protein L4, putative
  Pfam annotation: Domain name=Ribosomal_L4; Domain location=1-121; Score=1.8; E_value=4.1e-06; Accession=PF00573.14; Description =Ribosomal protein L4L1 family
VVRWQLAKRQQGTHSTKTISEVSGTGRKPYKQKGTGRARHGTLRGPQFRGGATMHGPKPRSHAIKLQKKVRRLGLKITLSARTAEGKLFVFEDLEVPSHKTKNIVNYISQMDNTKEGVLVD

SEQ ID NO: 123399 - protein, 86 aa, Setaria italica
  misc_feature (70)..(70): Xaa can be any naturally occurring amino acid
  Transcript Sequence Number=SeqID_57425
  Homolog annotation: Hit_ID=Q7XKU6; Match level="QueryCoverage=95%, HitCoverage=31%, E-value=6e-37, Identity=87%"; Hit description =OSJNBa0022H21.11 protein
YFGKEHWYRPRLLWYVDLVTVLASKGLQSEVDKACSYLKREQLEPDTEGFNLLLKALLDAGFTQLAMDCXRLMKLWDSDPDRITYT

SEQ ID NO: 123400 - protein, 143 aa, Setaria italica
  misc_feature (84)..(84): Xaa can be any naturally occurring amino acid
  misc_feature (98)..(98): Xaa can be any naturally occurring amino acid
  Transcript Sequence Number=SeqID_57426
  Gene Ontology: Cellular component=plasma membrane
  Homolog annotation: Hit_ID=A2TJU6; Match level="QueryCoverage=72%, HitCoverage=39%, E-value=9e-48, Identity=89%"; Hit description =Aluminum-induced protein-like protein
TRTTRIGSIPFFWGVDSEDHLLFSDDAGLLKTGCGNSFAPFPKGCFYTTSGGLQSYEHPLHEVKAVPRVDSQGQMCGSTFKVRXKTKTKKKQDASIPXVGSAADWSNQFLTGGRRLLPPSSCYPFPPAAVRCRSGVSAEPLRR

SEQ ID NO: 123401 - protein, 77 aa, Setaria italica
  misc_feature (70)..(70): Xaa can be any naturally occurring amino acid
  Transcript Sequence Number=SeqID_57427
  Gene Ontology: Cellular component=plasma membrane
  Homolog annotation: Hit_ID=A2TJU6; Match level="QueryCoverage=89%, HitCoverage=27%, E-value=2e-23, Identity=78%"; Hit description =Aluminum-induced protein-like protein
TEPKKEQKKPNQTKVELIPTYEAYRTLRDRGPVPASQVVRDLSGKFAFILYDTLSKSTFVAADADGSIPXFWGSTRR

SEQ ID NO: 123402 - protein, 49 aa, Setaria italica
  misc_feature (30)..(30): Xaa can be any naturally occurring amino acid
  misc_feature (49)..(49): Xaa can be any naturally occurring amino acid
  Transcript Sequence Number=SeqID_57428
  Gene Ontology: Mol. function=potassium ion transmembrane transporter activity; Cellular component=membrane; Biological process=potassium ion transport
  Homolog annotation: Hit_ID=Q653B6; Match level="QueryCoverage=83%, HitCoverage=5%, E-value=7e-11, Identity=80%"; Hit description =Potassium transporter 18
MDTVVVFPCLLLQYTGQAAYIAQNTHSVPXAFYYSLPASILWPSFIVAX

SEQ ID NO: 123403 - protein, 81 aa, Setaria italica
  Transcript Sequence Number=SeqID_57429
  Gene Ontology: Mol. function=binding
GGGGSNLVTSGNGGDRSGIEMHYKKMIEEDPCNGLFLRNYAQFLYQASANPICSTVNLGIQQILDRTEQHFVDGSCAFNFR

SEQ ID NO: 123404 - protein, 53 aa, Setaria italica
  Transcript Sequence Number=SeqID_57430
FLITGSVHGCSHVLAAHAAFLWDTEDADVPEESGIGALGYVGFAPAHSSLASA

SEQ ID NO: 123405 - protein, 63 aa, Setaria italica
  Transcript Sequence Number=SeqID_57431
  Gene Ontology: Mol. function=nucleic acid binding; Cellular component= nucleus
  Homolog annotation: Hit_ID=B6TQ61; Match level="QueryCoverage=100%, HitCoverage=12%, E-value=1e-15, Identity=74%"; Hit description=Zinc finger CCCH type domain-containing protein ZFN-like 1
AQPCAYYALKWYYLSSIWSCMQYDHPMGTLGYSSSALPLSDMPIAPYPLSFSVATLAPSPSSP

SEQ ID NO: 123406 - protein, 98 aa, Setaria italica
  Transcript Sequence Number=SeqID_57432
  Gene Ontology: Mol. function=electron carrier activity; Cellular component=extracellular region; Biological process=response to oxidative stress
  Homolog annotation: Hit_ID=Q94DM0; Match level="QueryCoverage=74%, HitCoverage=20%, E-value=2e-30, Identity=80%"; Hit description=Class III peroxidase 23
  Subcellular localization annotation: CTP_CleavageSite=29; ConfidenceScore=5.03e-01
WSTVPVGTSVLVRSVYPLTTFRTTSYYVNLVNREGLFTSDQDLFTNPATRPVVDKFAQNQKAFFDQFGSSMIKMGQIKVLTGSQGQIRRNCSARNPGT

SEQ ID NO: 123407 - protein, 100 aa, Setaria italica
  Transcript Sequence Number=SeqID_57433
  Gene Ontology: Mol. function=electron carrier activity; Cellular component=extracellular region; Biological process=response to oxidative stress
  Homolog annotation: Hit_ID=Q94DM0; Match level="QueryCoverage=83%, HitCoverage=23%, E-value=1e-31, Identity=75%"; Hit description=Class III peroxidase 23
TLNATFAGHLRQTCPAKGTDRRTPLDVRTPNTFDNKYYVNLVNREGLFTSDQDLFTNPATRPVVDKFAQNQKAFFDQFGSSMYSKYWGLVFLKVCSFLRG

SEQ ID NO: 123408 - protein, 58 aa, Setaria italica
  Transcript Sequence Number=SeqID_57434
VLLSYFFLLLREISNGLDTTAHGFCDCLWRDALVIDAMPLVVQVNVISMYVRFQNCVI

SEQ ID NO: 123409 - protein, 92 aa, Setaria italica
  Transcript Sequence Number=SeqID_57435
NSIWSLSLENMGFLRTFREISNGLDTTAHGFCDCLWRDALVIDAMPLVVQVNVISMIRERRKLSTKVDAKEVFIPWNLIRPKKELARSLWSQ

SEQ ID NO: 123410 - protein, 61 aa, Setaria italica
  Transcript Sequence Number=SeqID_57436
KHGPILMAAVQDMCFNINSASMVPWDSSLQKNQVLKKDSCNRLLDNESDVQIWDDSWKKIL

SEQ ID NO: 123411 - protein, 141 aa, Setaria italica
  Transcript Sequence Number=SeqID_57437
  Gene Ontology: Mol. function=protein binding; Cellular component=SCF ubiquitin ligase complex; Biological process=protein ubiquitination
  Homolog annotation: Hit_ID=Q2QNU9; Match level="QueryCoverage=89%, HitCoverage=30%, E-value=2e-56, Identity=76%"; Hit description =Leucine Rich Repeat family protein, expressed
LDLYRCNSITDDGLAALANGCKKIKLLNLCYCNKITDSGLGHIGSMEELTNLELRCLVRITGVGISSIAIGCKSLIELDLKRCYSVDDACLGALARNAFNLRQDIKMVHLSWVSIEGFEMALRAACTRLKKLKMLTGLKTV

SEQ ID NO: 123412 - protein, 47 aa, Setaria italica
  Transcript Sequence Number=SeqID_57438
  Gene Ontology: Mol. function=protein binding
  Homolog annotation: Hit_ID=Q2QNU9; Match level="QueryCoverage=85%, HitCoverage=8%, E-value=2e-14, Identity=92%"; Hit description =Leucine Rich Repeat family protein, expressed
HVCNIPSFRCNSITDDGLAALANGCKKIKLLNLCYCNKITDSGLGHI

SEQ ID NO: 123413 - protein, 54 aa, Setaria italica
  Transcript Sequence Number=SeqID_57439
MKIQECSNFLSLVLQVSNESLRSLSTLEKLEDITMVCCLFIDDDGLQMLSAGNS

SEQ ID NO: 123414 - protein, 32 aa, Setaria italica
  Transcript Sequence Number=SeqID_57440
LVWTSFQTSLRSVFTVSRTAGMANCSPITRFV

SEQ ID NO: 123415 - protein, 57 aa, Setaria italica
  Transcript Sequence Number=SeqID_57441
LQLVRKGRYSRALVTHFMVKTEGLSQAHQSNVSGISVVTGNCPSETTLRTPNSGFFV

SEQ ID NO: 123416 - protein, 55 aa, Setaria italica
  Transcript Sequence Number=SeqID_57442
CHEWHLKHNLSGEPEVVFKELFDVMNGTLSHLSNSSPAKPLHSAEGTGVDCLKVL

SEQ ID NO: 123417 - protein, 118 aa, Setaria italica
  misc_feature (97)..(97): Xaa can be any naturally occurring amino acid
  Transcript Sequence Number=SeqID_57443
  Gene Ontology: Mol. function=phosphatidylinositol phosphate kinase activity; Biological process=phosphatidylinositol metabolic process
  Homolog annotation: Hit_ID=Q6ZLF2; Match level="QueryCoverage=83%, HitCoverage=5%, E-value=2e-47, Identity=92%"; Hit description=1 -phosphatidylinositol-3-phosphate 5-kinase-like
  Pfam annotation: Domain name=PIP5K; Domain location=12-118; Score= -144.2; E_value=0.034; Accession=PF01504.10; Description =Phosphatidylinositol-4-phosphate 5-Kinase
FVLSKKIGGSLLRLVKSLIVVFCESLDDRFIIKQVTKTELESFLKFGTEYFKYLSESISTGSPTCLAKILGIYQVTIKHVKGGKESKMDLLVMENLXFGRNITRLYDLKGSSRSRYNA

SEQ ID NO: 123418 - protein, 80 aa, Setaria italica
  Transcript Sequence Number=SeqID_57444
  Gene Ontology: Mol. function=protein binding
  Homolog annotation: Hit_ID=B9RCS2; Match level="QueryCoverage=98%, HitCoverage=13%, E-value=1e-19, Identity=63%"; Hit description =Protein binding protein, putative
ELDLSRCTKVSDAGLRHIVIIQSLERLHLSGTRLTDNGVKLISSLTNLSFLDLGGIRITDKTLRSLQVLTRLEHLDIWGI

SEQ ID NO: 123419 - protein, 94 aa, Setaria italica
  Transcript Sequence Number=SeqID_57445
  Gene Ontology: Mol. function=structural constituent of cell wall
  Homolog annotation: Hit_ID=Q9ZQT2; Match level="QueryCoverage=82%, HitCoverage=23%, E-value=3e-28, Identity=78%"; Hit description=Root cap protein 1
  Subcellular localization annotation: CTP_CleavageSite=45; ConfidenceScore=5.16e-01
TVRWDAAADHLSLSLDDEASPSPAFTGARWSPPTAPALSVTRTAQANTVVVELRGVFRIMANVVPITAEDSRVHGYGVTDDDSLAHLDLGFKFY

SEQ ID NO: 123420 - protein, 82 aa, Setaria italica
  Transcript Sequence Number=SeqID_57446
  Gene Ontology: Mol. function=structural constituent of cell wall
  Homolog annotation: Hit_ID=Q9ZQT2; Match level="QueryCoverage=89%, HitCoverage=21%, E-value=3e-28, Identity=81%"; Hit description=Root cap protein 1
  Subcellular localization annotation: CTP_CleavageSite=33; ConfidenceScore=5.60e-01
MVSSLKKLALPAFTGARWSPPTAPALSVTRTAQANTVVVELRGVFRIMANVVPITAEDSRVHGYGVTDDDSLAHLDLGFKFY

SEQ ID NO: 123421 - protein, 83 aa, Setaria italica
  Transcript Sequence Number=SeqID_57447
  Subcellular localization annotation: CTP_CleavageSite=54; ConfidenceScore=5.46e-01
DEIQTATTTLPTQLGRNTVLVCIVTLTYTSRFSDGPRSPCSVLCVCLTTNSSVKGNMVKLHNLLQLQYDTTVSTKSLLSLFLP

SEQ ID NO: 123422 - protein, 76 aa, Setaria italica
  Transcript Sequence Number=SeqID_57448
  Gene Ontology: Cellular component=plasma membrane
EKSAQAKKWAEPHLETAKTKWMPVAKEKMVNLKKNMEPYVQMVSEKSVEVYQTSSDFIRPHLVNAHKVADPYFQEA

SEQ ID NO: 123423 - protein, 82 aa, Setaria italica
  Transcript Sequence Number=SeqID_57449
SVSRSRRGTRRESAVGARCAAAEALRLGAVGGRCWRCPREEGFAGAVGDRYRGKGCGKETAVMEESAFDFRGMYAGSGPQIG

SEQ ID NO: 123424 - protein, 106 aa, Setaria italica
  Transcript Sequence Number=SeqID_57450
  Gene Ontology: Mol. function=L-threonine ammonia-lyase activity; Cellular component=chloroplast; Biological process=isoleucine biosynthetic process
  Homolog annotation: Hit_ID=Q10DZ5; Match level="QueryCoverage=69%, HitCoverage=11%, E-value=6e-35, Identity=94%"; Hit description =Threonine dehydratase biosynthetic, chloroplast, putative, expressed
  Pfam annotation: Domain name=Thr_dehydrat_C; Domain location=50-104; Score=1.3; E_value=0.00075; Accession=PF00585.10; Description=C -terminal regulatory domain of Threonine dehydratase
GERSILEPAGALALAGAEAYCKYYNLKGETVVAITSGANMNFDRLRLVTELADVGRKREAVLATFLPEEQGSFKRFTELVGRMNITEFKYRYDSMRSTIAPSSLSV

SEQ ID NO: 123425 - protein, 98 aa, Setaria italica
  misc_feature (29)..(29): Xaa can be any naturally occurring amino acid
  Transcript Sequence Number=SeqID_57451
  Gene Ontology: Mol. function=L-threonine ammonia-lyase activity; Cellular component=chloroplast; Biological process=isoleucine biosynthetic process
  Homolog annotation: Hit_ID=Q10DZ5; Match level="QueryCoverage=88%, HitCoverage=14%, E-value=5e-43, Identity=93%"; Hit description =Threonine dehydratase biosynthetic, chloroplast, putative, expressed
FPLRDWGCDAVIVMPVTTPEIKWKSVERXGATVVLRGDSYDEAQSYAKLRCEQEGRTFIPPFDHPDVITGQGTVGMEIVRQLQGPLHAIFVPVGGGRN

SEQ ID NO: 123426 - protein, 101 aa, Setaria italica
  Transcript Sequence Number=SeqID_57452
  Gene Ontology: Mol. function=L-threonine ammonia-lyase activity; Cellular component=chloroplast; Biological process=isoleucine biosynthetic process
  Homolog annotation: Hit_ID=Q10DZ5; Match level="QueryCoverage=83%, HitCoverage=13%, E-value=8e-40, Identity=94%"; Hit description =Threonine dehydratase biosynthetic, chloroplast, putative, expressed
  Pfam annotation: Domain name=Thr_dehydrat_C; Domain location=45-101; Score=15.5; E_value=2.9e-05; Accession=PF00585.10; Description=C -terminal regulatory domain of Threonine dehydratase
LEPAGALALAGAEAYCKYYNLKGETVVAITSGANMNFDRLRLVTELADVGRKREAVLATFLPEEQGSFKRFTELVGRMNITEFKYRYDSNAKDALVLYRYI

SEQ ID NO: 123427 - protein, 28 aa, Setaria italica
  Transcript Sequence Number=SeqID_57453
FVAESLGYEYMSEHNNEIYRLLLRDPKI

SEQ ID NO: 123428 - protein, 90 aa, Setaria italica
  misc_feature (26)..(26): Xaa can be any naturally occurring amino acid
  misc_feature (77)..(77): Xaa can be any naturally occurring amino acid
  misc_feature (85)..(85): Xaa can be any naturally occurring amino acid
  Transcript Sequence Number=SeqID_57454
  Gene Ontology: Mol. function=L-threonine ammonia-lyase activity; Cellular component=chloroplast; Biological process=isoleucine biosynthetic process
  Homolog annotation: Hit_ID=Q10DZ5; Match level="QueryCoverage=100%, HitCoverage=14%, E-value=1e-39, Identity=86%"; Hit description =Threonine dehydratase biosynthetic, chloroplast, putative, expressed
  Pfam annotation: Domain name=Thr_dehydrat_C; Domain location=1-62; Score=5.7; E_value=0.00027; Accession=PF00585.10; Description=C -terminal regulatory domain of Threonine dehydratase
LVGRMNITEFKYRYDSNAKDALVLYXVGIYTDNELGAMVDRMESAKLRTVNLTDNDLAKDHLRYFIGGRSEIKDELXYRFYFPEXPGALM

SEQ ID NO: 123429 - protein, 111 aa, Setaria italica
  Transcript Sequence Number=SeqID_57455
  Gene Ontology: Mol. function=L-threonine ammonia-lyase activity; Cellular component=chloroplast; Biological process=isoleucine biosynthetic process
  Homolog annotation: Hit_ID=Q10DZ5; Match level="QueryCoverage=98%, HitCoverage=17%, E-value=2e-30, Identity=67%"; Hit description =Threonine dehydratase biosynthetic, chloroplast, putative, expressed
MVRVVPESLQRESGCLVAGFRERGAGAADGDGFGDAAPGGGGGPGAMEYLTSVLSSKVYDVAIESPLQLATKLSDRLGVNLWIKREDLQPVFSFKLRGAYNMMAKLSPEQL

SEQ ID NO: 123430 - protein, 108 aa, Setaria italica
  misc_feature (83)..(83): Xaa can be any naturally occurring amino acid
  misc_feature (93)..(93): Xaa can be any naturally occurring amino acid
  Transcript Sequence Number=SeqID_57456
  Gene Ontology: Mol. function=L-threonine ammonia-lyase activity; Cellular component=chloroplast; Biological process=isoleucine biosynthetic process
  Homolog annotation: Hit_ID=Q10DZ5; Match level="QueryCoverage=88%, HitCoverage=15%, E-value=1e-33, Identity=76%"; Hit description =Threonine dehydratase biosynthetic, chloroplast, putative, expressed
  Pfam annotation: Domain name=Thr_dehydrat_C; Domain location=9-97; Score=63.2; E_value=9.6e-16; Accession=PF00585.10; Description=C -terminal regulatory domain of Threonine dehydratase
LTCNFVLYCLVRKREAVLATFLPEEQGSFKRFTELVGRMNITEFKYRYDSNAKDALVLYSVGIYTDNELGAMVDRMESAKTEXTLTLTDNDLXKDHLRYFIGGRSEIK

SEQ ID NO: 123431 - protein, 63 aa, Setaria italica
  misc_feature (9)..(9): Xaa can be any naturally occurring amino acid
  Transcript Sequence Number=SeqID_57457
  Gene Ontology: Mol. function=L-threonine ammonia-lyase activity; Cellular component=chloroplast; Biological process=isoleucine biosynthetic process
  Homolog annotation: Hit_ID=Q10DZ5; Match level="QueryCoverage=82%, HitCoverage=8%, E-value=1e-19, Identity=88%"; Hit description =Threonine dehydratase biosynthetic, chloroplast, putative, expressed
LCHGKRVMXEHVGGFADGVAVKTVGEETFRLCRELVDGIVMVSRDAICASNKRNNSLEGRKRK

SEQ ID NO: 123432 - protein, 100 aa, Setaria italica
  Transcript Sequence Number=SeqID_57458
  Gene Ontology: Mol. function=catalytic activity; Cellular component =plasma membrane; Biological process=cellular metabolic process
  Homolog annotation: Hit_ID=B6T7H1; Match level="QueryCoverage=97%, HitCoverage=30%, E-value=5e-35, Identity=78%"; Hit description =Dihydroflavonol-4-reductase
GKVKRVVLVSSVAAVFNNPKWPKGKAFDEDSWSDEDYCRKNEEWYLLSKILSEREASAYAAKTGLDMVTICPSLVIGPLMQSTLNTSVKIFLDYIKGESI

SEQ ID NO: 123433 - protein, 68 aa, Setaria italica
  misc_feature (34)..(34): Xaa can be any naturally occurring amino acid
  Transcript Sequence Number=SeqID_57459
  Homolog annotation: Hit_ID=B6T7H1; Match level="QueryCoverage=100%, HitCoverage=30%, E-value=1e-16, Identity=45%"; Hit description =Dihydroflavonol-4-reductase
KTGLDMVTICPSLVIGPLMQSTLNTSVKIFLDYXKASGRYICSSTPIRVRDIMDILRTMHPTSRWPKR

SEQ ID NO: 123434 - protein, 63 aa, Setaria italica
  Transcript Sequence Number=SeqID_57460
FFVFFFFWLYSFPFFFLALFDLQYIIYKIYNWGEATNIASPPPYHPWVKDWLMLTYKESFAPL

SEQ ID NO: 123435 - protein, 58 aa, Setaria italica
  Transcript Sequence Number=SeqID_57461
  Gene Ontology: Mol. function=nucleotide binding; Cellular component =myosin complex
  Homolog annotation: Hit_ID=Q9M5A6; Match level="QueryCoverage=100%, HitCoverage=3%, E-value=1e-18, Identity=74%"; Hit description =Unconventional myosin XI
  Subcellular localization annotation: CTP_CleavageSite=29; ConfidenceScore=5.03e-01
MQNEDDNCNLAYWLSNTSSLLFLLQRSLKAAGAPGSVSRKKPPQPTSLFGRMALGLRS

SEQ ID NO: 123436 - protein, 77 aa, Setaria italica
  Transcript Sequence Number=SeqID_57462
  Gene Ontology: Mol. function=nucleotide binding; Cellular component =myosin complex
  Homolog annotation: Hit_ID=B0CN59; Match level="QueryCoverage=55%, HitCoverage=2%, E-value=2e-11, Identity=74%"; Hit description=Myosin XI-2
ILSRTIPYIFSTYAASMLRVSARLSGQSQNQSNNWQKIIESLDKLLRTLQDNHVPPVLAQKIFTQIFSYINVQLFNS

SEQ ID NO: 123437 - protein, 56 aa, Setaria italica
  Transcript Sequence Number=SeqID_57463
  Gene Ontology: Mol. function=inositol or phosphatidylinositol phosphatase activity
HSIGFVDGVQQNSWCEATRGMGAVLLVNVTGSASTETITHRINVQHCCPVHSAPPP

SEQ ID NO: 123438 - protein, 96 aa, Setaria italica
  misc_feature (80)..(80): Xaa can be any naturally occurring amino acid
  misc_feature (93)..(93): Xaa can be any naturally occurring amino acid
  Transcript Sequence Number=SeqID_57464
  Gene Ontology: Mol. function=inositol or phosphatidylinositol phosphatase activity
  Homolog annotation: Hit_ID=O80560; Match level="QueryCoverage=79%, HitCoverage=5%, E-value=1e-16, Identity=53%"; Hit description=Type I inositol-1,4,5-trisphosphate 5-phosphatase 12
VSNLFSSVLIEPGETMEVAVHHEEFFTKEEFVDGVQQNSWCEATRGMGAVLLVNVTGSASTETITHRINVQHCCPVHSAXPPVNPHSITDKPXDAV

SEQ ID NO: 123439 - protein, 28 aa, Setaria italica
  Transcript Sequence Number=SeqID_57465
VRRILICESYRGKCTCAFTVGNCIFFGR

SEQ ID NO: 123440 - protein, 49 aa, Setaria italica
  Transcript Sequence Number=SeqID_57466
  Gene Ontology: Mol. function=nucleic acid binding
QDFISYLINRECAGVIRVPAVNSMWTRLLFILPPTPDACGMLALPPHQV

SEQ ID NO: 123441 - protein, 136 aa, Setaria italica
  Transcript Sequence Number=SeqID_57467
  Gene Ontology: Mol. function=translation elongation factor activity; Cellular component=cytoplasm; Biological process=translational elongation
  Homolog annotation: Hit_ID=B9FBM7; Match level="QueryCoverage=81%, HitCoverage=25%, E-value=3e-58, Identity=97%"; Hit description =Elongation factor 1-alpha
  Pfam annotation: Domain name=GTP_EFTU_D3; Domain location=49-136; Score=116.1; E_value=1.1e-31; Accession=PF03143.9; Description =Elongation factor Tu C-terminal domain
  Subcellular localization annotation: CTP_CleavageSite=40; ConfidenceScore=5.07e-01
ATTPGWSTPTRRTSRTARCSGSCTCHVKNVAVKDLKRGFVASNSKDDPAKEAASFTSQVIIMNHPGQIGNGYAPVLDCHTSHIAVKFAELITKIDRRSGKELEKEPKFLKNGDAGMVKMIPTKPMVVETFSEYPPL

SEQ ID NO: 123442 - protein, 74 aa, Setaria italica
  Transcript Sequence Number=SeqID_57468
  Gene Ontology: Mol. function=hydrolase activity, acting on ester bonds; Biological process=lipid metabolic process
  Homolog annotation: Hit_ID=B6TLP8; Match level="QueryCoverage=66%, HitCoverage=12%, E-value=6e-20, Identity=91%"; Hit description=Alpha- L-fucosidase 2
VRAGCKSYLANSLFVFGEFGGNDYNAMIFGGYTTEQARKYTPKIVNTISRGIDVSSRCATFLPLTCKSTGALVS

SEQ ID NO: 123443 - protein, 63 aa, Setaria italica
  misc_feature (51)..(51): Xaa can be any naturally occurring amino acid
  misc_feature (56)..(56): Xaa can be any naturally occurring amino acid
  Transcript Sequence Number=SeqID_57469
LKEMTTGDKLQQGRTVTLFHMLQFVLAVTYHRLSSVTKSIKMVQVFVTKKXKKLKXTAKAHRG

SEQ ID NO: 123444 - protein, 51 aa, Setaria italica
  Transcript Sequence Number=SeqID_57470
  Gene Ontology: Mol. function=hydrolase activity, acting on ester bonds; Biological process=lipid metabolic process
  Homolog annotation: Hit_ID=B6TLP8; Match level="QueryCoverage=100%, HitCoverage=13%, E-value=2e-18, Identity=82%"; Hit description=Alpha- L-fucosidase 2
FYSGVYDMVKNPGSYGFSTAFQTCCGSGGGKYNYQNSARCGMSGASACSNP

SEQ ID NO: 123445 - protein, 87 aa, Setaria italica
  Transcript Sequence Number=SeqID_57471
  Subcellular localization annotation: CTP_CleavageSite=56; ConfidenceScore=5.33e-01
RQSYLPPPFSLSIQVHKHLQRFWSRLGEFPSNSLQPPVSWHPVSRFQGREHSTCFRANSVQHQAKQLLGVGRTPPCPNTKVPFNPPD

SEQ ID NO: 123446 - protein, 84 aa, Setaria italica
  misc_feature (23)..(23): Xaa can be any naturally occurring amino acid
  misc_feature (57)..(57): Xaa can be any naturally occurring amino acid
  Transcript Sequence Number=SeqID_57472
  Gene Ontology: Mol. function=protein serine/threonine kinase activity; Biological process=protein amino acid phosphorylation
  Homolog annotation: Hit_ID=B6U4S9; Match level="QueryCoverage=98%, HitCoverage=12%, E-value=1e-27, Identity=73%"; Hit description =Protein kinase G11A
LLRQRQPGKHFSEYAARFYAAEXFLALEYLHMLGVVYRDLKPENVLVRDDGHIMLSXFDLSLRCAVSPTLIRTSAFDTDPRRAG

SEQ ID NO: 123447 - protein, 45 aa, Setaria italica
  Transcript Sequence Number=SeqID_57473
  Gene Ontology: Mol. function=protein serine/threonine kinase activity; Biological process=protein amino acid phosphorylation
  Homolog annotation: Hit_ID=B6U4S9; Match level="QueryCoverage=75%, HitCoverage=4%, E-value=2e-14, Identity=97%"; Hit description =Protein kinase G11A
PIKEILQLLDHPFLPTLYTHFETDRFSCLVMEFCPGCLCRRVCRS

SEQ ID NO: 123448 - protein, 84 aa, Setaria italica
  misc_feature (5)..(5): Xaa can be any naturally occurring amino acid
  Transcript Sequence Number=SeqID_57474
  Gene Ontology: Mol. function=protein serine/threonine phosphatase activity; Cellular component=protein serine/threonine phosphatase complex; Biological process=protein amino acid dephosphorylation
  Homolog annotation: Hit_ID=B6TY17; Match level="QueryCoverage=92%, HitCoverage=22%, E-value=1e-33, Identity=89%"; Hit description =Protein phosphatase 2C
VIFWXGARVLGVLAMSRAIGDGYLKPYVSSVPEVTVTDLVEDDECLILASDGLWDVVSNEAACEVARACLRRGREKWCAEAAAL

SEQ ID NO: 123449 - protein, 80 aa, Setaria italica
  Transcript Sequence Number=SeqID_57475
VWDGMRCDRPCPVHLYISGRIQSRQGATYATWLTIPILSMWFVWNSAQESSYQDRSLTNSNKSKSSEIQSQHDSSILAQV

SEQ ID NO: 123450 - protein, 142 aa, Setaria italica
  misc_feature (29)..(29): Xaa can be any naturally occurring amino acid
  misc_feature (89)..(89): Xaa can be any naturally occurring amino acid
  Transcript Sequence Number=SeqID_57476
  Gene Ontology: Mol. function=nucleoside-triphosphatase activity; Cellular component=cytoplasm; Biological process=protein metabolic process
  Homolog annotation: Hit_ID=Q9SYS9; Match level="QueryCoverage=96%, HitCoverage=23%, E-value=4e-58, Identity=84%"; Hit description=101 kDa heat shock protein (Fragment)
  Pfam annotation: Domain name=AAA_2; Domain location=78-142; Score= -1.7; E_value=1.7e-05; Accession=PF07724.6; Description=ATPase family associated with various
ETGENLMLTENVGPEQIAEVVSRWTGIPXDPGLGQNDKERLVGLADRLHQRVVGQAEAVSAVAEAVLRSRAGLGRPQQPTGSFLFLGPXTGVGKTELAKALAEQLFDDENLLVRIDMSEYMEQHSVARLIGAPPGYVWSYCR

SEQ ID NO: 123451 - protein, 108 aa, Setaria italica
  misc_feature (8)..(8): Xaa can be any naturally occurring amino acid
  misc_feature (10)..(10): Xaa can be any naturally occurring amino acid
  Transcript Sequence Number=SeqID_57477
  Gene Ontology: Mol. function=ion channel activity; Cellular component= integral to membrane; Biological process=ion transport
  Homolog annotation: Hit_ID=Q6K4N3; Match level="QueryCoverage=97%, HitCoverage=23%, E-value=4e-51, Identity=90%"; Hit description =Cyclic nucleotide-gated calmodulin-binding ion channel-like
PADLRRDXKXHLCLGLVRRVPFFSQMDDQLLDAICERLVSSLCTKGTHIVREGDPVTEMLFIIRGKLESSTTNGGRSGFFNSITLKPGDFCGEELLGWALAPKPNHQT

SEQ ID NO: 123452 - protein, 131 aa, Setaria italica
  misc_feature (23)..(23): Xaa can be any naturally occurring amino acid
  Transcript Sequence Number=SeqID_57478
  Gene Ontology: Mol. function=ion channel activity; Cellular component= integral to membrane; Biological process=ion transport
  Homolog annotation: Hit_ID=Q6K4N3; Match level="QueryCoverage=90%, HitCoverage=26%, E-value=1e-59, Identity=92%"; Hit description =Cyclic nucleotide-gated calmodulin-binding ion channel-like
  Pfam annotation: Domain name=cNMP_binding; Domain location=2-102; Score=32.6; E_value=1.5e-06; Accession=PF00027.21; Description =Cyclic nucleotide-binding domain
VSSLCTKGTHIVREGDPVTEMLXIIRGKLESSTTNGGRSGFFNSITLKPGDFCGEELLGWALAPKPTTNLPSSTRTVKALIEVEAFALQAEDLKFVANQFRRLHSKKLQHTFRYYSHHLVVTLGPSLSFYS

SEQ ID NO: 123453 - protein, 119 aa, Setaria italica
  misc_feature (39)..(39): Xaa can be any naturally occurring amino acid
  Transcript Sequence Number=SeqID_57479
  Gene Ontology: Mol. function=ion channel activity; Cellular component= integral to membrane; Biological process=ion transport
  Homolog annotation: Hit_ID=Q6K4N3; Match level="QueryCoverage=81%, HitCoverage=21%, E-value=2e-28, Identity=63%"; Hit description =Cyclic nucleotide-gated calmodulin-binding ion channel-like
  Subcellular localization annotation: CTP_CleavageSite=63; ConfidenceScore=5.01e-01
ISSLFANQFRRLHSKKCSTLSGTYSHHWRTWASCFIQAXFWRRYKRRKMAKDLSMRESFNSVRLDEVDEEDESPPKNSLALKFIARTRKAPQRTKEISQKTKGKTKNETGIYYKTRNLE

SEQ ID NO: 123454 - protein, 54 aa, Setaria italica
  Transcript Sequence Number=SeqID_57480
QDYHKYTIIWNKDWILFLVDDKLYRQIKNNQMYGAPYPYYYPMRVYATICEWLL

SEQ ID NO: 123455 - protein, 126 aa, Setaria italica
  Transcript Sequence Number=SeqID_57481
  Gene Ontology: Mol. function=tryptophan synthase activity; Cellular component=chloroplast; Biological process=aromatic amino acid family biosynthetic process
  Homolog annotation: Hit_ID=P43284; Match level="QueryCoverage=83%, HitCoverage=23%, E-value=7e-47, Identity=88%"; Hit description =Tryptophan synthase beta chain 2, chloroplastic (Fragment)
IGQETRRAGHGRNGGGKPDVLVACVGGGSNAMGLFHEFVDDQDVRLIGVEAAGHGVDTDKHAATLTKGEVGVLHGSMSYLLQDDDGQVIEPHSISAGLDYPGVGPCSLLVFFVKVIYFGYVCSLLV

SEQ ID NO: 123456 - protein, 83 aa, Setaria italica
  Transcript Sequence Number=SeqID_57482
DISRKFRMSMLLIRTVSPDIRMFKVHTINLLLSVFGRWIGNQLDQIGLQRMVRDSNKHTVQCLLICYTVVLSTSNILQETVLT

SEQ ID NO: 123457 - protein, 75 aa, Setaria italica
  Transcript Sequence Number=SeqID_57483
  Gene Ontology: Mol. function=tryptophan synthase activity; Cellular component=chloroplast; Biological process=aromatic amino acid family biosynthetic process
  Homolog annotation: Hit_ID=P43284; Match level="QueryCoverage=84%, HitCoverage=14%, E-value=2e-29, Identity=100%"; Hit description =Tryptophan synthase beta chain 2, chloroplastic (Fragment)
GQVIEPHSISAGLDYPGVGPEHSFLKDIGRAEYDSVTDQEALDAFKRVSRLEGIIPALETSHAGMMPSRRETRLK

SEQ ID NO: 123458 - protein, 92 aa, Setaria italica
  Transcript Sequence Number=SeqID_57484
  Gene Ontology: Mol. function=nucleic acid binding
  Homolog annotation: Hit_ID=B6U9Q3; Match level="QueryCoverage=82%, HitCoverage=16%, E-value=5e-14, Identity=53%"; Hit description=F-box domain containing protein
LQLFIWRVQRSTTLTGKLANEGSVSYARTEPPSSMPNLEALALNSQTERAHAPMLQSKFLRLRHLSIALTAANYDYLSLVSFFDAAPSLETF

SEQ ID NO: 123459 - protein, 35 aa, Setaria italica
  Transcript Sequence Number=SeqID_57485
QFAAGIKTVLLVPVVPHGVLQLGSLHKVRSACLIK

SEQ ID NO: 123460 - protein, 50 aa, Setaria italica
  Transcript Sequence Number=SeqID_57486
  Gene Ontology: Mol. function=hydrolase activity
  Homolog annotation: Hit_ID=B6TZ49; Match level="QueryCoverage=88%, HitCoverage=20%, E-value=9e-11, Identity=67%"; Hit description=Nudix hydrolase 13
ACKGFMFGLQVTELLEIWPEQVTHGRRWVSMSFHSCNLIWRRDSKSAASS

SEQ ID NO: 123461 - protein, 41 aa, Setaria italica
  Transcript Sequence Number=SeqID_57487
ATKVKVSPEKRKEKKKDNCTSMQTLMMYLKFADAKKSSLQL

SEQ ID NO: 123462 - protein, 46 aa, Setaria italica
  Transcript Sequence Number=SeqID_57488
  Gene Ontology: Mol. function=metal ion binding; Cellular component =nucleus; Biological process=regulation of transcription, DNA -dependent
  Homolog annotation: Hit_ID=B6U9A8; Match level="QueryCoverage=84%, HitCoverage=49%, E-value=2e-12, Identity=89%"; Hit description =Transcription elongation factor 1
GSSVECRIDMKNLIGEASCRICQENFSTTVNGMSKLYIQLHYFPLI

SEQ ID NO: 123463 - protein, 38 aa, Setaria italica
  Transcript Sequence Number=SeqID_57489
  Pfam annotation: Domain name=Elf1; Domain location=2-38; Score=-0.6; E_value=0.00048; Accession=PF05129.5; Description=Transcription elongation factor Elf1 like
MGKRKSAAKPPPKKRMDKLDTVFSCPFCNHGSSVECRM

SEQ ID NO: 123464 - protein, 52 aa, Setaria italica
  Transcript Sequence Number=SeqID_57490
YSTLQRAKQSTLASVLHAGGDALHGEDERELCPHADETVTCNCVMYWHSRMP

SEQ ID NO: 123465 - protein, 44 aa, Setaria italica
  Transcript Sequence Number=SeqID_57491
PDTLSPRFGTADNALTEWEFQPAYYYQLAATYLREKRYAIECSS

SEQ ID NO: 123466 - protein, 37 aa, Setaria italica
  Transcript Sequence Number=SeqID_57492
VRTKGKLQAHTDSTLKCLRDHFQRSIRLAWLYFTINI

SEQ ID NO: 123467 - protein, 111 aa, Setaria italica
  Transcript Sequence Number=SeqID_57493
  Gene Ontology: Mol. function=metal ion binding
  Homolog annotation: Hit_ID=B6TCR8; Match level="QueryCoverage=69%, HitCoverage=23%, E-value=1e-33, Identity=93%"; Hit description =Protein binding protein
KVKTLKSKKVKRNNPNGTLRRNERRTITTRRRLDKDAEEREVAARLMALAGLSDWRAVDVEHEEDHVNDPQEAWQEVDPDEYSYEELVALGEVVGTESRGLSADTLASLPS

SEQ ID NO: 123468 - protein, 82 aa, Setaria italica
  misc_feature (17)..(17): Xaa can be any naturally occurring amino acid
  Transcript Sequence Number=SeqID_57494
  Gene Ontology: Mol. function=metal ion binding
STPPGDVDGEGEGAEGXRGAEGSDYEEEFEEDEEGEPEVDPADFEDDEAYARALQDAEEREVAARLMALAGLSDCEYKRFVS

SEQ ID NO: 123469 - protein, 71 aa, Setaria italica
  Transcript Sequence Number=SeqID_57495
LNCRTALQQLLSQHIWQDLMKQMFISRHQQLALYPQGRGAVLECSCVRCFNGGAVAETMPYHGRDCWWGKG

SEQ ID NO: 123470 - protein, 63 aa, Setaria italica
  Transcript Sequence Number=SeqID_57496
MNICFMRSCHMCCDNNCCNAVLQFKLQVFFEQQWQKLHIMMEVAKLVFEVKLQISFRVVDKKK

SEQ ID NO: 123471 - protein, 56 aa, Setaria italica
  misc_feature (46)..(46): Xaa can be any naturally occurring amino acid
  Transcript Sequence Number=SeqID_57497
  Homolog annotation: Hit_ID=Q8W195; Match level="QueryCoverage=83%, HitCoverage=26%, E-value=2e-09, Identity=62%"; Hit description=Zinc finger protein LSD1
  Pfam annotation: Domain name=zf-LSD1; Domain location=17-41; Score =58.4; E_value=2.7e-14; Accession=PF06943.4; Description=LSD1 zinc finger
  Subcellular localization annotation: CTP_CleavageSite=8; ConfidenceScore=5.01e-01
MIPLFSVAANQVAHVNCGNCRMLLMYQYGARSVKCAVCNFVTSVGXSPGAEQKPSS

SEQ ID NO: 123472 - protein, 103 aa, Setaria italica
  Transcript Sequence Number=SeqID_57498
  Subcellular localization annotation: CTP_CleavageSite=31; ConfidenceScore=5.28e-01
LGRWFLEHFLYISFSLVFFPNFAKKNVYSVRSSDASHMVARRVYVPYMFTEFAIWTLANFRTVTSSSVADQRRQERQPRDEEHDVEEVVGLQRLVRAASETPS

SEQ ID NO: 123473 - protein, 70 aa, Setaria italica
  Transcript Sequence Number=SeqID_57499
AKKNVYSVRSSDASHMVARRVYVPYMFTEFAIWTLANFRTVTSSSVADQRRQERQPAMKEDNRIVRRKVS

SEQ ID NO: 123474 - protein, 63 aa, Setaria italica
  Transcript Sequence Number=SeqID_57500
  Gene Ontology: Mol. function=peroxidase activity; Cellular component =chloroplast thylakoid membrane; Biological process=response to oxidative stress
  Homolog annotation: Hit_ID=B6TEY2; Match level="QueryCoverage=100%, HitCoverage=13%, E-value=6e-26, Identity=93%"; Hit description =Thylakoid-bound ascorbate peroxidase APx8
LSQLPSKEQKDQDLLVLPTDAALFEDPSFKVYAEKYAEDQEAFFKDYAEAHAKLSDLGAKFDP

SEQ ID NO: 123475 - protein, 63 aa, Setaria italica
  Transcript Sequence Number=SeqID_57501
HLNILLYILFSTDKLSESVILEVVMKNFKNHLILGEEGGLIGDSLSEYLWCIDPFRFGSSLSS

SEQ ID NO: 123476 - protein, 66 aa, Setaria italica
  Transcript Sequence Number=SeqID_57502
VDHSTYIFSMHKERLAQGNCFYRFIRSLLCFPIPKRVSLKPTTQSIYASSKSISYFTFHNDPHTEQ

SEQ ID NO: 123477 - protein, 87 aa, Setaria italica
  misc_feature (15)..(15): Xaa can be any naturally occurring amino acid
  Transcript Sequence Number=SeqID_57503
MVGGIRHAGGRGNSXGKFLNQSSPLCRVRKSHAGVLPYLGANMAGIHHHPLYHFQCLVIWPLSPLHHPCAFSLREGWAGPDLTNLSF

SEQ ID NO: 123478 - protein, 95 aa, Setaria italica
  Transcript Sequence Number=SeqID_57504
  Gene Ontology: Mol. function=protein binding; Cellular component =plasma membrane
  Homolog annotation: Hit_ID=B8Y9B4; Match level="QueryCoverage=65%, HitCoverage=10%, E-value=5e-11, Identity=56%"; Hit description =Transport inhibitor response protein
LLILIVNVTLKGCQVLASKMPMLNVEIMNELDGSSEMEENHGDPSRVDKLYVYRTTAGARDDAPNFVKSYRASCSSLVSSHPKDGRGIRHGRGRG

SEQ ID NO: 123479 - protein, 45 aa, Setaria italica
  Transcript Sequence Number=SeqID_57505
IFEPKKPDAITNQPLDEGFGAIVRECRGLRRLSISGLLTDKVVLH

SEQ ID NO: 123480 - protein, 59 aa, Setaria italica
  misc_feature (33)..(33): Xaa can be any naturally occurring amino acid
  Transcript Sequence Number=SeqID_57506
KSHAGVLPYLGANMAGIHHHPLYHFQCLVIWPXEPPFIILVHSHYRLQGGEKKRLVRSG

SEQ ID NO: 123481 - protein, 74 aa, Setaria italica
  Transcript Sequence Number=SeqID_57507
  Gene Ontology: Cellular component=nucleus
  Homolog annotation: Hit_ID=B9H437; Match level="QueryCoverage=70%, HitCoverage=11%, E-value=2e-16, Identity=69%"; Hit description=SET domain-containing protein (Fragment)
SGGLDVHPDDFSLDKYFAAKTLVSSRSFQIDNYHGFGMVPLADLFNHKTDGEHVHFTSASDDSDSDGEDHDEQS

SEQ ID NO: 123482 - protein, 95 aa, Setaria italica
  Transcript Sequence Number=SeqID_57508
  Subcellular localization annotation: CTP_CleavageSite=68; ConfidenceScore=5.55e-01
AAKVPDTEQPFSLASSLLLHTAPPMAAVPPPLPCSTTGPLAGAGVQPSRARIRRGAPLWTLWRGGLVTTASGSEARRRQRIGTRHVKLKSAGGHT

SEQ ID NO: 123483 - protein, 59 aa, Setaria italica
  Transcript Sequence Number=SeqID_57509
  Gene Ontology: Mol. function=hydrolase activity; Cellular component =membrane; Biological process=proton transport
  Homolog annotation: Hit_ID=Q8SAZ7; Match level="QueryCoverage=84%, HitCoverage=6%, E-value=3e-18, Identity=84%"; Hit description =Putative proton pump
GARGLGGYDDLGLIQFKDLNAEKSPFQRTYAAQIKRCSEMARKLRFFKEQMSKANISPS

SEQ ID NO: 123484 - protein, 33 aa, Setaria italica
  Transcript Sequence Number=SeqID_57510
  Gene Ontology: Mol. function=hydrolase activity; Cellular component =membrane; Biological process=proton transport
  Homolog annotation: Hit_ID=B9R827; Match level="QueryCoverage=96%, HitCoverage=3%, E-value=2e-10, Identity=100%"; Hit description =Vacuolar proton atpase, putative
FSEVFVHQLIHTIEFVLGAVSNTASYLRLWALR

SEQ ID NO: 123485 - protein, 56 aa, Setaria italica
  Transcript Sequence Number=SeqID_57511
  Gene Ontology: Cellular component=membrane; Biological process=proton transport
  Homolog annotation: Hit_ID=Q8SAZ7; Match level="QueryCoverage=60%, HitCoverage=4%, E-value=2e-10, Identity=82%"; Hit description =Putative proton pump
HLLALVSVPWMLIPKPVLLKKQHERRHQGHQYAMLQGTDESVGAELGNFTKLKLLM

SEQ ID NO: 123486 - protein, 76 aa, Setaria italica
  misc_feature (40)..(40): Xaa can be any naturally occurring amino acid
  Transcript Sequence Number=SeqID_57512
  Gene Ontology: Mol. function=hydrolase activity; Cellular component =membrane; Biological process=proton transport
  Homolog annotation: Hit_ID=Q8GUB1; Match level="QueryCoverage=71%, HitCoverage=6%, E-value=2e-16, Identity=75%"; Hit description =Putative vacuolar ATPase subunit 100 kDa subunit
TTSLSLPFVLLGLLVVLAHSELSTVFYDKVLMLTWRMNNXVVALILGVIIFIFATIGVLLVMETLSAFLHALRLHW

SEQ ID NO: 123487 - protein, 76 aa, Setaria italica
  Transcript Sequence Number=SeqID_57513
LLKKQHERRHQGHQYAMLQGTDESVGAELGEHHDESHDHEEFEFSEVFVHQTRIPTTNTKFSYLGRPYYKTTKYFN

SEQ ID NO: 123488 - protein, 74 aa, Setaria italica
  Transcript Sequence Number=SeqID_57514
  Gene Ontology: Mol. function=protein dimerization activity; Cellular component=nucleus; Biological process=regulation of transcription, DNA-dependent
  Homolog annotation: Hit_ID=Q01IQ5; Match level="QueryCoverage=68%, HitCoverage=11%, E-value=1e-18, Identity=84%"; Hit description =OSIGBa0159F11.9 protein
RLQDALNDRLRDEIQQLKIATGQVNANIGKMGSFGLSTFGGNPQSFQRSHILVRLSWSCSFLVLSCKQLQIHSQ

SEQ ID NO: 123489 - protein, 37 aa, Setaria italica
  Transcript Sequence Number=SeqID_57515
TPTNRILLLQLQALVGFEKTIKHLDNHLVEIGTKVKT

SEQ ID NO: 123490 - protein, 81 aa, Setaria italica
  Transcript Sequence Number=SeqID_57516
  Gene Ontology: Mol. function=heat shock protein binding; Cellular component=plasma membrane; Biological process=protein folding
  Homolog annotation: Hit_ID=B9RNG7; Match level="QueryCoverage=81%, HitCoverage=19%, E-value=5e-29, Identity=84%"; Hit description =Chaperone protein dnaJ, putative
LFGGGGGMEEEEEQILKGDEVVVELDASLEDLYMGGSLKVWREKNVIKPAAGKRQCNCRNEVYHRQIGPGMYQQMTEQVIF

SEQ ID NO: 123491 - protein, 43 aa, Setaria italica
  Transcript Sequence Number=SeqID_57517
MAAPGKGGAARIAAAFLVLLHLVAAIAGKSYYDVLQVPKGASE

SEQ ID NO: 123492 - protein, 55 aa, Setaria italica
  misc_feature (46)..(46): Xaa can be any naturally occurring amino acid
  Transcript Sequence Number=SeqID_57518
LLHAGHCLIFSSFFGGGGGMEEEEEQILKGDEVVVELDASLEDLYXGGSLKVWRE

SEQ ID NO: 123493 - protein, 83 aa, Setaria italica
  Transcript Sequence Number=SeqID_57519
  Gene Ontology: Mol. function=hydrolase activity, hydrolyzing O -glycosyl compounds; Biological process=carbohydrate metabolic process
  Homolog annotation: Hit_ID=B6U0V2; Match level="QueryCoverage=96%, HitCoverage=28%, E-value=1e-27, Identity=68%"; Hit description =Hydrolase, hydrolyzing O-glycosyl compounds
  Pfam annotation: Domain name=X8; Domain location=1-81; Score=142.1; E_ value=1.7e-39; Accession=PF07983.5; Description=X8 domain
VANAAVGETRLQAALDYACGHGADCSAIQRGGSCFYPDTKLAHASYAVNSYYQNKGRAASACDFNGAASVVFQKPEGTCDASA

SEQ ID NO: 123494 - protein, 68 aa, Setaria italica
  Transcript Sequence Number=SeqID_57520
MALTRGLIVVVLGATLPLLLLSHEAEASEVGVSYGTVAGNLPDPAKVSKLLKDNGITMVRIYDANSAV

SEQ ID NO: 123495 - protein, 108 aa, Setaria italica
  misc_feature (20)..(20): Xaa can be any naturally occurring amino acid
  Transcript Sequence Number=SeqID_57521
  Gene Ontology: Mol. function=transporter activity; Cellular component= integral to membrane; Biological process=transport
  Homolog annotation: Hit_ID=B6U0S4; Match level="QueryCoverage=53%, HitCoverage=13%, E-value=8e-25, Identity=91%"; Hit description =Patellin-5
AETLYKFIRPELVPVQYGGXSRAGDLENGPPKPASEFTIKGGEKVFLEIDGIEVCAAILPFVRSLLHWELKTALSDCCHDCNFVSLVQICVCRYKQIQIPVGAKKPHI

SEQ ID NO: 123496 - protein, 54 aa, Setaria italica
  Transcript Sequence Number=SeqID_57522
NICFLFYSLCSYGAVLENLQSRADITERIRGCIVDSAPVLEIRPEVCAPVLFSY

SEQ ID NO: 123497 - protein, 52 aa, Setaria italica
  misc_feature (19)..(19): Xaa can be any naturally occurring amino acid
  Transcript Sequence Number=SeqID_57523
PSTESLDGPIVNGSLNRVXLLNVMRPSWGECFILSTLQKFFEIVLYVPDINT

SEQ ID NO: 123498 - protein, 60 aa, Setaria italica
  Transcript Sequence Number=SeqID_57524
IVASIYSISILLYYYFRHINNSVSFIRKTLQKRLKKLKMLQRTKATCDGNIAVVPACTYL

SEQ ID NO: 123499 - protein, 99 aa, Setaria italica
  Transcript Sequence Number=SeqID_57525
  Gene Ontology: Mol. function=sodium:dicarboxylate symporter activity; Cellular component=plasma membrane
  Homolog annotation: Hit_ID=UPI0001A7B14A; Match level="QueryCoverage =100%, HitCoverage=12%, E-value=2e-37, Identity=71%"; Hit description= aminopeptidase
PEKKNPTLTPMDWVKFLISAVIGLVTLVGSLEMPKADVWVVIAILSGVIGYCAKIYFTFQQNMTIYQNLITKSMYDKQLDSGKGTLLHLCDDVIQQEVK

SEQ ID NO: 123500 - protein, 42 aa, Setaria italica
  Transcript Sequence Number=SeqID_57526
MKLNEDEEEPELFVERIRLEKIELSMKNLMSKMTIQEPTFDR

SEQ ID NO: 123501 - protein, 88 aa, Setaria italica
  misc_feature (51)..(51): Xaa can be any naturally occurring amino acid
  misc_feature (66)..(66): Xaa can be any naturally occurring amino acid
  Transcript Sequence Number=SeqID_57527
  Gene Ontology: Mol. function=sodium:dicarboxylate symporter activity; Cellular component=plasma membrane
  Homolog annotation: Hit_ID=UPI0001A7B14A; Match level="QueryCoverage =80%, HitCoverage=8%, E-value=6e-13, Identity=49%"; Hit description =aminopeptidase
DEEYDIAQSGKYLLNLPIKVDESKLDKKLLTKYFKEHPHENLPELRTSILXFRRGVGIDRTTDYFXMEKVDVNCYLFPVSSWRSLLRF

SEQ ID NO: 123502 - protein, 83 aa, Setaria italica
  Transcript Sequence Number=SeqID_57528
HPFIHCVKESLNPVFATHHLTVWYNNIFVLCQISRLREYQGVDPHFDVIARQYHEIVKKLEGMQWTIHQVEMDLKPHHDHAAV

SEQ ID NO: 123503 - protein, 128 aa, Setaria italica
  misc_feature (112)..(112): Xaa can be any naturally occurring amino acid
  Transcript Sequence Number=SeqID_57529
FGWLFPCIRFLGITSDYLYQVQQEQPAMSVDMVDYQRTLAREIEARLEAKCDALADLFAMDERDSSSISQISSARLPERVKLIIEEIEKEEAHLLEDLASMDRKFAEHYNVXLEQILAVLIQFVKDKK

SEQ ID NO: 123504 - protein, 105 aa, Setaria italica
  Transcript Sequence Number=SeqID_57530
  Homolog annotation: Hit_ID=B6TB66; Match level="QueryCoverage=59%, HitCoverage=15%, E-value=7e-25, Identity=85%"; Hit description=50S ribosomal protein L1
RSAGHEERIGVPVEEEQVPYPTIIPVVKRPQKVTIDLVDAIRLVKTSTNEKKRNFVETVEAHVMLGVDPRRGDQVCVLLCKKIPRCNICYPTEFYCMLILLFFFT

SEQ ID NO: 123505 - protein, 85 aa, Setaria italica
  Transcript Sequence Number=SeqID_57531
  Subcellular localization annotation: CTP_CleavageSite=48; ConfidenceScore=5.05e-01
HQIWLINRGKQGHFTFLLICPKISRMTCFFLTEGVCSRHCFRLPASCNSSLGVKGIPLFFAIPLAYKQRTGFLCDVNLHRCQKTA

SEQ ID NO: 123506 - protein, 83 aa, Setaria italica
  misc_feature (43)..(43): Xaa can be any naturally occurring amino acid
  misc_feature (78)..(78): Xaa can be any naturally occurring amino acid
  Transcript Sequence Number=SeqID_57532
  Gene Ontology: Mol. function=peptidase activity
  Homolog annotation: Hit_ID=Q10NL2; Match level="QueryCoverage=97%, HitCoverage=32%, E-value=1e-28, Identity=79%"; Hit description=OTU -like cysteine protease family protein, expressed
RIRRPDFWGGESELLVLSRLCRQPIIIYIPERELGSYLSCMFXYHGRGNGFIPIAEYGLEFAKNSKNWKKKAPVRLLXSGRIT

SEQ ID NO: 123507 - protein, 53 aa, Setaria italica
  Transcript Sequence Number=SeqID_57533
  Gene Ontology: Mol. function=nucleoside-triphosphatase activity; Cellular component=nucleus; Biological process=meiotic recombination
  Homolog annotation: Hit_ID=Q7GBF7; Match level="QueryCoverage=81%, HitCoverage=12%, E-value=3e-19, Identity=100%"; Hit description=DMC1
FEIYVIRLSCRSGKTQLAHTLCVSTQLPIHMHGGNGKVAYIDTEGTFRPERIV

SEQ ID NO: 123508 - protein, 116 aa, Setaria italica
  misc_feature (84)..(84): Xaa can be any naturally occurring amino acid
  Transcript Sequence Number=SeqID_57534
  Gene Ontology: Mol. function=nucleoside-triphosphatase activity; Cellular component=nucleus; Biological process=meiotic recombination
  Homolog annotation: Hit_ID=Q7GBF7; Match level="QueryCoverage=100%, HitCoverage=33%, E-value=2e-58, Identity=97%"; Hit description=DMC1
  Pfam annotation: Domain name=HHH; Domain location=14-43; Score=15.9; E_value=0.056; Accession=PF00633.15; Description=Helix-hairpin-helix motif
  Pfam annotation: Domain name=Rad51; Domain location=44-116; Score= -114.6; E_value=0.002; Accession=PF08423.3; Description=Rad51
  Pfam module annotation: Pfam domain module=HHH::Rad51; Domain location=14-43::44-116
AGDVKKLQDAGIYTCNGLMMHTKKSLTGIKGLSEAKVDKICEAAEKLLSQGFMTGSDLLLKRKSVVRITTGSQALDELLGGGIXETLCITEAFGEFRSGKTQLAHTLCVSTQLPIH

SEQ ID NO: 123509 - protein, 46 aa, Setaria italica
  Transcript Sequence Number=SeqID_57535
LQFSKLLAQSYAGVMLPFFTPYCIICSICYFSHMISLLLSILFLSL

SEQ ID NO: 123510 - protein, 119 aa, Setaria italica
  Transcript Sequence Number=SeqID_57536
  Gene Ontology: Mol. function=protein dimerization activity
  Homolog annotation: Hit_ID=B6U4H6; Match level="QueryCoverage=100%, HitCoverage=17%, E-value=8e-49, Identity=77%"; Hit description =Transposon protein
HSWGIDRKLAAVVLDNCSGGDLVARELLRVLQPRRLLLNGDLFQVRSCAHILNLTVQESWEHASDITDRVRKMINYVKFERFQKFQDISKLLHMDQKLLVVDSPDSWSSLYIMFESACY

SEQ ID NO: 123511 - protein, 47 aa, Setaria italica
  Transcript Sequence Number=SeqID_57537
YHGHLCCHYDPTEELARDSGTEELDSRLQALEARAALSEASNTRKVS

SEQ ID NO: 123512 - protein, 47 aa, Setaria italica
  Transcript Sequence Number=SeqID_57538
SLKSSSIDIRNNADTTIYSIEKSLGEYRDKIPVEVASEIEAAIADLR

SEQ ID NO: 123513 - protein, 75 aa, Setaria italica
  Transcript Sequence Number=SeqID_57539
  Gene Ontology: Mol. function=translation initiation factor activity; Cellular component=eukaryotic translation initiation factor 2B complex; Biological process=cellular metabolic process
  Homolog annotation: Hit_ID=Q10G37; Match level="QueryCoverage=98%, HitCoverage=12%, E-value=7e-27, Identity=75%"; Hit description =Translation initiation factor eIF-2B delta subunit, putative, expressed
FNELGDPDAISRVPRGESLSHLKNWAENENLHILNLKYDITPSDYVSMLITDYGMLPPTSVPVIVREYRREHVWI

SEQ ID NO: 123514 - protein, 68 aa, Setaria italica
  Transcript Sequence Number=SeqID_57540
LILLNLIKRSMSVAGKVIVSHAVTKIRDDDVLLTEGDPYVNSTSSSLIFVLLTYGSPSVVEMIFDHAH

SEQ ID NO: 123515 - protein, 50 aa, Setaria italica
  Transcript Sequence Number=SeqID_57541
  Gene Ontology: Mol. function=transporter activity; Cellular component= mitochondrial inner membrane; Biological process=transport
  Homolog annotation: Hit_ID=B6UAY5; Match level="QueryCoverage=98%, HitCoverage=15%, E-value=7e-19, Identity=91%"; Hit description =Protein brittle-1
  Pfam annotation: Domain name=Mito_carr; Domain location=1-45; Score= -0.5; E_value=0.0036; Accession=PF00153.19; Description=Mitochondrial carrier protein
SDILQKEGPRGFYRGIAPEYLKVVPSVGIAFMTYETLKGLLSSMDTDDES

SEQ ID NO: 123516 - protein, 71 aa, Setaria italica
  Transcript Sequence Number=SeqID_57542
NTVSATKSLDTPLIDNEKEVAVADREHAQVDTLDNDRLQDVPSDLQRSTDANGSRPDVALDSSSGQTYAQA

SEQ ID NO: 123517 - protein, 70 aa, Setaria italica
  misc_feature (28)..(28): Xaa can be any naturally occurring amino acid
  Transcript Sequence Number=SeqID_57543
  Gene Ontology: Mol. function=nucleotide binding; Cellular component =membrane; Biological process=intracellular protein transmembrane transport
  Homolog annotation: Hit_ID=Q53LH3; Match level="QueryCoverage=100%, HitCoverage=6%, E-value=4e-31, Identity=95%"; Hit description =Protein translocase subunit secA
TNGEDIAIESNVVVKQLLGLQINAEKYXFGIRKSLVEFDEVLEVQRKHVYNLRQVILSGDSESCSEQIFQ

SEQ ID NO: 123518 - protein, 59 aa, Setaria italica
  Transcript Sequence Number=SeqID_57544
EPNSGVGGAHCDADSSTKGEEANRGSGVYKCALLDLLLYCSLETLLCIRLVFSAIDPLC

SEQ ID NO: 123519 - protein, 104 aa, Setaria italica
  misc_feature (66)..(66): Xaa can be any naturally occurring amino acid
  misc_feature (96)..(96): Xaa can be any naturally occurring amino acid
  Transcript Sequence Number=SeqID_57545
  Gene Ontology: Mol. function=nucleotide binding; Cellular component =membrane; Biological process=intracellular protein transmembrane transport
  Homolog annotation: Hit_ID=Q0IU29; Match level="QueryCoverage=66%, HitCoverage=6%, E-value=7e-30, Identity=94%"; Hit description =Protein translocase subunit secA
KYASLTLPFVGALCTGYALYSFEFCDFQTTIVYIYCSVESSEYLSDLLKARNIPHNVLNARPKYAXREAEIIAQAGRKHAITISTNMAGRGTDIIXLGGNPKML

SEQ ID NO: 123520 - protein, 46 aa, Setaria italica
  Transcript Sequence Number=SeqID_57546
IKKLTRVIGWYHSHPHITVLPSHVGKCFAFPLVANHFVPRVALALQ

SEQ ID NO: 123521 - protein, 48 aa, Setaria italica
  Transcript Sequence Number=SeqID_57547
  Homolog annotation: Hit_ID=B6TJS7; Match level="QueryCoverage=97%, HitCoverage=11%, E-value=2e-19, Identity=95%"; Hit description =Mov34/MPN/PAD-1 family protein
QRVLFEEEQTAYNQAMQQNICDGKIHPLTSIHHTSTYNSSLCKLMEYW

SEQ ID NO: 123522 - protein, 77 aa, Setaria italica
  Transcript Sequence Number=SeqID_57548
RGSELRNKVQFVWANQEDVAEVRTSPHQYASVRILLNVSEWCIAELQETSMADPWYEVLSVLHLMAMVCFLQANNLL

SEQ ID NO: 123523 - protein, 75 aa, Setaria italica
  misc_feature (72)..(72): Xaa can be any naturally occurring amino acid
  Transcript Sequence Number=SeqID_57549
  Subcellular localization annotation: CTP_CleavageSite=27; ConfidenceScore=5.01e-01
VCLCARWPVEKSKKKLCIFSCISALISRSLASCPLAHSIHPWSVFASSSFFLSLVLGFLHPVQSGCVDGKFXCND

SEQ ID NO: 123524 - protein, 86 aa, Setaria italica
  Transcript Sequence Number=SeqID_57550
PIPCVPCLSPFACLSLEDLVRMFKVQGLNETDVVTLSGAHSIGRARCLFLTKDRLSAMNSTYAGQLNETCKINDTVNQDPFSPDPR

SEQ ID NO: 123525 - protein, 83 aa, Setaria italica
  misc_feature (70)..(70): Xaa can be any naturally occurring amino acid
  Transcript Sequence Number=SeqID_57551
GGEREGVGEEGGGEGERDDGGVVDAEAAVTAAVEKAIKQQGRGVGAGIIRLFFHDAFVRGCDASVLLNNXVAAGTTRRGKPSN

SEQ ID NO: 123526 - protein, 75 aa, Setaria italica
  Transcript Sequence Number=SeqID_57552
  Homolog annotation: Hit_ID=B6T9B8; Match level="QueryCoverage=70%, HitCoverage=10%, E-value=4e-09, Identity=56%"; Hit description =Protein binding protein
NAHEHAVYSAQEPNGANGRHRWLFIAAAPVVSLVSLALVLCFTNPAGNVRRQLYHRSQSTTTTRVDTRRSWWSMF

SEQ ID NO: 123527 - protein, 51 aa, Setaria italica
  Transcript Sequence Number=SeqID_57553
  Gene Ontology: Mol. function=metal ion binding
  Homolog annotation: Hit_ID=B6T9B8; Match level="QueryCoverage=100%, HitCoverage=10%, E-value=7e-15, Identity=72%"; Hit description =Protein binding protein
MSDQQSHSSSYGLLNTQPDVQCLVCTRPFTLDTEIADSFEALAICRECKMT

SEQ ID NO: 123528 - protein, 56 aa, Setaria italica
  Transcript Sequence Number=SeqID_57554
KLILGKIEVIQEIMDKWSQVRSISFYGLQEQGIPHLQELYSLRVLVFLYSSHLGNQ

SEQ ID NO: 123529 - protein, 34 aa, Setaria italica
  Transcript Sequence Number=SeqID_57555
MVLDSHRVLQRWADYVLRGEHNMWRALILYVAAG

SEQ ID NO: 123530 - protein, 80 aa, Setaria italica
  misc_feature (43)..(43): Xaa can be any naturally occurring amino acid
  Transcript Sequence Number=SeqID_57556
  Homolog annotation: Hit_ID=B9SMG7; Match level="QueryCoverage=97%, HitCoverage=5%, E-value=2e-22, Identity=67%"; Hit description =Nucleotide binding protein, putative
FAANERIPWHDKLDGEEALQKRVHELVSLGNLEAAVSLLLSTXPEGSNFYPNALRAVVLSSAVSQSLHELAVKVVAANMV

SEQ ID NO: 123531 - protein, 41 aa, Setaria italica
  Transcript Sequence Number=SeqID_57557
FQLQDAGCWIDAATLAASHLHGSDYARYNLTMAIYYMPVYE

SEQ ID NO: 123532 - protein, 63 aa, Setaria italica
  Transcript Sequence Number=SeqID_57558
  Gene Ontology: Mol. function=transporter activity; Cellular component= integral to membrane
  Homolog annotation: Hit_ID=Q2RAW8; Match level="QueryCoverage=77%, HitCoverage=10%, E-value=4e-14, Identity=69%"; Hit description=Major facilitator superfamily antiporter, putative, expressed
MGEQMPIGMGEEAPPTPPVTSLYVDGCPGCAIERKKESNKGIPYKELFFVAITTIASGRTKTK

SEQ ID NO: 123533 - protein, 55 aa, Setaria italica
  Transcript Sequence Number=SeqID_57559
  Gene Ontology: Mol. function=hydrolase activity, acting on glycosyl bonds; Cellular component=vacuole; Biological process=cell wall organization and biogenesis
  Homolog annotation: Hit_ID=B6TXJ8; Match level="QueryCoverage=96%, HitCoverage=12%, E-value=3e-21, Identity=88%"; Hit description =Glycoside hydrolase, family 28
PRRYASLIGGSNLTDVVITGNNGTIDGQGAMWWSKFHQNKLKYTRGYLVELMWSD

SEQ ID NO: 123534 - protein, 80 aa, Setaria italica
  Transcript Sequence Number=SeqID_57560
  Gene Ontology: Mol. function=hydrolase activity, acting on glycosyl bonds; Biological process=cell wall organization and biogenesis
CRARCRISGIRYCNSQSFCCCFWVQQLVLLLVAASGTVVAARHHHSSPAESRTGQSMYLAPSCRAHTASLADFGGVGDGT

SEQ ID NO: 123535 - protein, 60 aa, Setaria italica
  Transcript Sequence Number=SeqID_57561
  Gene Ontology: Mol. function=hydrolase activity, acting on glycosyl bonds; Biological process=cell wall organization and biogenesis
  Homolog annotation: Hit_ID=Q153G3; Match level="QueryCoverage=70%, HitCoverage=17%, E-value=1e-12, Identity=76%"; Hit description =Polygalacturonase (Fragment)
GGEGGVRDVRAEDITAINSESGVRIKTAVGRGNYVRDVFVRGMKLDLRHATEDRQGTQGI

SEQ ID NO: 123536 - protein, 145 aa, Setaria italica
  Transcript Sequence Number=SeqID_57562
  Homolog annotation: Hit_ID=B6UA78; Match level="QueryCoverage=80%, HitCoverage=22%, E-value=5e-17, Identity=47%"; Hit description=F-box domain containing protein
LTLRSCPLLTSVTIGSERLRVLELLGCRALRDLRVAAPALESFAFHGRVYFSEADDYAVPIELGDDTTMTMPALRDARMCHLGFGEYEDPNAQDFEYPFLYHVAHARVLTLCSIGLLVPKIATADSVISNSVLCRYGTALTITLF

SEQ ID NO: 123537 - protein, 75 aa, Setaria italica
  Transcript Sequence Number=SeqID_57563
  Homolog annotation: Hit_ID=B6UA78; Match level="QueryCoverage=98%, HitCoverage=14%, E-value=4e-10, Identity=47%"; Hit description=F-box domain containing protein
MPALRDARMCHLGFGEYEDPNAQDFEYPFLYHVAHARVLTLCSIGLLLLREQQTYDEMAYADLPNLEELQLLMAT

SEQ ID NO: 123538 - protein, 57 aa, Setaria italica
  Transcript Sequence Number=SeqID_57564
  Gene Ontology: Mol. function=nucleoside-triphosphatase activity; Cellular component=membrane
  Homolog annotation: Hit_ID=Q8GU82; Match level="QueryCoverage=63%, HitCoverage=2%, E-value=2e-11, Identity=77%"; Hit description=PDR -like ABC transporter
MSDDLQPWMRWGYWASPFTYSLNAVALNEFIDRRWATVTALLDIVVLLYIIMFCTLS

SEQ ID NO: 123539 - protein, 54 aa, Setaria italica
  Transcript Sequence Number=SeqID_57565
DHLALMMETLGKMPRKVTAAPSHPLFSQLSEFPSDLILLFFRLLAQELVPRITL

SEQ ID NO: 123540 - protein, 107 aa, Setaria italica
  Transcript Sequence Number=SeqID_57566
  Gene Ontology: Mol. function=metal ion binding; Cellular component =plasma membrane
  Homolog annotation: Hit_ID=B9RRE6; Match level="QueryCoverage=100%, HitCoverage=28%, E-value=3e-35, Identity=69%"; Hit description =Copine, putative
  Pfam annotation: Domain name=Copine; Domain location=1-106; Score =131.0; E_value=3.9e-36; Accession=PF07002.8; Description=Copine
HHHSVFSFYQDNHPCRGFEEVLVRYRQIVPHLNLSGPTSFAPLIYAAISVVENSNWQYHVLVIIADGQVTAANTNDGRLSPQEQATIQAIVDASYYPLSIVMVGVGD

SEQ ID NO: 123541 - protein, 51 aa, Setaria italica
  Transcript Sequence Number=SeqID_57567
  Gene Ontology: Mol. function=metal ion binding
YLPNRQSSRSTGIGKSAADEQVCPICLTNPKDMAFQCGHLVRFLSTCYLQG

SEQ ID NO: 123542 - protein, 80 aa, Setaria italica
  Transcript Sequence Number=SeqID_57568
  Subcellular localization annotation: CTP_CleavageSite=42; ConfidenceScore=5.32e-01
ETKAKSMGMMPYHVTAAGSLSFWVACDGLLCSVTSSTVVHASAGLARSSQHPRSSPHQGGRLVQSPLTCSALLRRGRSVL

SEQ ID NO: 123543 - protein, 64 aa, Setaria italica
  Transcript Sequence Number=SeqID_57569
YPLCAFPIPLLRVSVRREKVSRSCKTTVYSLVVQVVKLLATCYDPLLAVLVYAYVLLIWCAGPT

SEQ ID NO: 123544 - protein, 114 aa, Setaria italica
  misc_feature (7)..(7): Xaa can be any naturally occurring amino acid
  misc_feature (27)..(27): Xaa can be any naturally occurring amino acid
  misc_feature (67)..(67): Xaa can be any naturally occurring amino acid
  misc_feature (81)..(81): Xaa can be any naturally occurring amino acid
  Transcript Sequence Number=SeqID_57570
  Gene Ontology: Mol. function=metal ion binding; Cellular component =plasma membrane
  Homolog annotation: Hit_ID=Q9SS90; Match level="QueryCoverage=90%, HitCoverage=20%, E-value=3e-31, Identity=70%"; Hit description=E3 ubiquitin-protein ligase RGLG1
  Pfam annotation: Domain name=Copine; Domain location=1-61; Score= -23.0; E_value=0.00013; Accession=PF07002.8; Description=Copine
ISVVENXSNWQYHVLVIIADGQVTAAXNTNDGRLSPQEQATIQAIVDASYYPLSIVMVGVGDGPWDXAMQHFDDCIPERAXFDNFQFVNFTGIMSTSKDMSKKGGCNLLLRQDY

SEQ ID NO: 123545 - protein, 48 aa, Setaria italica
  Transcript Sequence Number=SeqID_57571
GEDRPTTGAGRAEQVRGDWTSRPPWWGCLRWSALLGYFQHRRARFRWP

SEQ ID NO: 123546 - protein, 34 aa, Setaria italica
  Transcript Sequence Number=SeqID_57572
YSSDVYIQSIVKIQIVKIQRCSIQFRKTCSADGP

SEQ ID NO: 123547 - protein, 95 aa, Setaria italica
  Transcript Sequence Number=SeqID_57573
  Gene Ontology: Mol. function=phosphatidylinositol phosphate kinase activity; Biological process=phosphatidylinositol metabolic process
  Homolog annotation: Hit_ID=B9RR30; Match level="QueryCoverage=100%, HitCoverage=5%, E-value=7e-39, Identity=76%"; Hit description=Fyve finger-containing phosphoinositide kinase, fyv1, putative
MKNVIDGHFRALISQLLEVENISLHEDDDMGWLEIVTSVSWEAANFLKPDTSQGGGMDPGGYVKVKCLACGHRSESIVVKGVACKKNVAHRRMTT

SEQ ID NO: 123548 - protein, 108 aa, Setaria italica
  Transcript Sequence Number=SeqID_57574
  Gene Ontology: Mol. function=protein serine/threonine kinase activity; Biological process=protein amino acid phosphorylation
  Homolog annotation: Hit_ID=Q9FIU5; Match level="QueryCoverage=55%, HitCoverage=13%, E-value=2e-18, Identity=75%"; Hit description =Serine/threonine-specific protein kinase-like protein
MSSKTIHVDFTEAKSNLIELHTWRTCASVLTKASNHMGMFGCQRELQKATSNFTTVLGQGAFGPVYKADMSSGEILAVKVLSNNSKQGEKEFHNEVLLSLGRICLPTR

SEQ ID NO: 123549 - protein, 77 aa, Setaria italica
  Transcript Sequence Number=SeqID_57575
  Gene Ontology: Mol. function=transferase activity, transferring nitrogenous groups; Biological process=cellular amino acid and derivative metabolic process
  Homolog annotation: Hit_ID=Q2R2Q2; Match level="QueryCoverage=74%, HitCoverage=14%, E-value=7e-20, Identity=80%"; Hit description =Tyrosine/nicotianamine aminotransferases family protein
LQAYSGYISGLLCRKQNNLSLEDIKDDMDFCCRLAKEELVVVLPGCAVGYKNWLRITFAIAPSSLHDGLDRLLNLFC

SEQ ID NO: 123550 - protein, 79 aa, Setaria italica
  Transcript Sequence Number=SeqID_57576
  Gene Ontology: Mol. function=structural molecule activity; Cellular component=protein complex; Biological process=microtubule-based movement
  Homolog annotation: Hit_ID=P11139; Match level="QueryCoverage=91%, HitCoverage=16%, E-value=7e-27, Identity=77%"; Hit description =Tubulin alpha-1 chain
MREIISIHIGQAGIQVGNSCWELYCLEHGIQPDGLMPSDTSVGVARDAFNTFFSETSAGKHVSLKNVLNACPVTPLLGS

SEQ ID NO: 123551 - protein, 66 aa, Setaria italica
  Transcript Sequence Number=SeqID_57577
NAVGGGTGSGLGSLLLERLSVDYGRKSKLGFTIYPSPQLIYRKISFRGRHSPIIDWTKSNFLNRTS

SEQ ID NO: 123552 - protein, 38 aa, Setaria italica
  Transcript Sequence Number=SeqID_57578
  Gene Ontology: Mol. function=structural molecule activity; Cellular component=protein complex; Biological process=microtubule-based movement
  Homolog annotation: Hit_ID=Q94EN1; Match level="QueryCoverage=97%, HitCoverage=8%, E-value=2e-16, Identity=94%"; Hit description=Pi -tubulin
MREIISIHIGQAGIQVGNSCWELYCLEHGIQPDGLMPR

SEQ ID NO: 123553 - protein, 145 aa, Setaria italica
  misc_feature (15)..(15): Xaa can be any naturally occurring amino acid
  misc_feature (30)..(30): Xaa can be any naturally occurring amino acid
  misc_feature (36)..(36): Xaa can be any naturally occurring amino acid
  Transcript Sequence Number=SeqID_57579
  Gene Ontology: Mol. function=structural molecule activity; Cellular component=protein complex; Biological process=microtubule-based movement
  Homolog annotation: Hit_ID=Q8MM47; Match level="QueryCoverage=99%, HitCoverage=39%, E-value=1e-59, Identity=76%"; Hit description=Alpha- tubulin (Fragment)
  Pfam annotation: Domain name=Tubulin; Domain location=1-145; Score =66.2; E_value=1.2e-16; Accession=PF00091.17; Description=TubulinFtsZ family, GTPase domain
GKHVPRALFVDLEPXVIDEVKTGTYRQLFXHPEQLXSHKEDAANNFARGHYTVGREVVDLCLDRIRKLADNCTGLQGFLVFNAVGGGTGSGLGSLLLERLSVDYGRKSKLGFTIYPSPQISTAVVEPYNSVLSTHSLIEHTRIVR

SEQ ID NO: 123554 - protein, 64 aa, Setaria italica
  misc_feature (17)..(17): Xaa can be any naturally occurring amino acid
  Transcript Sequence Number=SeqID_57580
  Gene Ontology: Mol. function=structural molecule activity; Cellular component=protein complex; Biological process=microtubule-based movement
  Homolog annotation: Hit_ID=Q53M52; Match level="QueryCoverage=100%, HitCoverage=14%, E-value=2e-21, Identity=79%"; Hit description =Tubulin alpha-2 chain
KSKLVSRFILHRQISTXVVEPYNSVLSTHSLIEHTDVVVLLDNEAIYDICKRSLDIERPTYTNL

SEQ ID NO: 123555 - protein, 57 aa, Setaria italica
  Transcript Sequence Number=SeqID_57581
TMRTKLNIESSHLEACLFSLGISQLRLRVLGWHCCPAISFPVLRHATGERQGTQGIG

SEQ ID NO: 123556 - protein, 107 aa, Setaria italica
  Transcript Sequence Number=SeqID_57582
  Subcellular localization annotation: CTP_CleavageSite=36; ConfidenceScore=5.41e-01
HVHILVSSKPFPNSVASQVLSTEAQRFSIGSGRPVWAALVGESSPDVTTGTLSRQQERPSIKALACYLQGDTPKLQAYNHAALTLTPSSADLNTKKRRRQTEPKTKY

SEQ ID NO: 123557 - protein, 83 aa, Setaria italica
  Transcript Sequence Number=SeqID_57583
ERRRSERREGKGFAISPVSHQAITPNTSDANATQQTRQQQQQRHAGFIYIHPSYLQNSIQSSSAMEVSDHGSKGVSTTGGKSS

SEQ ID NO: 123558 - protein, 58 aa, Setaria italica
  Transcript Sequence Number=SeqID_57584
HLPSNFFWYYLLHLQVFFRSVESKGSAFCRHVTGDLYVGNPGTVKVVSLIESSESIFY

SEQ ID NO: 123559 - protein, 101 aa, Setaria italica
  misc_feature (78)..(78): Xaa can be any naturally occurring amino acid
  misc_feature (91)..(91): Xaa can be any naturally occurring amino acid
  misc_feature (94)..(94): Xaa can be any naturally occurring amino acid
  Transcript Sequence Number=SeqID_57585
  Homolog annotation: Hit_ID=B6TKT2; Match level="QueryCoverage=97%, HitCoverage=27%, E-value=3e-37, Identity=78%"; Hit description=LysM domain containing protein
NRIILDSILKTPKPKVSPAMSLLQGYYGLAPPPKRDQTGEGTEMAVYGKGKSAFLDVEPWLEPPNSEPFSLQNRKPKXTIGSSLLDGDTDXNGXSERLIRR

SEQ ID NO: 123560 - protein, 81 aa, Setaria italica
  Transcript Sequence Number=SeqID_57586
  Gene Ontology: Mol. function=peptidyl-prolyl cis-trans isomerase activity; Cellular component=cytoplasm; Biological process=protein folding
  Homolog annotation: Hit_ID=Q9C566; Match level="QueryCoverage=82%, HitCoverage=18%, E-value=2e-25, Identity=76%"; Hit description =Peptidyl-prolyl cis-trans isomerase CYP40
NFFKDGDKYPDWPNDLEEKPAEVSWWMDAVESAKAYGNENFKKQDYKAALRKYRKALRYLDVCWEKDKGNGGSSLYGACPC

SEQ ID NO: 123561 - protein, 120 aa, Setaria italica
  misc_feature (9)..(9): Xaa can be any naturally occurring amino acid
  misc_feature (30)..(30): Xaa can be any naturally occurring amino acid
  Transcript Sequence Number=SeqID_57587
  Gene Ontology: Mol. function=nucleoside-triphosphatase activity; Cellular component=mitochondrial inner membrane; Biological process =protein catabolic process
  Homolog annotation: Hit_ID=Q8S2A7; Match level="QueryCoverage=90%, HitCoverage=13%, E-value=6e-48, Identity=87%"; Hit description=Cell division protease ftsH homolog 3, mitochondrial
  Pfam annotation: Domain name=Peptidase_M41; Domain location=1-100; Score=-21.2; E_value=3.3e-09; Accession=PF01434.10; Description =Peptidase family M41
STGAQNDLXKVTKMTYAQVAVYGFSERLGXSFPQREDGFGMSKPYGGETASIIDTEVREWVAKAYEKTLDLIKTHKEQVAQIAELLLEKEVLHQDDLVRVLGERPFKTACSPYLIYVFVF

SEQ ID NO: 123562 - protein, 66 aa, Setaria italica
  Transcript Sequence Number=SeqID_57588
MAMAPSSHAVSFPAAEGGGKWWAPLVGWSGKADYLEAPAPVVAVAQDGAAAARRQFVGGLTEEKAR

SEQ ID NO: 123563 - protein, 37 aa, Setaria italica
  Transcript Sequence Number=SeqID_57589
MATGAVTPPPLAAARRGIRGRGVLHRRLAASPISLHG

SEQ ID NO: 123564 - protein, 49 aa, Setaria italica
  Transcript Sequence Number=SeqID_57590
  Gene Ontology: Mol. function=N-acetyltransferase activity; Biological process=metabolic process
DQPKFGYLTNVCVAKYARRQGIASNMLLLAIDAARLNGNNNDLFRISMP

SEQ ID NO: 123565 - protein, 76 aa, Setaria italica
  Transcript Sequence Number=SeqID_57591
  Gene Ontology: Mol. function=N-acetyltransferase activity; Biological process=metabolic process
LQITKELFGCYVAREALIDEEYWIAAWLRAEDHYEDQSGNRYVESFKRKFASQEFHALKKRCSKQHGEKYICFVAV

SEQ ID NO: 123566 - protein, 69 aa, Setaria italica
  Transcript Sequence Number=SeqID_57592
  Gene Ontology: Mol. function=N-acetyltransferase activity; Biological process=metabolic process
ILYTERNFLRSLEVEGHHSSPQQNIYTFLHALKKRCSKQHGEKYICFVAVKNDDLRRTVLNSVEDALHI

SEQ ID NO: 123567 - protein, 61 aa, Setaria italica
  Transcript Sequence Number=SeqID_57593
  Gene Ontology: Mol. function=diacylglycerol kinase activity; Cellular component=vacuole; Biological process=activation of protein kinase C activity
  Homolog annotation: Hit_ID=B6TYH8; Match level="QueryCoverage=100%, HitCoverage=12%, E-value=2e-21, Identity=78%"; Hit description=D -erythro-sphingosine kinase/ diacylglycerol kinase
VEVVNGILQRTDWEEAIKMPIGLIPAGTGNGMAKSLLHAASEKCSVSNAVFAIIRGHKQSL

SEQ ID NO: 123568 - protein, 74 aa, Setaria italica
  Transcript Sequence Number=SeqID_57594
LQHYHKKITESHRTGLVLSCVQVQENGMAKSLLHAASEKCSVSNAVFAIIRGHLSISFLSHVRKYMNHAVFPWG

SEQ ID NO: 123569 - protein, 54 aa, Setaria italica
  misc_feature (11)..(11): Xaa can be any naturally occurring amino acid
  misc_feature (27)..(27): Xaa can be any naturally occurring amino acid
  Transcript Sequence Number=SeqID_57595
DDQTFQPDELXEQLLQSIQEDSHFGSXIIDPSHSSITNSVMPEDDSLMFYDSPV

SEQ ID NO: 123570 - protein, 64 aa, Setaria italica
  Transcript Sequence Number=SeqID_57596
VFLQAKTSSGGGSKGSSEGKKKRSEEQQGSDGNTKKSKNEASSPTSSLKASQVPKVKLGDKITA

SEQ ID NO: 123571 - protein, 122 aa, Setaria italica
  Transcript Sequence Number=SeqID_57597
  Gene Ontology: Cellular component=plasma membrane
  Homolog annotation: Hit_ID=Q9SY82; Match level="QueryCoverage=82%, HitCoverage=11%, E-value=2e-19, Identity=54%"; Hit description =F14N23.28
  Subcellular localization annotation: CTP_CleavageSite=48; ConfidenceScore=5.30e-01
LTYPPTGIRPFARSSAGNLALQPKLSSSAHRFNSMVQDFFEDVGPLVSLQLGGSAMDGLLKIFDSYVNLLISALPGSVDDEVNLEGLGNKIVRMAEMEDQQLALLANASLLAEELLPRAVLL

SEQ ID NO: 123572 - protein, 64 aa, Setaria italica
  Transcript Sequence Number=SeqID_57598
  Subcellular localization annotation: CTP_CleavageSite=51; ConfidenceScore=5.48e-01
FVFYVFYFLVFSFYFSFYVLFPLGSSISRISGKPRVANGEREVNSPTASVSAQSVSSVKSHGSS

SEQ ID NO: 123573 - protein, 51 aa, Setaria italica
  Transcript Sequence Number=SeqID_57599
DLANKNTGALFPVIDLEYQHYFTSPRILKIFIIMILPPNMLRRYKAERKHQ

SEQ ID NO: 123574 - protein, 141 aa, Setaria italica
  Transcript Sequence Number=SeqID_57600
  Subcellular localization annotation: CTP_CleavageSite=53; ConfidenceScore=5.61e-01
RSPPDSHPVPHASSPATPVASPLSAARFAAQDRGLGFGSGNLLPTRRRSEQIPAFPVSGELLPPAAVSVTALFVAAADTWACILSVQSGALGFLLGFFFPSIHSRSHCPSVLTLVARRPHVAASLALGLDSLGACSTVSGR

SEQ ID NO: 123575 - protein, 74 aa, Setaria italica
  Transcript Sequence Number=SeqID_57601
SSLTCTTDPAVWLDDLFLRVLDGHVYRYLLVALCVTCLYSLLTALGSMRLISGSASAAKTVFLLLLLDVVSTLI

SEQ ID NO: 123576 - protein, 40 aa, Setaria italica
  Transcript Sequence Number=SeqID_57602
  Homolog annotation: Hit_ID=B6U361; Match level="QueryCoverage=85%, HitCoverage=16%, E-value=3e-10, Identity=79%"; Hit description =UPF0497 membrane protein 4
RGEWREGEKGNSHTRWAKICDTYGKFCRHIGASVFLGLVA

SEQ ID NO: 123577 - protein, 62 aa, Setaria italica
  Transcript Sequence Number=SeqID_57603
RNTLETNNSSVYTRCNISFVYIFPYKATLDVTHVVHHMQGHGGCSDGRGLLGIVSSSVCFPL

SEQ ID NO: 123578 - protein, 140 aa, Setaria italica
  misc_feature (59)..(59): Xaa can be any naturally occurring amino acid
  misc_feature (71)..(71): Xaa can be any naturally occurring amino acid
  misc_feature (118)..(118): Xaa can be any naturally occurring amino acid
  Transcript Sequence Number=SeqID_57604
  Gene Ontology: Cellular component=nucleus; Biological process =response to stress
  Homolog annotation: Hit_ID=B4F976; Match level="QueryCoverage=87%, HitCoverage=76%, E-value=1e-35, Identity=65%"; Hit description=17.4 kDa class I heat shock protein 3
  Pfam annotation: Domain name=HSP20; Domain location=55-136; Score =48.5; E_value=2.6e-11; Accession=PF00011.13; Description=Hsp20alpha crystallin family
  Subcellular localization annotation: CTP_CleavageSite=41; ConfidenceScore=5.11e-01
MSLIRRSNVFDPFSLDLWDPFEGFPFGSGSSSGSLFPSFPRTSSETAAFAGARIDWKEXPEAHVFKADPGXLKKEEVKVEVEDGNVLQISGERNKEQEEKTDTWHRVERSSGKVLRRXRLPDYPEETTKERKTRIQGTYQ

SEQ ID NO: 123579 - protein, 51 aa, Setaria italica
  Transcript Sequence Number=SeqID_57605
MSLIRRSNVFDPFSLDLWDPFQGFPFGSGSGSLFPRIPSDSETAAFAGARI

SEQ ID NO: 123580 - protein, 59 aa, Setaria italica
  Transcript Sequence Number=SeqID_57606
  Subcellular localization annotation: CTP_CleavageSite=45; ConfidenceScore=5.10e-01
LRGSKQLTGNHTPDASLLVIKRGTVSRLFLLASLVLASTHQVALRCSAHRRKKALVDPA

SEQ ID NO: 123581 - protein, 73 aa, Setaria italica
  Transcript Sequence Number=SeqID_57607
LDEDGYKDIFYCYIYLCSVGCVRLSVTVYNPIFVSHFMNTMMKSSALGVRFCSKLTKKQPIQPRVPCSSIKVQ

SEQ ID NO: 123582 - protein, 84 aa, Setaria italica
  Transcript Sequence Number=SeqID_57608
  Gene Ontology: Mol. function=binding
  Homolog annotation: Hit_ID=B6TK50; Match level="QueryCoverage=100%, HitCoverage=24%, E-value=3e-36, Identity=85%"; Hit description =Armadillo/beta-catenin-like repeat family protein
  Pfam annotation: Domain name=Arm; Domain location=43-84; Score=22.2; E_value=0.0022; Accession=PF00514.15; Description=Armadillobeta -catenin-like repeat
DELQEHVESIDMANDPLLSYLKNSHAGIRARAAEVVSTIVQNNPKSQQLVMESNGLEPLLTNFKSDPSASARTKALGAISSLIR

SEQ ID NO: 123583 - protein, 85 aa, Setaria italica
  Transcript Sequence Number=SeqID_57609
  Gene Ontology: Mol. function=binding
  Homolog annotation: Hit_ID=B6TK50; Match level="QueryCoverage=92%, HitCoverage=21%, E-value=3e-35, Identity=92%"; Hit description =Armadillo/beta-catenin-like repeat family protein
LPRKNVLESQGVTPENIEDMLDELQEHVESIDMANDLHSIGGLDPLLSYLKNSHAGIRARAAEVVSTIVQNNPKSQQLVMESMDS

SEQ ID NO: 123584 - protein, 72 aa, Setaria italica
  Transcript Sequence Number=SeqID_57610
  Gene Ontology: Mol. function=binding
  Homolog annotation: Hit_ID=B6TK50; Match level="QueryCoverage=83%, HitCoverage=16%, E-value=2e-24, Identity=91%"; Hit description =Armadillo/beta-catenin-like repeat family protein
MLNFWNSNLLAILADMLDELQEHVESIDMANDLHSIGGLDPLLSYLKNSHAGIRARAAEVVSTIVQNNPKSQ

SEQ ID NO: 123585 - protein, 58 aa, Setaria italica
  Transcript Sequence Number=SeqID_57611
  Gene Ontology: Mol. function=serine-type endopeptidase activity; Cellular component=chloroplast; Biological process=proteolysis
  Homolog annotation: Hit_ID=O82261; Match level="QueryCoverage=93%, HitCoverage=8%, E-value=1e-22, Identity=87%"; Hit description =Protease Do-like 2, chloroplastic
TLFYSAFMIGDGKLLTNAHCVEHDTQVKVKRRGDDKKYIAKVLARGIECDLALLSVEN

SEQ ID NO: 123586 - protein, 57 aa, Setaria italica
  Transcript Sequence Number=SeqID_57612
MIARQTMAAPKILRIVPSLAIWQVRVFVFGWECFGMLIYGFTRSLVYLPLSNVNLAE

SEQ ID NO: 123587 - protein, 100 aa, Setaria italica
  misc_feature (63)..(63): Xaa can be any naturally occurring amino acid
  Transcript Sequence Number=SeqID_57613
DDDEKCGNPCGNPCGVPCIYASPPPPPAPVYSPPPAPVYSPPPAPEYYPPPTPEKPGCPPPPXGGGGGYNPTPYTPGGGGYNPTPSGWYTPPNQLPSYNT

SEQ ID NO: 123588 - protein, 49 aa, Setaria italica
  Transcript Sequence Number=SeqID_57614
NPFTFTNSCQFRGSYTSDDLHGVSRHVFTGYLWSNLLKQEYTIHTGYSQ

SEQ ID NO: 123589 - protein, 70 aa, Setaria italica
  Transcript Sequence Number=SeqID_57615
TNVEMLIHAQWCFLHFTILSYSSLKYNCATYSCLNPKCKGYGMLEQGQYPSHLSKTGGLEFTGKRKDNVK

SEQ ID NO: 123590 - protein, 66 aa, Setaria italica
  Transcript Sequence Number=SeqID_57616
  Gene Ontology: Mol. function=nucleotidyltransferase activity; Biological process=RNA processing
  Homolog annotation: Hit_ID=Q2QX33; Match level="QueryCoverage=65%, HitCoverage=7%, E-value=6e-17, Identity=95%"; Hit description=TRNA -nucleotidyltransferase, putative, expressed
MYFSFLRCSSSCLLRLSAAFPASGEEQKGIGVIQCNPDQSKHLETARMLILDILIDFVNLRSEKYA

SEQ ID NO: 123591 - protein, 57 aa, Setaria italica
  Transcript Sequence Number=SeqID_57617
  Subcellular localization annotation: CTP_CleavageSite=17; ConfidenceScore=5.04e-01
EQQQQLPSSYGLAQAPSAFAVAQGSSPYGLATQPPVYGSGRAAGNSGSNYEAPHGRK

SEQ ID NO: 123592 - protein, 62 aa, Setaria italica
  Transcript Sequence Number=SeqID_57618
  Subcellular localization annotation: CTP_CleavageSite=31; ConfidenceScore=5.28e-01
LSVIPAFVGLSLALLPRIRTNEQSLSQQIIRSSNRNQQESAVSVRTRRPSHATTLRAPDERA

SEQ ID NO: 123593 - protein, 83 aa, Setaria italica
  misc_feature (15)..(15): Xaa can be any naturally occurring amino acid
  Transcript Sequence Number=SeqID_57619
  Gene Ontology: Mol. function=protein serine/threonine kinase activity; Biological process=protein amino acid phosphorylation
  Homolog annotation: Hit_ID=B9V0I5; Match level="QueryCoverage=100%, HitCoverage=9%, E-value=3e-31, Identity=78%"; Hit description=S -domain receptor-like protein kinase
RGTAGYLAPEWLGGXVAITSKVDVYSFGMVLLEIISGRRNSPEAYSSGNYHIEYFPVRAISKLHEGDVQSLMDPQLQGDFNLE

SEQ ID NO: 123594 - protein, 92 aa, Setaria italica
  Transcript Sequence Number=SeqID_57620
  Subcellular localization annotation: CTP_CleavageSite=10; ConfidenceScore=5.18e-01
MGMAFMASGRAMTSTRPSFVTPRSFFNWGKGAGGAESPPPPQLKFQYHDVELPFPMSLVANTHLRGRELKCCYKATVDGFSATDFHRRCDFK

SEQ ID NO: 123595 - protein, 52 aa, Setaria italica
  Transcript Sequence Number=SeqID_57621
RKFVQFNLITDCAEQSQVTCRKRKVMGTKDLAYVYFLGTTCETKDALPASDV

SEQ ID NO: 123596 - protein, 42 aa, Setaria italica
  Transcript Sequence Number=SeqID_57622
  Gene Ontology: Mol. function=zinc ion binding; Cellular component =COPII vesicle coat; Biological process=ER to Golgi vesicle-mediated transport
  Homolog annotation: Hit_ID=Q2QSF9; Match level="QueryCoverage=92%, HitCoverage=3%, E-value=6e-10, Identity=76%"; Hit description =Retrotransposon protein, putative, unclassified, expressed
MFTGNTARCLVRSLLVEDKAPGGVSYVEFLVHVHRQIQNKMT

SEQ ID NO: 123597 - protein, 65 aa, Setaria italica
  Transcript Sequence Number=SeqID_57623
CKFNHMTPMAKLTLLPNLYKLPLDKIQPLFTRINTFKIEHTKVHSSLYRNIYRLHQNRCCKWLQN

SEQ ID NO: 123598 - protein, 62 aa, Setaria italica
  misc_feature (1)..(34): Xaa can be any naturally occurring amino acid
  Transcript Sequence Number=SeqID_57624
XXXXXXXXXXXXXXXXXXXXXXXXXXXXXXXXXXISTMSTVRTKTPKVIHLIHTIARYSFIT

SEQ ID NO: 123599 - protein, 80 aa, Setaria italica
  Transcript Sequence Number=SeqID_57625
SKKRRFQITGWSIKLARKIELQALRPVVFAAPFLEWVVHVVYRDERCGVRRLCFCVFVSIVHPPYLSLVHRGCTMFKGRL

SEQ ID NO: 123600 - protein, 60 aa, Setaria italica
  Transcript Sequence Number=SeqID_57626
  Gene Ontology: Mol. function=zinc ion binding; Cellular component =COPII vesicle coat; Biological process=ER to Golgi vesicle-mediated transport
  Homolog annotation: Hit_ID=Q2QSF9; Match level="QueryCoverage=100%, HitCoverage=5%, E-value=1e-28, Identity=95%"; Hit description =Retrotransposon protein, putative, unclassified, expressed
EVVNEIRRQRCSYLRLRLCKKGDPSGDFFRSLLVEDKAPGGVSYVEFLVHVHRQIQNKMT

SEQ ID NO: 123601 - protein, 59 aa, Setaria italica
  misc_feature (41)..(41): Xaa can be any naturally occurring amino acid
  Transcript Sequence Number=SeqID_57627
  Gene Ontology: Mol. function=zinc ion binding; Cellular component =COPII vesicle coat; Biological process=ER to Golgi vesicle-mediated transport
  Homolog annotation: Hit_ID=Q2R4A0; Match level="QueryCoverage=67%, HitCoverage=4%, E-value=8e-13, Identity=90%"; Hit description =Protein transport protein Sec24-like CEF, putative, expressed
IKYVLVVLLRYLRLRLCRRGEPSGDFFRSFLIEDKAPAGLXPYVEFLVHVHRQIQSKMT

SEQ ID NO: 123602 - protein, 125 aa, Setaria italica
  misc_feature (9)..(9): Xaa can be any naturally occurring amino acid
  misc_feature (84)..(84): Xaa can be any naturally occurring amino acid
  Transcript Sequence Number=SeqID_57628
  Gene Ontology: Mol. function=zinc ion binding; Cellular component =COPII vesicle coat; Biological process=ER to Golgi vesicle-mediated transport
  Homolog annotation: Hit_ID=Q2R4A0; Match level="QueryCoverage=100%, HitCoverage=14%, E-value=7e-56, Identity=88%"; Hit description =Protein transport protein Sec24-like CEF, putative, expressed
  Pfam annotation: Domain name=Sec23_trunk; Domain location=2-124; Score=-52.5; E_value=1.5e-06; Accession=PF04811.7; Description =Sec23Sec24 trunk domain
QQQPLMLIXPDVQDVYTPLQTDLILPVSECRENLEQLLESIPNMFENNRVADSAFGAAMKAGFLAIKSTGGKLLVFQSDACLAXIILPSLGVGSLSAREAEGRANVTTGDKEAHKLLQPVDNTLK

SEQ ID NO: 123603 - protein, 54 aa, Setaria italica
  misc_feature (12)..(12): Xaa can be any naturally occurring amino acid
  Transcript Sequence Number=SeqID_57629
  Gene Ontology: Mol. function=zinc ion binding; Cellular component =COPII vesicle coat; Biological process=ER to Golgi vesicle-mediated transport
  Homolog annotation: Hit_ID=Q2QSF9; Match level="QueryCoverage=90%, HitCoverage=4%, E-value=6e-19, Identity=87%"; Hit description =Retrotransposon protein, putative, unclassified, expressed
SELQLVKDTGNXNPRLMRCTMNQIPCTGDLLTTSGMPLALLVQPFALPHPSEET

SEQ ID NO: 123604 - protein, 56 aa, Setaria italica
  misc_feature (31)..(31): Xaa can be any naturally occurring amino acid
  Transcript Sequence Number=SeqID_57630
CSLGHNRYCFYICSLGHNRYRSNINIGLCGXEYIHRDLNIASISVVPRLQVAGSTT

SEQ ID NO: 123605 - protein, 72 aa, Setaria italica
  Transcript Sequence Number=SeqID_57631
  Gene Ontology: Mol. function=protein dimerization activity; Cellular component=nucleus; Biological process=regulation of transcription, DNA-dependent
  Homolog annotation: Hit_ID=B6SUA9; Match level="QueryCoverage=69%, HitCoverage=29%, E-value=2e-15, Identity=82%"; Hit description=BZIP transcription factor
  Pfam annotation: Domain name=bZIP_1; Domain location=6-62; Score =54.0; E_value=5.9e-13; Accession=PF00170.13; Description=bZIP transcription factor
  Pfam annotation: Domain name=bZIP_2; Domain location=6-60; Score =32.1; E_value=2.2e-06; Accession=PF07716.7; Description=Basic region leucine zipper
  Pfam module annotation: Pfam domain module=bZIP_1::bZIP_2; Domain location=6-62::6-60
QVSGGSGDDRRTIRMMRNRESALRSRARKRAYVENLEKEVRRLVDENLKLKKQCKEVTEHTERLNHACTMPD

SEQ ID NO: 123606 - protein, 42 aa, Setaria italica
  Transcript Sequence Number=SeqID_57632
  Gene Ontology: Mol. function=acid-amino acid ligase activity; Cellular component=intracellular; Biological process=ubiquitin -dependent protein catabolic process
  Homolog annotation: Hit_ID=Q2L3D3; Match level="QueryCoverage=100%, HitCoverage=4%, E-value=5e-10, Identity=64%"; Hit description =Polyubiquitin-like protein
SFGYIVHATPQELGAAMSVAFKHEQATGPGVLREWFCLVCQA

SEQ ID NO: 123607 - protein, 149 aa, Setaria italica
  Transcript Sequence Number=SeqID_57633
  Gene Ontology: Mol. function=4-hydroxyphenylacetaldehyde oxime monooxygenase activity; Cellular component=endoplasmic reticulum membrane; Biological process=oxidation reduction
  Homolog annotation: Hit_ID=O48958; Match level="QueryCoverage=86%, HitCoverage=24%, E-value=2e-49, Identity=73%"; Hit description=4 -hydroxyphenylacetaldehyde oxime monooxygenase
GGVGEEVLGGEAGHHVHGLVDRVTGLVARRERIFRELDAFFETVIDQHTDPARVVPENGGDLVDVLVSLWKENRGTLRFTRDHVKALIMNTFIGGIDTSSVTVLWAMSELIRKPRALKKAQDEVRAVVGNKPRVEPDDVPKLPYLKMVV

SEQ ID NO: 123608 - protein, 62 aa, Setaria italica
  Transcript Sequence Number=SeqID_57634
  Homolog annotation: Hit_ID=B6T4L8; Match level="QueryCoverage=77%, HitCoverage=17%, E-value=2e-11, Identity=66%"; Hit description =Amelogenin like protein
FNHYSICFPFLHKQVAIERNELQDENGVLRKEISELQDELRMRTSSNPADWGHGNAGLNSPV

SEQ ID NO: 123609 - protein, 44 aa, Setaria italica
  Transcript Sequence Number=SeqID_57635
  Homolog annotation: Hit_ID=B6U178; Match level="QueryCoverage=100%, HitCoverage=7%, E-value=5e-11, Identity=75%"; Hit description =Protein binding protein
MVQTLISVEGIEINAVNRAGETAFAIAEKQGNEELINILKEVGG

SEQ ID NO: 123610 - protein, 32 aa, Setaria italica
  Transcript Sequence Number=SeqID_57636
EILKACDVQSAGIKASNSFDAFHIAAKQGHLG

SEQ ID NO: 123611 - protein, 91 aa, Setaria italica
  misc_feature (14)..(14): Xaa can be any naturally occurring amino acid
  Transcript Sequence Number=SeqID_57637
  Gene Ontology: Mol. function=nucleoside-triphosphatase activity; Cellular component=intracellular; Biological process=regulation of transcription, DNA-dependent
  Homolog annotation: Hit_ID=B9S5U3; Match level="QueryCoverage=97%, HitCoverage=1%, E-value=1e-32, Identity=74%"; Hit description=ATP binding protein, putative
RRDKIWLRRTKPNXKEIYQVVIAIDDSRSMSEGKCGKVAIEALVTVCRAMSQLEVGQFAVASFGKKGNVRVLHDFHQIFNSEAGVLKIVFF

SEQ ID NO: 123612 - protein, 52 aa, Setaria italica
  Transcript Sequence Number=SeqID_57638
RQATEGTPATKFGQLTSQMDHSLALCMSSNHCTAYNKIYEQGIYLLIMDQKS

SEQ ID NO: 123613 - protein, 79 aa, Setaria italica
  Transcript Sequence Number=SeqID_57639
FLCNDPKIQKHQDITRKKAMKNPLLNALSKRKQAEKITNVLWLLHMNNKSSFSMRLRNYLSPFWHTSIMSVSLENFSST

SEQ ID NO: 123614 - protein, 43 aa, Setaria italica
  Transcript Sequence Number=SeqID_57640
MLCLKIREQKIKTLTPREAGYTYKLTDKALLDVRPSNERQKAW

SEQ ID NO: 123615 - protein, 87 aa, Setaria italica
  Transcript Sequence Number=SeqID_57641
  Homolog annotation: Hit_ID=B6TI36; Match level="QueryCoverage=55%, HitCoverage=10%, E-value=8e-18, Identity=93%"; Hit description =Transporter, folate-biopterin transporter
GMGVDASSLQILQASANLPMVAKPLVGLLSDAVPIRGHRRLPYVAIGGTRPLLHSPLLICSCISCQIPNPLSSAVTNSRRHYVILRT

SEQ ID NO: 123616 - protein, 80 aa, Setaria italica
  Transcript Sequence Number=SeqID_57642
  Subcellular localization annotation: CTP_CleavageSite=31; ConfidenceScore=5.49e-01
HTKSMQPAGRQSGKISLISHRPRFREEPPPRCRRAWVSSPLSERSRVQTSGQVTGRRREAQGVAAGESARGGGGVRRAAV

SEQ ID NO: 123617 - protein, 52 aa, Setaria italica
  Transcript Sequence Number=SeqID_57643
  Gene Ontology: Mol. function=protein serine/threonine kinase activity; Biological process=protein amino acid phosphorylation
  Homolog annotation: Hit_ID=B6TDZ3; Match level="QueryCoverage=92%, HitCoverage=12%, E-value=3e-16, Identity=83%"; Hit description =Serine/threonine-protein kinase AFC3
TYGPQLQDLVSRNADHSRAVLADLLQGLLRFEPSERLTAQEALDHPFFRNPT

SEQ ID NO: 123618 - protein, 41 aa, Setaria italica
  Transcript Sequence Number=SeqID_57644
MKRKKTITMPNGVTMGQTITVKQLQSLMTSAGGIKRGHLGD

SEQ ID NO: 123619 - protein, 81 aa, Setaria italica
  Transcript Sequence Number=SeqID_57645
  Subcellular localization annotation: CTP_CleavageSite=42; ConfidenceScore=5.56e-01
CNESRCPNKIHSRCLSHASNSDTSTTALYHATTSSSSAAVLRATTTTTTTTTTTTTYLPNYLFLRLLPFAVRRNPSPVPNP

SEQ ID NO: 123620 - protein, 108 aa, Setaria italica
  misc_feature (64)..(64): Xaa can be any naturally occurring amino acid
  Transcript Sequence Number=SeqID_57646
  Gene Ontology: Mol. function=structural molecule activity; Cellular component=clathrin coat of trans-Golgi network vesicle; Biological process=intracellular protein transport
GSGEAGNPSAEAWTSAEPSKWRKARKDKEKEKKPGIVVIQGPKPGKPTDMARMRQILLKLKHTXPPPHMKPPPPPAAAAGKDGAPAAAGKAELQLLLQRMEQSQQPCE

SEQ ID NO: 123621 - protein, 71 aa, Setaria italica
  Transcript Sequence Number=SeqID_57647
  Homolog annotation: Hit_ID=B6UBW7; Match level="QueryCoverage=67%, HitCoverage=6%, E-value=5e-17, Identity=83%"; Hit description =Stachyose synthase
VFNISISSPCHRCLINILFLLPGSLSRLQKHQNLEVSLSTMACEIYTISPIKVFGEAVQFAPLGLINMFNS

SEQ ID NO: 123622 - protein, 44 aa, Setaria italica
  Transcript Sequence Number=SeqID_57648
  Homolog annotation: Hit_ID=B6UBW7; Match level="QueryCoverage=97%, HitCoverage=5%, E-value=2e-18, Identity=90%"; Hit description =Stachyose synthase
LSKIKGNFKHIEDKEIPANLDWFGWCTWDAFYKAVNPAGIEEGP

SEQ ID NO: 123623 - protein, 87 aa, Setaria italica
  Transcript Sequence Number=SeqID_57649
  Gene Ontology: Mol. function=triose-phosphate isomerase activity; Cellular component=cytoplasm; Biological process=metabolic process
  Homolog annotation: Hit_ID=Q8LR75; Match level="QueryCoverage=88%, HitCoverage=30%, E-value=2e-35, Identity=94%"; Hit description =Triosephosphate isomerase
  Pfam annotation: Domain name=TIM; Domain location=2-87; Score=-99.3; E_value=0.00016; Accession=PF00121.10; Description=Triosephosphate isomerase
MCQFSCCSAEMLVNLQVPWVILGHSERRALLGESSDFVADKVAYALSQGLKVIACIGETLEQREAGTTMDVVAAQTKAIAEKISRLD

SEQ ID NO: 123624 - protein, 70 aa, Setaria italica
  Transcript Sequence Number=SeqID_57650
WRTGRGHEGRVRQGRVERTVREAMESGEIRRSAQALLHHRKAPASFLGFRIWECIGRGKWITAVRTFIRR

SEQ ID NO: 123625 - protein, 70 aa, Setaria italica
  Transcript Sequence Number=SeqID_57651
  Subcellular localization annotation: CTP_CleavageSite=30; ConfidenceScore=5.39e-01
ASPSWSHFTLCIARRHHMSTATSYLSFFKRTSSLFQLCYFFPRAKLTLISLPSISCIMHYCSAQCFQQIH

SEQ ID NO: 123626 - protein, 61 aa, Setaria italica
  Transcript Sequence Number=SeqID_57652
MTGCWLTRQPVPPLLQGPGVLALLASWGITLYTLRLLIELHECVPGVRFDRLRDLGAHALG

SEQ ID NO: 123627 - protein, 96 aa, Setaria italica
  Transcript Sequence Number=SeqID_57653
  Subcellular localization annotation: CTP_CleavageSite=23; ConfidenceScore=5.51e-01
AAPFRCAAIANSGGSSPLYPSIRAFTFVNLMTSYSCYVISWREMFTSALVVSQIVLNLALRHSPHDIARLMQKKLEKRNSKAEADFSSGVQGENNQ

SEQ ID NO: 123628 - protein, 64 aa, Setaria italica
  Transcript Sequence Number=SeqID_57654
CRLVFKLNIRCPFSLFFTNLSVDFIYYYIFLNRKNWRRETVKPKPTSVPEFRERTTNRAVECCV

SEQ ID NO: 123629 - protein, 54 aa, Setaria italica
  Transcript Sequence Number=SeqID_57655
ETKGQKKGADKKQSSKYLCLALLLQGLLKKRWAPNKPSLQEPEQKINMSVLHTL

SEQ ID NO: 123630 - protein, 83 aa, Setaria italica
  misc_feature (3)..(3): Xaa can be any naturally occurring amino acid
  misc_feature (57)..(57): Xaa can be any naturally occurring amino acid
  Transcript Sequence Number=SeqID_57656
  Gene Ontology: Mol. function=metal ion binding; Cellular component =intracellular
  Homolog annotation: Hit_ID=B6SV94; Match level="QueryCoverage=100%, HitCoverage=14%, E-value=3e-26, Identity=75%"; Hit description=CCT motif family protein
  Pfam annotation: Domain name=CCT; Domain location=14-73; Score=67.0; E_value=7.2e-17; Accession=PF06203.6; Description=CCT motif
  Pfam annotation: Domain name=CCT_2; Domain location=13-38; Score =18.4; E_value=0.014; Accession=PF09425.2; Description=Divergent CCT motif
  Pfam module annotation: Pfam domain module=CCT::CCT_2; Domain location=14-73::13-38
IDXFPENGAAGGIREASVLRYKEKRRTRLFSKKIRYQVRKVNADCRPRMKASTRTDXKHKRSVRKGRFVRSPSLLQQALEEES

SEQ ID NO: 123631 - protein, 55 aa, Setaria italica
  Transcript Sequence Number=SeqID_57657
WFDNLFRYIGGGSGHEPAHGGFVGQGMLTAAVSGDVFTSPPVNSILAVCSFSKCF

SEQ ID NO: 123632 - protein, 78 aa, Setaria italica
  Transcript Sequence Number=SeqID_57658
  Gene Ontology: Mol. function=protein serine/threonine phosphatase activity; Cellular component=protein serine/threonine phosphatase complex; Biological process=protein amino acid dephosphorylation
  Homolog annotation: Hit_ID=B6TEB8; Match level="QueryCoverage=87%, HitCoverage=18%, E-value=1e-30, Identity=94%"; Hit description =Catalytic/ protein phosphatase type 2C/ protein serine/threonine phosphatase
MFFFSRSGALGHGGSRAAEYLKEHLFENLLKHPEFLTDTKLAISETYQKTDTDFLESEASAFRDDGSTASTAVLVGDH

SEQ ID NO: 123633 - protein, 56 aa, Setaria italica
  Transcript Sequence Number=SeqID_57659
  Homolog annotation: Hit_ID=B6TT96; Match level="QueryCoverage=75%, HitCoverage=9%, E-value=7e-13, Identity=85%"; Hit description =Transferase
YPLCALPILCCVSQVAYYPLAGEVVANADGEPELLCSGRGVDFTVATAAGVDLREI

SEQ ID NO: 123634 - protein, 124 aa, Setaria italica
  Transcript Sequence Number=SeqID_57660
LAALEEMRSMKSRHAGVSVDQMLEILKRSAHEKEEKAIAELDEEDEQLIKSITFRNSGFYVKRIEDDDDDDDDDDDLVPGQSSKTIKINGSSESVAKPTDVLSKTNGSEGADKEGSKSWMPKFY

SEQ ID NO: 123635 - protein, 68 aa, Setaria italica
  Transcript Sequence Number=SeqID_57661
MPKFIVKPKSAGADPKRQKTESTAVQDNGKAPVGDQKSEPAMQTNVLQSLCQNYDSDDSECGQPLKPQ

SEQ ID NO: 123636 - protein, 96 aa, Setaria italica
  Transcript Sequence Number=SeqID_57662
CYPATNNLYSIFEPCPSCSLASSSVCTKCRVSNNIPENQKHVKKMGNISSIVVAMIRYGNTISELTYIIRRPFVLLNKIAFHSLSLERAFVTRSKN

SEQ ID NO: 123637 - protein, 47 aa, Setaria italica
  Transcript Sequence Number=SeqID_57663
PIPCVPCLSPVACLSCFSKHANKRSCGNVTQQLITYIPFLNHVHHVL

SEQ ID NO: 123638 - protein, 44 aa, Setaria italica
  Transcript Sequence Number=SeqID_57664
  Gene Ontology: Mol. function=transcription regulator activity; Cellular component=nucleus; Biological process=regulation of transcription
  Homolog annotation: Hit_ID=Q6ZBT5; Match level="QueryCoverage=97%, HitCoverage=10%, E-value=2e-11, Identity=74%"; Hit description=BHLH transcription factor (BHLH123)-like protein
PQVPKVKIGEKITALQQIVSPFGKTDTASVLFETIKYIKFLHEQ

SEQ ID NO: 123639 - protein, 54 aa, Setaria italica
  Transcript Sequence Number=SeqID_57665
  Homolog annotation: Hit_ID=B6T3V2; Match level="QueryCoverage=98%, HitCoverage=43%, E-value=1e-14, Identity=77%"; Hit description =Negatively light-regulated protein
  Pfam annotation: Domain name=Lg106; Domain location=1-53; Score=50.3; E_value=7.5e-12; Accession=PF07844.3; Description=Lg106-like protein
QQQGVAKPKGPLEALRPKLQPTRQQQQQRSRRSIYTSSENEDGDGAGAEDMNIN

SEQ ID NO: 123640 - protein, 47 aa, Setaria italica
  Transcript Sequence Number=SeqID_57666
  Pfam annotation: Domain name=Lg106; Domain location=5-46; Score=-7.8; E_value=0.051; Accession=PF07844.3; Description=Lg106-like protein
HYIVALSCSGLFQPTRQQQQQRSRRSIYTSSENEDGDGAGAEDMNIN

SEQ ID NO: 123641 - protein, 59 aa, Setaria italica
  Transcript Sequence Number=SeqID_57667
  Gene Ontology: Mol. function=DNA topoisomerase type I activity; Cellular component=chromosome
  Homolog annotation: Hit_ID=B8BDG8; Match level="QueryCoverage=77%, HitCoverage=5%, E-value=8e-16, Identity=73%"; Hit description=DNA topoisomerase
  Pfam annotation: Domain name=zf-GRF; Domain location=17-58; Score =61.8; E_value=2.5e-15; Accession=PF06839.4; Description=GRF zinc finger
MYIAATYLDLHPDAGQVLCTSCGELCISRIANTEANRGRKFYKCEDPGCGFFKWEDELD

SEQ ID NO: 123642 - protein, 101 aa, Setaria italica
  misc_feature (72)..(72): Xaa can be any naturally occurring amino acid
  Transcript Sequence Number=SeqID_57668
  Homolog annotation: Hit_ID=B8BDG8; Match level="QueryCoverage=97%, HitCoverage=10%, E-value=9e-28, Identity=68%"; Hit description=DNA topoisomerase
YVIDILKELTEISRFGSRSQAATPARGQTPNGVRQGPPRQDLHTNFRPAGQLNNENPSVMHSQGFRSTHTQXPSNTSDAGQVLCTSCGELCISRIANTEAN

SEQ ID NO: 123643 - protein, 121 aa, Setaria italica
  misc_feature (115)..(115): Xaa can be any naturally occurring amino acid
  Transcript Sequence Number=SeqID_57669
  Gene Ontology: Mol. function=acid phosphatase activity; Cellular component=plasma membrane
  Homolog annotation: Hit_ID=B6TV55; Match level="QueryCoverage=100%, HitCoverage=41%, E-value=2e-53, Identity=83%"; Hit description=Stem 28 kDa glycoprotein
  Pfam annotation: Domain name=Acid_phosphat_B; Domain location=1-121; Score=46.5; E_value=1e-10; Accession=PF03767.6; Description=HAD superfamily, subfamily IIIB (Acid
TSFNAYVFAGSAPVLPETQRLYNKLISLGITPVFLTGRRENQRAITVANLRREGYSGWMKLLLKPVGYNGTAIGFKSDERQKLQDAGYVIVGNIGDQWSDILGAPEGVRTFKLPXPLYYIG

SEQ ID NO: 123644 - protein, 55 aa, Setaria italica
  Transcript Sequence Number=SeqID_57670
  Gene Ontology: Mol. function=acid phosphatase activity
  Homolog annotation: Hit_ID=B6TV55; Match level="QueryCoverage=100%, HitCoverage=18%, E-value=3e-23, Identity=90%"; Hit description=Stem 28 kDa glycoprotein
GFKASAIGFKSGERQKLQDAGYVIVGNIGDQWSDILGAPEGARTFKLPDPIYYIG

SEQ ID NO: 123645 - protein, 80 aa, Setaria italica
  Transcript Sequence Number=SeqID_57671
  Gene Ontology: Mol. function=acid phosphatase activity
  Homolog annotation: Hit_ID=B6TV55; Match level="QueryCoverage=46%, HitCoverage=12%, E-value=6e-13, Identity=91%"; Hit description=Stem 28 kDa glycoprotein
TAKLLVVLVALVAAASSSFGTWELNIRMPTARAVEDAAAGVAAPLIHALRPLVGSAGDLGRRGGVPCDSWRLAVEAYNKR

SEQ ID NO: 123646 - protein, 79 aa, Setaria italica
  misc_feature (16)..(16): Xaa can be any naturally occurring amino acid
  Transcript Sequence Number=SeqID_57672
  Gene Ontology: Mol. function=N-acetyltransferase activity; Biological process=metabolic process
  Homolog annotation: Hit_ID=Q10QJ2; Match level="QueryCoverage=56%, HitCoverage=20%, E-value=2e-14, Identity=86%"; Hit description =Acetyltransferase, GNAT family protein, expressed
AVEKYGIHTFQSKINXESNTASLKLFRKLGFKDASYSAVFKEVCIMTISLLQRTCDIIKNVSAKLHHNSSILMCPRVSA

SEQ ID NO: 123647 - protein, 53 aa, Setaria italica
  Transcript Sequence Number=SeqID_57673
  Homolog annotation: Hit_ID=B9RM59; Match level="QueryCoverage=98%, HitCoverage=7%, E-value=3e-10, Identity=65%"; Hit description =Trichohyalin, putative
REELKDQEKYEYVYSFRHEEAEASGAVVADRVMGHSRVVEGSVRKKESSRKQQ

SEQ ID NO: 123648 - protein, 63 aa, Setaria italica
  Transcript Sequence Number=SeqID_57674
  Subcellular localization annotation: CTP_CleavageSite=20; ConfidenceScore=5.27e-01
PYVQHGTKHTICTIATHFTCSSNLQASLSNTPSSTEMGCPLTGWLDKLVQARTHRSSRGISHH

SEQ ID NO: 123649 - protein, 84 aa, Setaria italica
  misc_feature (70)..(70): Xaa can be any naturally occurring amino acid
  Transcript Sequence Number=SeqID_57675
  Gene Ontology: Biological process=lipid metabolic process
  Homolog annotation: Hit_ID=B6T8B6; Match level="QueryCoverage=91%, HitCoverage=34%, E-value=1e-19, Identity=58%"; Hit description =Surfactant protein B containing protein
  Pfam annotation: Domain name=SapB_2; Domain location=21-54; Score =19.7; E_value=0.012; Accession=PF03489.9; Description=Saposin-like type B, region 2
TTTTKTKVYKFIITIINTFLSLQCIELMQSYAALLFSKIAEIKPEEFCKQHGMCRDIAHLSGVRSDSTCXFCHHLLDEIMYQTE

SEQ ID NO: 123650 - protein, 93 aa, Setaria italica
  Transcript Sequence Number=SeqID_57676
  Gene Ontology: Biological process=lipid metabolic process
  Homolog annotation: Hit_ID=B6T8B6; Match level="QueryCoverage=86%, HitCoverage=34%, E-value=5e-29, Identity=73%"; Hit description =Surfactant protein B containing protein
  Pfam annotation: Domain name=SapB_1; Domain location=24-63; Score =30.6; E_value=6.5e-06; Accession=PF05184.7; Description=Saposin-like type B, region 1
MLVTAQSTRTNSSIKIPVHLKSSNPICSACENFTNEAVSYLSKKQTQDKIVEFLHDACSQSFSLEQKCIELMQSYAALLFSKIAEIKPEEFLA

SEQ ID NO: 123651 - protein, 25 aa, Setaria italica
  Transcript Sequence Number=SeqID_57677
RQEVLIIWGEFDQIFPVEKAHKMKE

SEQ ID NO: 123652 - protein, 65 aa, Setaria italica
  Transcript Sequence Number=SeqID_57678
QTSWKYKRRQNLHERNSGCMQHCNRKLHPSYLAAALPLEVEGCSKKYEGRNLRLRKKELKGNNLT

SEQ ID NO: 123653 - protein, 83 aa, Setaria italica
  Transcript Sequence Number=SeqID_57679
  Gene Ontology: Mol. function=zinc ion binding; Cellular component =nucleus; Biological process=transcription initiation
  Homolog annotation: Hit_ID=Q7XCX5; Match level="QueryCoverage=83%, HitCoverage=4%, E-value=3e-36, Identity=85%"; Hit description=Plus-3 domain containing protein, expressed
  Pfam annotation: Domain name=PHD; Domain location=19-72; Score=14.4; E_value=0.00069; Accession=PF00628.21; Description=PHD-finger
PAAAPAPVKPVNKKDEEVVCFICFDGGDLVVCDRRGCPKVYHPACIKRDASFFRSRGKWDCGWHICSSCEKAVQYMCYTCTYS

SEQ ID NO: 123654 - protein, 45 aa, Setaria italica
  Transcript Sequence Number=SeqID_57680
  Gene Ontology: Mol. function=zinc ion binding; Cellular component =nucleus
  Homolog annotation: Hit_ID=B9T6E1; Match level="QueryCoverage=93%, HitCoverage=2%, E-value=2e-10, Identity=66%"; Hit description =Nuclear receptor binding set domain containing protein 1, nsd, putative
NCDCRGCPKVYHPACIKRDASFFRSRGKWDCGELFSWTPASLCLV

SEQ ID NO: 123655 - protein, 55 aa, Setaria italica
  Transcript Sequence Number=SeqID_57681
  Gene Ontology: Mol. function=substrate-specific transmembrane transporter activity; Cellular component=integral to membrane
  Homolog annotation: Hit_ID=Q6B4G9; Match level="QueryCoverage=61%, HitCoverage=6%, E-value=1e-10, Identity=94%"; Hit description=Sugar transport protein 1
MCLLLYIKKFPTNDDRCCMQSVPVYLSEMAPARLRGMLNIGFQLMITIGILGGGA

SEQ ID NO: 123656 - protein, 73 aa, Setaria italica
  Transcript Sequence Number=SeqID_57682
  Gene Ontology: Mol. function=metal ion binding; Cellular component =plasma membrane
  Homolog annotation: Hit_ID=Q70JP7; Match level="QueryCoverage=73%, HitCoverage=25%, E-value=3e-21, Identity=77%"; Hit description =Putative Zn-finger protein (Putative ring protein) (Putative vwa protein) (Fragment)
  Pfam annotation: Domain name=zf-C3HC4; Domain location=30-62; Score =10.0; E_value=0.0073; Accession=PF00097.17; Description=Zinc finger, C3HC4 type (RING finger)
  Pfam annotation: Domain name=zf-P11; Domain location=27-71; Score =4.7; E_value=0.038; Accession=PF03854.6; Description=P-11 zinc finger
  Pfam module annotation: Pfam domain module=zf-C3HC4::zf-P11; Domain location=30-62::27-71
LGLIGSLVYRKTPIRSSFVEDSDIGDPQTCPICWNQAKNLAFGCGHQTCSDCAKDLKVCPMCQKAISVRLKLY

SEQ ID NO: 123657 - protein, 119 aa, Setaria italica
  Transcript Sequence Number=SeqID_57683
  Gene Ontology: Mol. function=metal ion binding; Cellular component =plasma membrane
  Homolog annotation: Hit_ID=Q70JP7; Match level="QueryCoverage=89%, HitCoverage=52%, E-value=1e-28, Identity=65%"; Hit description =Putative Zn-finger protein (Putative ring protein) (Putative vwa protein) (Fragment)
  Subcellular localization annotation: CTP_CleavageSite=52; ConfidenceScore=5.04e-01
HFIFRSNIANTNYPVSMQFVNFTQIMSRPIPTSKKEAEFALSALMEIPEQFKAAMSLQLLGKRRGFPNRPVLPPPVSNQQQYSGFSAVKQTQSTSYSGCSAAKQTQSTGYGAAPKTPSA

SEQ ID NO: 123658 - protein, 63 aa, Setaria italica
  Transcript Sequence Number=SeqID_57684
SRITQVTIHRICLWGLATRGDQASYSLVRNLKSPKHHVGNFMHYISRFVAGFAIGLSSSRLLV

SEQ ID NO: 123659 - protein, 130 aa, Setaria italica
  misc_feature (120)..(120): Xaa can be any naturally occurring amino acid
  Transcript Sequence Number=SeqID_57685
  Gene Ontology: Mol. function=calcium ion binding; Cellular component =membrane; Biological process=protein transport
  Homolog annotation: Hit_ID=Q9LLR3; Match level="QueryCoverage=98%, HitCoverage=20%, E-value=5e-60, Identity=79%"; Hit description =Vacuolar targeting receptor bp-80
FTTKNLCSSSEVLEKKGYTQFTPHYITWYCPETFVTSKQCKSQCINHGRYCAPDPEQDFSQGYDGKDVVIQNLHQICLFKIANETGKPWLWWDYVHDFALRCPMKDKKYTHECASDVIKXQLGLDVEKVN

SEQ ID NO: 123660 - protein, 86 aa, Setaria italica
  Transcript Sequence Number=SeqID_57686
  Subcellular localization annotation: CTP_CleavageSite=29; ConfidenceScore=5.04e-01
KAPILPCTDARGPAATRTGALAPPVTDPTAAHVATPTRAVADSLPCRVVRLTWLAGLYLDGAGAADDFPRAEAFQVVQRLHLHPTP

SEQ ID NO: 123661 - protein, 74 aa, Setaria italica
  Transcript Sequence Number=SeqID_57687
  Gene Ontology: Mol. function=calcium ion binding; Cellular component =late endosome membrane; Biological process=protein transport
  Homolog annotation: Hit_ID=Q9LLR3; Match level="QueryCoverage=89%, HitCoverage=10%, E-value=1e-23, Identity=80%"; Hit description =Vacuolar targeting receptor bp-80
YFLSFIGHLSAKSCTYECASDVIKSLGLDVEKVNKCVGDPEADEENEILKAEQDAQIGNGKRGDVTILPTLVIN

SEQ ID NO: 123662 - protein, 81 aa, Setaria italica
  Transcript Sequence Number=SeqID_57688
  Gene Ontology: Mol. function=isomerase activity; Cellular component =endoplasmic reticulum; Biological process=cell redox homeostasis
  Homolog annotation: Hit_ID=B1Q2X5; Match level="QueryCoverage=86%, HitCoverage=12%, E-value=7e-33, Identity=88%"; Hit description =Protein disulfide isomerase L-2
  Pfam annotation: Domain name=Thioredoxin; Domain location=1-80; Score= 23.3; E_value=2.7e-06; Accession=PF00085.12; Description=Thioredoxin
AQSFSSQLDRRESKDVLLEIYAPWCGHCQSLEPIYNKLAKHLRGIGSLVIAKMDGTTNEHPRAKPDGYPTILFYPAGKKSF

SEQ ID NO: 123663 - protein, 77 aa, Setaria italica
  Transcript Sequence Number=SeqID_57689
  Gene Ontology: Mol. function=isomerase activity; Cellular component =endoplasmic reticulum; Biological process=cell redox homeostasis
  Homolog annotation: Hit_ID=B6UDP0; Match level="QueryCoverage=97%, HitCoverage=12%, E-value=2e-23, Identity=73%"; Hit description=PDIL1- 4-Zea mays protein disulfide isomerase
  Pfam annotation: Domain name=Thioredoxin; Domain location=1-73; Score= -15.6; E_value=0.0039; Accession=PF00085.12; Description=Thioredoxin
VGKNLDLIVLDESKDVLLEIYAPWCGHCQSLEPIYNKLAKHLPKHLRGIGYPCDSPKWYGTTNEHPRAKPDGYPTDF

SEQ ID NO: 123664 - protein, 106 aa, Setaria italica
  Transcript Sequence Number=SeqID_57690
  Pfam annotation: Domain name=Thioredoxin; Domain location=1-73; Score= -3.5; E_value=0.00041; Accession=PF00085.12; Description=Thioredoxin
MVEFYAPWCGHCQVLAPDYAAAASHLAAQHAQADVALAKVDATEDTDLQYLIDNAGDTPASDPDGWLRTLRAKTTTATTSSRTKTRTSTSQPTTSRSTRPTSSSSP

SEQ ID NO: 123665 - protein, 56 aa, Setaria italica
  Transcript Sequence Number=SeqID_57691
  Gene Ontology: Mol. function=isomerase activity; Cellular component =endoplasmic reticulum; Biological process=cell redox homeostasis
  Homolog annotation: Hit_ID=B6UDP0; Match level="QueryCoverage=98%, HitCoverage=9%, E-value=2e-16, Identity=76%"; Hit description=PDIL1 -4-Zea mays protein disulfide isomerase
PGCKTFTTVDDAQRILTGDDKAVLAFLDSLSGADSDELAAASRLEDTVNFYQTSST

SEQ ID NO: 123666 - protein, 51 aa, Setaria italica
  Transcript Sequence Number=SeqID_57692
  Subcellular localization annotation: CTP_CleavageSite=23; ConfidenceScore=5.19e-01
LGGRGPGLGPGRRLRRRPLPGPRPGRGRRRSRLRPLPGLGPGRRLRRRPLP

SEQ ID NO: 123667 - protein, 65 aa, Setaria italica
  Transcript Sequence Number=SeqID_57693
  Gene Ontology: Mol. function=heat shock protein binding; Cellular component=membrane; Biological process=protein folding
  Homolog annotation: Hit_ID=B6THE8; Match level="QueryCoverage=76%, HitCoverage=11%, E-value=1e-11, Identity=72%"; Hit description =Chaperone protein dnaJ 16
KVRSYTIEVVCAEPFSAEKERLRSVEAKIIAKRSELSKFESEYREVCPQLLNSLLTCTVLMLNTL

SEQ ID NO: 123668 - protein, 59 aa, Setaria italica
  Transcript Sequence Number=SeqID_57694
  Gene Ontology: Mol. function=heat shock protein binding; Cellular component=membrane; Biological process=protein folding
  Homolog annotation: Hit_ID=Q67VC3; Match level="QueryCoverage=100%, HitCoverage=13%, E-value=4e-19, Identity=81%"; Hit description=ARG1 -like protein
EPFSAEKERLRSVEAKIIAKRSELSKFESEYREVLAKFTEMTSRYAQEMQTIDELLKER

SEQ ID NO: 123669 - protein, 59 aa, Setaria italica
  Transcript Sequence Number=SeqID_57695
  Gene Ontology: Mol. function=heat shock protein binding; Cellular component=membrane; Biological process=protein folding
  Homolog annotation: Hit_ID=B6THE8; Match level="QueryCoverage=76%, HitCoverage=10%, E-value=5e-13, Identity=86%"; Hit description =Chaperone protein dnaJ 16
MLYLILSALFCDLISLCSKLGVPIKTTVSATVLEEALNGSVEISQLQLGKSVCRKVEKQ

SEQ ID NO: 123670 - protein, 105 aa, Setaria italica
  Transcript Sequence Number=SeqID_57696
  Gene Ontology: Mol. function=protein binding; Cellular component =polytene chromosome band; Biological process=protein modification process
  Homolog annotation: Hit_ID=O64955; Match level="QueryCoverage=97%, HitCoverage=97%, E-value=4e-46, Identity=86%"; Hit description =Polyubiquitin (Fragment)
  Pfam annotation: Domain name=ubiquitin; Domain location=34-102; Score= 138.0; E_value=2.9e-38; Accession=PF00240.15; Description=Ubiquitin family
GSGEGWTPSGYCSRQGSTLHLVLRLRGGMQIFVKTLTGKTITLEVESSDTIDNVKAKIQDKEGIPPDQQRLIFAGKQLEDGRTLADYNIQKESTLHLVLRLRGGM

SEQ ID NO: 123671 - protein, 79 aa, Setaria italica
  Transcript Sequence Number=SeqID_57697
  Gene Ontology: Mol. function=structural constituent of ribosome; Cellular component=intracellular; Biological process=protein modification process
  Homolog annotation: Hit_ID=A8NSV0; Match level="QueryCoverage=84%, HitCoverage=34%, E-value=9e-29, Identity=91%"; Hit description =Ubiquitin, putative
  Pfam annotation: Domain name=ubiquitin; Domain location=22-79; Score =87.8; E_value=3.9e-23; Accession=PF00240.15; Description=Ubiquitin family
PEQSKRSEEASPNPLKMQIFVKTLTGKTITLEVESSDTIDNVKAKIQDKEGIPPDQQRLIFAGKQLEDGRTLADYNITR

SEQ ID NO: 123672 - protein, 86 aa, Setaria italica
  Transcript Sequence Number=SeqID_57698
  Gene Ontology: Mol. function=nutrient reservoir activity; Cellular component=extracellular region
  Homolog annotation: Hit_ID=Q0GR06; Match level="QueryCoverage=62%, HitCoverage=25%, E-value=2e-22, Identity=94%"; Hit description =Germin-like protein 5a
LHHHRQQALHQDRHQGGRLRLPQGARALPAEQGANVASFPGVNTLGVSMARIDYAPGGQNPPHTHPRATEIIFVLEGTLEVGFITT

SEQ ID NO: 123673 - protein, 64 aa, Setaria italica
  Transcript Sequence Number=SeqID_57699
  Gene Ontology: Mol. function=nutrient reservoir activity; Cellular component=extracellular region
  Homolog annotation: Hit_ID=B6TKE1; Match level="QueryCoverage=75%, HitCoverage=22%, E-value=1e-16, Identity=87%"; Hit description =Rhicadhesin receptor
  Subcellular localization annotation: CTP_CleavageSite=43; ConfidenceScore=5.40e-01
PFSLIGDARSATQTSWSMSGDDFFFDGLRNPGNTNNPAGSLVTAANVASFPGVNTLGVSMARID

SEQ ID NO: 123674 - protein, 54 aa, Setaria italica
  Transcript Sequence Number=SeqID_57700
PQIYQPISACQFMDDLRAEEHIVSHHSEAPCVSIHLKLHKFHHMHVILQCIHLQ

SEQ ID NO: 123675 - protein, 50 aa, Setaria italica
  Transcript Sequence Number=SeqID_57701
EADSLMVQGNKRTPDKFVGKEAVITSQCLNGWLVGTLDSSFFGFRICLGQ

SEQ ID NO: 123676 - protein, 53 aa, Setaria italica
  misc_feature (45)..(45): Xaa can be any naturally occurring amino acid
  Transcript Sequence Number=SeqID_57702
MKKLMLPPYSLTLYWVLALRAVATVVKMEDDRRLFHNAALRKRRXEVTELMDA

SEQ ID NO: 123677 - protein, 62 aa, Setaria italica
  Transcript Sequence Number=SeqID_57703
  Gene Ontology: Mol. function=phenylalanine-tRNA ligase activity; Cellular component=cytoplasm; Biological process=tRNA aminoacylation for protein translation
  Homolog annotation: Hit_ID=B6SS66; Match level="QueryCoverage=98%, HitCoverage=12%, E-value=7e-27, Identity=98%"; Hit description =Phenylalanyl-tRNA synthetase alpha chain
PDKVIDDLKRRKLITKEKSIWYSLKKGPEFVVKRKTLATDVTTEHLRSGDWKDLEFKDYNYG

SEQ ID NO: 123678 - protein, 65 aa, Setaria italica
  Transcript Sequence Number=SeqID_57704
  Subcellular localization annotation: CTP_CleavageSite=29; ConfidenceScore=5.81e-01
LPITVAVIASPSESNNISPRRGFTPHSPSLSSSSSRPPPPPTMSRDLISFLPSFLRTFLRPVVRT

SEQ ID NO: 123679 - protein, 74 aa, Setaria italica
  Transcript Sequence Number=SeqID_57705
CLHENFMMLSKELHDAEDAENSRHRERLKEINTQYQEKLLALRARQANYRDEFLRKESLARQQQYQQASMSHYA

SEQ ID NO: 123680 - protein, 90 aa, Setaria italica
  Transcript Sequence Number=SeqID_57706
FFPSVLFCKVLEQSFHEDIMMLSKELHDAEDAENSRHRERLKEINTQYQEKLLALRARQANYRDEFLRKESLARQQQYQQASMSHYANNS

SEQ ID NO: 123681 - protein, 100 aa, Setaria italica
  Transcript Sequence Number=SeqID_57707
  Gene Ontology: Cellular component=plasma membrane
  Homolog annotation: Hit_ID=Q9SY82; Match level="QueryCoverage=81%, HitCoverage=9%, E-value=3e-27, Identity=67%"; Hit description =F14N23.28
RAAMKLSSINQSSMDDLRKRGTDKQNRVPEQREWKRKLQRMVDRLRDSFCRQHALELIFTDDGDTHLSAEMYINMDNTVEEPDWVPSPIFQVITSSTTLL

SEQ ID NO: 123682 - protein, 68 aa, Setaria italica
  Transcript Sequence Number=SeqID_57708
  Gene Ontology: Mol. function=microtubule motor activity; Cellular component=microtubule associated complex; Biological process =microtubule-based movement
  Homolog annotation: Hit_ID=Q75LL2; Match level="QueryCoverage=85%, HitCoverage=4%, E-value=9e-11, Identity=63%"; Hit description =Kinesin-like protein
IDNLDTSTALTHKPKNFSKATDLLKSEEERIKLSCELQNAREQLRIVHKEIKSMQLRHAKGRQGTQGI

SEQ ID NO: 123683 - protein, 83 aa, Setaria italica
  misc_feature (1)..(1): Xaa can be any naturally occurring amino acid
  Transcript Sequence Number=SeqID_57709
XGQTEYKVERTDGRTGRPKERGDEHAGDGRGQQAGRRHRQHQQGLLHHHQGSLDARARALPSCLPIDTACLFMGPVCTVFFPS

SEQ ID NO: 123684 - protein, 66 aa, Setaria italica
  Transcript Sequence Number=SeqID_57710
  Gene Ontology: Mol. function=ion channel activity; Cellular component= integral to membrane; Biological process=metabolic process
  Homolog annotation: Hit_ID=Q5N941; Match level="QueryCoverage=90%, HitCoverage=6%, E-value=7e-24, Identity=86%"; Hit description =Probable ion channel DMI1, chloroplastic
ELWMFNEVPEKEREIKLTDGGLDICGLTNIKLVHKEGNAVIRRHLENLPLETFDSVSTIASFLETL

SEQ ID NO: 123685 - protein, 67 aa, Setaria italica
  misc_feature (23)..(23): Xaa can be any naturally occurring amino acid
  misc_feature (62)..(62): Xaa can be any naturally occurring amino acid
  Transcript Sequence Number=SeqID_57711
  Gene Ontology: Mol. function=ion channel activity; Cellular component= integral to membrane; Biological process=metabolic process
  Homolog annotation: Hit_ID=Q208N2; Match level="QueryCoverage=100%, HitCoverage=20%, E-value=1e-29, Identity=68%"; Hit description =Putative ion channel protein POLLUX (Fragment)
ELDGMRFGDVLISFPDAVPCGVXEDDDTYAPAPLPEVNKGFLPNIPTPPKYPEKILFCGWRXRDIHD

SEQ ID NO: 123686 - protein, 53 aa, Setaria italica
  misc_feature (29)..(29): Xaa can be any naturally occurring amino acid
  Transcript Sequence Number=SeqID_57712
  Gene Ontology: Mol. function=ion channel activity; Cellular component= integral to membrane; Biological process=metabolic process
  Homolog annotation: Hit_ID=Q5N941; Match level="QueryCoverage=100%, HitCoverage=7%, E-value=4e-16, Identity=68%"; Hit description =Probable ion channel DMI1, chloroplastic
LADESVEDSIVHSDSRSLATLLLIRDIQXWIREMQNASDKSIIISEILDSRTR

SEQ ID NO: 123687 - protein, 51 aa, Setaria italica
  Transcript Sequence Number=SeqID_57713
LRGAESYLFTYPNIKLLGPPPIRLYPAFKNGTHVFGSDYNLHDKSESKCPL

SEQ ID NO: 123688 - protein, 92 aa, Setaria italica
  misc_feature (29)..(29): Xaa can be any naturally occurring amino acid
  misc_feature (36)..(36): Xaa can be any naturally occurring amino acid
  misc_feature (39)..(39): Xaa can be any naturally occurring amino acid
  misc_feature (69)..(69): Xaa can be any naturally occurring amino acid
  Transcript Sequence Number=SeqID_57714
  Gene Ontology: Cellular component=integral to membrane
  Homolog annotation: Hit_ID=O49726; Match level="QueryCoverage=95%, HitCoverage=25%, E-value=5e-18, Identity=45%"; Hit description =Probable purine permease 9
  Pfam annotation: Domain name=TPT; Domain location=1-75; Score=-19.2; E_value=0.0084; Accession=PF03151.8; Description=Triose-phosphate Transporter family
YVMTLLWTAISWQIASVGVVGLIFVVSSXFSNVISXLAXPIIPVFAVIFFHDKMDGVKIIAMLLAIWGXFISYGYQIYVNDKKARKTSVSVE

SEQ ID NO: 123689 - protein, 83 aa, Setaria italica
  Transcript Sequence Number=SeqID_57715
  Gene Ontology: Mol. function=transporter activity; Cellular component= integral to membrane; Biological process=transport
  Homolog annotation: Hit_ID=B9SKH5; Match level="QueryCoverage=97%, HitCoverage=22%, E-value=5e-24, Identity=71%"; Hit description =ATPUP11, putative
  Pfam annotation: Domain name=TPT; Domain location=12-83; Score=-27.9; E_value=0.027; Accession=PF03151.8; Description=Triose-phosphate Transporter family
TFGLSHGRYILGFMLTLGASATYSLILSLMQVTFEKVIKRETFSVVLNMQIYTALVATIASLIGLFASGEWKTLKGEMHAFSS

SEQ ID NO: 123690 - protein, 93 aa, Setaria italica
  Transcript Sequence Number=SeqID_57716
  Homolog annotation: Hit_ID=B8YIE8; Match level="QueryCoverage=93%, HitCoverage=4%, E-value=3e-15, Identity=50%"; Hit description=DNA glycosylase/lyase 701
ARPHCSSFIHPNDELENRFSAESNFYGGSNGSIISEDTFPNSSPLTLGNERINSDTHCDVPEGSSANTSTGKYMDYLQGVASKLKHLVFCKLI

SEQ ID NO: 123691 - protein, 86 aa, Setaria italica
  misc_feature (18)..(18): Xaa can be any naturally occurring amino acid
  misc_feature (46)..(46): Xaa can be any naturally occurring amino acid
  misc_feature (67)..(67): Xaa can be any naturally occurring amino acid
  misc_feature (74)..(74): Xaa can be any naturally occurring amino acid
  misc_feature (78)..(78): Xaa can be any naturally occurring amino acid
  misc_feature (82)..(82): Xaa can be any naturally occurring amino acid
  Transcript Sequence Number=SeqID_57717
  Homolog annotation: Hit_ID=Q8LPX2; Match level="QueryCoverage=98%, HitCoverage=36%, E-value=1e-30, Identity=68%"; Hit description=36I5.7
FADINDDYHNAHMADAKXFRRPYCDDFLNFCALNFELGVWSSRKKXNVASVVNIVMRDFKPRLLFCXMSKCTFXGHKXLENXHKPL

SEQ ID NO: 123692 - protein, 65 aa, Setaria italica
  Transcript Sequence Number=SeqID_57718
  Gene Ontology: Mol. function=Rho guanyl-nucleotide exchange factor activity
  Homolog annotation: Hit_ID=B6SYQ2; Match level="QueryCoverage=75%, HitCoverage=8%, E-value=9e-14, Identity=75%"; Hit description=Pollen- specific kinase partner protein
LSVADHIVEFVAKKQVLDNGTEMEVMGTQQRRDLQANIPALRKLDTMLLVSTVHACHVSIATTQC

SEQ ID NO: 123693 - protein, 51 aa, Setaria italica
  Transcript Sequence Number=SeqID_57719
  Gene Ontology: Mol. function=Rho guanyl-nucleotide exchange factor activity
  Homolog annotation: Hit_ID=B6SW78; Match level="QueryCoverage=98%, HitCoverage=10%, E-value=2e-13, Identity=68%"; Hit description =Pollen-specific kinase partner protein
KQVLDNGTEMEVMGTQQRRDLQANIPALRKLDTMLLDYLDNFKERKEFWYV

SEQ ID NO: 123694 - protein, 115 aa, Setaria italica
  Transcript Sequence Number=SeqID_57720
  Gene Ontology: Mol. function=transcription regulator activity; Cellular component=nucleus
  Homolog annotation: Hit_ID=B6T879; Match level="QueryCoverage=70%, HitCoverage=34%, E-value=3e-23, Identity=71%"; Hit description=DNA binding protein
FKFLVYCNSLVKQAKLDKANILSDAARMVAQLRGEAEKLKESNEKLRENIKDLKEEKNELREEKVRLKAEKERLEQQVKAISTAPTGYVPHLPHPAAYHPAAFAPFAPPQQAPTN

SEQ ID NO: 123695 - protein, 65 aa, Setaria italica
  Transcript Sequence Number=SeqID_57721
  Gene Ontology: Mol. function=transcription regulator activity; Cellular component=nucleus
  Homolog annotation: Hit_ID=B6T879; Match level="QueryCoverage=67%, HitCoverage=18%, E-value=1e-10, Identity=77%"; Hit description=DNA binding protein
VLILRNAILFFQEEKNELREEKVRLKAEKERLEQQVKAISTAPTGYVPHLPHPAAYHPAAFAPFA

SEQ ID NO: 123696 - protein, 129 aa, Setaria italica
  misc_feature (111)..(111): Xaa can be any naturally occurring amino acid
  Transcript Sequence Number=SeqID_57722
  Gene Ontology: Mol. function=zinc ion binding; Cellular component =intracellular
VNFRQKEQRLKDLKDHDVAIQLPKIMDDATCYPGIQSFKAISDPDLHEQEGSQYIQFPPPVTSETDNGFNANLLVEDVSCDSGPVMDKGAVLRPQVISRHHLGRTEKLAEXIISGSAVASKQLALARSS

SEQ ID NO: 123697 - protein, 62 aa, Setaria italica
  Transcript Sequence Number=SeqID_57723
YVPDPKTNYQNWSRVDKGSPIASSNITSGTIAVASFGKACREECQVTCGSFIAYHEVFQYSC

SEQ ID NO: 123698 - protein, 59 aa, Setaria italica
  Transcript Sequence Number=SeqID_57724
GKRSPSVTSSPITASQSSHLGLAENKNATDKQRLEEEKKRRQKEVEMRLLEEETAKRVE

SEQ ID NO: 123699 - protein, 70 aa, Setaria italica
  Transcript Sequence Number=SeqID_57725
ILTLIGYVACKNMVLAGILKYFMISYKNCHKLLDILLYRLFPKEATAIVPLVIFDDAIGDPLSNYLEPSF

SEQ ID NO: 123700 - protein, 60 aa, Setaria italica
  Transcript Sequence Number=SeqID_57726
  Gene Ontology: Mol. function=hydrolase activity, hydrolyzing O -glycosyl compounds; Biological process=carbohydrate metabolic process
  Homolog annotation: Hit_ID=B6T7E0; Match level="QueryCoverage=98%, HitCoverage=11%, E-value=2e-24, Identity=88%"; Hit description=Non -cyanogenic beta-glucosidase
SASGSIDYVGINHYTSFYMKDPGTWNLMPISYQYDWHASFVYERNGVPIGAHANSYWLYI

SEQ ID NO: 123701 - protein, 53 aa, Setaria italica
  Transcript Sequence Number=SeqID_57727
  Gene Ontology: Mol. function=hydrolase activity, hydrolyzing O -glycosyl compounds; Cellular component=cytosolic ribosome; Biological process=carbohydrate metabolic process
  Homolog annotation: Hit_ID=B5ABY0; Match level="QueryCoverage=98%, HitCoverage=10%, E-value=6e-20, Identity=86%"; Hit description=Beta -mannosidase/beta-glucosidase (Fragment)
VVQANSYWLYIVPWGINKAVNYVKETYENPIMILAENGMDQPGNISISQGVHD

SEQ ID NO: 123702 - protein, 69 aa, Setaria italica
  Transcript Sequence Number=SeqID_57728
  Gene Ontology: Mol. function=hydrolase activity, hydrolyzing O -glycosyl compounds; Biological process=carbohydrate metabolic process
  Homolog annotation: Hit_ID=B5ABY0; Match level="QueryCoverage=60%, HitCoverage=8%, E-value=9e-11, Identity=73%"; Hit description=Beta -mannosidase/beta-glucosidase (Fragment)
MVNQFNVEVCTAHCNFGSVKNSVLSTEQLYQKGRIGILLDFVWYEPFSDSNADRAAAQRARDFHLGWFL

SEQ ID NO: 123703 - protein, 72 aa, Setaria italica
  Transcript Sequence Number=SeqID_57729
RRKRGGFRRFAGLVGSPAGVMKAAGYDLYDSSGEFPRIDRGFQANRFFVAGNPRSVGVDLVILAWLYDAPLG

SEQ ID NO: 123704 - protein, 53 aa, Setaria italica
  Transcript Sequence Number=SeqID_57730
  Homolog annotation: Hit_ID=B6TPT8; Match level="QueryCoverage=98%, HitCoverage=13%, E-value=4e-16, Identity=71%"; Hit description=ENT domain containing protein
TLPNYKFQSAKWGPLSARGKKPKTPMPSALPSADPNSLINHKVYTRWPDDNNF

SEQ ID NO: 123705 - protein, 56 aa, Setaria italica
  Transcript Sequence Number=SeqID_57731
DARPFPLKDRPLSPLFCAGGRIIISPYNNGRGINTVVCNAQLDRKSISRHADYVIL

SEQ ID NO: 123706 - protein, 63 aa, Setaria italica
  Transcript Sequence Number=SeqID_57732
  Gene Ontology: Mol. function=transcription regulator activity; Cellular component=nucleus; Biological process=regulation of transcription
  Homolog annotation: Hit_ID=Q9C7T4; Match level="QueryCoverage=74%, HitCoverage=14%, E-value=3e-12, Identity=72%"; Hit description =Transcription factor bHLH96
  Pfam annotation: Domain name=HLH; Domain location=8-58; Score=27.6; E_ value=5.1e-05; Accession=PF00010.18; Description=Helix-loop-helix DNA- binding domain
NTEEMESQRRNHIAVERNRRRQMNEYLAVLRSVMPPSYAQRVRTSTISMAPAVLSVHRALRQH

SEQ ID NO: 123707 - protein, 80 aa, Setaria italica
  misc_feature (22)..(22): Xaa can be any naturally occurring amino acid
  Transcript Sequence Number=SeqID_57733
GQMNEYLAVLRSVMPPSYAQRXQASIVAGAINFVKELEQLLQSLEAQKRRAGSCTEPQPAAAPFAGFFTFPQYSTGATGA

SEQ ID NO: 123708 - protein, 61 aa, Setaria italica
  Transcript Sequence Number=SeqID_57734
AISSSTKARIYQNLLAELCFSYDAWVIYNFFSLCLAWVGGPGTVVVSLSGQSLKPSWFLMT

SEQ ID NO: 123709 - protein, 40 aa, Setaria italica
  Transcript Sequence Number=SeqID_57735
  Gene Ontology: Mol. function=iron-sulfur cluster binding
  Homolog annotation: Hit_ID=B4FVP6; Match level="QueryCoverage=95%, HitCoverage=19%, E-value=4e-14, Identity=92%"; Hit description =Electron carrier/ electron transporter/ iron ion binding protein
MPMQPRLLPDGTPDVHYRTARGGQKLRDIMLEGYIDLYGP

SEQ ID NO: 123710 - protein, 56 aa, Setaria italica
  Transcript Sequence Number=SeqID_57736
  Homolog annotation: Hit_ID=B6TX13; Match level="QueryCoverage=51%, HitCoverage=5%, E-value=3e-10, Identity=100%"; Hit description =Growth regulator like protein
ICNAVVAARIMNATLVLPELDTNSFWHDERYVICLKCFIIQEDYCTYGLPQTLYSL

SEQ ID NO: 123711 - protein, 74 aa, Setaria italica
  Transcript Sequence Number=SeqID_57737
  Homolog annotation: Hit_ID=B6TX13; Match level="QueryCoverage=87%, HitCoverage=12%, E-value=1e-21, Identity=77%"; Hit description =Growth regulator like protein
NPGSATDCARRGLGSETSLRRHRGPAWLWIAVAVLVTGTIWLWSSSFVGLLGTYRVQDYVVNELWRTADSNGWR

SEQ ID NO: 123712 - protein, 57 aa, Setaria italica
  Transcript Sequence Number=SeqID_57738
  Homolog annotation: Hit_ID=B6U0Q1; Match level="QueryCoverage=68%, HitCoverage=7%, E-value=3e-14, Identity=92%"; Hit description=Growth regulator like protein
EIIRWPLHLACCTPCNLSDIYDVPHFINSLKYDVRIVMSVPKITAQGKTKKLRAYKI

SEQ ID NO: 123713 - protein, 57 aa, Setaria italica
  Transcript Sequence Number=SeqID_57739
MKKSKNIDLKSMWERATKTRRGLGSETSLRRHRGPAWLWIAVAVLVTGTIWLWSSSF

SEQ ID NO: 123714 - protein, 59 aa, Setaria italica
  Transcript Sequence Number=SeqID_57740
  Gene Ontology: Mol. function=DNA-directed RNA polymerase activity; Cellular component=DNA-directed RNA polymerase III complex; Biological process=transcription
  Homolog annotation: Hit_ID=B2BXR4; Match level="QueryCoverage=100%, HitCoverage=54%, E-value=3e-20, Identity=74%"; Hit description =RNApol24
  Pfam annotation: Domain name=RNA_pol_L; Domain location=8-59; Score =18.5; E_value=0.0053; Accession=PF01193.16; Description=RNA polymerases L  13 to 16 kDa subunit
MEHGSLQDSSASSFSIMEEDHTLANSVRFVLNQDPRVAFCGYSIPHPAENKVNIRLQTT

SEQ ID NO: 123715 - protein, 60 aa, Setaria italica
  Transcript Sequence Number=SeqID_57741
  Subcellular localization annotation: CTP_CleavageSite=20; ConfidenceScore=5.53e-01
LKLTASPSHQHLLPRRGRVRCRSVLVRFVTVSFRFPVFGFYVFLFFLFLFFSLFFNFFVF

SEQ ID NO: 123716 - protein, 110 aa, Setaria italica
  misc_feature (30)..(30): Xaa can be any naturally occurring amino acid
  Transcript Sequence Number=SeqID_57742
  Gene Ontology: Mol. function=structural constituent of ribosome; Cellular component=large ribosomal subunit; Biological process =translation
  Homolog annotation: Hit_ID=B9S876; Match level="QueryCoverage=98%, HitCoverage=39%, E-value=7e-35, Identity=68%"; Hit description=60S ribosomal protein L10, mitochondrial, putative
  Pfam annotation: Domain name=L15; Domain location=23-56; Score=22.2; E_value=0.0021; Accession=PF00256.15; Description=Ribosomal protein L15
MSICIPLCQETGAIGKQIKDGIRLMGRGAXEIKWPIHLEVSRTTARAKAAVEAAGGTVRLVYYNKLGFRALLKPEWFEKKGRLLPKAARPPPKQQDKVDSIGRLPAPTKP

SEQ ID NO: 123717 - protein, 44 aa, Setaria italica
  Transcript Sequence Number=SeqID_57743
MAGRSCEGRREAAASNWGGGGAPAGDVDEPPPPPRPPPPPYHRP

SEQ ID NO: 123718 - protein, 44 aa, Setaria italica
  Transcript Sequence Number=SeqID_57744
RAPASCHLLSQTCRGMEEVDLMPSGSKVTATCMLAELADTQRRF

SEQ ID NO: 123719 - protein, 45 aa, Setaria italica
  Transcript Sequence Number=SeqID_57745
LSVHCSHQAPKNGKTYQQINNPQTCMRVKKKMLVTKTDQNSTYGD

SEQ ID NO: 123720 - protein, 74 aa, Setaria italica
  Transcript Sequence Number=SeqID_57746
  Gene Ontology: Mol. function=calcium ion binding; Cellular component =nucleus; Biological process=regulation of transcription, DNA -dependent
  Homolog annotation: Hit_ID=Q7XI44; Match level="QueryCoverage=74%, HitCoverage=5%, E-value=4e-17, Identity=74%"; Hit description =Putative anther ethylene-upregulated protein ER1
  Pfam annotation: Domain name=IQ; Domain location=24-44; Score=24.7; E_ value=0.00039; Accession=PF00612.19; Description=IQ calmodulin -binding motif
MSDERALSLLSVKPSKPGQLDPLHSAATRIQNKFRGWKGRKEFLLIRQRIVKIQVCKCSVHFVLFENNVQYYQL

SEQ ID NO: 123721 - protein, 41 aa, Setaria italica
  Transcript Sequence Number=SeqID_57747
YPLCALPFPCCVSQSAEMDDGYLMNELQELLNDDTSIHGYF

SEQ ID NO: 123722 - protein, 49 aa, Setaria italica
  Transcript Sequence Number=SeqID_57748
PFSNAGYLLDYTLAPYMGRIREASLIGFGLCLFPKIISILLGAAATCWS

SEQ ID NO: 123723 - protein, 73 aa, Setaria italica
  Transcript Sequence Number=SeqID_57749
SYRTNVLYNQSCEHHLGIAIIVSTITMKLSNKCSVQQSCEHHLGMQSCATKTSTFHNTTPELQILPIPKVAEH

SEQ ID NO: 123724 - protein, 46 aa, Setaria italica
  Transcript Sequence Number=SeqID_57750
  Gene Ontology: Mol. function=nucleotide binding; Biological process =defense response
  Homolog annotation: Hit_ID=Q84NY1; Match level="QueryCoverage=89%, HitCoverage=4%, E-value=4e-13, Identity=80%"; Hit description =Putative disease resistance complex protein
NGALFSSILVTTRNVNVSSIIQTMPPYNVGCLPFDESWQLFKQMAF

SEQ ID NO: 123725 - protein, 35 aa, Setaria italica
  Transcript Sequence Number=SeqID_57751
FCQCCFFDLISFSSGGEDGYVRLHHFDSDYFNIKM

SEQ ID NO: 123726 - protein, 125 aa, Setaria italica
  Transcript Sequence Number=SeqID_57752
  Homolog annotation: Hit_ID=Q7G6K7; Match level="QueryCoverage=60%, HitCoverage=6%, E-value=3e-23, Identity=82%"; Hit description=Formin- like protein 3
EKFQKLILNDMKELSKMQAKVGLQMPLMSPLDSDEEKYSVASDSVGSADHEKVQHGGNSSDSENIDRDPTTEDSESSATLSMNSSSPPQPPLPPPPHGVPSSLLDSSVPTTGPSGPLTKPTDKED

SEQ ID NO: 123727 - protein, 53 aa, Setaria italica
  Transcript Sequence Number=SeqID_57753
  Gene Ontology: Mol. function=ubiquitin-protein ligase activity; Cellular component=nucleus; Biological process=ubiquitin-dependent protein catabolic process
  Homolog annotation: Hit_ID=A8W463; Match level="QueryCoverage=98%, HitCoverage=16%, E-value=9e-23, Identity=90%"; Hit description=SINA4
VFHCFGQYFCLHFEAFQLGMAPVYMAFLRFMGDENDAKNYSYSLEVGRKNQKK

SEQ ID NO: 123728 - protein, 63 aa, Setaria italica
  misc_feature (28)..(28): Xaa can be any naturally occurring amino acid
  Transcript Sequence Number=SeqID_57754
  Gene Ontology: Mol. function=calcium ion binding
  Homolog annotation: Hit_ID=Q3HRN8-2; Match level="QueryCoverage=98%, HitCoverage=27%, E-value=9e-17, Identity=70%"; Hit description =Isoform 2 of Calcineurin B-like protein 9
IVPQEELQLALFKTPSGQNLFLDRVFDXLFDEKKNGVIEFDEFIHALSVFHPLAPMEDKIKCM

SEQ ID NO: 123729 - protein, 146 aa, Setaria italica
  misc_feature (113)..(113): Xaa can be any naturally occurring amino acid
  Transcript Sequence Number=SeqID_57755
  Gene Ontology: Mol. function=protein serine/threonine kinase activity; Cellular component=integral to membrane; Biological process=protein amino acid phosphorylation
  Homolog annotation: Hit_ID=Q42371; Match level="QueryCoverage=100%, HitCoverage=45%, E-value=1e-65, Identity=44%"; Hit description =Leucine-rich repeat receptor-like protein kinase
  Pfam annotation: Domain name=LRR_1; Domain location=104-125; Score =2.3; E_value=1.1e+02; Accession=PF00560.25; Description=Leucine Rich Repeat
  Pfam annotation: Domain name=LRR_1; Domain location=128-146; Score =5.1; E_value=32; Accession=PF00560.25; Description=Leucine Rich Repeat
  Pfam annotation: Domain name=LRR_1; Domain location=33-55; Score=8.9; E_value=6.1; Accession=PF00560.25; Description=Leucine Rich Repeat
  Pfam annotation: Domain name=LRR_1; Domain location=57-79; Score=2.6; E_value=97; Accession=PF00560.25; Description=Leucine Rich Repeat
  Pfam annotation: Domain name=LRR_1; Domain location=81-103; Score =18.1; E_value=0.038; Accession=PF00560.25; Description=Leucine Rich Repeat
  Pfam annotation: Domain name=LRR_1; Domain location=9-30; Score=12.6; E_value=1.2; Accession=PF00560.25; Description=Leucine Rich Repeat
  Pfam module annotation: Pfam domain module=LRR_1::LRR_1::LRR_1::LRR _1::LRR_1::LRR_1; Domain location=104-125::128-146::33-55::57-79::81 -103::9-30
PSTLSQLPNLKILDLAQNKLSGEIPNLIYWNEVLQYLGLRSNNLEGSLSPDMCQLTGLWYFDVKNNSLMGTIPETIGNCTSFQVLDLSNNQLTGEIPFNIGFLQVATLSLQGXKFSGPIPSVIGLMQALAVLDLSFNELSGPIPSI

SEQ ID NO: 123730 - protein, 77 aa, Setaria italica
  Transcript Sequence Number=SeqID_57756
  Gene Ontology: Mol. function=protein serine/threonine kinase activity; Biological process=protein amino acid phosphorylation
  Homolog annotation: Hit_ID=Q8W0U9; Match level="QueryCoverage=100%, HitCoverage=8%, E-value=9e-24, Identity=70%"; Hit description =Putative receptor protein kinase
RPTMHEVVRVLDSLVCPDPPPKQAQPQGSEQSATAPSYVSEYVSLRGGTALSCANSSSASDAELFMKFGEVISRNTE

SEQ ID NO: 123731 - protein, 82 aa, Setaria italica
  misc_feature (52)..(52): Xaa can be any naturally occurring amino acid
  misc_feature (61)..(61): Xaa can be any naturally occurring amino acid
  Transcript Sequence Number=SeqID_57757
  Gene Ontology: Mol. function=protein serine/threonine kinase activity; Cellular component=integral to membrane; Biological process=protein amino acid phosphorylation
  Homolog annotation: Hit_ID=Q42371; Match level="QueryCoverage=97%, HitCoverage=7%, E-value=3e-25, Identity=80%"; Hit description =Leucine-rich repeat receptor-like protein kinase
  Pfam annotation: Domain name=LRR_1; Domain location=19-41; Score =12.4; E_value=1.3; Accession=PF00560.25; Description=Leucine Rich Repeat
  Pfam annotation: Domain name=LRR_1; Domain location=43-65; Score=4.7; E_value=39; Accession=PF00560.25; Description=Leucine Rich Repeat
  Pfam module annotation: Pfam domain module=LRR_1::LRR_1; Domain location=19-41::43-65
MVSGIVPIKLLFSISKLKHLENLILKNNQLVGVIPSTLSQLPNLKILDLAQXNKLSGEIPXLIYWNEVLQYLGLRSNNLEGT

SEQ ID NO: 123732 - protein, 95 aa, Setaria italica
  Transcript Sequence Number=SeqID_57758
KICLLDHLCLLKMLMKTEHAVSFRGIYIFVCEFIRRLILMHNLNLIDKFYHPCFELLVTFHICRKKSKIKRLERLKIGETKRGLPQEVMGRVQGV

SEQ ID NO: 123733 - protein, 75 aa, Setaria italica
  Transcript Sequence Number=SeqID_57759
IKSFWILAIRVMSNDELVMSGEGRGYIDGEMKEIEAGGGRYRRGTGDDFMINGQESHIDRSSLLDPLAGGPLQES

SEQ ID NO: 123734 - protein, 63 aa, Setaria italica
  misc_feature (54)..(54): Xaa can be any naturally occurring amino acid
  Transcript Sequence Number=SeqID_57760
  Subcellular localization annotation: CTP_CleavageSite=19; ConfidenceScore=5.35e-01
KLDSSSPPIGRKSHRKSKRSGKKKPSVVVIKNVNVTSKKHGSSESESQSSSDVXEDSDDSHTK

SEQ ID NO: 123735 - protein, 55 aa, Setaria italica
  Transcript Sequence Number=SeqID_57761
WVLTPRSSKWLWRVSTSNSSSRKEPCARGHCVLHLPIMRKHCSLFGFVFSYVLGC

SEQ ID NO: 123736 - protein, 53 aa, Setaria italica
  Transcript Sequence Number=SeqID_57762
HKGQKLMKWNVGTEYTLRSPSLLPSPSIEMERRHRVYFEITKLASKFLSYYSN

SEQ ID NO: 123737 - protein, 53 aa, Setaria italica
  Transcript Sequence Number=SeqID_57763
LSPVCLAYLLLRVSVEAGAHSTVSQGESEAGEVRQLSLNPMEFGTLQAKLQLI

SEQ ID NO: 123738 - protein, 53 aa, Setaria italica
  Transcript Sequence Number=SeqID_57764
ATDYVPRGSCMKIRCSFFILWFQNCSRKRKVKPCLISSLTSSFVIGTFSPISS

SEQ ID NO: 123739 - protein, 56 aa, Setaria italica
  Transcript Sequence Number=SeqID_57765
  Gene Ontology: Mol. function=oxidoreductase activity; Cellular component=membrane; Biological process=cell redox homeostasis
  Homolog annotation: Hit_ID=Q10ME8; Match level="QueryCoverage=62%, HitCoverage=3%, E-value=8e-12, Identity=85%"; Hit description=HAD -superfamily hydrolase, subfamily IA, variant 3 containing protein, expressed
DRVICVGLGSGPSWNLTSKAMGRINCKVYYCKEDEVCLYQSIAFDVKFHEGPEPSP

SEQ ID NO: 123740 - protein, 76 aa, Setaria italica
  Transcript Sequence Number=SeqID_57766
  Gene Ontology: Mol. function=hydrolase activity, acting on glycosyl bonds; Cellular component=beta-galactosidase complex; Biological process=carbohydrate metabolic process
  Homolog annotation: Hit_ID=Q5N8X6; Match level="QueryCoverage=90%, HitCoverage=8%, E-value=6e-23, Identity=71%"; Hit description=Beta -galactosidase 3
CGQPTQRWYHVPRSWFHPSENTLVVFEEKGGDPTKITFSRRVVSSVCSFVSEHYPSIDLESWDKSITNDTTARTTT

SEQ ID NO: 123741 - protein, 83 aa, Setaria italica
  misc_feature (12)..(12): Xaa can be any naturally occurring amino acid
  Transcript Sequence Number=SeqID_57767
  Gene Ontology: Mol. function=hydrolase activity, acting on glycosyl bonds; Cellular component=beta-galactosidase complex; Biological process=carbohydrate metabolic process
  Homolog annotation: Hit_ID=B6U0W2; Match level="QueryCoverage=93%, HitCoverage=9%, E-value=1e-39, Identity=97%"; Hit description=Beta -galactosidase
  Pfam annotation: Domain name=Glyco_hydro_35; Domain location=1-83; Score=-203.2; E_value=0.05; Accession=PF01301.11; Description =Glycosyl hydrolases family 35
PGWFQTFGESNXHRPPEDVAFAVARFFEKGGSVQNYYMYHGGTNFGRTTGGPFITTSYDYDAPIDEYGLRRFPKWAHLEGAFY

SEQ ID NO: 123742 - protein, 46 aa, Setaria italica
  Transcript Sequence Number=SeqID_57768
SDYTAESNPLETLQKKRNHIPLLSRQTEPSYEERIAKVKTKQTNIL

SEQ ID NO: 123743 - protein, 95 aa, Setaria italica
  misc_feature (27)..(27): Xaa can be any naturally occurring amino acid
  Transcript Sequence Number=SeqID_57769
  Gene Ontology: Mol. function=protein dimerization activity
VSTYSSLLSRRNKLKDTIDPISLDNIXVLDEWVSEHPSLLCRDDLNWESVDAPFAEPTSDDEELIAVDNDEDASVAALSWSAADDLYCPQPDQEP

SEQ ID NO: 123744 - protein, 84 aa, Setaria italica
  Transcript Sequence Number=SeqID_57770
  Subcellular localization annotation: CTP_CleavageSite=66; ConfidenceScore=5.08e-01
NMNGHHLVLLCSTIQWFCSFVDSRKGFSQMIVVSNTFCCQFYKRSHGCVSICRYSLCKMRLELLVCVFLVVEAMQKFLYLNYSM

SEQ ID NO: 123745 - protein, 50 aa, Setaria italica
  Transcript Sequence Number=SeqID_57771
NWSYSLHSCFTVKPFNRKTYLYIMCTPTSSSSHVLHNEYLQIETHPWLLL

SEQ ID NO: 123746 - protein, 64 aa, Setaria italica
  Transcript Sequence Number=SeqID_57772
  Gene Ontology: Mol. function=protein dimerization activity; Cellular component=nucleus; Biological process=regulation of transcription, DNA-dependent
  Homolog annotation: Hit_ID=Q41650; Match level="QueryCoverage=98%, HitCoverage=14%, E-value=6e-18, Identity=60%"; Hit description=CREB -like protein
ADEQLQAFVNGAMAQHEELLNLKGAMARADVFHLLSGVWASPAERCFLWLGGFRPSEVIKVLVP

SEQ ID NO: 123747 - protein, 48 aa, Setaria italica
  Transcript Sequence Number=SeqID_57773
SRNYPHHTSGNIFHTCSCPFITYSLIDSSYVESKILLTHQGTRTCLPH

SEQ ID NO: 123748 - protein, 71 aa, Setaria italica
  Transcript Sequence Number=SeqID_57774
  Gene Ontology: Mol. function=catalytic activity; Biological process =cellular metabolic process
TLTPSITGSLQVFLQIMKGQRFDMDEYFLGCVDVRGVAQSLVALYENSSAQGRHLCVESTERMVDFTNKLA

SEQ ID NO: 123749 - protein, 49 aa, Setaria italica
  Transcript Sequence Number=SeqID_57775
LTPSITGSLQVFLQIMKGQRFDMDEYFLGCVDVRGVAQSLVALSETFHL

SEQ ID NO: 123750 - protein, 90 aa, Setaria italica
  Transcript Sequence Number=SeqID_57776
  Gene Ontology: Mol. function=zinc ion binding; Biological process=RNA- dependent DNA replication
  Homolog annotation: Hit_ID=Q7X7M3; Match level="QueryCoverage=77%, HitCoverage=8%, E-value=3e-20, Identity=64%"; Hit description =OSJNBa0084K20.2 protein
  Pfam annotation: Domain name=SWIM; Domain location=27-59; Score=44.1; E_value=5.3e-10; Accession=PF04434.9; Description=SWIM zinc finger
KRTNVLILALALEVAEVTALGGSGFRFVVNLHDRTCSCRAWQVSGIPCKHAIAFITSLSNAPLENYVDLFYSTDKFRAVYGQLIPAMADK

SEQ ID NO: 123751 - protein, 150 aa, Setaria italica
  misc_feature (8)..(8): Xaa can be any naturally occurring amino acid
  Transcript Sequence Number=SeqID_57777
TDQELMSXFEKHIMTKVVHLFIAYAELSKPYQLITEWQGYASSVPVQPEQCKPSSTQPDDESYLQNPLPENEHVGVDEEAIYLSNEPVLALDVAVCCEKEKGLNADGPEDDEVEVDNDEVEENNDEVEEDEIGEVTTNRTKEIRNPKNKI

SEQ ID NO: 123752 - protein, 36 aa, Setaria italica
  Transcript Sequence Number=SeqID_57778
HSSHHSAMHLWRTMSTYFTQQTNLGHCDLSAIAGIS

SEQ ID NO: 123753 - protein, 38 aa, Setaria italica
  Transcript Sequence Number=SeqID_57779
  Gene Ontology: Mol. function=nucleoside-triphosphatase activity; Cellular component=mitochondrial matrix; Biological process=ATP -dependent proteolysis
  Homolog annotation: Hit_ID=P93648; Match level="QueryCoverage=100%, HitCoverage=3%, E-value=3e-15, Identity=100%"; Hit description=Lon protease homolog 2, mitochondrial
VLFVCTANVIEMIPNPLLDRMEIIAIAGYITDEKMHIA

SEQ ID NO: 123754 - protein, 62 aa, Setaria italica
  Transcript Sequence Number=SeqID_57780
  Gene Ontology: Mol. function=nucleoside-triphosphatase activity; Cellular component=mitochondrial matrix; Biological process=ATP -dependent proteolysis
  Homolog annotation: Hit_ID=Q4ZJ72; Match level="QueryCoverage=83%, HitCoverage=5%, E-value=2e-20, Identity=88%"; Hit description=Lon protease homolog
AKAEDATVAEGEADGKASSAIVPTNPKIEDCLSVVALPLPHRPLFPGFYMPVYVKDQKLLQA

SEQ ID NO: 123755 - protein, 75 aa, Setaria italica
  Transcript Sequence Number=SeqID_57781
  Gene Ontology: Mol. function=nucleoside-triphosphatase activity; Cellular component=mitochondrial matrix; Biological process=ATP -dependent proteolysis
  Homolog annotation: Hit_ID=P93648; Match level="QueryCoverage=77%, HitCoverage=6%, E-value=1e-25, Identity=96%"; Hit description=Lon protease homolog 2, mitochondrial
AFGPLHRPACKIQERVVDVEEVILEFIAVGKLRGTSQGKIICLSGPPGVGKTSIGRSIARALNRQFYRFSVGGLA

SEQ ID NO: 123756 - protein, 61 aa, Setaria italica
  misc_feature (6)..(6): Xaa can be any naturally occurring amino acid
  Transcript Sequence Number=SeqID_57782
IKLHPXVKYQQAMPMQFFVTQTEKDKKLFYRSKDQSVQCQKSNSLSILTRFQVSMYNAIGM

SEQ ID NO: 123757 - protein, 82 aa, Setaria italica
  Transcript Sequence Number=SeqID_57783
  Gene Ontology: Mol. function=protein serine/threonine kinase activity; Biological process=protein amino acid phosphorylation
  Homolog annotation: Hit_ID=B9T3P6; Match level="QueryCoverage=67%, HitCoverage=14%, E-value=2e-12, Identity=60%"; Hit description =Protein kinase atn1, putative
IIHRDLKPDNLLLTANRKKLKLTDFGLAREETVTEMMTAETGTYRWMAPEVVNTIFCIILKLAKLHTETKTTKHFTLITVIC

SEQ ID NO: 123758 - protein, 150 aa, Setaria italica
  misc_feature (142)..(142): Xaa can be any naturally occurring amino acid
  Transcript Sequence Number=SeqID_57784
  Gene Ontology: Mol. function=protein serine/threonine kinase activity; Cellular component=plasma membrane; Biological process =protein amino acid phosphorylation
  Homolog annotation: Hit_ID=B9T3P6; Match level="QueryCoverage=100%, HitCoverage=40%, E-value=4e-68, Identity=78%"; Hit description =Protein kinase atn1, putative
  Pfam annotation: Domain name=Pkinase; Domain location=1-150; Score= -8.4; E_value=5.4e-08; Accession=PF00069.17; Description=Protein kinase domain
  Pfam annotation: Domain name=Pkinase_Tyr; Domain location=1-150; Score=-55.4; E_value=4.8e-10; Accession=PF07714.9; Description =Protein tyrosine kinase
  Pfam module annotation: Pfam domain module=Pkinase::Pkinase_Tyr; Domain location=1-150::1-150
MDCLHANGIIHRDLKPDNLLLTANRKKLKLTDFGLAREETVTEMMTAETGTYRWMAPELYSTVTLRRGEKKHYTNKVDVYSFGIVLWELLTNRMPFEGMSNLQAAYAAAFQQKRPTLPEDTPQELVFIVQSCWVEDPSMRPXFSQIIRML

SEQ ID NO: 123759 - protein, 75 aa, Setaria italica
  Transcript Sequence Number=SeqID_57785
  Gene Ontology: Mol. function=protein serine/threonine kinase activity; Biological process=protein amino acid phosphorylation
  Homolog annotation: Hit_ID=B9T3P6; Match level="QueryCoverage=61%, HitCoverage=12%, E-value=9e-12, Identity=71%"; Hit description =Protein kinase atn1, putative
CGVELGREIYCEVAEFVSRCKCRVGRLIIGACKEPLMVIVSELLPGMSLKNYLNSIRPSQLDTHTAIGYALDIAH

SEQ ID NO: 123760 - protein, 52 aa, Setaria italica
  Transcript Sequence Number=SeqID_57786
CYKWLCGNGSLLFQAIRSVNISPRGRGRGRGRGRGRPPTKRKEVGYVQFEDE

SEQ ID NO: 123761 - protein, 44 aa, Setaria italica
  misc_feature (1)..(7): Xaa can be any naturally occurring amino acid
  Transcript Sequence Number=SeqID_57787
XXXXXXXKFLGQLPSNYWETKVTQDNYITASWQQDYQLQPELIK

SEQ ID NO: 123762 - protein, 96 aa, Setaria italica
  Transcript Sequence Number=SeqID_57788
  Subcellular localization annotation: CTP_CleavageSite=28; ConfidenceScore=5.56e-01
WRKPIPSVKSHVRSRQTGTRKRVRLHPVAQTESGSSNPRTAARSDQTPGGRSRRDRPPRAAGSTQVLNSTRRTGRRAAAGRARRGAVVGWGGRGRS

SEQ ID NO: 123763 - protein, 72 aa, Setaria italica
  Transcript Sequence Number=SeqID_57789
  Gene Ontology: Mol. function=metal ion binding
  Homolog annotation: Hit_ID=B9RT06; Match level="QueryCoverage=97%, HitCoverage=26%, E-value=6e-22, Identity=64%"; Hit description=Zinc finger protein, putative
LEDKTGSTTKTCVSCGANMGEYFCDICKFYDDDTEKGQYHCNDCGICRVGGKENFFHCVKCGSCYSVALRDN

SEQ ID NO: 123764 - protein, 51 aa, Setaria italica
  Transcript Sequence Number=SeqID_57790
  Gene Ontology: Mol. function=metal ion binding
  Homolog annotation: Hit_ID=B9RT06; Match level="QueryCoverage=100%, HitCoverage=18%, E-value=3e-15, Identity=66%"; Hit description=Zinc finger protein, putative
  Pfam annotation: Domain name=zf-CHY; Domain location=1-38; Score= -6.7; E_value=0.0045; Accession=PF05495.4; Description=CHY zinc finger
IEKVVCLLCDTEQPVSQACVSCGANMGEYFCDICKFYDDDTEKGQYHCNDC

SEQ ID NO: 123765 - protein, 75 aa, Setaria italica
  Transcript Sequence Number=SeqID_57791
  Gene Ontology: Mol. function=catalytic activity; Biological process =metabolic process
  Homolog annotation: Hit_ID=B8XVQ4; Match level="QueryCoverage=88%, HitCoverage=37%, E-value=9e-24, Identity=73%"; Hit description =Autophagy-related 7
TSENKIAITAVLGCDSYIVMRHGAGPGTSGGTDEVAAQIENLSTEDALSHQRLGCCFCNDAASLFNVHQIKTFVL

SEQ ID NO: 123766 - protein, 26 aa, Setaria italica
  Transcript Sequence Number=SeqID_57792
LKQPRNQSPFQGLMYDYLRLEGPCGC

SEQ ID NO: 123767 - protein, 155 aa, Setaria italica
  Transcript Sequence Number=SeqID_57793
  Gene Ontology: Mol. function=cysteine-type peptidase activity; Cellular component=soluble fraction; Biological process=ubiquitin -dependent protein catabolic process
  Homolog annotation: Hit_ID=Q5JK78; Match level="QueryCoverage=83%, HitCoverage=27%, E-value=2e-50, Identity=73%"; Hit description =Ubiquitin carboxyl-terminal hydrolase
  Pfam annotation: Domain name=UCH; Domain location=1-147; Score=-52.0; E_value=0.00067; Accession=PF00443.21; Description=Ubiquitin carboxyl- terminal hydrolase
FLHLSASVEELGVSVSVHLSKIHKHPVPRQMLRDAENAKFGLKTQGKASSSKENEGSSSSAGDSSSMDIDKADPSVPKKQLTGVYDLVAVLTHKGRSADSGHYVGWVKQDNGKWIEFDDDNPNIRKEEDILKLSGGGDWHMAYICLYKARIAKRP

SEQ ID NO: 123768 - protein, 104 aa, Setaria italica
  misc_feature (28)..(28): Xaa can be any naturally occurring amino acid
  misc_feature (71)..(71): Xaa can be any naturally occurring amino acid
  Transcript Sequence Number=SeqID_57794
  Gene Ontology: Mol. function=cysteine-type peptidase activity; Cellular component=soluble fraction; Biological process=ubiquitin -dependent protein catabolic process
  Homolog annotation: Hit_ID=Q5JK78; Match level="QueryCoverage=81%, HitCoverage=17%, E-value=2e-41, Identity=90%"; Hit description =Ubiquitin carboxyl-terminal hydrolase
  Pfam annotation: Domain name=UCH; Domain location=1-95; Score=-84.7; E_value=0.088; Accession=PF00443.21; Description=Ubiquitin carboxyl -terminal hydrolase
TNNKVSRLGELQSSMDIDKADPSVPKNXLTGVYDLVAVLTHKGRSADSGHYVGWVKQDNGKWIEFDDDNPXIRKEEDILKLSGGGDWHMAYICLYKARVAESKS

SEQ ID NO: 123769 - protein, 38 aa, Setaria italica
  Transcript Sequence Number=SeqID_57795
TREEVQTLATTLAGLRQQPNRRHQSIVSLVQKDQLTGV

SEQ ID NO: 123770 - protein, 120 aa, Setaria italica
  misc_feature (27)..(27): Xaa can be any naturally occurring amino acid
  Transcript Sequence Number=SeqID_57796
  Gene Ontology: Mol. function=cysteine-type peptidase activity; Cellular component=soluble fraction; Biological process=ubiquitin -dependent protein catabolic process
  Homolog annotation: Hit_ID=Q5JK78; Match level="QueryCoverage=88%, HitCoverage=22%, E-value=1e-53, Identity=94%"; Hit description =Ubiquitin carboxyl-terminal hydrolase
  Pfam annotation: Domain name=UCH; Domain location=1-117; Score=-68.5; E_value=0.0079; Accession=PF00443.21; Description=Ubiquitin carboxyl -terminal hydrolase
NTCYMNSTLQCLHSVPELKSALLSYSXTARGNGVDQASHNLTLATRNTFGELDQSVRPVAPLQFLQTLRKKYPQFAQQHNNVYMQQDAEECWTQLVYTLSQTLTSECKVEILARLLYELR

SEQ ID NO: 123771 - protein, 102 aa, Setaria italica
  misc_feature (43)..(43): Xaa can be any naturally occurring amino acid
  Transcript Sequence Number=SeqID_57797
KVPMELFAQGNKEVLPALLMKADGNGHFSVDFHARLSALQAFXSICISLLHCSEASSDIGIDKFKNKLYSSSLKMLLKEEVKQLIDSVTTKEKKENQKKTRK

SEQ ID NO: 123772 - protein, 86 aa, Setaria italica
  Transcript Sequence Number=SeqID_57798
  Gene Ontology: Cellular component=extracellular region; Biological process=plant-type cell wall organization and biogenesis
  Homolog annotation: Hit_ID=P0C1Y4; Match level="QueryCoverage=98%, HitCoverage=34%, E-value=1e-31, Identity=77%"; Hit description =Expansin-A33
  Pfam annotation: Domain name=DPBB_1; Domain location=37-85; Score =21.1; E_value=4e-05; Accession=PF03330.10; Description=Rare lipoprotein A (RlpA)-like double
YWNSGTATFYGGKDGSGTMGGACGYDNLYNQGYGVLNAALSQVLFNDGASCGQCYNIKCDTSKSAWCKPGYSVTITATNLCPPNYA

SEQ ID NO: 123773 - protein, 39 aa, Setaria italica
  Transcript Sequence Number=SeqID_57799
  Gene Ontology: Cellular component=extracellular region; Biological process=plant-type cell wall organization and biogenesis
  Homolog annotation: Hit_ID=Q4PR40; Match level="QueryCoverage=97%, HitCoverage=14%, E-value=8e-10, Identity=86%"; Hit description =Expansin-A28
YWNSGTATFYGGKDGSGTMGGACGYDNLYNQGYGVLNAA

SEQ ID NO: 123774 - protein, 117 aa, Setaria italica
  misc_feature (18)..(18): Xaa can be any naturally occurring amino acid
  misc_feature (34)..(34): Xaa can be any naturally occurring amino acid
  Transcript Sequence Number=SeqID_57800
  Gene Ontology: Mol. function=metal ion binding
  Homolog annotation: Hit_ID=Q67WE0; Match level="QueryCoverage=82%, HitCoverage=14%, E-value=3e-37, Identity=82%"; Hit description=Zinc finger (C3HC4-type RING finger)protein-like
RQLGILVQQICKWCSIVXKSSVLLSIWIFVIPVXLIGLLFELLVIVPMRVPIDESPVFLLYQDWALGLIFLKIWTRLVMLDQMAPLVDESWRSKFERAVRSLVTIGIIISWRTHKPL

SEQ ID NO: 123775 - protein, 43 aa, Setaria italica
  Transcript Sequence Number=SeqID_57801
KLVCEVDWTVEPSYGFHGCHEVPSEFNKITIARLHGPVNFMTL

SEQ ID NO: 123776 - protein, 97 aa, Setaria italica
  misc_feature (92)..(92): Xaa can be any naturally occurring amino acid
  Transcript Sequence Number=SeqID_57802
  Gene Ontology: Mol. function=cysteine-type peptidase activity; Biological process=ubiquitin-dependent protein catabolic process
  Homolog annotation: Hit_ID=Q8H557; Match level="QueryCoverage=89%, HitCoverage=9%, E-value=1e-15, Identity=56%"; Hit description =Ubiquitin carboxyl-terminal hydrolase
HCLLAIAFRYSSGDNVTPQKKEFEAPLLATLPETVNGLLLQDIYLKLLNPFRLSKGANSLSGFAGSNGDPVDLMDGMPSDSDSNFQNIQLEXDTESS

SEQ ID NO: 123777 - protein, 61 aa, Setaria italica
  Transcript Sequence Number=SeqID_57803
  Gene Ontology: Mol. function=RNA binding
  Homolog annotation: Hit_ID=Q5SMR4; Match level="QueryCoverage=100%, HitCoverage=10%, E-value=1e-20, Identity=83%"; Hit description=ALM beta-like
LIDLLIQSVRLTDEFMELAKENTSNNLETCGILGASFRDGTYFVTMLIIPKQEGTAHSVCQ

SEQ ID NO: 123778 - protein, 38 aa, Setaria italica
  Transcript Sequence Number=SeqID_57804
MKMAGFLQVMLPEAVAIVVAPTDPTRSYGIFRLTDPGG

SEQ ID NO: 123779 - protein, 95 aa, Setaria italica
  misc_feature (83)..(83): Xaa can be any naturally occurring amino acid
  misc_feature (87)..(87): Xaa can be any naturally occurring amino acid
  Transcript Sequence Number=SeqID_57805
  Gene Ontology: Mol. function=RNA binding
  Homolog annotation: Hit_ID=Q5SMR4; Match level="QueryCoverage=83%, HitCoverage=14%, E-value=2e-30, Identity=81%"; Hit description=ALM beta-like
VLFLLVLSLTSTVLLSGSCAVKHHFPSPIVSWIEDLSSFGNVSFSPDTEYVDEQARASVGQSSTSSNLHDMQISVRLTDEFMXLAKXNTSNNLET

SEQ ID NO: 123780 - protein, 62 aa, Setaria italica
  misc_feature (37)..(37): Xaa can be any naturally occurring amino acid
  Transcript Sequence Number=SeqID_57806
  Gene Ontology: Mol. function=amino-acid N-acetyltransferase activity; Cellular component=cytoplasm; Biological process=amino acid biosynthetic process
  Homolog annotation: Hit_ID=Q8H5K9; Match level="QueryCoverage=72%, HitCoverage=7%, E-value=5e-11, Identity=77%"; Hit description=Amino acid acetyltransferase(N-acetylglutamate synthase)-like protein
FVPKSSDVELIYLSLLWQRRGVVGGTDYGFTGEVKKXRCSWIRERLDRDSIVVVSNMGYSSA

SEQ ID NO: 123781 - protein, 41 aa, Setaria italica
  Transcript Sequence Number=SeqID_57807
DYLPFLLQIHRIFTCINTVLQCTSAAGVIKQPSCAATRSVN

SEQ ID NO: 123782 - protein, 75 aa, Setaria italica
  misc_feature (51)..(51): Xaa can be any naturally occurring amino acid
  Transcript Sequence Number=SeqID_57808
  Gene Ontology: Mol. function=kinase activity
  Homolog annotation: Hit_ID=B6TU35; Match level="QueryCoverage=100%, HitCoverage=18%, E-value=5e-28, Identity=81%"; Hit description =Choline/ethanolamine kinase
FIHARTLSAADLRDPEISAIIASKLREFHNLDMPGPKSVLIWERLSTSSAXRNWLKTAKSLCSPDEAKEFCLDSM

SEQ ID NO: 123783 - protein, 59 aa, Setaria italica
  Transcript Sequence Number=SeqID_57809
  Gene Ontology: Mol. function=kinase activity
  Homolog annotation: Hit_ID=B6TU35; Match level="QueryCoverage=100%, HitCoverage=16%, E-value=9e-25, Identity=86%"; Hit description =Choline/ethanolamine kinase
NEFSGEGECIGFCHNDLQYGNIMIDEETKLLTIIDYEYASFNPVAYDITNHFCEMAADY

SEQ ID NO: 123784 - protein, 48 aa, Setaria italica
  Transcript Sequence Number=SeqID_57810
TLNDNIRTNLPAYWIFFLEYTGDLHIIALRRELWSMKHPTQHHLLLDK

SEQ ID NO: 123785 - protein, 69 aa, Setaria italica
  Transcript Sequence Number=SeqID_57811
QLNKYIQVQLWIYLEQLPFSCCMYASHLLKSLGYFPCSATEFNQSSTTLLPASFIIFFLFQQESTSPLL

SEQ ID NO: 123786 - protein, 59 aa, Setaria italica
  misc_feature (55)..(55): Xaa can be any naturally occurring amino acid
  Transcript Sequence Number=SeqID_57812
LVKCVPICITYSPSPCHLFPSSFIQMDYSSLRRQAASMKKSLFDQACIILWKFLXIGIS

SEQ ID NO: 123787 - protein, 57 aa, Setaria italica
  Transcript Sequence Number=SeqID_57813
  Gene Ontology: Mol. function=GTP binding; Cellular component =intracellular
  Homolog annotation: Hit_ID=B9RVE2; Match level="QueryCoverage=98%, HitCoverage=11%, E-value=3e-12, Identity=58%"; Hit description=GTP binding protein, putative
DKNAGYNVKISAPLDNVPFSTSTERERIEESVFRNQLEFFAAAKMSSSFPPPTLPEI

SEQ ID NO: 123788 - protein, 31 aa, Setaria italica
  Transcript Sequence Number=SeqID_57814
QVFRNQLEFFAAAKMSSSFPPPTLPEIAFAG

SEQ ID NO: 123789 - protein, 77 aa, Setaria italica
  Transcript Sequence Number=SeqID_57815
  Pfam annotation: Domain name=DUF1713; Domain location=49-75; Score =20.5; E_value=0.0032; Accession=PF08213.3; Description=Mitochondrial domain of unknown funct
ASTPAGTPPASLRDAILSFHPGLQIHPCLDPIGDAPAVEEGGGEAAEVWADSVKKKRKRKMNKHKLRKLRKRLRRQT

SEQ ID NO: 123790 - protein, 53 aa, Setaria italica
  Transcript Sequence Number=SeqID_57816
  Gene Ontology: Mol. function=protein serine/threonine kinase activity; Cellular component=plasma membrane; Biological process =protein amino acid phosphorylation
  Homolog annotation: Hit_ID=Q10R62; Match level="QueryCoverage=96%, HitCoverage=12%, E-value=3e-21, Identity=96%"; Hit description =Serine/threonine-protein kinase NAK, putative, expressed
NFAGRLSAKADVYSFGVVLLELLTGRRALDKSKPGIEQNLVDWARPHLGDKRR

SEQ ID NO: 123791 - protein, 155 aa, Setaria italica
  misc_feature (27)..(27): Xaa can be any naturally occurring amino acid
  Transcript Sequence Number=SeqID_57817
  Gene Ontology: Mol. function=protein serine/threonine kinase activity; Cellular component=plasma membrane; Biological process =protein amino acid phosphorylation
  Homolog annotation: Hit_ID=Q10R62; Match level="QueryCoverage=97%, HitCoverage=35%, E-value=4e-77, Identity=93%"; Hit description =Serine/threonine-protein kinase NAK, putative, expressed
  Pfam annotation: Domain name=Pkinase; Domain location=2-134; Score= -81.3; E_value=0.0012; Accession=PF00069.17; Description=Protein kinase domain
  Pfam annotation: Domain name=Pkinase_Tyr; Domain location=1-139; Score=-152.1; E_value=0.0013; Accession=PF07714.9; Description =Protein tyrosine kinase
  Pfam module annotation: Pfam domain module=Pkinase::Pkinase_Tyr; Domain location=2-134::1-139
LENHLFRRGADPLSWAIRLKVAIGAAXGLSFLHDAENQVIYRDFKASNILLDSEFHAKLSDFGLAKAGPTGDKTHVSTQVMGTHGYAAPEYIATGRLSAKADVYSFGVVLLELLTGRRALDKSKPGIEQNLVDWARPHLGDKSSRSYYRLFYCTT

SEQ ID NO: 123792 - protein, 81 aa, Setaria italica
  misc_feature (55)..(55): Xaa can be any naturally occurring amino acid
  misc_feature (74)..(74): Xaa can be any naturally occurring amino acid
  Transcript Sequence Number=SeqID_57818
  Subcellular localization annotation: CTP_CleavageSite=67; ConfidenceScore=5.43e-01
DGLIDPSSHPLSENLNLNSDSNGSTSGCLPQSSQPGNQIPFINSANPVMSLVAFXASEVGPRVAAACASAALSXLTRDDSR

SEQ ID NO: 123793 - protein, 66 aa, Setaria italica
  misc_feature (21)..(21): Xaa can be any naturally occurring amino acid
  Transcript Sequence Number=SeqID_57819
  Gene Ontology: Mol. function=endonuclease activity; Cellular component=intracellular; Biological process=DNA repair
  Homolog annotation: Hit_ID=UPI00005DC310; Match level="QueryCoverage =92%, HitCoverage=10%, E-value=5e-13, Identity=49%"; Hit description =endonuclease/exonuclease/phosphatase family protein
MWKGGRSSKLEGSDHIPVYIXLKEIPELPVHNIPPSAARYLPEVRGRQQSIVSFFNKGKTYELQDD

SEQ ID NO: 123794 - protein, 30 aa, Setaria italica
  Transcript Sequence Number=SeqID_57820
CGHFVLFNIYGPAVEEDDKERVRFKLLFYK

SEQ ID NO: 123795 - protein, 79 aa, Setaria italica
  Transcript Sequence Number=SeqID_57821
GKSCFRNLTSFTLKNCHFLYYWKPLFLYADGKCFAWTGENELICRWQTGNYSYMPPLGERTCEYLPYAALLDACVSLYP

SEQ ID NO: 123796 - protein, 46 aa, Setaria italica
  Transcript Sequence Number=SeqID_57822
FYRIITHEIGASKVTTVLVRVYDNRRATKLESTPRAALLCFFFFYF

SEQ ID NO: 123797 - protein, 40 aa, Setaria italica
  Transcript Sequence Number=SeqID_57823
FYRIITHEIGASKVTTVLVRVYDNRLRHATGDRQGTQGIG

SEQ ID NO: 123798 - protein, 44 aa, Setaria italica
  Transcript Sequence Number=SeqID_57824
  Homolog annotation: Hit_ID=B6THE1; Match level="QueryCoverage=84%, HitCoverage=11%, E-value=3e-10, Identity=83%"; Hit description =Aldose reductase
MAESFVLNTGATIPSVGLGVWQIKPEAVGDAIYAAVKLAGDSMC

SEQ ID NO: 123799 - protein, 84 aa, Setaria italica
  Transcript Sequence Number=SeqID_57825
RVTTLQASLDSWQSEQINKSLYYLSFLSIIFLPLSIVTGGKFFLLVLIHVYFPQFISLVLTYMTYNCTICPVFGMNVGGVPWTE

SEQ ID NO: 123800 - protein, 126 aa, Setaria italica
  misc_feature (68)..(68): Xaa can be any naturally occurring amino acid
  Transcript Sequence Number=SeqID_57826
  Gene Ontology: Mol. function=hydrolase activity, hydrolyzing O -glycosyl compounds; Biological process=carbohydrate metabolic process
  Homolog annotation: Hit_ID=Q93X75; Match level="QueryCoverage=89%, HitCoverage=14%, E-value=8e-28, Identity=54%"; Hit description =Putative beta-mannosidase
SYFIEVVNTTADELADVAVEVSVWDLDGASPYYKVSEKIVVPPKKVKQIMEMKYPKMKDAKPVYFSAXLNFFRLSDNGILSRNFYWLHLHGKDYKLLEQYQQKNIPLKIYTEVSSTTGLPRTTKVK

SEQ ID NO: 123801 - protein, 56 aa, Setaria italica
  Transcript Sequence Number=SeqID_57827
  Subcellular localization annotation: CTP_CleavageSite=16; ConfidenceScore=5.37e-01
ATSKSLGGKSKSGKNRASSTSSKTGGSKTERNNSDQCTYANPKSARACQACDRQHR

SEQ ID NO: 123802 - protein, 151 aa, Setaria italica
  Transcript Sequence Number=SeqID_57828
  Gene Ontology: Mol. function=RNA binding
  Homolog annotation: Hit_ID=Q8LLB9; Match level="QueryCoverage=83%, HitCoverage=13%, E-value=3e-65, Identity=95%"; Hit description=BPM
  Pfam annotation: Domain name=PUF; Domain location=20-54; Score=29.0; E_value=1.9e-05; Accession=PF00806.11; Description=Pumilio-family RNA binding repeat
  Pfam annotation: Domain name=PUF; Domain location=62-96; Score=37.9; E_value=4e-08; Accession=PF00806.11; Description=Pumilio-family RNA binding repeat
  Pfam module annotation: Pfam domain module=PUF::PUF; Domain location =20-54::62-96
VVQHVLEHGKPHERSAIIEKLIGQIVQMSQQKFASNVIEKCLAFGNPVERQVLIGEMLGSTSESEPLEVMMKDQFANYVVQKVLETCDDQQREMILTRIKTHLNTLKKYTYGKHIVARVEKLVAAGGICGLSPVPLTLCVCIHGANMSVFL

SEQ ID NO: 123803 - protein, 64 aa, Setaria italica
  Transcript Sequence Number=SeqID_57829
  Gene Ontology: Mol. function=RNA binding
  Homolog annotation: Hit_ID=Q94HK0; Match level="QueryCoverage=96%, HitCoverage=7%, E-value=9e-30, Identity=98%"; Hit description =Putative pumilio/Mpt5 family RNA-binding protein
  Pfam annotation: Domain name=PUF; Domain location=20-54; Score=39.4; E_value=1.4e-08; Accession=PF00806.11; Description=Pumilio-family RNA binding repeat
MLRVLEHCDDPKTQQIMMDEILQSVCLLAQDQYGNYVVQHVLEHGKPHERSAIIEKLIGQIVQM

SEQ ID NO: 123804 - protein, 46 aa, Setaria italica
  Transcript Sequence Number=SeqID_57830
RANNLVVQLTVARFALYVFSLLKTLYKALLALPEINTVRLRRRVYI

SEQ ID NO: 123805 - protein, 69 aa, Setaria italica
  Transcript Sequence Number=SeqID_57831
LLSHAAKDRDQGEPAGEREDTVQGHGAGRQSGRYARARVVLVFYHVDALVLFICELRPVLTVLLLRAWV

SEQ ID NO: 123806 - protein, 38 aa, Setaria italica
  Transcript Sequence Number=SeqID_57832
  Gene Ontology: Mol. function=transferase activity, transferring nitrogenous groups
  Homolog annotation: Hit_ID=Q9XGB0; Match level="QueryCoverage=89%, HitCoverage=6%, E-value=2e-12, Identity=88%"; Hit description=Serine palmitoyltransferase (Fragment)
WYLRYAPICLGLEDFYVRRLYLRIQDCFGRPIASAPDS

SEQ ID NO: 123807 - protein, 49 aa, Setaria italica
  Transcript Sequence Number=SeqID_57833
MNSLRMIVEHAHCKLGELEFIFFLLSFLVAGMNNDVSILHGTSYWGSQA

SEQ ID NO: 123808 - protein, 73 aa, Setaria italica
  misc_feature (17)..(17): Xaa can be any naturally occurring amino acid
  Transcript Sequence Number=SeqID_57834
AEIIYSLPLFATFKSIXLFTCDNVNNEHYMNAKTGSQPLVHLNIFTSSNWDFWCKGPHELILFLRGVNCNKIR

SEQ ID NO: 123809 - protein, 61 aa, Setaria italica
  Transcript Sequence Number=SeqID_57835
LVQILDVDSIPSFKRRSDCSEQESCQVSTMFETDEDLGKLSLLRVLLNFLSALSSLCFLDH

SEQ ID NO: 123810 - protein, 34 aa, Setaria italica
  Transcript Sequence Number=SeqID_57836
  Gene Ontology: Cellular component=integral to membrane
  Homolog annotation: Hit_ID=B6TVF3; Match level="QueryCoverage=82%, HitCoverage=7%, E-value=7e-09, Identity=92%"; Hit description =Protein alx
EEEEESDLSDNFIVKTCQKFIPVTDYYDGDRFFN

SEQ ID NO: 123811 - protein, 41 aa, Setaria italica
  Transcript Sequence Number=SeqID_57837
CLLLKVAHRVYSEHDGHQNHNLQCNLNNSMLKLNILQHMKL

SEQ ID NO: 123812 - protein, 75 aa, Setaria italica
  Transcript Sequence Number=SeqID_57838
  Gene Ontology: Cellular component=membrane
  Homolog annotation: Hit_ID=B6SRZ8; Match level="QueryCoverage=76%, HitCoverage=12%, E-value=5e-25, Identity=85%"; Hit description =Exostosin-like
MHMEFLSTYLLKCECPFQVKQFFEYEDPNGPVNEIWRQVSLKAPLIKLLTNRNKRLFERGTNGTDCSCMCSTTPY

SEQ ID NO: 123813 - protein, 58 aa, Setaria italica
  misc_feature (12)..(12): Xaa can be any naturally occurring amino acid
  Transcript Sequence Number=SeqID_57839
  Gene Ontology: Mol. function=acetyl-CoA carboxylase activity
  Homolog annotation: Hit_ID=Q5CCG4; Match level="QueryCoverage=98%, HitCoverage=7%, E-value=1e-18, Identity=86%"; Hit description=Acetyl- CoA carboxylase (Fragment)
RRNYLEELKAEXRVSKWFSHLAESSDVKALPNGLSLLLNKMNPSKREQVIDGLRQLLG

SEQ ID NO: 123814 - protein, 89 aa, Setaria italica
  Transcript Sequence Number=SeqID_57840
  Gene Ontology: Mol. function=acetyl-CoA carboxylase activity; Biological process=fatty acid biosynthetic process
  Homolog annotation: Hit_ID=Q5CCG4; Match level="QueryCoverage=100%, HitCoverage=12%, E-value=9e-40, Identity=87%"; Hit description =Acetyl-CoA carboxylase (Fragment)
KKWYLASKGTEGDSEKWNDDESFFAWKDDSKNYENYLEELKAERVSKWFSHLAESSDVKALPNGLSLLLNKMNPSKREQVIDGLRQLLG

SEQ ID NO: 123815 - protein, 59 aa, Setaria italica
  Transcript Sequence Number=SeqID_57841
SRFLLTGDAYCLGFMCHHIFSGATFLFYFFKEMHNTYSHGDTLSYNAINGSNNGIDGLN

SEQ ID NO: 123816 - protein, 96 aa, Setaria italica
  misc_feature (28)..(28): Xaa can be any naturally occurring amino acid
  misc_feature (75)..(75): Xaa can be any naturally occurring amino acid
  Transcript Sequence Number=SeqID_57842
  Gene Ontology: Mol. function=electron carrier activity
  Homolog annotation: Hit_ID=B6TGN9; Match level="QueryCoverage=64%, HitCoverage=36%, E-value=5e-25, Identity=85%"; Hit description =Uclacyanin-2
  Pfam annotation: Domain name=Cu_bind_like; Domain location=1-71; Score=61.5; E_value=3.2e-15; Accession=PF02298.9; Description =Plastocyanin-like domain
MIISSGTTYVAVFTYSPELHDVVEVTKXGYDACSSANNISAFRSGNDVVALADVGTRYFLCGLTGHCDSGMKIRXAAAAASSAGIAAACLLLQHAA

SEQ ID NO: 123817 - protein, 74 aa, Setaria italica
  misc_feature (6)..(6): Xaa can be any naturally occurring amino acid
  misc_feature (12)..(12): Xaa can be any naturally occurring amino acid
  misc_feature (23)..(23): Xaa can be any naturally occurring amino acid
  Transcript Sequence Number=SeqID_57843
VDPLKXLANNIXFATEVEVQLGXRLQASVVRQMKDSEMAMQWTLIYQLTSRLRVLFQSTPSNRLLFEYSATSQD

SEQ ID NO: 123818 - protein, 99 aa, Setaria italica
  Transcript Sequence Number=SeqID_57844
  Gene Ontology: Mol. function=protein dimerization activity; Cellular component=endoplasmic reticulum lumen; Biological process=proteolysis
  Homolog annotation: Hit_ID=Q7XUA8; Match level="QueryCoverage=100%, HitCoverage=23%, E-value=4e-46, Identity=88%"; Hit description=IAA -amino acid hydrolase ILR1-like 5
PTQAAVCFYEAKIEGKTGMAETPHLNVDPIVAASFAILSLQQLISREDDPLHSQVVSVTYVKAGKALDATPAIVEFGGTLRSITTEGLYRLQKRVKEVV

SEQ ID NO: 123819 - protein, 85 aa, Setaria italica
  Transcript Sequence Number=SeqID_57845
  Gene Ontology: Mol. function=electron carrier activity
  Homolog annotation: Hit_ID=B9RBK2; Match level="QueryCoverage=94%, HitCoverage=48%, E-value=4e-09, Identity=39%"; Hit description=Blue copper protein, putative
  Pfam annotation: Domain name=Cu_bind_like; Domain location=3-84; Score=50.6; E_value=6e-12; Accession=PF02298.9; Description =Plastocyanin-like domain
IQWSVGGNYSDWSAAHPVSVGDTVVFKYAPPHTVAQLSSEAAYKACNLGSKVFLDSSGGTGFTFDEPGTWYFACVTGSHCARAEG

SEQ ID NO: 123820 - protein, 45 aa, Setaria italica
  Transcript Sequence Number=SeqID_57846
VVILFLGSHWAIFYSYADSAETWYINITFCLTVGSGSIFEWLFCS

SEQ ID NO: 123821 - protein, 82 aa, Setaria italica
  Transcript Sequence Number=SeqID_57847
  Gene Ontology: Mol. function=calcium ion binding
  Homolog annotation: Hit_ID=B9T3W8; Match level="QueryCoverage=95%, HitCoverage=33%, E-value=6e-20, Identity=66%"; Hit description =Troponin C, skeletal muscle, putative
  Pfam annotation: Domain name=efhand; Domain location=39-67; Score =27.9; E_value=4.1e-05; Accession=PF00036.24; Description=EF hand
IQVLFLDLLCFCEVLSCSLDLLPQKIKMGLGNLEATFETLVDAFVFLDKNKDGYVSKDEMIQAITETTTGERSSGRIAMKRF

SEQ ID NO: 123822 - protein, 67 aa, Setaria italica
  Transcript Sequence Number=SeqID_57848
  Gene Ontology: Mol. function=secondary active sulfate transmembrane transporter activity; Cellular component=integral to membrane; Biological process=sulfate transport
  Homolog annotation: Hit_ID=A5CVC7; Match level="QueryCoverage=80%, HitCoverage=10%, E-value=4e-17, Identity=78%"; Hit description =Sulfate transporter (Fragment)
WGIDKKDSFYWAITFITTLIFGIEIGVLVGVGFSLAFVIHESANPHIGRRAGCSQLNSVVVPWIMDR

SEQ ID NO: 123823 - protein, 40 aa, Setaria italica
  Transcript Sequence Number=SeqID_57849
SARTGRILISRGVPLLFHTKKKRTGRITNSFQSPARVSKK

SEQ ID NO: 123824 - protein, 61 aa, Setaria italica
  Transcript Sequence Number=SeqID_57850
GNWRRSKRWSGRARIGETVIPSCQGCRVLGWPDRDYEARSRRPSSPARLYPSTVGFRRQGR

SEQ ID NO: 123825 - protein, 83 aa, Setaria italica
  Transcript Sequence Number=SeqID_57851
SKDREDNQQFSITGTSQQEIKASVQKHWPQAFNCQGTQITEIAIECLWPVLLEVFTRKKPTDAMFIGELSLRQWVSQAFPHEL

SEQ ID NO: 123826 - protein, 74 aa, Setaria italica
  Transcript Sequence Number=SeqID_57852
VMCYSLGKTINCNPSFPMEWYKVAATFCLHLHWKNMPIPIFLDVPILHNCYSYGIVLLEVFTRKKPTDAMFIGE

SEQ ID NO: 123827 - protein, 105 aa, Setaria italica
  misc_feature (1)..(32): Xaa can be any naturally occurring amino acid
  Transcript Sequence Number=SeqID_57853
XXXXXXXXXXXXXXXXXXXXXXXXXXXXXXXXFQEEQNIFFYQNQNLGMYIISTLPKTSLCPPEKSQLLNSSKTIYSCFKTNKHVYGSQASILQMTSQATSDWNI

SEQ ID NO: 123828 - protein, 60 aa, Setaria italica
  Transcript Sequence Number=SeqID_57854
GGTFNFGTLFFFIFVGLLCQNDHTEDFSLQVVTAYLLSYIFPCARILESKELGNESSILS

SEQ ID NO: 123829 - protein, 40 aa, Setaria italica
  Transcript Sequence Number=SeqID_57855
EVIQESLQGTVLFKASRLCYSPDSVVYDGTFVGLLSCPCC

SEQ ID NO: 123830 - protein, 91 aa, Setaria italica
  Transcript Sequence Number=SeqID_57856
ERKQLEGGPSSFEILIAGESPMLSGHRFGLGRLSRRLSFFTFWRIKTQLQPWYSLHSLFVGSSRGEGCSRFVISWFTLLCYKKKRGVCGWQ

SEQ ID NO: 123831 - protein, 51 aa, Setaria italica
  Transcript Sequence Number=SeqID_57857
  Gene Ontology: Mol. function=transferase activity, transferring glycosyl groups; Cellular component=integral to membrane; Biological process=protein amino acid glycosylation
  Homolog annotation: Hit_ID=B9RP11; Match level="QueryCoverage=98%, HitCoverage=14%, E-value=3e-19, Identity=84%"; Hit description =Galactosyltransferase, putative
MKSGVVVSEEGQQWYEPEWWKFGDSKTYFRHASGSLFILSKNLARYININR

SEQ ID NO: 123832 - protein, 40 aa, Setaria italica
  Transcript Sequence Number=SeqID_57858
KNNYLFMFLSPCFNLAVVKIKQGDKNNYLFMLTTAKLNGF

SEQ ID NO: 123833 - protein, 49 aa, Setaria italica
  Transcript Sequence Number=SeqID_57859
RTIYVDVSVGSWMMGVNATYVDDDRLCCSSSRQKSTVYKMPDVRKLLHQ

SEQ ID NO: 123834 - protein, 80 aa, Setaria italica
  Transcript Sequence Number=SeqID_57860
ACPCQPLSIRSFCSEICAVKIPPGERPSIFLVLNFYKPGFSSSKFLIWIKFFTSSCSASLESYAHDDISVGSWMMGVNAT

SEQ ID NO: 123835 - protein, 39 aa, Setaria italica
  Transcript Sequence Number=SeqID_57861
  Gene Ontology: Mol. function=RNA polymerase II transcription factor activity; Cellular component=nucleus; Biological process =transcription initiation from RNA polymerase II promoter
  Homolog annotation: Hit_ID=B6U2E9; Match level="QueryCoverage=94%, HitCoverage=18%, E-value=3e-13, Identity=97%"; Hit description =Transcription initiation factor TFIID subunit 11
NRTERKDSGPIRPCHIREAYRRLKLEGKIPRRSVPRLFR

SEQ ID NO: 123836 - protein, 53 aa, Setaria italica
  Transcript Sequence Number=SeqID_57862
TTKRLEKEVSAYLFHLSRNVRYKFDQVGIIISGFIACLSYMMIQTNIKLHHGL

SEQ ID NO: 123837 - protein, 38 aa, Setaria italica
  Transcript Sequence Number=SeqID_57863
MLTLPFNLLCRRSPISIAAAVIYMITQLSEDKKPLKGL

SEQ ID NO: 123838 - protein, 69 aa, Setaria italica
  Transcript Sequence Number=SeqID_57864
  Homolog annotation: Hit_ID=Q7XKW2; Match level="QueryCoverage=65%, HitCoverage=11%, E-value=6e-19, Identity=95%"; Hit description =OSJNBa0073E02.7 protein
VKVIQDSRPIHDKVVDSFLNKFFPSGYPYSVNEGYLTYTKFRALQHFSSAMLHVLSTQVSNSLSNTSTS

SEQ ID NO: 123839 - protein, 84 aa, Setaria italica
  misc_feature (58)..(58): Xaa can be any naturally occurring amino acid
  Transcript Sequence Number=SeqID_57865
  Homolog annotation: Hit_ID=Q7XKW2; Match level="QueryCoverage=84%, HitCoverage=20%, E-value=7e-33, Identity=88%"; Hit description =OSJNBa0073E02.7 protein
VKVIQDSRPIHDKVVDSFLNKFFPSGYPYSVNEGYLTYTKFRALQHFSSAMLHVLSTXGLRPTPAQATAVSWILKDGMQHAGKL

SEQ ID NO: 123840 - protein, 82 aa, Setaria italica
  Transcript Sequence Number=SeqID_57866
PIPDISDSYLDNLLSNFLPAGPFGNGNIINQSNLAQCIPFQKNTTVVLTNDQISPGVWYIGYFHGLGPARTQSKMISRGKAR

SEQ ID NO: 123841 - protein, 46 aa, Setaria italica
  misc_feature (10)..(10): Xaa can be any naturally occurring amino acid
  Transcript Sequence Number=SeqID_57867
MASAGLKPGXVPVILGELEPSSEMFKQGASLRVTGILQSYDVDSAI

SEQ ID NO: 123842 - protein, 38 aa, Setaria italica
  Transcript Sequence Number=SeqID_57868
MASAGLKPGVPVILGELEPSSEMFKQGASLRVTGILQS

SEQ ID NO: 123843 - protein, 77 aa, Setaria italica
  misc_feature (32)..(32): Xaa can be any naturally occurring amino acid
  Transcript Sequence Number=SeqID_57869
  Gene Ontology: Mol. function=oxidoreductase activity, acting on paired donors, with incorporation or reduction of molecular oxygen, 2-oxoglutarate as one donor, and incorporation of one atom each of oxygen into both ...
  Gene Ontology: Mol. function=donors; Cellular component=plasma membrane; Biological process=protein metabolic process
  Homolog annotation: Hit_ID=B6TED5; Match level="QueryCoverage=85%, HitCoverage=21%, E-value=3e-32, Identity=93%"; Hit description =Prolyl 4-hydroxylase
NISILTKLFTWQDEVVKRIEERISAWTFLPPXENGESIQILHYQNGEKYEPHYDYFHDRNNQALGGHRIATVLMYLS

SEQ ID NO: 123844 - protein, 84 aa, Setaria italica
  Transcript Sequence Number=SeqID_57870
  Gene Ontology: Mol. function=oxidoreductase activity, acting on paired donors, with incorporation or reduction of molecular oxygen, 2-oxoglutarate as one donor, and incorporation of one atom each of oxygen into both ...
  Gene Ontology: Mol. function=donors; Cellular component=plasma membrane; Biological process=protein metabolic process
  Homolog annotation: Hit_ID=B6TED5; Match level="QueryCoverage=64%, HitCoverage=18%, E-value=4e-22, Identity=96%"; Hit description =Prolyl 4-hydroxylase
RSDLPLTLLSPPPQNSRSRAGLTAVVPCGCRAFLHKGFLTDAECDHLIALAKDKLEKSMVADNESGKSVQSEVRTSSGMFLEKK

SEQ ID NO: 123845 - protein, 41 aa, Setaria italica
  Transcript Sequence Number=SeqID_57871
  Gene Ontology: Mol. function=oxidoreductase activity, acting on paired donors, with incorporation or reduction of molecular oxygen, 2-oxoglutarate as one donor, and incorporation of one atom each of oxygen into both ...
  Gene Ontology: Mol. function=donors; Biological process=protein metabolic process
  Homolog annotation: Hit_ID=B6TED5; Match level="QueryCoverage=95%, HitCoverage=13%, E-value=5e-16, Identity=100%"; Hit description =Prolyl 4-hydroxylase
GRNVLCPQWAAVGECAKNPNYMVGTKEAPGFCRKSCKVCAE

SEQ ID NO: 123846 - protein, 56 aa, Setaria italica
  Transcript Sequence Number=SeqID_57872
KLIRLRRKWCHPVPVIDERKGQACNWWHLHSCISSNNNRTLDDTTQKEMVSSLRLS

SEQ ID NO: 123847 - protein, 80 aa, Setaria italica
  Transcript Sequence Number=SeqID_57873
  Gene Ontology: Mol. function=aspartic-type endopeptidase activity; Biological process=proteolysis
  Homolog annotation: Hit_ID=Q2QWY6; Match level="QueryCoverage=100%, HitCoverage=17%, E-value=4e-41, Identity=93%"; Hit description =Eukaryotic aspartyl protease family protein, expressed
VTKYGNACLGILNGSEVGLKDLNILGDITMQDQMVIYDNERGQIGWIRAPCDRIPNDNTIHGFEEGYCWPQFPGIIGLPN

SEQ ID NO: 123848 - protein, 84 aa, Setaria italica
  Transcript Sequence Number=SeqID_57874
MKVAALFKEMVTKGCTPSKFIYRVLVDSLSEPSHDDKPFRQLIVEAAALSGRDFLDGESWEIFIRKVVDTNETWKKHLDLVLNL

SEQ ID NO: 123849 - protein, 60 aa, Setaria italica
  Transcript Sequence Number=SeqID_57875
  Gene Ontology: Mol. function=oligopeptide transporter activity; Cellular component=integral to membrane; Biological process =oligopeptide transport
  Homolog annotation: Hit_ID=B6SVF4; Match level="QueryCoverage=70%, HitCoverage=5%, E-value=1e-16, Identity=90%"; Hit description =Oligopeptide transporter 9
MLFLNTHFLQCICNPFTRALHEKEQRVKGGLTRNQFFLVAFICSFAYYIFPGYLFQMLTL

SEQ ID NO: 123850 - protein, 57 aa, Setaria italica
  Transcript Sequence Number=SeqID_57876
  Gene Ontology: Mol. function=oligopeptide transporter activity; Cellular component=integral to membrane; Biological process =oligopeptide transport
  Homolog annotation: Hit_ID=B6SVF4; Match level="QueryCoverage=100%, HitCoverage=7%, E-value=2e-22, Identity=87%"; Hit description =Oligopeptide transporter 9
VVGTLIAAFVYIGTAWWLMETVPNICNTELLPRDSPWTCPGDHVFYDASVIWGLISP

SEQ ID NO: 123851 - protein, 78 aa, Setaria italica
  Transcript Sequence Number=SeqID_57877
  Gene Ontology: Mol. function=oligopeptide transporter activity; Cellular component=integral to membrane; Biological process =oligopeptide transport
  Homolog annotation: Hit_ID=B6SVF4; Match level="QueryCoverage=61%, HitCoverage=6%, E-value=4e-21, Identity=95%"; Hit description =Oligopeptide transporter 9
LYPGRPVANMCFKVYGYISMSQALTFLQDFKLGHYMKIPPRTMFMAQVSSASHFSTQIHMWLCSVASLSSLFQPPIIV

SEQ ID NO: 123852 - protein, 50 aa, Setaria italica
  Transcript Sequence Number=SeqID_57878
DAAADGADKQQQQQQDTVKKTVQTVEVRSSAGQPDEEGVLKPVRVVHEIP

SEQ ID NO: 123853 - protein, 57 aa, Setaria italica
  Transcript Sequence Number=SeqID_57879
  Gene Ontology: Mol. function=glutathione transferase activity
  Homolog annotation: Hit_ID=Q9FQA2; Match level="QueryCoverage=92%, HitCoverage=19%, E-value=8e-13, Identity=71%"; Hit description =Glutathione S-transferase GST 37
EAFPSRGPHLLPDDPYDRAVARFWASYVDDKIVLGMQLFSTWIPVYNGRTREDRVEA

SEQ ID NO: 123854 - protein, 93 aa, Setaria italica
  misc_feature (41)..(41): Xaa can be any naturally occurring amino acid
  misc_feature (68)..(68): Xaa can be any naturally occurring amino acid
  Transcript Sequence Number=SeqID_57880
RLGTFTPEQKNRGIRIQGLQGYRGYNAIQQNQLAAAMGNGXYAPTTLVPLTYKIPAESIGAPAGEGNXVQDAMQQNGPQSKLLLGGFHFAFSA

SEQ ID NO: 123855 - protein, 63 aa, Setaria italica
  Transcript Sequence Number=SeqID_57881
PILLLAILSRLNLPHHKSLAKKDPSEFRPEEGFSPELFGTQTRRPTANGTGDLHQLRTSYGPS

SEQ ID NO: 123856 - protein, 132 aa, Setaria italica
  misc_feature (98)..(98): Xaa can be any naturally occurring amino acid
  misc_feature (110)..(110): Xaa can be any naturally occurring amino acid
  misc_feature (125)..(125): Xaa can be any naturally occurring amino acid
  Transcript Sequence Number=SeqID_57882
  Gene Ontology: Mol. function=nucleic acid binding; Cellular component= nucleus; Biological process=DNA replication
  Homolog annotation: Hit_ID=B3VTC8; Match level="QueryCoverage=100%, HitCoverage=14%, E-value=6e-57, Identity=78%"; Hit description =Replication protein A1-like protein
TFWGKFCDAEGQQLQLQCDSGLNPVLALKSVRVTEFSGRSVSSISSTQLKINPDFPEAEKLQRWYVTEGKTATCVSLSVASMGKTDVRKTVVQIKDEXLGRSEKPDWITXVKGTVSHLNTDNFCXACTMEVN

SEQ ID NO: 123857 - protein, 78 aa, Setaria italica
  misc_feature (55)..(55): Xaa can be any naturally occurring amino acid
  Transcript Sequence Number=SeqID_57883
SFQPPIPVIWIWKSKCSNKSKVFTWLLLLDRLTTRNILKKKNHKINGNDDNCVIXNTQEETAHHLFFGCQFNSTCWQH

SEQ ID NO: 123858 - protein, 37 aa, Setaria italica
  Transcript Sequence Number=SeqID_57884
YTLLQTCSVHCQFLVQQISCILKPIWIFKITCCRTFF

SEQ ID NO: 123859 - protein, 54 aa, Setaria italica
  Transcript Sequence Number=SeqID_57885
  Gene Ontology: Mol. function=receptor activity; Cellular component =plasma membrane
  Homolog annotation: Hit_ID=Q9XID5; Match level="QueryCoverage=94%, HitCoverage=8%, E-value=3e-12, Identity=64%"; Hit description =F23M19.3
SVHTRAHHGFGWVGEWANAGSDVNCKPTGQMDLTRIETLYHADKDKTEVIIIPL

SEQ ID NO: 123860 - protein, 68 aa, Setaria italica
  Transcript Sequence Number=SeqID_57886
HLYLSWCLQTHHDAGSFQAYTLLQTCSVMPIQFSRFLVSLSNLDFQDHVLQNVFLILALINLDSSLYP

SEQ ID NO: 123861 - protein, 113 aa, Setaria italica
  Transcript Sequence Number=SeqID_57887
  Gene Ontology: Mol. function=receptor activity; Cellular component =plasma membrane
  Homolog annotation: Hit_ID=Q9XID5; Match level="QueryCoverage=82%, HitCoverage=15%, E-value=3e-29, Identity=65%"; Hit description =F23M19.3
  Pfam annotation: Domain name=DUF668; Domain location=37-105; Score =98.5; E_value=2.4e-26; Accession=PF05003.4; Description=Protein of unknown function (DUF668)
RGKYFVDIVHFLHLEIHNAFGRSDNEESQEPTKRRNRLGPAGLALHYANIISQIDTLVSRSSSIPPNTRDALYQSLPPTIKSSLRSKLHSFGVKEEVRCMWDGTRELENESGL

SEQ ID NO: 123862 - protein, 101 aa, Setaria italica
  Transcript Sequence Number=SeqID_57888
  Subcellular localization annotation: CTP_CleavageSite=81; ConfidenceScore=5.74e-01
WRMAAPLLTTTSRRSPPSTWCFASGVASNFTGLIVLLSSMGSQVWLSLQWRLSVSCCVLCPGLLLVQVLCRPVVFVNICCCASNLRLETSRIENKVETLEI

SEQ ID NO: 123863 - protein, 52 aa, Setaria italica
  Transcript Sequence Number=SeqID_57889
SDMDGTRVKDRDAILHWEIYGFVEYIESGHTQEDMILPVPEGDRAVRLGNDA

SEQ ID NO: 123864 - protein, 65 aa, Setaria italica
  Transcript Sequence Number=SeqID_57890
  Gene Ontology: Cellular component=cell wall
  Homolog annotation: Hit_ID=Q43557; Match level="QueryCoverage=100%, HitCoverage=17%, E-value=8e-18, Identity=58%"; Hit description =Unidentified
IHNPGHEDNPACGPLIDFIAIKNLHPPHHTPVNMLRNGDFEEGPYIFPDVPWGVLVPPMSEDLYS

SEQ ID NO: 123865 - protein, 58 aa, Setaria italica
  Transcript Sequence Number=SeqID_57891
YEFVAMGSLSSMLHGNRGSGRSPLSWESRRRIALASARVHRPAEEDVGGPDVAVRHHG

SEQ ID NO: 123866 - protein, 93 aa, Setaria italica
  Transcript Sequence Number=SeqID_57892
  Subcellular localization annotation: CTP_CleavageSite=53; ConfidenceScore=5.58e-01
RASAITKAASDGTRNLSESMDLTENDNSTLSSSVSSPSISPSASVSSVSNAASQTTAKSSERLMDPGLSPRRTTSGGIGTLSKSVDFPWAPGR

SEQ ID NO: 123867 - protein, 90 aa, Setaria italica
  Transcript Sequence Number=SeqID_57893
  Subcellular localization annotation: CTP_CleavageSite=66; ConfidenceScore=5.62e-01
TDEESVLLSVSSPSISPSASVSSVSNAASQTTAKSSERLMDPGLSPRRSTSGGIGTLSKSVDFAVVCDAALDTLDTDALGTYQRAWILLK

SEQ ID NO: 123868 - protein, 86 aa, Setaria italica
  Transcript Sequence Number=SeqID_57894
TSTRFMTAIAALLVSSKVQFGLVYAAVMLETTDSRSRGKNRFFYLGHQGGKASVGFRGRGEREGEEGGDVRTGRGPRGGASGSGRA

SEQ ID NO: 123869 - protein, 87 aa, Setaria italica
  Transcript Sequence Number=SeqID_57895
  Subcellular localization annotation: CTP_CleavageSite=47; ConfidenceScore=5.76e-01
MMCLKASVLVKISNLHPENDNSTLSSSVSSPSISPSASVSSVSNAASQTTAKSSERLMDPGLSPRRTTSGGIGTLSKSVDFPWAPGR

SEQ ID NO: 123870 - protein, 86 aa, Setaria italica
  Transcript Sequence Number=SeqID_57896
FFFLLERTQTSALRLLYEETDCTDYTPCGGNAKTLSNLNTEKRKRTTMSKSMDLTDKLVGLLFHQFHLVGFHLVGFTEENNNVLRC

SEQ ID NO: 123871 - protein, 89 aa, Setaria italica
  Transcript Sequence Number=SeqID_57897
  Gene Ontology: Mol. function=hydrolase activity; Cellular component =intracellular
  Homolog annotation: Hit_ID=Q7F447; Match level="QueryCoverage=84%, HitCoverage=10%, E-value=6e-30, Identity=80%"; Hit description =P0696G06.7 protein
ERQWEVPECINRVRKSIKDVFLKQSLAAYLCGHLHTRFGKNLKRYYHRAVQESSFSEHYYQFNMHQGYAIQSNKENCSEEAAHIEEFWE

SEQ ID NO: 123872 - protein, 61 aa, Setaria italica
  Transcript Sequence Number=SeqID_57898
  Gene Ontology: Cellular component=mitochondrion; Biological process =cellular iron ion homeostasis
  Homolog annotation: Hit_ID=B6TSR5; Match level="QueryCoverage=55%, HitCoverage=16%, E-value=3e-11, Identity=88%"; Hit description =Frataxin
VLKFLWFYFFSYLCCSLGPFLGFVFGYASTDGWIYKRTGANLVQLLEKEIGELCGTPVELS

SEQ ID NO: 123873 - protein, 67 aa, Setaria italica
  Transcript Sequence Number=SeqID_57899
  Homolog annotation: Hit_ID=B6SQP1; Match level="QueryCoverage=70%, HitCoverage=20%, E-value=4e-17, Identity=87%"; Hit description=FAD binding protein
TYLITEYFRRPQIPTESDVMKQILKSNCTHRMKSYLEAGCRLHSQNISNINQCELYGLISERVSYSC

SEQ ID NO: 123874 - protein, 42 aa, Setaria italica
  Transcript Sequence Number=SeqID_57900
YCRIILVRLPILIELLFYYFLLVKALLEELECLVEDVYGITL

SEQ ID NO: 123875 - protein, 130 aa, Setaria italica
  Transcript Sequence Number=SeqID_57901
CDLLCGGCDGSWIAFLPCARSAQLKNRFLPLIDLAQGLGDSLLLRFCRLEIYCAAILNSLNHQPNSRSGCQHEQRPTTARGNASKSAPSIFDPQQRFFMNPLAKLPWIWVRSCSLTLAAGGQLPKGMCRV

SEQ ID NO: 123876 - protein, 131 aa, Setaria italica
  Transcript Sequence Number=SeqID_57902
CDLLCGGCDGSWIAFLPCARSAQLKNRFLPLIDLAQGLGDSLLLRFCRLEIYCAAILNSLNHQPNSRSGCQHEQRPTTARGNASKQRFFMNPLAKLPWIWVRSCSLTLGCWWTASLKVCAVFDNMFFEPIL

SEQ ID NO: 123877 - protein, 60 aa, Setaria italica
  misc_feature (59)..(59): Xaa can be any naturally occurring amino acid
  Transcript Sequence Number=SeqID_57903
NLHSFPQKEKRITYIAHLLCTTEITQPSYTKFVTEPQKQIITLLITSQLLCVCSADGFXG

SEQ ID NO: 123878 - protein, 93 aa, Setaria italica
  misc_feature (5)..(5): Xaa can be any naturally occurring amino acid
  misc_feature (15)..(15): Xaa can be any naturally occurring amino acid
  Transcript Sequence Number=SeqID_57904
  Gene Ontology: Mol. function=sequence-specific DNA binding; Cellular component=nucleus; Biological process=regulation of transcription, DNA-dependent
  Homolog annotation: Hit_ID=B3GAU2; Match level="QueryCoverage=97%, HitCoverage=27%, E-value=6e-40, Identity=87%"; Hit description=WRKY1 transcription factor
  Pfam annotation: Domain name=WRKY; Domain location=16-75; Score =151.8; E_value=2.1e-42; Accession=PF03106.7; Description=WRKY DNA -binding domain
REPRXVVQTTSEVDXLDDGYRWRKYGQKVVKGNPNPRSYYKCTYAGCTVRKHVERASNDLKSVITTYEGKHNHEVPAARNSCGMLGCAGSGLR

SEQ ID NO: 123879 - protein, 48 aa, Setaria italica
  Transcript Sequence Number=SeqID_57905
  Gene Ontology: Cellular component=nucleus; Biological process =ubiquitin-dependent protein catabolic process
  Homolog annotation: Hit_ID=B6T9C7; Match level="QueryCoverage=87%, HitCoverage=8%, E-value=3e-17, Identity=97%"; Hit description=Fizzy -related protein
  Pfam annotation: Domain name=WD40; Domain location=5-43; Score=38.3; E_value=3e-08; Accession=PF00400.24; Description=WD domain, G-beta repeat
MLILGEQVATLTGHTMRVLYLASSPDGQTIVTGAGDETLRFWNIFPSV

SEQ ID NO: 123880 - protein, 72 aa, Setaria italica
  misc_feature (3)..(3): Xaa can be any naturally occurring amino acid
  Transcript Sequence Number=SeqID_57906
FHXFFKSFHNSMSQPTAMKCCLSEASREKASCVNWKYIQRKHHTIGLLIYQDMSSTEIHNTFDIDGYFHTMI

SEQ ID NO: 123881 - protein, 76 aa, Setaria italica
  misc_feature (6)..(6): Xaa can be any naturally occurring amino acid
  Transcript Sequence Number=SeqID_57907
  Gene Ontology: Mol. function=carbohydrate binding; Biological process= carbohydrate metabolic process
  Homolog annotation: Hit_ID=Q7XV01; Match level="QueryCoverage=97%, HitCoverage=17%, E-value=2e-23, Identity=71%"; Hit description =OSJNBa0036B21.18 protein
YELKNXKGDFSIKVTNWGATLMSVIVPDSKGNLADVVLGYDTLAEYVDASSAFGTVVGRVANRIANGSFVLDGKTI

SEQ ID NO: 123882 - protein, 115 aa, Setaria italica
  misc_feature (29)..(29): Xaa can be any naturally occurring amino acid
  misc_feature (101)..(101): Xaa can be any naturally occurring amino acid
  Transcript Sequence Number=SeqID_57908
  Gene Ontology: Mol. function=sucrose transmembrane transporter activity; Cellular component=integral to plasma membrane; Biological process=carbohydrate transport
  Homolog annotation: Hit_ID=Q0ILJ3; Match level="QueryCoverage=97%, HitCoverage=21%, E-value=2e-36, Identity=78%"; Hit description =Sucrose transport protein 2
MLQKNMDYPPSGVPPTGIVIASLVVFTIXLGAPLAITYSIPYAMAASRVENLGLGQGLAMGILNLAIVIPQIIVSLGSGPWDELFGGGNAPAFAVAAGASXFIGGLVAILGLPRA

SEQ ID NO: 123883 - protein, 87 aa, Setaria italica
  Transcript Sequence Number=SeqID_57909
  Gene Ontology: Mol. function=sucrose transmembrane transporter activity; Cellular component=integral to plasma membrane; Biological process=carbohydrate transport
  Homolog annotation: Hit_ID=Q0ILJ3; Match level="QueryCoverage=87%, HitCoverage=15%, E-value=7e-34, Identity=97%"; Hit description =Sucrose transport protein 2
LVVPPTGIVIASLVVFTILGAPLAITYSIPYAMAASRVENLGLGQGLAMGILNLAIVIPQIIVSLGSGPWDELFGGGNALLCVAAGA

SEQ ID NO: 123884 - protein, 58 aa, Setaria italica
  Transcript Sequence Number=SeqID_57910
  Gene Ontology: Mol. function=sucrose transmembrane transporter activity; Cellular component=integral to plasma membrane; Biological process=carbohydrate transport
  Homolog annotation: Hit_ID=Q0ILJ3; Match level="QueryCoverage=65%, HitCoverage=7%, E-value=8e-13, Identity=100%"; Hit description =Sucrose transport protein 2
ITYSIPYAMAASRVENLGLGQGLAMGILNLAIVIPQVITFINVFVGFGSVLCVYGVQC

SEQ ID NO: 123885 - protein, 72 aa, Setaria italica
  Transcript Sequence Number=SeqID_57911
  Gene Ontology: Mol. function=sucrose transmembrane transporter activity; Cellular component=integral to plasma membrane; Biological process=carbohydrate transport
  Homolog annotation: Hit_ID=Q0ILJ3; Match level="QueryCoverage=84%, HitCoverage=12%, E-value=8e-29, Identity=98%"; Hit description =Sucrose transport protein 2
EATSDATLLCDENDPRRTRIANAYFSLFMALGNILGYATGAYSGWYRIFPFTVTPSCSISCANLKSAFLLDI

SEQ ID NO: 123886 - protein, 70 aa, Setaria italica
  Transcript Sequence Number=SeqID_57912
  Gene Ontology: Mol. function=catalytic activity
LIIDGKMQSAEVDEFIYHESLIHPPLLFHPKYYTESSYQLYPFVDQLAAVLFLAHGHTLKFLMHAWRAAR

SEQ ID NO: 123887 - protein, 66 aa, Setaria italica
  Transcript Sequence Number=SeqID_57913
FYFSQFHFTRAKDLPAKTLSGQQLVKFVSSGIEDLEMEQSRICQKEGSVIPDAEILERLQGWTSFC

SEQ ID NO: 123888 - protein, 115 aa, Setaria italica
  misc_feature (70)..(70): Xaa can be any naturally occurring amino acid
  Transcript Sequence Number=SeqID_57914
  Gene Ontology: Mol. function=protein tyrosine kinase activity; Cellular component=integral to membrane; Biological process=protein amino acid phosphorylation
  Homolog annotation: Hit_ID=B6SS74; Match level="QueryCoverage=85%, HitCoverage=18%, E-value=3e-40, Identity=81%"; Hit description=ATP binding protein
LHVREDGHLDWPTRLRVAVGVAYCLEHMHQLSPPEILRTLDTSTICLTDDFAAKISDVFFCDEPREEESXAPSPALADREGVVYSYGMVLLETMAGRFYGRSVGSVLVLVRVLWL

SEQ ID NO: 123889 - protein, 52 aa, Setaria italica
  Transcript Sequence Number=SeqID_57915
YVQMDTNFTEYKLKPKNKIQKKNGVLSTEQLFGGAFEREIVLGTSGIQILAK

SEQ ID NO: 123890 - protein, 58 aa, Setaria italica
  misc_feature (27)..(27): Xaa can be any naturally occurring amino acid
  misc_feature (45)..(45): Xaa can be any naturally occurring amino acid
  misc_feature (48)..(48): Xaa can be any naturally occurring amino acid
  misc_feature (55)..(55): Xaa can be any naturally occurring amino acid
  Transcript Sequence Number=SeqID_57916
  Gene Ontology: Mol. function=protein tyrosine kinase activity; Cellular component=integral to membrane; Biological process=protein amino acid phosphorylation
  Homolog annotation: Hit_ID=B6SS74; Match level="QueryCoverage=100%, HitCoverage=10%, E-value=2e-14, Identity=70%"; Hit description=ATP binding protein
KRSELELACEDFSNVIGSLPDYMVYKXGTLSSGVEIAVVSTTKSXAKXWSKHCEXQFR

SEQ ID NO: 123891 - protein, 65 aa, Setaria italica
  Transcript Sequence Number=SeqID_57917
  Gene Ontology: Mol. function=RNA-directed RNA polymerase activity
  Homolog annotation: Hit_ID=Q5QMN5; Match level="QueryCoverage=100%, HitCoverage=5%, E-value=6e-15, Identity=60%"; Hit description =Probable RNA-dependent RNA polymerase 3
KSLKFLSIAHFESEIWSKFGRKNFQASNRTASDRPKNLDLDPSKTKVYHCNIEIRGDSVFYVLKG

SEQ ID NO: 123892 - protein, 85 aa, Setaria italica
  Transcript Sequence Number=SeqID_57918
  Gene Ontology: Mol. function=nucleic acid binding; Cellular component= intracellular
  Homolog annotation: Hit_ID=B9RAX5; Match level="QueryCoverage=100%, HitCoverage=19%, E-value=1e-10, Identity=43%"; Hit description =Nucleic acid binding protein, putative
  Pfam annotation: Domain name=G-patch; Domain location=38-82; Score =49.5; E_value=1.3e-11; Accession=PF01585.15; Description=G-patch domain
GPGQKQCNIISFDEYEESIDDINSMGTASVDMNFRSSGLQSAKRIMENMGWKEGEALGKSRKGIVEPIQPIINKHGAGLGWNQTR

SEQ ID NO: 123893 - protein, 99 aa, Setaria italica
  Transcript Sequence Number=SeqID_57919
  Homolog annotation: Hit_ID=B9R923; Match level="QueryCoverage=77%, HitCoverage=13%, E-value=2e-30, Identity=80%"; Hit description =Epstein-Barr nuclear antigen, putative
NCSFSFIGAEADGALDKARKHKKRQLEDTYNLIVKKRKEYEQKMKEKGEQPVMFGHLGPPKRRPAAEEEDRANPKPEDSVYYHPTLNPSGAPPPGKPPM

SEQ ID NO: 123894 - protein, 111 aa, Setaria italica
  misc_feature (94)..(94): Xaa can be any naturally occurring amino acid
  Transcript Sequence Number=SeqID_57920
KLTDQYLGTNQKKNGPRQDKKEEDRANPKPEDSVYYHPTLNPSGAPPPGKPPMYKSSIGPRIPLPSSSNAGASSSMSESEAGPSTLPPPPPPPXHCPATSESIDPSAPPFP

SEQ ID NO: 123895 - protein, 39 aa, Setaria italica
  Transcript Sequence Number=SeqID_57921
IFEYILTTFVLQDSVYYHPTLNPSGAPPPGKPPMYKIQY

SEQ ID NO: 123896 - protein, 94 aa, Setaria italica
  misc_feature (82)..(82): Xaa can be any naturally occurring amino acid
  misc_feature (85)..(85): Xaa can be any naturally occurring amino acid
  misc_feature (91)..(91): Xaa can be any naturally occurring amino acid
  Transcript Sequence Number=SeqID_57922
  Subcellular localization annotation: CTP_CleavageSite=74; ConfidenceScore=5.63e-01
LGQKNACVAVPGSGWLPPNSWRLYVVCTSVYFPRSVTNRFRTNNTANRRCSLGCYPSGFKNSFAVLTAMVYICVCLIKQKKXKKXKKKKKXKKK

SEQ ID NO: 123897 - protein, 90 aa, Setaria italica
  Transcript Sequence Number=SeqID_57923
  Gene Ontology: Mol. function=nucleic acid binding
  Homolog annotation: Hit_ID=B6U752; Match level="QueryCoverage=90%, HitCoverage=17%, E-value=3e-23, Identity=65%"; Hit description =Heterogeneous nuclear ribonucleoprotein R
  Pfam annotation: Domain name=RRM_1; Domain location=42-90; Score =10.7; E_value=0.02; Accession=PF00076.14; Description=RNA recognition motif. (a.k.a. RRM, RBD, o
  Subcellular localization annotation: CTP_CleavageSite=24; ConfidenceScore=5.20e-01
GLNSSLCQKPSFAVEADSPLFLVSAQLTVGAFVSTAKQVKSLYVKNLPKTVTEEQLRTLFEHLGEITKVVLPPAKAGHENRYGFVHFKER

SEQ ID NO: 123898 - protein, 69 aa, Setaria italica
  Transcript Sequence Number=SeqID_57924
  Gene Ontology: Mol. function=nucleic acid binding
  Homolog annotation: Hit_ID=B6U752; Match level="QueryCoverage=94%, HitCoverage=13%, E-value=6e-28, Identity=86%"; Hit description =Heterogeneous nuclear ribonucleoprotein R
  Pfam annotation: Domain name=RRM_1; Domain location=1-56; Score=9.5; E_value=0.026; Accession=PF00076.14; Description=RNA recognition motif. (a.k.a. RRM, RBD, o
LRTLFEHLGEITKVVLPPAKAGHENRYGFVHFKERYMAIKALKNTERYELDGQLLDCSLAKAAMDLLLQ

SEQ ID NO: 123899 - protein, 78 aa, Setaria italica
  Transcript Sequence Number=SeqID_57925
  Subcellular localization annotation: CTP_CleavageSite=64; ConfidenceScore=5.44e-01
PVPPRQQERRPLAPARWRAPRARVHGTGSPFSTLRFLPVCARVCGVVVASSSKLLPCGLAVVCCCGAARSGVEWSDVG

SEQ ID NO: 123900 - protein, 76 aa, Setaria italica
  misc_feature (74)..(74): Xaa can be any naturally occurring amino acid
  Transcript Sequence Number=SeqID_57926
SLPLQLVSLCAVGSYYLSCMGCRVKLIINQQHTKTQAAAAGHGGRRAADTGPHTRDTLYLAHVTPLHSTPRSPXAA

SEQ ID NO: 123901 - protein, 69 aa, Setaria italica
  Transcript Sequence Number=SeqID_57927
  Subcellular localization annotation: CTP_CleavageSite=58; ConfidenceScore=5.41e-01
YPLCALPFPCCVSQRDPPWAPSRTASSLTVGGLRVLLGGRLGRRGLRLSGCRLSGRCLLGSRSGGLWLR

SEQ ID NO: 123902 - protein, 47 aa, Setaria italica
  Transcript Sequence Number=SeqID_57928
  Gene Ontology: Mol. function=DNA binding; Cellular component=nucleus
  Homolog annotation: Hit_ID=Q5I204; Match level="QueryCoverage=87%, HitCoverage=11%, E-value=4e-16, Identity=92%"; Hit description=Brain acid soluble protein 1
TGEEIKSKRQLTQYLKAHPGGPASSEFDWGTSDTPRRSSHLLGSLLP

SEQ ID NO: 123903 - protein, 53 aa, Setaria italica
  Transcript Sequence Number=SeqID_57929
  Gene Ontology: Mol. function=DNA binding; Cellular component=nucleus
  Homolog annotation: Hit_ID=Q8LK06; Match level="QueryCoverage=83%, HitCoverage=11%, E-value=1e-17, Identity=97%"; Hit description =Methyl binding domain protein MBD109
  Pfam annotation: Domain name=MBD; Domain location=1-50; Score=0.1; E _value=0.042; Accession=PF01429.11; Description=Methyl-CpG binding domain
IRGGKFEVIFVSPTGEEIKSKRQLTQYLKAHPGGPASSEFDWGTSRHLDLIIC

SEQ ID NO: 123904 - protein, 73 aa, Setaria italica
  Transcript Sequence Number=SeqID_57930
GPFGLLCNICTGSITGVEMKDAEEEKKEDAPSADVAEKTEGGEEKKDEAPGADAAEKTEQGAEGQEQTNNVAA

SEQ ID NO: 123905 - protein, 140 aa, Setaria italica
  misc_feature (47)..(47): Xaa can be any naturally occurring amino acid
  Transcript Sequence Number=SeqID_57931
  Gene Ontology: Mol. function=zinc ion binding
  Homolog annotation: Hit_ID=B9SWC9; Match level="QueryCoverage=97%, HitCoverage=13%, E-value=2e-28, Identity=50%"; Hit description =Transcription factor, putative
KQGEADFDAEMDSVCNALQAVNLQTATDRSSQKVPLFTSNMLHCLLXENQKSAFIEILDVLRAICHAHMLPLALTWVPTSNGIDNGYCVRNNIGVDSQSGKTVLRIHESACYINDAKMQGFLHACAERHLEKGQGIAGRA

SEQ ID NO: 123906 - protein, 68 aa, Setaria italica
  Transcript Sequence Number=SeqID_57932
RAKLKSITEENTHEYANRYVHSQICTYIIIIYYQCQAMNIGGKLLLSGGKQLLGTRDHGKSHNARHSK

SEQ ID NO: 123907 - protein, 82 aa, Setaria italica
  misc_feature (45)..(45): Xaa can be any naturally occurring amino acid
  Transcript Sequence Number=SeqID_57933
  Gene Ontology: Mol. function=transferase activity, transferring groups other than amino-acyl groups
  Homolog annotation: Hit_ID=B4G1P9; Match level="QueryCoverage=74%, HitCoverage=14%, E-value=3e-25, Identity=96%"; Hit description=3-N -debenzoyl-2-deoxytaxol N-benzoyltransferase
RGARPGEPEIECTGEGVWFVEAEASCSLEEARNLERPLCIPKEEXLLPRPPAGVRVEDTVLLAQVRPIPPLPVARVPSGHFG

SEQ ID NO: 123908 - protein, 56 aa, Setaria italica
  Transcript Sequence Number=SeqID_57934
  Gene Ontology: Mol. function=transferase activity, transferring groups other than amino-acyl groups
  Homolog annotation: Hit_ID=B4G1P9; Match level="QueryCoverage=100%, HitCoverage=13%, E-value=1e-23, Identity=96%"; Hit description=3-N -debenzoyl-2-deoxytaxol N-benzoyltransferase
AEVRLGFAASTRHLLSNVLPSVEGYYGNCVYPGGLTKTSQEVKEASLVEIVTAIRD

SEQ ID NO: 123909 - protein, 92 aa, Setaria italica
  Transcript Sequence Number=SeqID_57935
  Gene Ontology: Mol. function=catalytic activity; Biological process =metabolic process
  Homolog annotation: Hit_ID=B9RMA4; Match level="QueryCoverage=84%, HitCoverage=22%, E-value=9e-31, Identity=75%"; Hit description =Aminocarboxymuconate-semialdehyde decarboxylase, putative
CMDEAGVDGALIVQPVNHMFDHSLVTSVLKKYPSKFIGCCLANPADDGSGIKQLEHLIVQEKYRAVRFNPNLWPSGQKVCKWETEHHFPSTS

SEQ ID NO: 123910 - protein, 80 aa, Setaria italica
  Transcript Sequence Number=SeqID_57936
  Subcellular localization annotation: CTP_CleavageSite=49; ConfidenceScore=5.35e-01
PRPSVGSGPVTAIAAVLPCPPPRSTPSGLPPFSYCLINRLRIISSCLLVAAAATEILLVHILWITRFGLLALVLALLLGF

SEQ ID NO: 123911 - protein, 36 aa, Setaria italica
  misc_feature (16)..(16): Xaa can be any naturally occurring amino acid
  Transcript Sequence Number=SeqID_57937
  Gene Ontology: Mol. function=metal ion binding
MICCCLPCIISVMGFXREDTNNTRGATSESINALPT

SEQ ID NO: 123912 - protein, 70 aa, Setaria italica
  Transcript Sequence Number=SeqID_57938
  Gene Ontology: Mol. function=hydrolase activity; Biological process =lipid catabolic process
  Homolog annotation: Hit_ID=Q69VY8; Match level="QueryCoverage=100%, HitCoverage=4%, E-value=8e-35, Identity=97%"; Hit description =Putative calcium-independent phospholipase A2
SRRGGWRYLDTGQVLIESACSVERVEETLDTLIPMLPEMQYFRFNPVDERCGMELDETDPAIWLKLEAAT

SEQ ID NO: 123913 - protein, 79 aa, Setaria italica
  Transcript Sequence Number=SeqID_57939
  Gene Ontology: Mol. function=hydrolase activity; Biological process =lipid catabolic process
  Homolog annotation: Hit_ID=Q69VY8; Match level="QueryCoverage=93%, HitCoverage=5%, E-value=7e-24, Identity=71%"; Hit description =Putative calcium-independent phospholipase A2
LYSPEGTQRIGRIDLVPPLSLDGHPTSKSSPPTSPLKSRQPSAHVRSLYDKLQNMPQVGVIHLALQNDSTGSVIEVGKK

SEQ ID NO: 123914 - protein, 135 aa, Setaria italica
  Transcript Sequence Number=SeqID_57940
  Gene Ontology: Mol. function=hydrolase activity; Biological process =lipid catabolic process
  Homolog annotation: Hit_ID=Q69VY8; Match level="QueryCoverage=86%, HitCoverage=8%, E-value=2e-50, Identity=78%"; Hit description =Putative calcium-independent phospholipase A2
HIWMSQVGAWRERIIVCSGKYGLTHGLVKAFMDSGAKAVISSSIEPPDSQTIAYYGMDVNGSLENGKFVIGDEEADESEPEPVSPISDWEDSDAEKSGNHDMDDEEYLAQFMCLLYFNLGCVPVVVLVLSSSRLF

SEQ ID NO: 123915 - protein, 30 aa, Setaria italica
  Transcript Sequence Number=SeqID_57941
QEIGAYMFRRTVPAVHMAPEDVRWMVSQYV

SEQ ID NO: 123916 - protein, 71 aa, Setaria italica
  misc_feature (41)..(41): Xaa can be any naturally occurring amino acid
  Transcript Sequence Number=SeqID_57942
  Gene Ontology: Mol. function=hydrolase activity, acting on acid anhydrides, catalyzing transmembrane movement of substances; Cellular component=integral to membrane; Biological process=calcium ion transport
  Homolog annotation: Hit_ID=O04938; Match level="QueryCoverage=81%, HitCoverage=5%, E-value=3e-25, Identity=96%"; Hit description=Ca2+ -ATPase
QESNAEKALEALKEIQSEHATVKRDGRWSHGLPARDLVPGXTIVELRVGDKVPADMRVDYQELNNKELTKP

SEQ ID NO: 123917 - protein, 125 aa, Setaria italica
  misc_feature (92)..(92): Xaa can be any naturally occurring amino acid
  Transcript Sequence Number=SeqID_57943
  Gene Ontology: Mol. function=serine-type peptidase activity; Cellular component=membrane; Biological process=proteolysis
  Homolog annotation: Hit_ID=B9RSG5; Match level="QueryCoverage=80%, HitCoverage=13%, E-value=9e-39, Identity=72%"; Hit description =Dipeptidyl peptidase IV, putative
  Pfam annotation: Domain name=Peptidase_S9; Domain location=4-125; Score=-39.7; E_value=0.00023; Accession=PF00326.13; Description =Prolyl oligopeptidase family
LVIYGFGYLFLCFLVLIVVLCLRFPCTIISCCAVAGAPVTAWDGYDTFYTEKYMGLPSENKDVYEFASIMHHVNNLKGKLLLVHGMVDENVXFRHTARLINSLIAARKPYDILIFPDARHLLRGK

SEQ ID NO: 123918 - protein, 86 aa, Setaria italica
  Transcript Sequence Number=SeqID_57944
  Gene Ontology: Mol. function=amino acid binding; Biological process =metabolic process
  Homolog annotation: Hit_ID=B6U9J2; Match level="QueryCoverage=54%, HitCoverage=10%, E-value=3e-17, Identity=95%"; Hit description=ACR4
KQRSLDLGPPFLSSSFTFVLFCLGFSVLRSITYICRANYRVVIDNDASDDATVIRVDSVNSHGTLLAVVQVIADLNLVIRKAYFSS

SEQ ID NO: 123919 - protein, 71 aa, Setaria italica
  misc_feature (67)..(67): Xaa can be any naturally occurring amino acid
  Transcript Sequence Number=SeqID_57945
NRASLAEDLRSIEKQRKPPRGIQQLSGGRRRQQEQSTGGSRAEAGRAPEVDPRTHRLKKPAPPVPPXAPPV

SEQ ID NO: 123920 - protein, 127 aa, Setaria italica
  Transcript Sequence Number=SeqID_57946
VLRQLPPSRMRFRKLYEIGGNAKTTFEKRMGNIDDAVPFFGRGFNRIYPLIMVVYTLLVASNFFGRVIDFFGSWKRFKFQREEENIDGLDPSGMIILQKERSWIEQGCKVGDQVIPLARDFNGVSTD

SEQ ID NO: 123921 - protein, 56 aa, Setaria italica
  Transcript Sequence Number=SeqID_57947
QHTICNWMLHTTHYAVAYKAKQNEAYRCRTLPRIRTDLLLPAYQPWRRRRSRLVRT

SEQ ID NO: 123922 - protein, 76 aa, Setaria italica
  Transcript Sequence Number=SeqID_57948
  Gene Ontology: Mol. function=receptor activity; Cellular component =integral to membrane
  Homolog annotation: Hit_ID=B9T3A9; Match level="QueryCoverage=98%, HitCoverage=15%, E-value=2e-22, Identity=65%"; Hit description=Ptm1, putative
YRKFAIALIVSVLVSVGWIGYEIYFKSTDVFNERWQYAWIIPAFWHVLSFSLLCVICYLWAPSLRHATGDRQGTRG

SEQ ID NO: 123923 - protein, 101 aa, Setaria italica
  misc_feature (44)..(44): Xaa can be any naturally occurring amino acid
  Transcript Sequence Number=SeqID_57949
  Gene Ontology: Mol. function=protein transporter activity; Cellular component=integral to membrane; Biological process=protein transport
  Homolog annotation: Hit_ID=B4FPJ1; Match level="QueryCoverage=100%, HitCoverage=27%, E-value=5e-45, Identity=87%"; Hit description =Protein transporter
VRAAIFGILWVLLGKRVWFFPNINAEETTFRELVRFWPEKDEGXRPKWTSRLFYALVAVLVILLLRHHAPDEAARARYQKKVSNIIDDVLEWSPKLAISGM

SEQ ID NO: 123924 - protein, 51 aa, Setaria italica
  misc_feature (14)..(14): Xaa can be any naturally occurring amino acid
  Transcript Sequence Number=SeqID_57950
  Gene Ontology: Mol. function=protein transporter activity; Cellular component=integral to membrane; Biological process=protein transport
  Homolog annotation: Hit_ID=B4FPJ1; Match level="QueryCoverage=100%, HitCoverage=13%, E-value=3e-14, Identity=76%"; Hit description =Protein transporter
ETTFRELVRFWPEXDEGERPKWTSRLFYALVAVLVILLLRHHAPDEAARAR

SEQ ID NO: 123925 - protein, 106 aa, Setaria italica
  misc_feature (26)..(26): Xaa can be any naturally occurring amino acid
  Transcript Sequence Number=SeqID_57951
  Gene Ontology: Mol. function=protein transporter activity; Cellular component=integral to membrane; Biological process=protein transport
  Homolog annotation: Hit_ID=B4FPJ1; Match level="QueryCoverage=71%, HitCoverage=20%, E-value=1e-24, Identity=76%"; Hit description =Protein transporter
PFFCLRAAIFGILWVLLGKRVWFFPXNINAEETTFRELVRFWPEKDEGERPKWTSRLFYALVAVLVILLLRHHDYQEIRKEQRTKEKKPKGKTKKRKRFKLKTNKI

SEQ ID NO: 123926 - protein, 105 aa, Setaria italica
  misc_feature (37)..(37): Xaa can be any naturally occurring amino acid
  Transcript Sequence Number=SeqID_57952
  Gene Ontology: Cellular component=anchored to membrane
  Homolog annotation: Hit_ID=Q6Z4G8; Match level="QueryCoverage=82%, HitCoverage=19%, E-value=2e-41, Identity=89%"; Hit description=COBRA- like protein 1
  Pfam annotation: Domain name=COBRA; Domain location=51-105; Score= -62.6; E_value=0.049; Accession=PF04833.7; Description=COBRA-like protein
MWYRNYLQFGGSSNKFHETSLWSSADAYDPLDPNGNXTIKWDVMQWTPDGYVAVVSLYNYQQYRHIQAPGWKLGWVWAKKEIIWAMTGGQATEQGDCSKFKSNIP

SEQ ID NO: 123927 - protein, 63 aa, Setaria italica
  Transcript Sequence Number=SeqID_57953
RHRDCRIKIFPEKVPAYTTTIDMYHQAEKVCTTNTQVSKFCHFTCSLHGLNHIFNKLLENQRI

SEQ ID NO: 123928 - protein, 72 aa, Setaria italica
  Transcript Sequence Number=SeqID_57954
LSPVCLAYPLLRVSAVAADLGALPREEPVEFPVFPTNVLFWGTHDDVTNAGLAAPPPPTLPPPSPVYLPSLR

SEQ ID NO: 123929 - protein, 48 aa, Setaria italica
  Transcript Sequence Number=SeqID_57955
LPPHKRRCLHFRKLCLLNLLIMCSGAARGLINHILYESEKITGRKFSG

SEQ ID NO: 123930 - protein, 90 aa, Setaria italica
  misc_feature (31)..(31): Xaa can be any naturally occurring amino acid
  misc_feature (43)..(43): Xaa can be any naturally occurring amino acid
  Transcript Sequence Number=SeqID_57956
  Gene Ontology: Cellular component=small-subunit processome
  Homolog annotation: Hit_ID=B6TNQ8; Match level="QueryCoverage=96%, HitCoverage=40%, E-value=2e-32, Identity=80%"; Hit description=U3 small nucleolar RNA-associated protein 11
KRPNKHVYFAEDREEAKEIRSRIGESSNMPXFDNIPSRIKRKXASSYRELDERKQRLQKLEKLYGDMTLQKELKKPGHKRKLREDETVNS

SEQ ID NO: 123931 - protein, 77 aa, Setaria italica
  Transcript Sequence Number=SeqID_57957
HTLAFFLQSSPILEKLTLRHCQFPKCPNKKERNTHTLTRFHLLGSMAWICCVRTSRLKSYIDMAMAPTSYSFCCVFQ

SEQ ID NO: 123932 - protein, 145 aa, Setaria italica
  Transcript Sequence Number=SeqID_57958
  Gene Ontology: Mol. function=symporter activity; Cellular component =integral to membrane; Biological process=auxin mediated signaling pathway
  Homolog annotation: Hit_ID=Q9FEL6; Match level="QueryCoverage=84%, HitCoverage=26%, E-value=2e-61, Identity=91%"; Hit description=Auxin transporter-like protein 3
RRRRRRRREAASAATSRRGGNKALSSLFWHGGSVYDAWFSCASNQVAQVLLTLPYSFSQLGMASGIVFQLFYGLMGSWTAYLISVLYVEYRTRKEREKVDFRNHVIQWFEVLDGLLGKHWRNMGLFFNCTFLLLGSVIQLIALLS

SEQ ID NO: 123933 - protein, 61 aa, Setaria italica
  Transcript Sequence Number=SeqID_57959
  Subcellular localization annotation: CTP_CleavageSite=52; ConfidenceScore=5.71e-01
MPMTPTSSSLPLPSATMDSSSCSRAILKRPAFPSPAAVCYRRGGSVRLQGGRASVVAAPRG

SEQ ID NO: 123934 - protein, 48 aa, Setaria italica
  misc_feature (38)..(38): Xaa can be any naturally occurring amino acid
  Transcript Sequence Number=SeqID_57960
  Gene Ontology: Mol. function=symporter activity; Cellular component =integral to membrane; Biological process=auxin mediated signaling pathway
  Homolog annotation: Hit_ID=Q9CA25; Match level="QueryCoverage=100%, HitCoverage=10%, E-value=1e-16, Identity=83%"; Hit description=Auxin transporter-like protein 3
MMHIWACSNIYYINDKYDKRTWTYIFGACCATTVFIPXFHNYRIWSFL

SEQ ID NO: 123935 - protein, 53 aa, Setaria italica
  Transcript Sequence Number=SeqID_57961
  Gene Ontology: Mol. function=symporter activity; Cellular component =integral to membrane; Biological process=auxin mediated signaling pathway
  Homolog annotation: Hit_ID=Q8L883; Match level="QueryCoverage=66%, HitCoverage=7%, E-value=2e-12, Identity=97%"; Hit description=Auxin transporter-like protein 5
EEEHGGSGESSVKSKLSGFLWHGGSAYDAWFSCASNQVAQVLLTLPYSFAQLG

SEQ ID NO: 123936 - protein, 72 aa, Setaria italica
  Transcript Sequence Number=SeqID_57962
  Gene Ontology: Mol. function=symporter activity; Cellular component =integral to membrane; Biological process=auxin mediated signaling pathway
  Homolog annotation: Hit_ID=Q688J2; Match level="QueryCoverage=77%, HitCoverage=11%, E-value=2e-21, Identity=85%"; Hit description=Auxin transporter-like protein 2
GRVRAMGIGDDAEQQQQRDGGFGLKSLLWHGGSVWDAWFSCASNQVAQVLLTLPYSFSQLGMVSGVLLQVFY

SEQ ID NO: 123937 - protein, 83 aa, Setaria italica
  misc_feature (62)..(62): Xaa can be any naturally occurring amino acid
  Transcript Sequence Number=SeqID_57963
  Gene Ontology: Mol. function=CDP-diacylglycerol-serine O -phosphatidyltransferase activity; Cellular component=integral to membrane; Biological process=phosphatidylserine biosynthetic process
  Homolog annotation: Hit_ID=A9XU49; Match level="QueryCoverage=100%, HitCoverage=35%, E-value=6e-37, Identity=84%"; Hit description =Phosphatidyl serine synthase (Fragment)
  Pfam annotation: Domain name=PSS; Domain location=1-83; Score=-126.4; E_value=1.7e-07; Accession=PF03034.7; Description=Phosphatidyl serine synthase
PAVWRLVHGLAIVYLVALTFLLFQNRDDARQFMKQLHPDLGVELPERSYGADCRLYVPENPXNKFINIYETLFDEFVVAHILG

SEQ ID NO: 123938 - protein, 70 aa, Setaria italica
  misc_feature (19)..(19): Xaa can be any naturally occurring amino acid
  Transcript Sequence Number=SeqID_57964
PLFSPCLTLERGRTVPNWXRPRRLGGGLGSSRMGGAETDKKDSAREQQQGGRPRSEEPRRDDRRADRDRE

SEQ ID NO: 123939 - protein, 63 aa, Setaria italica
  Transcript Sequence Number=SeqID_57965
RVGVPDQKSLGESFLSVSGTTHPNWRPRRLGGGLGSSRMGGAETDKKDSAREQQQGGRPRSEE

SEQ ID NO: 123940 - protein, 95 aa, Setaria italica
  misc_feature (51)..(51): Xaa can be any naturally occurring amino acid
  Transcript Sequence Number=SeqID_57966
  Gene Ontology: Mol. function=nucleic acid binding; Cellular component= ribonucleoprotein complex; Biological process=nuclear mRNA splicing, via spliceosome
  Homolog annotation: Hit_ID=Q6E0J0; Match level="QueryCoverage=85%, HitCoverage=16%, E-value=2e-26, Identity=72%"; Hit description=U1 snRNP
RICLYPSQLQAEPAKDTSKPRGYAFIEYMHTRDMKNAYKQADGRKVDNKRXLVDVERGRTVPNWRPRRLGGGLGSSRMGGAETDKKDSAREQQQG

SEQ ID NO: 123941 - protein, 40 aa, Setaria italica
  Transcript Sequence Number=SeqID_57967
AVLGRTYINFQNCEFRPQTSASQGQRSEMMISTGRAGSVD

SEQ ID NO: 123942 - protein, 80 aa, Setaria italica
  Transcript Sequence Number=SeqID_57968
  Subcellular localization annotation: CTP_CleavageSite=35; ConfidenceScore=5.13e-01
QSLCAMVLRLASVLLPFFFCSGSGLGNDGGGRRAVCMRTSPTLLQDFDEIGISVRRRVFCLEPLHLYDDFSIQFLVLYNS

SEQ ID NO: 123943 - protein, 53 aa, Setaria italica
  Transcript Sequence Number=SeqID_57969
  Subcellular localization annotation: CTP_CleavageSite=26; ConfidenceScore=5.04e-01
QQAVEQVKLALIKLIASRRFPQLRSCAMAPRAPLFFSPSPRRPRRRREEERAL

SEQ ID NO: 123944 - protein, 66 aa, Setaria italica
  Transcript Sequence Number=SeqID_57970
  Gene Ontology: Mol. function=DNA binding; Cellular component=nucleus; Biological process=regulation of transcription
  Homolog annotation: Hit_ID=Q9M2Y9; Match level="QueryCoverage=69%, HitCoverage=14%, E-value=2e-19, Identity=89%"; Hit description =Transcription factor RAX3
GLSCPPPPRILRACVPGPCAGLKRCGKSCRLRWLNYLRPNIKHGGFSEEEDKIILSLYISIGSRWS

SEQ ID NO: 123945 - protein, 51 aa, Setaria italica
  Transcript Sequence Number=SeqID_57971
DRTTRGIYDLCEFTKKLEQSPKADTRQVTSSTPRPAIESSERAARAASLPP

SEQ ID NO: 123946 - protein, 56 aa, Setaria italica
  Transcript Sequence Number=SeqID_57972
  Subcellular localization annotation: CTP_CleavageSite=28; ConfidenceScore=5.22e-01
MSASGLSMLVGTTMPPKRDHQGAFSRASSMKEGSSELPSGAPSSSKKPKTPRKNTN

SEQ ID NO: 123947 - protein, 36 aa, Setaria italica
  Transcript Sequence Number=SeqID_57973
RSLRSYFGEIVAMQGIAQSLPPACTARLDATSVCCC

SEQ ID NO: 123948 - protein, 63 aa, Setaria italica
  Transcript Sequence Number=SeqID_57974
  Gene Ontology: Mol. function=nucleic acid binding
  Homolog annotation: Hit_ID=B9S7K8; Match level="QueryCoverage=100%, HitCoverage=26%, E-value=2e-28, Identity=87%"; Hit description=Rrm -containing protein, putative
KAAGQSWEDPTLADWPENDFRLFCGDLGNEVNDDILTKAFSKYPSFNMARVIRDKWTGKTKGY

SEQ ID NO: 123949 - protein, 66 aa, Setaria italica
  Transcript Sequence Number=SeqID_57975
  Gene Ontology: Mol. function=hydrolase activity, acting on ester bonds
  Homolog annotation: Hit_ID=Q39635; Match level="QueryCoverage=84%, HitCoverage=16%, E-value=3e-11, Identity=50%"; Hit description =Uncharacterized 38.1 kDa protein
MHIWSLQEQMLKSGHVWHFKIYDKRPEFAQWEREARAARRGLWASENPEKPWDWRREQRSANVQVY

SEQ ID NO: 123950 - protein, 54 aa, Setaria italica
  Transcript Sequence Number=SeqID_57976
LAFPICDYVLIVKHLFYSAFIICEVKRIERELQDRSWDDQQFFIGKMSTAWLRC

SEQ ID NO: 123951 - protein, 75 aa, Setaria italica
  Transcript Sequence Number=SeqID_57977
  Homolog annotation: Hit_ID=Q9SYL4; Match level="QueryCoverage=88%, HitCoverage=40%, E-value=2e-17, Identity=65%"; Hit description =F3F20.18 protein
  Pfam annotation: Domain name=DUF842; Domain location=8-75; Score =25.0; E_value=6.5e-07; Accession=PF05811.5; Description=Eukaryotic protein of unknown function (DUF842)
FPSWFLCRSKHSYAHLKYACFDRQRNQEGINNCVENCSVPVLTANNLVENEMARFQERLNRSLMVCQDKFEAAKL

SEQ ID NO: 123952 - protein, 100 aa, Setaria italica
  misc_feature (14)..(14): Xaa can be any naturally occurring amino acid
  Transcript Sequence Number=SeqID_57978
  Gene Ontology: Cellular component=integral to membrane; Biological process=phagocytosis, engulfment
  Homolog annotation: Hit_ID=B6U4M6; Match level="QueryCoverage=84%, HitCoverage=14%, E-value=3e-32, Identity=82%"; Hit description =Transmembrane 9 superfamily protein member 4
  Subcellular localization annotation: CTP_CleavageSite=59; ConfidenceScore=5.15e-01
LMTAMLLLWVFMGXLAGYSSSRLYKLFKGSEWKNIALRTAFTFPGSVFAIFFFLNALIWGQKSSGAVPFTTMFALVLLWFEISAHVTIRIRKTRKRNPKM

SEQ ID NO: 123953 - protein, 91 aa, Setaria italica
  misc_feature (68)..(68): Xaa can be any naturally occurring amino acid
  misc_feature (75)..(75): Xaa can be any naturally occurring amino acid
  Transcript Sequence Number=SeqID_57979
  Gene Ontology: Cellular component=integral to membrane
  Homolog annotation: Hit_ID=Q5Z5T2; Match level="QueryCoverage=92%, HitCoverage=13%, E-value=1e-32, Identity=84%"; Hit description =Putative PHG1A protein
  Subcellular localization annotation: CTP_CleavageSite=30; ConfidenceScore=5.35e-01
MFFHSEPLRTAFTFPGSVFAIFFFLNALIWGQKSSGAVPFTTMFALVLLWFGISVPLVFVGSFLGFKXSIEDPVXKTNKIPRQIPEQAWYM

SEQ ID NO: 123954 - protein, 49 aa, Setaria italica
  Transcript Sequence Number=SeqID_57980
  Gene Ontology: Cellular component=integral to membrane; Biological process=transport
  Homolog annotation: Hit_ID=B9STR3; Match level="QueryCoverage=83%, HitCoverage=6%, E-value=9e-16, Identity=100%"; Hit description =Endosomal P24A protein, putative
PDDQIHWFSIVNSLMIVLFLSGMVAMIMLRTLYRDISKYNQLGPLPESQ

SEQ ID NO: 123955 - protein, 124 aa, Setaria italica
  Transcript Sequence Number=SeqID_57981
  Gene Ontology: Cellular component=integral to membrane
  Homolog annotation: Hit_ID=B9STR3; Match level="QueryCoverage=99%, HitCoverage=19%, E-value=2e-53, Identity=78%"; Hit description =Endosomal P24A protein, putative
FTKELVGPLEVKPYSVKHEYEGQWNDKKTRLTTCDPHAQRVITSSDSPQEVEVGKEIIFTYDVDFKESDIKWASRWDSYLLMTDDQIHWFSIVNSLMIVLFLSGMVAMIMLRTLYRDISKYNQL

SEQ ID NO: 123956 - protein, 95 aa, Setaria italica
  Transcript Sequence Number=SeqID_57982
  Gene Ontology: Cellular component=integral to membrane
  Homolog annotation: Hit_ID=B9RNV4; Match level="QueryCoverage=96%, HitCoverage=14%, E-value=8e-32, Identity=76%"; Hit description =Endosomal P24A protein, putative
ERILRIVLCYFQLCSEDYLWWWRSYLTSGSSALYLFLYATFYFFTKLEITKFVSAVLYFGYMLIASYAFFALTGTIGFYACFLFTRLIYSSVKIE

SEQ ID NO: 123957 - protein, 95 aa, Setaria italica
  Transcript Sequence Number=SeqID_57983
DNAVRNRNGSCEPKFLLQRTWRAKIWDQTLWVPFFIDVPRTFTNLPKGYARGERRRSRGHKWRCRASIPPTKNPKRTGERILNKARFCCLFPPLF

SEQ ID NO: 123958 - protein, 85 aa, Setaria italica
  Transcript Sequence Number=SeqID_57984
FASSSLHRKKRSSSRVGRIGIEGDNAVRNRNGSCEPKFLLPKGYARGERRRSRGHKWRCRASIPPTKNPKRTGERILNKARFAAS

SEQ ID NO: 123959 - protein, 86 aa, Setaria italica
  Transcript Sequence Number=SeqID_57985
  Homolog annotation: Hit_ID=Q9FLF8; Match level="QueryCoverage=100%, HitCoverage=15%, E-value=5e-31, Identity=73%"; Hit description=Auxin- independent growth promoter-like protein
VEGHRRFLGHRKTITPDRRGLVELFDLLEKGELMEGPKLSSVVTDMHKYRQGAPRKRYGSLPGSKGRARLRTEESFYENPFPECIC

SEQ ID NO: 123960 - protein, 88 aa, Setaria italica
  Transcript Sequence Number=SeqID_57986
  Gene Ontology: Mol. function=microtubule binding
  Homolog annotation: Hit_ID=B6TN74; Match level="QueryCoverage=53%, HitCoverage=17%, E-value=7e-13, Identity=76%"; Hit description=ATEB1A
  Pfam annotation: Domain name=EB1; Domain location=44-80; Score=40.4; E_value=6.9e-09; Accession=PF03271.9; Description=EB1-like C -terminal motif
PLIESSHELVLQNNSSDVELIVVLDISTSFVELNIADLKVSVDSMEKERDLYFSKLRDIEILCQRPELEHLLVRTKTMQIVDLSWSIY

SEQ ID NO: 123961 - protein, 47 aa, Setaria italica
  Transcript Sequence Number=SeqID_57987
  Homolog annotation: Hit_ID=Q6UNT3; Match level="QueryCoverage=70%, HitCoverage=11%, E-value=2e-09, Identity=90%"; Hit description =Hypersensitive-induced response protein
SYCHDQPVAWTLSVQDNVFVTVVASVQYRALADKASDAFYKLSNTEE

SEQ ID NO: 123962 - protein, 111 aa, Setaria italica
  Transcript Sequence Number=SeqID_57988
  Subcellular localization annotation: CTP_CleavageSite=40; ConfidenceScore=5.13e-01
ELQQDPCYTYCSSSPSSEQRSGSASLFAKADTRVSIPQTRQAKSKNGLQALDSCKRFSVIERQPSVSSIWHHRASSTNRSPNAPVTSSGNIRKGSSSPRTESKEERRHSST

SEQ ID NO: 123963 - protein, 43 aa, Setaria italica
  Transcript Sequence Number=SeqID_57989
  Gene Ontology: Mol. function=electron carrier activity; Cellular component=extracellular region; Biological process=response to oxidative stress
  Homolog annotation: Hit_ID=Q96512; Match level="QueryCoverage=83%, HitCoverage=10%, E-value=5e-10, Identity=80%"; Hit description =Peroxidase 9
GFEVIDEIKAALEEACPHTVSCADTIALAARGSTVLVNFCSLK

SEQ ID NO: 123964 - protein, 115 aa, Setaria italica
  misc_feature (90)..(90): Xaa can be any naturally occurring amino acid
  Transcript Sequence Number=SeqID_57990
  Gene Ontology: Mol. function=RNA binding; Cellular component =ribosome; Biological process=translation
  Homolog annotation: Hit_ID=A6N017; Match level="QueryCoverage=100%, HitCoverage=40%, E-value=2e-34, Identity=69%"; Hit description=30S ribosomal protein S1 (Fragment)
GRVSLSTKKLEPTPGDMIRNPKLVFEKVSVKINNVCTFAGYALANKLTYGFFGSNQADEMAQIFRQRIAQAEAMARADMLRFQPESGLTXSSEGILGPLSSDTPSEDSAEESTDE

SEQ ID NO: 123965 - protein, 82 aa, Setaria italica
  misc_feature (5)..(5): Xaa can be any naturally occurring amino acid
  misc_feature (52)..(52): Xaa can be any naturally occurring amino acid
  Transcript Sequence Number=SeqID_57991
  Gene Ontology: Mol. function=RNA binding; Cellular component =ribosome; Biological process=translation
  Homolog annotation: Hit_ID=A6N017; Match level="QueryCoverage=87%, HitCoverage=33%, E-value=4e-34, Identity=97%"; Hit description=30S ribosomal protein S1 (Fragment)
SAPGXTLKVMILSHDRERGRVSLSTKKLEPTPGDMIRNPKLVFEKADEMAQXFRQRIAQAEAMARADMLRFQPEVLLAPPLL

SEQ ID NO: 123966 - protein, 115 aa, Setaria italica
  Transcript Sequence Number=SeqID_57992
  Gene Ontology: Mol. function=RNA binding; Cellular component =ribosome; Biological process=translation
  Homolog annotation: Hit_ID=Q10MB2; Match level="QueryCoverage=81%, HitCoverage=23%, E-value=2e-44, Identity=95%"; Hit description=30S ribosomal protein S1, chloroplast, putative, expressed
  Pfam annotation: Domain name=S1; Domain location=23-80; Score=29.8; E_ value=1.1e-05; Accession=PF00575.15; Description=S1 RNA binding domain
LCWVTLVSSVLFICVSCQSCLQVIGGNKGGVVALVEGLKGFVPFSQVSSKTTAEELLGKELPLKFVEVDEEQGRLVLSNRKAMADSQAQLGIGSVVMGTVESLKPYGAFIDIGGI

SEQ ID NO: 123967 - protein, 81 aa, Setaria italica
  Transcript Sequence Number=SeqID_57993
  Gene Ontology: Mol. function=RNA binding; Cellular component =ribosome; Biological process=translation
  Homolog annotation: Hit_ID=Q10MB2; Match level="QueryCoverage=70%, HitCoverage=14%, E-value=6e-22, Identity=85%"; Hit description=30S ribosomal protein S1, chloroplast, putative, expressed
IGCLLLFVLFLILKFLLAFLPLDEACLLDIDNVEDAGIRPGLVEEFMIIDENPSDETLILSLQAIQQELAWERCRQLQART

SEQ ID NO: 123968 - protein, 49 aa, Setaria italica
  Transcript Sequence Number=SeqID_57994
  Gene Ontology: Mol. function=RNA binding; Cellular component=ribosome
  Homolog annotation: Hit_ID=Q6L5I7; Match level="QueryCoverage=83%, HitCoverage=6%, E-value=6e-15, Identity=87%"; Hit description =Putative 30S ribosomal protein S1
ILTLMGRPRNFTDLKNKVGQEIHVCITRIDEGANELIISEKEAWVSCVH

SEQ ID NO: 123969 - protein, 33 aa, Setaria italica
  Transcript Sequence Number=SeqID_57995
  Gene Ontology: Mol. function=RNA binding; Cellular component=ribosome
  Homolog annotation: Hit_ID=Q6L5I7; Match level="QueryCoverage=100%, HitCoverage=5%, E-value=3e-10, Identity=90%"; Hit description =Putative 30S ribosomal protein S1
AVTYLREGTLLQGTVRKLFPYGAQIRIGETNRG

SEQ ID NO: 123970 - protein, 82 aa, Setaria italica
  Transcript Sequence Number=SeqID_57996
MPEMHLLFVEANTLPVPNGRCISGIPVDMLNSDEACILAVSGRKQIILDAFADGSSFICLKCGGLYSTSRKDEHLAYWCRTA

SEQ ID NO: 123971 - protein, 59 aa, Setaria italica
  Transcript Sequence Number=SeqID_57997
VPWVLVPLLVLLSEFLDEACILAVSGRKQIILDAFADGSSFICLKCGGLYSTSRKDEHL

SEQ ID NO: 123972 - protein, 59 aa, Setaria italica
  Transcript Sequence Number=SeqID_57998
  Gene Ontology: Mol. function=catalytic activity; Cellular component =plasma membrane; Biological process=cellular metabolic process
  Homolog annotation: Hit_ID=B6STR1; Match level="QueryCoverage=100%, HitCoverage=19%, E-value=1e-25, Identity=96%"; Hit description=dTDP -4-dehydrorhamnose reductase
VEELLKNYENVCTLRVRMPISSDLSNPRNFITKITRYEKVVNIPNSMTILDELLPISIE

SEQ ID NO: 123973 - protein, 88 aa, Setaria italica
  Transcript Sequence Number=SeqID_57999
  Gene Ontology: Mol. function=protein tyrosine kinase activity; Cellular component=plasma membrane; Biological process=protein amino acid phosphorylation
  Homolog annotation: Hit_ID=Q10E34; Match level="QueryCoverage=92%, HitCoverage=10%, E-value=3e-38, Identity=93%"; Hit description =Receptor protein kinase CLAVATA1, putative, expressed
VLPSGPFSGMWILNYLNLSRNHLDGEIPPSIATMQSLTAVDFSYNNLSGLVPGTGQFTYFNATSFVGNPGLCGPYLGPCRPGIAGADH

SEQ ID NO: 123974 - protein, 63 aa, Setaria italica
  Transcript Sequence Number=SeqID_58000
  Homolog annotation: Hit_ID=B6SJK3; Match level="QueryCoverage=77%, HitCoverage=12%, E-value=5e-13, Identity=73%"; Hit description=mTERF family protein
YPLCALPIPFACLSRVISILKRETWVRKVALYRSFGVCEADLLRAFKTQPTILLVSDESVKKK

SEQ ID NO: 123975 - protein, 130 aa, Setaria italica
  misc_feature (80)..(80): Xaa can be any naturally occurring amino acid
  misc_feature (110)..(110): Xaa can be any naturally occurring amino acid
  Transcript Sequence Number=SeqID_58001
  Gene Ontology: Mol. function=ARF guanyl-nucleotide exchange factor activity; Cellular component=intracellular; Biological process =regulation of ARF protein signal transduction
  Homolog annotation: Hit_ID=Q7F8R6; Match level="QueryCoverage=100%, HitCoverage=7%, E-value=1e-53, Identity=79%"; Hit description =Putative guanine nucleotide-exchange protein GEP2
LLEDDSWNFETKMVALKCLSDLYITFFEVMRPELSRVTSVVTNFIRSPYKQSASTGISVFQRLTEGLASKLSNDEWEKIXLLCFKESAAHTFVLFDKIVRTMKDIEIPDXNESYSEAEQYSDHDIYNDDE

SEQ ID NO: 123976 - protein, 110 aa, Setaria italica
  Transcript Sequence Number=SeqID_58002
  Gene Ontology: Cellular component=integral to membrane
  Homolog annotation: Hit_ID=B6U2S9; Match level="QueryCoverage=96%, HitCoverage=39%, E-value=4e-38, Identity=83%"; Hit description =Senescence-associated protein DH
KVLARSFADRKETVTQFVNSNLSPIQLINLSYVQSGCCKPPTGCNFTYQSETVWIKPTGFNTTTDDPDCTTWSNDQTALCYDCMACKAGVLANLKNDWKKIATINIVFLI

SEQ ID NO: 123977 - protein, 66 aa, Setaria italica
  misc_feature (16)..(16): Xaa can be any naturally occurring amino acid
  Transcript Sequence Number=SeqID_58003
  Gene Ontology: Mol. function=DNA-directed RNA polymerase activity; Cellular component=nucleus
PKNMRQHLLEIVDHFXESGQISSKGYSSFVSNRVQKLQELQVIIYIFGMLFLVIQLSTFSCHLLMF

SEQ ID NO: 123978 - protein, 46 aa, Setaria italica
  Transcript Sequence Number=SeqID_58004
  Gene Ontology: Mol. function=sodium:hydrogen antiporter activity; Cellular component=integral to membrane; Biological process=sodium ion transport
  Homolog annotation: Hit_ID=B6U2S2; Match level="QueryCoverage=100%, HitCoverage=8%, E-value=7e-16, Identity=93%"; Hit description =Sodium/hydrogen exchanger
FTRSGHTQQPSNAIMITSTIIVVLFSTFVFGLLTKPLIRLLIPPRH

SEQ ID NO: 123979 - protein, 86 aa, Setaria italica
  Transcript Sequence Number=SeqID_58005
  Gene Ontology: Mol. function=sodium:hydrogen antiporter activity; Cellular component=integral to membrane; Biological process=sodium ion transport
  Homolog annotation: Hit_ID=B6U2S2; Match level="QueryCoverage=69%, HitCoverage=10%, E-value=2e-22, Identity=88%"; Hit description =Sodium/hydrogen exchanger
AIQNFDLGNINTAKLLKFIGSFLYLFSSSTILGVAAGLLSAYIIKKLYFGRHSTDREVSIMMLMAYLSYMLAEVSSLYYRPICLCF

SEQ ID NO: 123980 - protein, 61 aa, Setaria italica
  misc_feature (13)..(13): Xaa can be any naturally occurring amino acid
  misc_feature (25)..(25): Xaa can be any naturally occurring amino acid
  Transcript Sequence Number=SeqID_58006
  Gene Ontology: Mol. function=sodium:hydrogen antiporter activity; Cellular component=integral to membrane; Biological process =regulation of pH
  Homolog annotation: Hit_ID=B6U2S2; Match level="QueryCoverage=91%, HitCoverage=9%, E-value=3e-19, Identity=91%"; Hit description =Sodium/hydrogen exchanger
LVLVSRAAFVFPXLSFLSNLTKKTXPEGKISFKQQVIVWWAGLMRGAVSIALAYNKVKFFV

SEQ ID NO: 123981 - protein, 53 aa, Setaria italica
  Transcript Sequence Number=SeqID_58007
YQMLCGFDRSMLHHFDVLGVAIFFSTAIRYVSTKALLSATLGMRGLNVSYTIW

SEQ ID NO: 123982 - protein, 115 aa, Setaria italica
  misc_feature (56)..(56): Xaa can be any naturally occurring amino acid
  misc_feature (104)..(104): Xaa can be any naturally occurring amino acid
  Transcript Sequence Number=SeqID_58008
  Gene Ontology: Mol. function=metalloendopeptidase activity; Cellular component=integral to membrane; Biological process=proteolysis
  Homolog annotation: Hit_ID=Q06010; Match level="QueryCoverage=99%, HitCoverage=13%, E-value=2e-10, Identity=30%"; Hit description=A -factor-processing enzyme
QVLREIFWDVDEKLEVLMNLTFTDLVTFVPKILSQLHIEGLCHGNLSEEEAINISXKIFRNTLSAQTLPEEARHGVYFPIEQDIGKEATRLRAITDLFSSIIEXPCFDQLRTKEQ

SEQ ID NO: 123983 - protein, 42 aa, Setaria italica
  Transcript Sequence Number=SeqID_58009
  Gene Ontology: Mol. function=metalloendopeptidase activity; Biological process=proteolysis
SAQTLPEEARHGVRVICIPNGANFVRSVRVKNDLEENMSFLL

SEQ ID NO: 123984 - protein, 71 aa, Setaria italica
  misc_feature (67)..(67): Xaa can be any naturally occurring amino acid
  Transcript Sequence Number=SeqID_58010
LTVPNHGILSSLSSSLALALAQEVVALQPLLLGEHQVGHGEYRKERRLERRPTNLLTGIQPIVPNLXYYYR

SEQ ID NO: 123985 - protein, 86 aa, Setaria italica
  Transcript Sequence Number=SeqID_58011
WSDRIGDAIGGRLGALQAPIGIGARGVVGSDRRQTPEGLPLLISIALGYIINPVRVVPIPSKFSSARELQLISRLISPLTVFSLTT

SEQ ID NO: 123986 - protein, 68 aa, Setaria italica
  Transcript Sequence Number=SeqID_58012
  Gene Ontology: Mol. function=chlorophyllide a oxygenase activity; Cellular component=chloroplast; Biological process=oxidation reduction
  Homolog annotation: Hit_ID=Q8S7E1-2; Match level="QueryCoverage=97%, HitCoverage=12%, E-value=2e-33, Identity=96%"; Hit description =Isoform 2 of Chlorophyllide a oxygenase, chloroplastic
  Pfam annotation: Domain name=Rieske; Domain location=2-68; Score =11.0; E_value=0.00026; Accession=PF00355.18; Description=Rieske [2Fe- 2S] domain
NFWYPVAFSSDLKDDTMVPIDCFEEQWVIFRGKDGRPGCVQNTCAHRACPLHLGSVNEGRIQCPLHLS

SEQ ID NO: 123987 - protein, 91 aa, Setaria italica
  Transcript Sequence Number=SeqID_58013
  Gene Ontology: Mol. function=protein dimerization activity
  Homolog annotation: Hit_ID=Q8S7P4; Match level="QueryCoverage=84%, HitCoverage=9%, E-value=5e-12, Identity=46%"; Hit description =Putative transposase
YIDDMRRDDSFKGPDSIVDLSVKLVQIRRHKVYDMVYLLLKLILLLPVATTSVERVFSVIKSKIHHCLLAAIHPDALQNRALPEHGVTGRP

SEQ ID NO: 123988 - protein, 58 aa, Setaria italica
  Transcript Sequence Number=SeqID_58014
  Gene Ontology: Mol. function=protein serine/threonine kinase activity; Biological process=protein amino acid phosphorylation
  Homolog annotation: Hit_ID=B9SAC0; Match level="QueryCoverage=65%, HitCoverage=8%, E-value=1e-10, Identity=81%"; Hit description =Protein kinase APK1B, chloroplast, putative
STRMKIALGAARGLEYLHGAERSIIYRDFKTSNILLDAVSVSSIMFECVLVLFPPFKY

SEQ ID NO: 123989 - protein, 88 aa, Setaria italica
  misc_feature (23)..(23): Xaa can be any naturally occurring amino acid
  Transcript Sequence Number=SeqID_58015
  Pfam annotation: Domain name=NUC189; Domain location=31-88; Score =4.5; E_value=0.0017; Accession=PF08162.3; Description=NUC189 domain
PVHILLKQALRADDNMSLLTCLXYNRDEKVIAKSISLLTPADVVKLLKFFVLQIQSRGAVLVCLLPWLQTLLSQHMSKDREDSWDTML

SEQ ID NO: 123990 - protein, 115 aa, Setaria italica
  misc_feature (87)..(87): Xaa can be any naturally occurring amino acid
  Transcript Sequence Number=SeqID_58016
  Gene Ontology: Cellular component=plasma membrane
  Homolog annotation: Hit_ID=B6U8U8; Match level="QueryCoverage=59%, HitCoverage=11%, E-value=6e-22, Identity=64%"; Hit description =Nodulin-like protein
  Pfam annotation: Domain name=Nodulin-like; Domain location=2-98; Score=-108.5; E_value=0.00015; Accession=PF06813.5; Description =Nodulin-like
EQQQPRTNDKQLVFMVAVGPSLVAIGLMFIIRPVGGHRQVRPSDKNSFMFIYTICLLLASYLVGVMLVQNFMQLSDNVVNSLTVILXLLLISPIAIPVTLTLSSKAQHPTEEALL

SEQ ID NO: 123991 - protein, 46 aa, Setaria italica
  Transcript Sequence Number=SeqID_58017
YVPWVCVLPDNNLREVASSITTRTTVLPSPKTNTRQQAHTPAPPPP

SEQ ID NO: 123992 - protein, 63 aa, Setaria italica
  Transcript Sequence Number=SeqID_58018
RFCSCSRVMVATTFIVFGNIFLVSFGNHQSPGMVPSTISIRVLYIVLMINLNLHYLFFVFVLK

SEQ ID NO: 123993 - protein, 64 aa, Setaria italica
  Transcript Sequence Number=SeqID_58019
  Homolog annotation: Hit_ID=B9RGU0; Match level="QueryCoverage=89%, HitCoverage=4%, E-value=4e-24, Identity=87%"; Hit description =Pentatricopeptide repeat-containing protein, putative
RKAFLCTAGFWMARLNEGLSLFDAILIVPMFQIAWTFFSICTGFVYFQEYQVFDTLRRRMSCPI

SEQ ID NO: 123994 - protein, 81 aa, Setaria italica
  Transcript Sequence Number=SeqID_58020
  Homolog annotation: Hit_ID=B9RGU0; Match level="QueryCoverage=96%, HitCoverage=6%, E-value=1e-24, Identity=67%"; Hit description =Pentatricopeptide repeat-containing protein, putative
MLTVYTPEQLIAKYSNLVFVLYCMSLVFVVAFNHYLYRSGETIISNSSKDAGTYWRTMLPFSYAVVSGAIGSCSVLFAKSL

SEQ ID NO: 123995 - protein, 56 aa, Setaria italica
  Transcript Sequence Number=SeqID_58021
  Homolog annotation: Hit_ID=B9RGU0; Match level="QueryCoverage=94%, HitCoverage=4%, E-value=3e-16, Identity=79%"; Hit description =Pentatricopeptide repeat-containing protein, putative
  Subcellular localization annotation: CTP_CleavageSite=39; ConfidenceScore=5.09e-01
RRRSFAYAAQSLLAALGSIQFVSNIAFAYFVLNKTISVKVMVATTFIVFGNIFLVS

SEQ ID NO: 123996 - protein, 131 aa, Setaria italica
  Transcript Sequence Number=SeqID_58022
LSSSSNQMNLHCTTIRISALLERKRPKSKKNHLQYYGWIETKALHYLHSIICTNWSGMRSEALHQGWGGHGREKGEGGGSSASGDANRLAEQPHDERELDHEERVQPRPVHHEDRNNRRITPNPVKLTNQR

SEQ ID NO: 123997 - protein, 42 aa, Setaria italica
  Transcript Sequence Number=SeqID_58023
  Homolog annotation: Hit_ID=B9SDN5; Match level="QueryCoverage=80%, HitCoverage=4%, E-value=6e-09, Identity=85%"; Hit description =Transferase, transferring glycosyl groups, putative
FSSSFPCKTSRRNLLNVLDFLKKPNASELVSGTKDRVNLHDK

SEQ ID NO: 123998 - protein, 80 aa, Setaria italica
  Transcript Sequence Number=SeqID_58024
RKLSAPNPTLLLHRKVPPVARFLEASIPISVQVWEVCTSSLAILCSFCCYNMSRYHLKQYEKEHMKMAMLKQEETFKQLG

SEQ ID NO: 123999 - protein, 38 aa, Setaria italica
  Transcript Sequence Number=SeqID_58025
QFLRNTWILQPLFRKIAGSLPGLDAISSAKQEDMVDIN

SEQ ID NO: 124000 - protein, 129 aa, Setaria italica
  Transcript Sequence Number=SeqID_58026
  Gene Ontology: Mol. function=pseudouridine synthase activity; Biological process=pseudouridine synthesis
  Homolog annotation: Hit_ID=B4FLG8; Match level="QueryCoverage=87%, HitCoverage=55%, E-value=2e-41, Identity=76%"; Hit description =Pseudouridylate synthase
ISAARPEFHARSSTKSKIYHYKIYNEAIMDPFHNCYAYHSAYKLNPHAMRQAAKHFVGIHDFTSFANAAHNDRERSPIKKITRFDVTEMVVDAQTNYVFGTIVFYPLVLSLVSGGKSFCVGLWFGVCCT

SEQ ID NO: 124001 - protein, 116 aa, Setaria italica
  misc_feature (96)..(96): Xaa can be any naturally occurring amino acid
  Transcript Sequence Number=SeqID_58027
  Gene Ontology: Mol. function=ubiquitin-protein ligase activity
  Homolog annotation: Hit_ID=Q9SRU2; Match level="QueryCoverage=88%, HitCoverage=2%, E-value=3e-32, Identity=62%"; Hit description=Auxin transport protein
MMEEQLWLTPEPEQDKNEFASQLVRACSALRQQSFLNYLMDILQQLVHTFKSSSINGEAGSSGSGCGSLLTVRRELPAGNFSPFFSDSYAKSHPTXLFTDYYKLLLENTFRLVYSI

SEQ ID NO: 124002 - protein, 77 aa, Setaria italica
  misc_feature (23)..(23): Xaa can be any naturally occurring amino acid
  Transcript Sequence Number=SeqID_58028
  Gene Ontology: Mol. function=ubiquitin-protein ligase activity
  Homolog annotation: Hit_ID=B9SIX2; Match level="QueryCoverage=96%, HitCoverage=1%, E-value=3e-24, Identity=69%"; Hit description =Ubiquitin-protein ligase, putative
KKWRELPAGNFSPFFSDSYAKSXHPTDLFTDYYKLLLENTFRLVYSMVRPEKEKSAEKDRSYKVPNTKDLKLDGYQD

SEQ ID NO: 124003 - protein, 103 aa, Setaria italica
  misc_feature (46)..(46): Xaa can be any naturally occurring amino acid
  Transcript Sequence Number=SeqID_58029
  Gene Ontology: Mol. function=ubiquitin-protein ligase activity
  Homolog annotation: Hit_ID=Q9SRU2; Match level="QueryCoverage=90%, HitCoverage=1%, E-value=6e-40, Identity=70%"; Hit description=Auxin transport protein
  Pfam annotation: Domain name=ZZ; Domain location=23-66; Score=36.8; E_ value=8.6e-08; Accession=PF00569.9; Description=Zinc finger, ZZ type
LLFCYGSSSGNAQVMIEEDPASSSVRYCCDGCSTVPILRRRWHCNXCPDFDLCETCYEILDADRLPVPHSKDHPMSAIPIELDTFGGEGNEIHFSIDELTDSG

SEQ ID NO: 124004 - protein, 64 aa, Setaria italica
  Transcript Sequence Number=SeqID_58030
TTRVIPRQPSRVDFDAELIKAPLAALFGNGEGHDRQIANRASCELADQFQQDCCSIVEHDMGHI

SEQ ID NO: 124005 - protein, 77 aa, Setaria italica
  Transcript Sequence Number=SeqID_58031
  Gene Ontology: Mol. function=catalytic activity; Biological process =metabolic process
  Homolog annotation: Hit_ID=B9RMA4; Match level="QueryCoverage=100%, HitCoverage=22%, E-value=4e-28, Identity=72%"; Hit description =Aminocarboxymuconate-semialdehyde decarboxylase, putative
NDEEEKAFSSFLNLSRFPQVYVKYSALFRISREAYPYEDTAQLLSHVISIYGANRIMWGSDFPYVVPECGYKGAKDA

SEQ ID NO: 124006 - protein, 117 aa, Setaria italica
  Transcript Sequence Number=SeqID_58032
  Gene Ontology: Mol. function=pantothenate kinase activity; Biological process=coenzyme A biosynthetic process
  Homolog annotation: Hit_ID=Q8L5Y9; Match level="QueryCoverage=88%, HitCoverage=11%, E-value=5e-34, Identity=72%"; Hit description =Pantothenate kinase 2
TILLPNQSDDISHLALDIGGSLIKLVYFSRHAELSTEDKRKISTKRRLGMFNGGRRSYPILGGRLHFVKFETEKLNECLDFISSKQLHRGGVDSPSWRSGAQPDDIVIKADSQSFLK

SEQ ID NO: 124007 - protein, 51 aa, Setaria italica
  Transcript Sequence Number=SeqID_58033
SRPFKTSHTCCSWNSHSMNEEARLLALIEGVLAANIFDWGSRATTGMGGFE

SEQ ID NO: 124008 - protein, 123 aa, Setaria italica
  misc_feature (47)..(47): Xaa can be any naturally occurring amino acid
  misc_feature (112)..(112): Xaa can be any naturally occurring amino acid
  Transcript Sequence Number=SeqID_58034
  Gene Ontology: Cellular component=intracellular; Biological process =ribosome biogenesis
  Homolog annotation: Hit_ID=A8IK52; Match level="QueryCoverage=100%, HitCoverage=46%, E-value=1e-52, Identity=79%"; Hit description=Low -CO2-inducible protein
  Pfam annotation: Domain name=Ribosomal_S8e; Domain location=1-113; Score=121.5; E_value=2.7e-33; Accession=PF01201.14; Description =Ribosomal protein S8e
PLAKEEMFKVLRTGKRKTKQWKRMVTKATFVGSGFTRKPPKYERFIXRPTGLRFTKAHVTHPELKCTFNLDIISVKKNPNGPMYTSLGVMTRGTIIEVNVSELGLVTPAGKXVWGKYAQVTNN

SEQ ID NO: 124009 - protein, 38 aa, Setaria italica
  Transcript Sequence Number=SeqID_58035
LNSVTVSRKATVQVQYSSIVLLCYCKQEGNSASTIQFH

SEQ ID NO: 124010 - protein, 136 aa, Setaria italica
  misc_feature (69)..(69): Xaa can be any naturally occurring amino acid
  misc_feature (96)..(96): Xaa can be any naturally occurring amino acid
  misc_feature (118)..(118): Xaa can be any naturally occurring amino acid
  Transcript Sequence Number=SeqID_58036
  Gene Ontology: Cellular component=intracellular; Biological process =ribosome biogenesis
  Homolog annotation: Hit_ID=A8IK52; Match level="QueryCoverage=80%, HitCoverage=41%, E-value=5e-44, Identity=78%"; Hit description=Low -CO2-inducible protein
  Pfam annotation: Domain name=Ribosomal_S8e; Domain location=10-136; Score=124.6; E_value=3.2e-34; Accession=PF01201.14; Description =Ribosomal protein S8e
LLNLSLKVGKVVKSWLNWVLFPFVLKVRPVAEEEMFKVLRTGKRKTKQWKRMVTKATFVGSGFTRKPPXKYERFIRPTGLRFTKAHVTHPELKCTXNLDIISVKKNPNGPMYTSLGVXTRGTIIEVNVSELGLVTL

SEQ ID NO: 124011 - protein, 65 aa, Setaria italica
  Transcript Sequence Number=SeqID_58037
  Gene Ontology: Mol. function=ATP-dependent DNA helicase activity; Cellular component=nucleus; Biological process=double-strand break repair via nonhomologous end joining
  Homolog annotation: Hit_ID=Q75IP5; Match level="QueryCoverage=100%, HitCoverage=20%, E-value=7e-25, Identity=78%"; Hit description =Putative H-box binding protein, KAP2, with alternative splicing isoforms
GKVLDAVVVGLDMLIRKYGNTKGKRRLCLITSAQHRLRDPPEGTKEDQVDTIADQMKRHDIKMEC

SEQ ID NO: 124012 - protein, 122 aa, Setaria italica
  misc_feature (91)..(91): Xaa can be any naturally occurring amino acid
  Transcript Sequence Number=SeqID_58038
  Gene Ontology: Mol. function=glyceraldehyde-3-phosphate dehydrogenase (NADP+) (phosphorylating) activity; Cellular component=chloroplast; Biological process=reductive pentose-phosphate cycle
  Homolog annotation: Hit_ID=P09315; Match level="QueryCoverage=71%, HitCoverage=21%, E-value=2e-40, Identity=90%"; Hit description =Glyceraldehyde-3-phosphate dehydrogenase A, chloroplastic
  Pfam annotation: Domain name=Gp_dh_C; Domain location=4-100; Score =16.6; E_value=3e-08; Accession=PF02800.12; Description =Glyceraldehyde 3-phosphate dehydrogenas
SLKGYLSSFLTGYFVRLPGCPYPVTFSVVDLVVQVSKKTLAEEVNQAFRDSAANELAGILEVCDAPLVSVDFRCSDVSSTVDASLTMVMGXDMVKVIAWYDNEWGYSQRVVDLADIVANNWK

SEQ ID NO: 124013 - protein, 83 aa, Setaria italica
  misc_feature (34)..(34): Xaa can be any naturally occurring amino acid
  Transcript Sequence Number=SeqID_58039
  Gene Ontology: Mol. function=glyceraldehyde-3-phosphate dehydrogenase (NADP+) (phosphorylating) activity; Cellular component=chloroplast; Biological process=reductive pentose-phosphate cycle
  Homolog annotation: Hit_ID=P25856; Match level="QueryCoverage=90%, HitCoverage=18%, E-value=3e-19, Identity=64%"; Hit description =Glyceraldehyde-3-phosphate dehydrogenase A, chloroplastic
  Pfam annotation: Domain name=Gp_dh_C; Domain location=2-61; Score= -68.0; E_value=0.026; Accession=PF02800.12; Description =Glyceraldehyde 3-phosphate dehydrogenas
KPRTLPTNKTTDQTKLAGILEVCDAPLVSVDFRXDSDVSSTVDASLTMVMGDDMVKVIAWYDNEWGYSQRVVDLADIVANNWK

SEQ ID NO: 124014 - protein, 95 aa, Setaria italica
  Transcript Sequence Number=SeqID_58040
EQNLDKNKTTGGDNGFIHIWALKKTSSRSKEKVDITPDRRYEHKYYSNHLQPEKIKIPSTSDDEEDDEDVDKEVVREGPLEVVVEYVDKEVVRVA

SEQ ID NO: 124015 - protein, 89 aa, Setaria italica
  Transcript Sequence Number=SeqID_58041
  Gene Ontology: Mol. function=oxidoreductase activity, acting on the CH-OH group of donors, NAD or NADP as acceptor; Cellular component =mitochondrion; Biological process=metabolic process
  Homolog annotation: Hit_ID=Q8LFC0; Match level="QueryCoverage=51%, HitCoverage=12%, E-value=1e-18, Identity=95%"; Hit description =Isocitrate dehydrogenase [NAD] regulatory subunit 1, mitochondrial
VNCFNLPGLPTRHDNVDIVVIRENTEGEYSGLEHEVVPGVVESLKVRRISRIALSRISNLLTDAACAKLLEIVNNRKKLKKNKLKLKTN

SEQ ID NO: 124016 - protein, 40 aa, Setaria italica
  Transcript Sequence Number=SeqID_58042
MVTPNLYGNLVANTAAGIVGGTGIMPGGRVAPHTLLCFTP

SEQ ID NO: 124017 - protein, 59 aa, Setaria italica
  Transcript Sequence Number=SeqID_58043
  Gene Ontology: Mol. function=oxidoreductase activity, acting on the CH-OH group of donors, NAD or NADP as acceptor; Cellular component =mitochondrion; Biological process=tricarboxylic acid cycle
  Homolog annotation: Hit_ID=Q8LFC0; Match level="QueryCoverage=98%, HitCoverage=15%, E-value=8e-23, Identity=93%"; Hit description =Isocitrate dehydrogenase [NAD] regulatory subunit 1, mitochondrial
FALLLSSAMMLRHLQFPSFADRLETAVKRVIAEGNYRTKDLGGTSTTQEVTDAVIAKLD

SEQ ID NO: 124018 - protein, 65 aa, Setaria italica
  Transcript Sequence Number=SeqID_58044
  Gene Ontology: Mol. function=oxidoreductase activity, acting on the CH-OH group of donors, NAD or NADP as acceptor; Cellular component =mitochondrion; Biological process=metabolic process
  Homolog annotation: Hit_ID=O82004; Match level="QueryCoverage=70%, HitCoverage=11%, E-value=2e-18, Identity=95%"; Hit description=NADP -dependent isocitrate dehydrogenase-like protein
SLFFLTFPPGSCPYLGLRTNVDIVVIRENTEGEYSGLEHEVVPGVVESLKVITKFCSERIAKYAL

SEQ ID NO: 124019 - protein, 85 aa, Setaria italica
  Transcript Sequence Number=SeqID_58045
  Gene Ontology: Mol. function=oxidoreductase activity, acting on the CH-OH group of donors, NAD or NADP as acceptor; Cellular component =mitochondrion; Biological process=tricarboxylic acid cycle
  Homolog annotation: Hit_ID=Q9ZNX1; Match level="QueryCoverage=70%, HitCoverage=16%, E-value=8e-25, Identity=88%"; Hit description=NAD -dependent isocitrate dehydrogenase
APPRLRLLPARAAALPGHCGGLARRTVTYMPRPGDGTPRAVTLIPGDGIGPLVTGAVRQVMEAMHAPVYFETYEVHGDMPTVPPA

SEQ ID NO: 124020 - protein, 124 aa, Setaria italica
  Transcript Sequence Number=SeqID_58046
DWLAEDERMPLKRPLETPVQKKRSAPSVMKDLDMVEDEDQSDSPGPVTSRKRERKKSKYLSPPYTNLGVDVLPRKPVGTPKASVPKAAEDGSKVLQLPDSIVVEDVLLLVRGLGKDPHHMVIFP

SEQ ID NO: 124021 - protein, 79 aa, Setaria italica
  Transcript Sequence Number=SeqID_58047
KAGNSARGIVQDEKNKLSLFKCPVSATVPGAAKPGHEQVKENDKSILEKPQALGNMLHEETTKDIDEAKLGTTKSETNV

SEQ ID NO: 124022 - protein, 35 aa, Setaria italica
  Transcript Sequence Number=SeqID_58048
  Gene Ontology: Mol. function=metal ion binding
VLLQKGKKRENLTKKLYGTSTGRRRSDWHRDWEVE

SEQ ID NO: 124023 - protein, 111 aa, Setaria italica
  misc_feature (12)..(12): Xaa can be any naturally occurring amino acid
  misc_feature (65)..(65): Xaa can be any naturally occurring amino acid
  misc_feature (81)..(81): Xaa can be any naturally occurring amino acid
  Transcript Sequence Number=SeqID_58049
  Gene Ontology: Mol. function=acetolactate synthase activity; Cellular component=chloroplast; Biological process=branched chain family amino acid biosynthetic process
  Homolog annotation: Hit_ID=B6TXK4; Match level="QueryCoverage=98%, HitCoverage=70%, E-value=3e-46, Identity=65%"; Hit description =Acetolactate synthase/ amino acid binding protein
  Pfam annotation: Domain name=ALS_ss_C; Domain location=59-110; Score =21.5; E_value=1.2e-07; Accession=PF10369.1; Description=Small subunit of acetolactate synthase
FARRGYNIEFVXLGLNKDKALFTIVVSGTDKVLNQVIEQLNKLVNVLSVEDLSKEPQVERELMLXKLNVKPHQRPEVMVFXFDIFRAKVVDISDTTLTLEVAGDPGKIADK

SEQ ID NO: 124024 - protein, 49 aa, Setaria italica
  Transcript Sequence Number=SeqID_58050
  Gene Ontology: Mol. function=acetolactate synthase activity; Biological process=branched chain family amino acid biosynthetic process
  Homolog annotation: Hit_ID=Q53L28; Match level="QueryCoverage=100%, HitCoverage=10%, E-value=9e-16, Identity=83%"; Hit description =Acetolactate synthase small subunit, putative, expressed
  Pfam annotation: Domain name=ALS_ss_C; Domain location=3-34; Score= -15.8; E_value=0.00095; Accession=PF10369.1; Description=Small subunit of acetolactate synthase
LAVSVNKMVALQRLLEHYGICEVARTGRVALVRESGVDSKYLRGFSLPL

SEQ ID NO: 124025 - protein, 51 aa, Setaria italica
  misc_feature (35)..(35): Xaa can be any naturally occurring amino acid
  Transcript Sequence Number=SeqID_58051
  Gene Ontology: Mol. function=acetolactate synthase activity; Biological process=branched chain family amino acid biosynthetic process
  Homolog annotation: Hit_ID=B6TXK4; Match level="QueryCoverage=98%, HitCoverage=10%, E-value=5e-16, Identity=88%"; Hit description =Acetolactate synthase/ amino acid binding protein
FVPGTNESIEKLVQQLYKLIDVHEVHDITHLPFFXKGELMLIKVSVNTAAR

SEQ ID NO: 124026 - protein, 34 aa, Setaria italica
  Transcript Sequence Number=SeqID_58052
TRTIIHKDGEGVLNIVTGVFARRGYNIQSLAVGP

SEQ ID NO: 124027 - protein, 65 aa, Setaria italica
  Transcript Sequence Number=SeqID_58053
  Gene Ontology: Mol. function=aldehyde dehydrogenase [NAD(P)+] activity; Cellular component=chloroplast; Biological process =cellular aldehyde metabolic process
  Homolog annotation: Hit_ID=Q53NG7; Match level="QueryCoverage=92%, HitCoverage=18%, E-value=1e-18, Identity=76%"; Hit description =Aldehyde dehydrogenase family protein, expressed
VDYNTISAWNYPFLLSIDPVIGAIAAGNAVVLKPSEIAPATSAMFAKLLPEYVDSTCIKVVEGGV

SEQ ID NO: 124028 - protein, 116 aa, Setaria italica
  misc_feature (48)..(48): Xaa can be any naturally occurring amino acid
  misc_feature (90)..(90): Xaa can be any naturally occurring amino acid
  misc_feature (107)..(107): Xaa can be any naturally occurring amino acid
  Transcript Sequence Number=SeqID_58054
  Gene Ontology: Mol. function=binding; Cellular component=cytoplasm; Biological process=regulation of synapse organization and biogenesis
  Homolog annotation: Hit_ID=Q10D20; Match level="QueryCoverage=75%, HitCoverage=2%, E-value=2e-44, Identity=93%"; Hit description=WD-40 repeat family protein, putative, expressed
  Pfam annotation: Domain name=Beach; Domain location=1-116; Score =57.3; E_value=1.6e-18; Accession=PF02138.10; Description=BeigeBEACH domain
YSYYFFNFSFVLLKLFTYLGLSLFFVLGLKVNTSDVKELIPEFYYLPXFLENRFNLDLGEKQSGEKVGDVVLPPWAKGSTREFIRKHREXLESDYVSENLHHWIDLXFGYKQRGKA

SEQ ID NO: 124029 - protein, 43 aa, Setaria italica
  Transcript Sequence Number=SeqID_58055
IVLSPTSYRVYFELKLSAGSFQWSKLYLSYLGWKSAFPPLGLT

SEQ ID NO: 124030 - protein, 54 aa, Setaria italica
  Transcript Sequence Number=SeqID_58056
NQMELYQTDPKKLDSYCWNKLCAMQLIASFCFVQIQKKKIWESVQPHLKTTDNC

SEQ ID NO: 124031 - protein, 116 aa, Setaria italica
  Transcript Sequence Number=SeqID_58057
  Gene Ontology: Mol. function=catalytic activity; Cellular component =plasma membrane; Biological process=nucleoside metabolic process
  Homolog annotation: Hit_ID=B6TR61; Match level="QueryCoverage=76%, HitCoverage=35%, E-value=2e-33, Identity=75%"; Hit description =MTA/SAH nucleosidase
WRPEATPLVNKFRLVEAPAHESIFPKGATWTRFYGNYKDLHLDLVMPGKDVVFGVDSVGTVSASLVAYASIQALKPDLIINAGTAGGFKVCTRTLLMLPSYVLVFMLCWKIGFLLL

SEQ ID NO: 124032 - protein, 80 aa, Setaria italica
  Transcript Sequence Number=SeqID_58058
TCIQPIVFVLYPSIVYQKQEGDLGFHEHIQFFLPTTTAWRSSWSSQRSVMRFPLMKSIILVTATSSACLVLTVSNSRFLV

SEQ ID NO: 124033 - protein, 46 aa, Setaria italica
  Transcript Sequence Number=SeqID_58059
MFSIRWHCSIIIGNQSVIYIIHCDLCTYKWMVQTYCLIEVSIDHKV

SEQ ID NO: 124034 - protein, 63 aa, Setaria italica
  Transcript Sequence Number=SeqID_58060
  Gene Ontology: Cellular component=integral to membrane; Biological process=electron transport chain
  Homolog annotation: Hit_ID=Q8H112; Match level="QueryCoverage=100%, HitCoverage=19%, E-value=1e-21, Identity=76%"; Hit description=PGR5 -like protein 1A, chloroplastic
  Subcellular localization annotation: CTP_CleavageSite=39; ConfidenceScore=5.10e-01
IVQDFLILKGPCPNCGTENLSFFGTILSVSSGGTTNNVKCANCSTELVYDSKSRVITFPEPSN

SEQ ID NO: 124035 - protein, 63 aa, Setaria italica
  Transcript Sequence Number=SeqID_58061
YKQFGQVAYVKYIVQLVQSLKGDGADDTSLFLVARNKELQHCLFFRTRWPSAVHSRNCKACNH

SEQ ID NO: 124036 - protein, 38 aa, Setaria italica
  Transcript Sequence Number=SeqID_58062
SLYHRQLYLSFSIHTLQLSSQTMHDNPIIQSRIVMHVT

SEQ ID NO: 124037 - protein, 170 aa, Setaria italica
  misc_feature (73)..(73): Xaa can be any naturally occurring amino acid
  misc_feature (139)..(139): Xaa can be any naturally occurring amino acid
  Transcript Sequence Number=SeqID_58063
  Gene Ontology: Mol. function=protein serine/threonine phosphatase activity; Cellular component=protein serine/threonine phosphatase complex; Biological process=protein amino acid dephosphorylation
  Homolog annotation: Hit_ID=B4G0F7; Match level="QueryCoverage=81%, HitCoverage=36%, E-value=2e-68, Identity=92%"; Hit description =Catalytic/ protein phosphatase type 2C
VLPSSGLSVGVLGPYLLPVPRFPSFLRGKTSEGRDGLLWWRDLARCHAGEVSVAVAQANQVLEDQCRLESAPXLGTVVGVFDGHGGYDAARFACDHLFPNLREASSGPGGVTANAIREAFLATEEGFLALVSRLWEAQXPDIATAGTCCLVGVVHNRTLFVANLGDSRAV

SEQ ID NO: 124038 - protein, 59 aa, Setaria italica
  Transcript Sequence Number=SeqID_58064
  Subcellular localization annotation: CTP_CleavageSite=19; ConfidenceScore=5.36e-01
AHNQFKLKTLAPCPCNYARCSSPAGTSVNRAPVTRELRLRAPLMAEHNGSNSKTERLAS

SEQ ID NO: 124039 - protein, 56 aa, Setaria italica
  misc_feature (12)..(12): Xaa can be any naturally occurring amino acid
  misc_feature (33)..(33): Xaa can be any naturally occurring amino acid
  Transcript Sequence Number=SeqID_58065
  Gene Ontology: Mol. function=isomerase activity
  Homolog annotation: Hit_ID=B6U5H8; Match level="QueryCoverage=73%, HitCoverage=16%, E-value=4e-12, Identity=82%"; Hit description =Chalcone isomerase 3
AEEASSLSTFQXTFLGRNLKQGTSIYLTWLEPXRMLVSYSQFCESYEFSMSMMLNF

SEQ ID NO: 124040 - protein, 33 aa, Setaria italica
  Transcript Sequence Number=SeqID_58066
VGRWGPISSWRQSKLSVLLLISWPHHISVEIYF

SEQ ID NO: 124041 - protein, 89 aa, Setaria italica
  Transcript Sequence Number=SeqID_58067
  Gene Ontology: Mol. function=catalytic activity; Cellular component =membrane; Biological process=plant-type hypersensitive response
  Homolog annotation: Hit_ID=B4FH50; Match level="QueryCoverage=100%, HitCoverage=28%, E-value=5e-26, Identity=66%"; Hit description=Lipid phosphate phosphatase 3
YRHHWEDVFVGGLIGSIMAVLCYLHFFPPPYHDQGWGPYAYFQMLEELQAAHSSNAQNQQSAATGGQHIALSRQEHDRKSINDLESGSV

SEQ ID NO: 124042 - protein, 116 aa, Setaria italica
  Transcript Sequence Number=SeqID_58068
  Gene Ontology: Mol. function=protein serine/threonine kinase activity; Cellular component=plasma membrane; Biological process =protein amino acid phosphorylation
  Homolog annotation: Hit_ID=Q84XU5; Match level="QueryCoverage=97%, HitCoverage=23%, E-value=1e-24, Identity=54%"; Hit description =Receptor-like protein kinase (Fragment)
FWSYGRSYYLLQWVRMVTGSSKEGVMKIADPRLSTVPLYELTHVFYVAMLCVAEQSVERPTMREVVQILADMPGSTSTSIDAPLVIEPKEDASSEKPPRQQEGPHDSPPQQDLLSI

SEQ ID NO: 124043 - protein, 56 aa, Setaria italica
  Transcript Sequence Number=SeqID_58069
  Gene Ontology: Mol. function=inorganic diphosphatase activity; Cellular component=cytoplasm; Biological process=phosphate metabolic process
  Homolog annotation: Hit_ID=B6SZZ9; Match level="QueryCoverage=78%, HitCoverage=21%, E-value=9e-19, Identity=100%"; Hit description =Soluble inorganic pyrophosphatase
KNSLTWVLFLFQVIEIPRGSKVKYELDKKTGLIKVDRVLYSSVVYPHNYGFIPRTL

SEQ ID NO: 124044 - protein, 97 aa, Setaria italica
  misc_feature (62)..(62): Xaa can be any naturally occurring amino acid
  Transcript Sequence Number=SeqID_58070
  Gene Ontology: Mol. function=inorganic diphosphatase activity; Cellular component=cytoplasm; Biological process=phosphate metabolic process
  Homolog annotation: Hit_ID=Q8LA73; Match level="QueryCoverage=97%, HitCoverage=43%, E-value=3e-43, Identity=87%"; Hit description =Inorganic pyrophosphatase-like protein
  Pfam annotation: Domain name=Pyrophosphatase; Domain location=1-92; Score=-30.9; E_value=1.9e-05; Accession=PF00719.11; Description =Inorganic pyrophosphatase
TGCFLRAKAIGLMPMIDQGEADDKIIAVCADDPEYKHYNDIGEELPPHRLAEIRRFFEDYKXNENKEVAVNDFLPASAAYEAIQHSMDLYATYIVEA

SEQ ID NO: 124045 - protein, 82 aa, Setaria italica
  Transcript Sequence Number=SeqID_58071
CYFVDEKLRYCYLMKHKYCYFVDDLYTASNGPSIKSPGESVVVEAGNTRVAKYSFLASVPIYVVLHWYRDIQSQPMNYITTG

SEQ ID NO: 124046 - protein, 45 aa, Setaria italica
  Transcript Sequence Number=SeqID_58072
  Gene Ontology: Mol. function=inorganic diphosphatase activity; Cellular component=cytoplasm; Biological process=phosphate metabolic process
  Homolog annotation: Hit_ID=Q8LA73; Match level="QueryCoverage=88%, HitCoverage=18%, E-value=1e-12, Identity=85%"; Hit description =Inorganic pyrophosphatase-like protein
LGPTDKKNENKEVAVNDFLPASAAYEAIQHSMDLYATYIVEGLRR

SEQ ID NO: 124047 - protein, 69 aa, Setaria italica
  Transcript Sequence Number=SeqID_58073
  Homolog annotation: Hit_ID=B3CK95; Match level="QueryCoverage=84%, HitCoverage=36%, E-value=3e-14, Identity=63%"; Hit description=ROP interacting CRIB motif protein
  Pfam annotation: Domain name=PBD; Domain location=27-68; Score=32.9; E_value=1.3e-06; Accession=PF00786.20; Description=P21-Rho-binding domain
MAFKAKGFFKGIKVISRMFAAKEHEMEIGYPTDVKHVAHIGWDSAAGNASPSWMNNIMAAPDISSLGNF

SEQ ID NO: 124048 - protein, 103 aa, Setaria italica
  misc_feature (66)..(66): Xaa can be any naturally occurring amino acid
  misc_feature (90)..(90): Xaa can be any naturally occurring amino acid
  Transcript Sequence Number=SeqID_58074
  Homolog annotation: Hit_ID=Q646W9; Match level="QueryCoverage=55%, HitCoverage=42%, E-value=1e-09, Identity=57%"; Hit description=Rwp34 (Fragment)
VLDWGRHSSLLVFKEKASRIHELEATSIENTNLLLLQSELDQLYQEKMDAEIRCTIQTRAYQASVXLPEDQMALYEAQKSLSEDYKQLRXKLRHTETSSLTVV

SEQ ID NO: 124049 - protein, 80 aa, Setaria italica
  Transcript Sequence Number=SeqID_58075
  Homolog annotation: Hit_ID=Q646W9; Match level="QueryCoverage=95%, HitCoverage=57%, E-value=8e-22, Identity=64%"; Hit description=Rwp34 (Fragment)
YTKRKSTLSEDYKQLALKLRHTENRATVLEEMAEKLQVQCKELSNCSEVLQLQSTASRVSLFCFVQFILLCIAIGTYLMR

SEQ ID NO: 124050 - protein, 45 aa, Setaria italica
  Transcript Sequence Number=SeqID_58076
  Pfam annotation: Domain name=BRCA2; Domain location=1-32; Score=25.1; E_value=0.00029; Accession=PF00634.10; Description=BRCA2 repeat
QLPIFQTGLGRSVAVKQSSIKKARAVLEDGDVKRSGNGDTNVCAT

SEQ ID NO: 124051 - protein, 90 aa, Setaria italica
  Transcript Sequence Number=SeqID_58077
TRAQLKRTRAVLEDGDVKRSGNGDTNVCATSFQFETPTSVLVSSSLIMNDRTVTPKENTSVQEKCYKDDGHLPLFQTGSGRSVTVSKSSI

SEQ ID NO: 124052 - protein, 80 aa, Setaria italica
  misc_feature (18)..(18): Xaa can be any naturally occurring amino acid
  misc_feature (22)..(22): Xaa can be any naturally occurring amino acid
  Transcript Sequence Number=SeqID_58078
  Gene Ontology: Mol. function=translation initiation factor activity; Cellular component=nucleolus; Biological process=mature ribosome assembly
  Homolog annotation: Hit_ID=B6SS23; Match level="QueryCoverage=98%, HitCoverage=31%, E-value=2e-36, Identity=91%"; Hit description =Eukaryotic translation initiation factor 6
  Pfam annotation: Domain name=eIF-6; Domain location=1-80; Score= -27.1; E_value=3.9e-05; Accession=PF01912.10; Description=eIF-6 family
SSIAGTRIVGRLCVGNKXGLLXPHTATDQEIQHLRNSLPDEVVVKCVDERLSALGNCIACNDYVALTHPDLDKETEEVIY

SEQ ID NO: 124053 - protein, 68 aa, Setaria italica
  Transcript Sequence Number=SeqID_58079
  Gene Ontology: Mol. function=translation initiation factor activity; Cellular component=nucleolus; Biological process=mature ribosome assembly
  Homolog annotation: Hit_ID=B6SS23; Match level="QueryCoverage=67%, HitCoverage=18%, E-value=1e-18, Identity=95%"; Hit description =Eukaryotic translation initiation factor 6
HADICFLVFAEIQHLRNSLPDEVVVKCVDERLSALGNCIACNDYVALTHPDLDKATPLSVSLGVNFSL

SEQ ID NO: 124054 - protein, 81 aa, Setaria italica
  misc_feature (23)..(23): Xaa can be any naturally occurring amino acid
  Transcript Sequence Number=SeqID_58080
MFSILIPCSHQVGDLLNLMSSFXFAIHMLRTEHISRNMKKENFLTLVGCEVFVVAIISAATYILKCFIWNVQHWNFKSWPP

SEQ ID NO: 124055 - protein, 63 aa, Setaria italica
  Transcript Sequence Number=SeqID_58081
  Gene Ontology: Mol. function=catalytic activity; Cellular component =cytoplasm; Biological process=metabolic process
  Homolog annotation: Hit_ID=B4FYM0; Match level="QueryCoverage=98%, HitCoverage=14%, E-value=2e-24, Identity=88%"; Hit description =Acetyl-CoA acetyltransferase, cytosolic 2
  Pfam annotation: Domain name=Thiolase_C; Domain location=2-63; Score =13.2; E_value=1.4e-07; Accession=PF02803.10; Description=Thiolase, C- terminal domain
RTAPALSIPKAISSAGLQTSQIDYYEINEAFAVVALANQRLLGIPSEKLNLSGGAVSLGHPIG

SEQ ID NO: 124056 - protein, 56 aa, Setaria italica
  Transcript Sequence Number=SeqID_58082
  Gene Ontology: Mol. function=transporter activity; Cellular component= mitochondrial inner membrane; Biological process=transport
  Homolog annotation: Hit_ID=B6TNU2; Match level="QueryCoverage=75%, HitCoverage=11%, E-value=1e-15, Identity=95%"; Hit description =Mitochondrial carrier protein CGI-69
EEYSDHNCPKLRPYAPLISGSIARSLACITCSPIELARTRMQVSILNFYARLCICI

SEQ ID NO: 124057 - protein, 84 aa, Setaria italica
  misc_feature (9)..(9): Xaa can be any naturally occurring amino acid
  Transcript Sequence Number=SeqID_58083
  Gene Ontology: Mol. function=transporter activity; Cellular component= mitochondrial inner membrane; Biological process=transport
  Homolog annotation: Hit_ID=B6TNU2; Match level="QueryCoverage=100%, HitCoverage=23%, E-value=2e-38, Identity=90%"; Hit description =Mitochondrial carrier protein CGI-69
  Pfam annotation: Domain name=Mito_carr; Domain location=4-84; Score= -15.3; E_value=0.086; Accession=PF00153.19; Description=Mitochondrial carrier protein
PYAPLISGXIARSLACITCSPIELARTRMQAFKESNVGGKPPGMWKTLLGVLSSRQSISSPENFRGYHLLWTGLGAQLARDVPF

SEQ ID NO: 124058 - protein, 116 aa, Setaria italica
  misc_feature (35)..(35): Xaa can be any naturally occurring amino acid
  Transcript Sequence Number=SeqID_58084
  Gene Ontology: Mol. function=peptidase activity; Cellular component =membrane
  Homolog annotation: Hit_ID=B6T405; Match level="QueryCoverage=73%, HitCoverage=24%, E-value=3e-36, Identity=89%"; Hit description=CAAX amino terminal protease family protein
ATQIAKRLTFSFCTVLCSSVTVVVLGVIFGITNTXFRPFPDDVFRYDIKEPFKLKNGWLLWAGVGLFGAIISIGLTGAAMTYLNGEPPERETDSLVLLLPLIGSSTTSTAFLVGIT

SEQ ID NO: 124059 - protein, 52 aa, Setaria italica
  Transcript Sequence Number=SeqID_58085
  Homolog annotation: Hit_ID=B6T405; Match level="QueryCoverage=100%, HitCoverage=14%, E-value=8e-21, Identity=80%"; Hit description=CAAX amino terminal protease family protein
GGGFPCFSYNANNETPPPSDKSSDNWRILQRWDVPWEWQTVVLSMVGCGVRY

SEQ ID NO: 124060 - protein, 82 aa, Setaria italica
  misc_feature (22)..(22): Xaa can be any naturally occurring amino acid
  misc_feature (64)..(64): Xaa can be any naturally occurring amino acid
  Transcript Sequence Number=SeqID_58086
  Gene Ontology: Mol. function=peptidase activity; Cellular component =membrane
  Homolog annotation: Hit_ID=Q6Z539; Match level="QueryCoverage=100%, HitCoverage=25%, E-value=6e-11, Identity=43%"; Hit description=CAAX amino terminal protease family-like protein
RWDVPWEWQTVVLSMVGCGVSXVTVVVLGVIFGITNTFRPFPDDVFRYDIKEPFKLKNGWLLWXGVGLFGAIISIGLTGAAM

SEQ ID NO: 124061 - protein, 121 aa, Setaria italica
  misc_feature (113)..(113): Xaa can be any naturally occurring amino acid
  Transcript Sequence Number=SeqID_58087
  Gene Ontology: Mol. function=pyridoxal phosphate binding; Cellular component=glycerol-3-phosphate dehydrogenase complex; Biological process=cysteine biosynthetic process from serine
  Homolog annotation: Hit_ID=B6TEX7; Match level="QueryCoverage=93%, HitCoverage=33%, E-value=8e-46, Identity=83%"; Hit description =Cysteine synthase
  Pfam annotation: Domain name=TFIIB; Domain location=38-121; Score= -6.6; E_value=0.095; Accession=PF00382.11; Description=Transcription factor TFIIB repeat
PLVLILSILFCVEPAESPVVSGGEPGKHKIQGIGPGFIPEVLDTSVIDESVTVTTEEAMLTARRLAKEEGLLVGISSGANMAACLKVASREENKGKMIAHVPRRGERYMNSDXAAVREECI

SEQ ID NO: 124062 - protein, 62 aa, Setaria italica
  Transcript Sequence Number=SeqID_58088
PRPSPTGPPPPCRPCSDPGRPCPCSVQGGARPAFWSLEGHGLLLQGVRPASGRVWAREHRAG

SEQ ID NO: 124063 - protein, 120 aa, Setaria italica
  misc_feature (1)..(38): Xaa can be any naturally occurring amino acid
  misc_feature (67)..(67): Xaa can be any naturally occurring amino acid
  Transcript Sequence Number=SeqID_58089
XXXXXXXXXXXXXXXXXXXXXXXXXXXXXXXXXXXXXXLKLCFICVLLCDEYFTCIDVILVSKLPIXVFYHHILMQTSTPVILSCAWERRDFSPSAQDKNNTRRSTSVYDLANFQHTSLS

SEQ ID NO: 124064 - protein, 75 aa, Setaria italica
  Transcript Sequence Number=SeqID_58090
  Subcellular localization annotation: CTP_CleavageSite=34; ConfidenceScore=5.02e-01
PPLPSGRGGSFGSGVSWLIYSTLRVPRIYSTRCVGSANPKGSSIQLYCYFDPDVTDNLLASFEQLPEARLQLVGL

SEQ ID NO: 124065 - protein, 42 aa, Setaria italica
  Transcript Sequence Number=SeqID_58091
VRYTLQRGVGHDHRGAYCRHIIALPVAILLQEVAQRKLISYP

SEQ ID NO: 124066 - protein, 32 aa, Setaria italica
  Transcript Sequence Number=SeqID_58092
  Pfam annotation: Domain name=DUF1639; Domain location=1-27; Score =29.1; E_value=1.8e-05; Accession=PF07797.6; Description=Protein of unknown function (DUF1639)
KRPRVVQRQLDSLFPGLWLTEITADAYKVPDE

SEQ ID NO: 124067 - protein, 54 aa, Setaria italica
  Transcript Sequence Number=SeqID_58093
TYKNTTKEAGEWTSSGFHPYLPSETYLTCRYLNADNALTRFNWRIDSLMEFTLC

SEQ ID NO: 124068 - protein, 83 aa, Setaria italica
  Transcript Sequence Number=SeqID_58094
  Gene Ontology: Mol. function=transcription regulator activity; Cellular component=nucleus; Biological process=transcription
LLAFSASWYRSWSLLFATQPTSIQLSEFFDEMDEDGNLRHNSDASLGNKRGNNGGRPANYSAIAMQEPPRRSPGAVEKVQFRR

SEQ ID NO: 124069 - protein, 49 aa, Setaria italica
  Transcript Sequence Number=SeqID_58095
LVVLSKSFGKLRGEIMVEGLQTIQQLQCKNLLDVLLELLKKFNSGGQNR

SEQ ID NO: 124070 - protein, 72 aa, Setaria italica
  Transcript Sequence Number=SeqID_58096
  Gene Ontology: Mol. function=citrate transmembrane transporter activity; Cellular component=integral to membrane; Biological process=citrate transport
  Homolog annotation: Hit_ID=Q1RU51; Match level="QueryCoverage=90%, HitCoverage=11%, E-value=3e-22, Identity=76%"; Hit description =Transporter, putative
VTRSWLLLAWVSTVAGNLSLLGSAANLIVCEQARRAPRNAHDLTFWSHVVFGVPSTLVVTAIGIPLIGKISV

SEQ ID NO: 124071 - protein, 76 aa, Setaria italica
  Transcript Sequence Number=SeqID_58097
SLGYQSTIRVLGCAWYLGQPSLASPARARLALPAQASQKSLSLISKQKACHCRPQEELAQKPNASFLAYLGKARSG

SEQ ID NO: 124072 - protein, 78 aa, Setaria italica
  Transcript Sequence Number=SeqID_58098
  Gene Ontology: Mol. function=sucrose transmembrane transporter activity; Cellular component=integral to plasma membrane; Biological process=sucrose transport
  Homolog annotation: Hit_ID=B6T7Q1; Match level="QueryCoverage=47%, HitCoverage=6%, E-value=5e-11, Identity=89%"; Hit description =Sucrose transporter BoSUT1
FWSNRFVCLQVLFSVPWAVASEVASEEGGGQGLTIGVLNIAIVLPQVNFFLTIDLSSSIIASFEHNTKLLIPCCSSFS

SEQ ID NO: 124073 - protein, 91 aa, Setaria italica
  misc_feature (51)..(51): Xaa can be any naturally occurring amino acid
  Transcript Sequence Number=SeqID_58099
  Gene Ontology: Mol. function=indole-3-glycerol-phosphate synthase activity; Biological process=tryptophan metabolic process
  Homolog annotation: Hit_ID=B6UGU8; Match level="QueryCoverage=72%, HitCoverage=18%, E-value=6e-13, Identity=60%"; Hit description =Indole-3-glycerol phosphate synthase
AVPWDVLEQVVWDKEVEVSQRKARAPLHRVAESAQRAPLPRDIASAAATEXLPALVVEVKKASPTRDSGTTSTRLVVLRGRDHASLREERR

SEQ ID NO: 124074 - protein, 55 aa, Setaria italica
  Transcript Sequence Number=SeqID_58100
  Homolog annotation: Hit_ID=B6UGU8; Match level="QueryCoverage=100%, HitCoverage=13%, E-value=3e-09, Identity=60%"; Hit description =Indole-3-glycerol phosphate synthase
APPPRDFAAALGAARRRNGGLPALVAEVKKASPTRGLLRDHFNPVEIAQAYEKNG

SEQ ID NO: 124075 - protein, 67 aa, Setaria italica
  Transcript Sequence Number=SeqID_58101
REGEGRRHPTVSEPDAGAGFHGVDGVEGALLPDLAHGREAYHSPGVRTPARRRPRLGFRSPASSSLS

SEQ ID NO: 124076 - protein, 65 aa, Setaria italica
  misc_feature (25)..(25): Xaa can be any naturally occurring amino acid
  Transcript Sequence Number=SeqID_58102
  Homolog annotation: Hit_ID=B9SEH0; Match level="QueryCoverage=100%, HitCoverage=9%, E-value=3e-14, Identity=66%"; Hit description =Protein binding protein, putative
ARSAARRSPYTGRVISLTSMSEIRXEGTLYTINTVEPSSSIGLRNVRSFGTEDRKKDGQQIPASN

SEQ ID NO: 124077 - protein, 128 aa, Setaria italica
  misc_feature (47)..(47): Xaa can be any naturally occurring amino acid
  Transcript Sequence Number=SeqID_58103
  Gene Ontology: Mol. function=ATP-dependent helicase activity; Cellular component=intracellular
  Homolog annotation: Hit_ID=Q5ZEC6; Match level="QueryCoverage=96%, HitCoverage=11%, E-value=2e-65, Identity=97%"; Hit description =Putative DEAD/H box polypeptide 36 protein
  Pfam annotation: Domain name=Helicase_C; Domain location=45-128; Score=6.1; E_value=0.014; Accession=PF00271.23; Description=Helicase conserved C-terminal domain
IENVLCHICQKERSGAVLVFMTGWDDINALKEQLQANPLLGDPSKVXLLLACHGSMASSEQKLIFDKPEPGVRKIVLATNLAETSITINDVVFVVDCGKAKETSYDALNNTPCLLPTWISKASARQIC

SEQ ID NO: 124078 - protein, 69 aa, Setaria italica
  Transcript Sequence Number=SeqID_58104
  Gene Ontology: Mol. function=ATP-dependent helicase activity; Cellular component=intracellular
  Homolog annotation: Hit_ID=B9EZ83; Match level="QueryCoverage=100%, HitCoverage=4%, E-value=7e-30, Identity=88%"; Hit description =Fructose-bisphosphate aldolase
STYLSLKNELENLIHCKLQNPRMDIQTSEELLSAIRLLVSEDPCSGRFVYGRQEQRSKKAKTMLSSSSM

SEQ ID NO: 124079 - protein, 108 aa, Setaria italica
  misc_feature (60)..(60): Xaa can be any naturally occurring amino acid
  Transcript Sequence Number=SeqID_58105
  Gene Ontology: Mol. function=enzyme inhibitor activity
  Homolog annotation: Hit_ID=B6SV90; Match level="QueryCoverage=75%, HitCoverage=14%, E-value=2e-39, Identity=91%"; Hit description=PAPA -1-like conserved region family protein
  Pfam annotation: Domain name=zf-HIT; Domain location=58-89; Score =52.0; E_value=2.3e-12; Accession=PF04438.8; Description=HIT zinc finger
MNSSFAFPLVQEKQARLEEYRKNCIQTVMGPTGTVITFPESMGLPSIFNSKPVSYPPPRXKCAGPNCTNPYKYRDSKTRVPLCSLACYKAVQGRPVQGMKLPKECCCS

SEQ ID NO: 124080 - protein, 87 aa, Setaria italica
  Transcript Sequence Number=SeqID_58106
  Subcellular localization annotation: CTP_CleavageSite=49; ConfidenceScore=5.29e-01
LLPTSGRDGASSQNSSAIPHLHTPASSLDLSSAAARQYERRWIWRGGCRAAAASSTSPSSSGDGTVAAARKGGRGRIPGQLKAADAG

SEQ ID NO: 124081 - protein, 56 aa, Setaria italica
  Transcript Sequence Number=SeqID_58107
  Subcellular localization annotation: CTP_CleavageSite=23; ConfidenceScore=5.59e-01
YQNYRQHLFKHTSSHQPKPSTVGASSNNVLLVIVKTRSITRNSRSSCLGPLFVYCS

SEQ ID NO: 124082 - protein, 89 aa, Setaria italica
  Transcript Sequence Number=SeqID_58108
  Gene Ontology: Mol. function=protein serine/threonine kinase activity; Biological process=protein amino acid phosphorylation
  Homolog annotation: Hit_ID=P0C5D6; Match level="QueryCoverage=94%, HitCoverage=25%, E-value=5e-38, Identity=88%"; Hit description =Serine/threonine-protein kinase SAPK3
PFEDPEDPKNFRKTISRILGVQYSIPDYVRVSSDCRRLLSQIFVSDPSKRITIPEIKQHPWFLKNLPREISEREKANYKDKEAVRSPVV

SEQ ID NO: 124083 - protein, 32 aa, Setaria italica
  Transcript Sequence Number=SeqID_58109
ACYRVQLDEDLFVCTWLISEAKNLRACRTDTT

SEQ ID NO: 124084 - protein, 81 aa, Setaria italica
  Transcript Sequence Number=SeqID_58110
  Gene Ontology: Mol. function=nucleoside-triphosphatase activity; Cellular component=membrane; Biological process=transport
  Homolog annotation: Hit_ID=Q8GU83; Match level="QueryCoverage=79%, HitCoverage=4%, E-value=2e-26, Identity=79%"; Hit description=PDR -like ABC transporter
ASCWRQERTWKVVELYSNFFESCGFKCPRRKGAADFLQEVLSKKDQEQFWSFGDETYNFVTVDQFCERFKACHVGQNLAVE

SEQ ID NO: 124085 - protein, 58 aa, Setaria italica
  Transcript Sequence Number=SeqID_58111
NHAVRFEWGTSVHLNQITLFQLKWSSIIASAANYISLQVKDSVYADENFSVSVNRSAY

SEQ ID NO: 124086 - protein, 94 aa, Setaria italica
  misc_feature (4)..(4): Xaa can be any naturally occurring amino acid
  misc_feature (12)..(12): Xaa can be any naturally occurring amino acid
  misc_feature (15)..(15): Xaa can be any naturally occurring amino acid
  misc_feature (31)..(31): Xaa can be any naturally occurring amino acid
  misc_feature (49)..(49): Xaa can be any naturally occurring amino acid
  Transcript Sequence Number=SeqID_58112
  Gene Ontology: Mol. function=metal ion binding
AILXLGFGEVIXGIXGNLRRATSQSIDITSXISSLSRAWVAGEILCTWXMKGGSALKTFLPSLVQYMKEESRLEVGIVPLLLDTLLGGALIVYC

SEQ ID NO: 124087 - protein, 39 aa, Setaria italica
  Transcript Sequence Number=SeqID_58113
  Gene Ontology: Mol. function=hydrolase activity
HTIQTVGINAVCGAQAVRVDVGLSRGGCGNGLPEVLDIC

SEQ ID NO: 124088 - protein, 50 aa, Setaria italica
  Transcript Sequence Number=SeqID_58114
TVLSLIILLLSNLASNVPTGELINKLQLFNYIITHCLPYRKLNDVCRLSK

SEQ ID NO: 124089 - protein, 121 aa, Setaria italica
  misc_feature (71)..(71): Xaa can be any naturally occurring amino acid
  Transcript Sequence Number=SeqID_58115
  Gene Ontology: Mol. function=hydrolase activity
  Homolog annotation: Hit_ID=Q9SR79; Match level="QueryCoverage=91%, HitCoverage=29%, E-value=2e-26, Identity=59%"; Hit description =Probable inactive purple acid phosphatase 16
GTLLVPVVVPNLRSLSKLSSSHTHGDPALLMYFLDSGGGSYTEVISSAQVKWFQSQSQFLNPNGRIPELIXFWHIPSTAYVKVAPEAKTEIRKPCVGSINKEDVAPQAAEWGMMDALAKRP

SEQ ID NO: 124090 - protein, 100 aa, Setaria italica
  Transcript Sequence Number=SeqID_58116
  Gene Ontology: Mol. function=hydrolase activity
  Homolog annotation: Hit_ID=Q9SR79; Match level="QueryCoverage=98%, HitCoverage=27%, E-value=3e-27, Identity=64%"; Hit description =Probable inactive purple acid phosphatase 16
SCRGTPRIDLMTTEIGNNRLSYSSNGPKDLWPGVSNYVLQVLSHTHGDPALLMYFLDSGGGSYTEVISSAQVKWFQSQSQFLNPNGRIPELIFWHIPSTA

SEQ ID NO: 124091 - protein, 115 aa, Setaria italica
  Transcript Sequence Number=SeqID_58117
  Subcellular localization annotation: CTP_CleavageSite=60; ConfidenceScore=5.10e-01
LDGAGRAPGPYKLSLRPLALLTLTGKKHGSDRSSYRKLNARTLPCRGEGRSLLDRSNSSSASIDRQLALVDRWASRSGASDSEEGACRATEITASKIPQVSSYLTVCSRNYDGWV

SEQ ID NO: 124092 - protein, 86 aa, Setaria italica
  Transcript Sequence Number=SeqID_58118
  Subcellular localization annotation: CTP_CleavageSite=57; ConfidenceScore=5.02e-01
FSCSSFQLLLVLTFSSTSCLLRPLLDSDPSIVVPTAYSQVARNLRYRDEMGGFAWGRAAAESGRAARQGRSVAVAPCYGGQSPPPT

SEQ ID NO: 124093 - protein, 75 aa, Setaria italica
  Transcript Sequence Number=SeqID_58119
  Gene Ontology: Mol. function=transferase activity
  Homolog annotation: Hit_ID=Q6ZJH9; Match level="QueryCoverage=100%, HitCoverage=34%, E-value=5e-27, Identity=58%"; Hit description =Putative glutathione S-transferase GST 16
EEHAFDPPSRALFCHIAFPLAGNKFTLADLVHLPGTHHVITSERFAYLYDSRKNVQNWWNRISARDSWQQVLRDM

SEQ ID NO: 124094 - protein, 70 aa, Setaria italica
  Transcript Sequence Number=SeqID_58120
  Gene Ontology: Mol. function=electron carrier activity; Biological process=oxidation reduction
  Homolog annotation: Hit_ID=Q8H3L0; Match level="QueryCoverage=84%, HitCoverage=11%, E-value=4e-17, Identity=76%"; Hit description =Putative cytochrome P450 monooxygenase
YIFFNNGFYKKSRYFPSKYRREIKRLNGELEQLLKESIQRSREIADEGRTPSSACGMGLLGMLLAEMEKK

SEQ ID NO: 124095 - protein, 151 aa, Setaria italica
  misc_feature (109)..(109): Xaa can be any naturally occurring amino acid
  misc_feature (146)..(146): Xaa can be any naturally occurring amino acid
  Transcript Sequence Number=SeqID_58121
  Gene Ontology: Mol. function=metal ion binding
  Homolog annotation: Hit_ID=Q94E82; Match level="QueryCoverage=94%, HitCoverage=44%, E-value=1e-44, Identity=65%"; Hit description =Mahogunin, ring finger 1-like protein
YGPLVLPYFVLSSFRTSVRPPVSLLTCSYFFAQEDEELILKATKENLLKPVTTAFDKGHDQEFKQPSGTGIDISQFEESELTKVGEGGIFPVAFKVDVAVSNNQELEGXHEDEASKCLVKFAILAKKDNAEYGVRIVQQMLWVNGXRYVLQ

SEQ ID NO: 124096 - protein, 42 aa, Setaria italica
  Transcript Sequence Number=SeqID_58122
FIIICRTFMPSLITRLILDYSSFEQHNCLFLCARRRRAYLEG

SEQ ID NO: 124097 - protein, 101 aa, Setaria italica
  misc_feature (15)..(15): Xaa can be any naturally occurring amino acid
  misc_feature (83)..(83): Xaa can be any naturally occurring amino acid
  Transcript Sequence Number=SeqID_58123
  Gene Ontology: Mol. function=methyltransferase activity; Cellular component=nucleus; Biological process=nucleobase, nucleoside, nucleotide and nucleic acid metabolic process
  Homolog annotation: Hit_ID=Q94AI4; Match level="QueryCoverage=69%, HitCoverage=8%, E-value=1e-27, Identity=81%"; Hit description =Methyltransferase-like protein 1
  Pfam annotation: Domain name=MT-A70; Domain location=1-99; Score= -6.3; E_value=3e-05; Accession=PF05063.6; Description=MT-A70
RRCEDVCWVKTNKKXNATPSLRHDSHTLLQHSKEHCLMGIKGTVRRSTDGHVIHANIDTDIIIAEEPTDGSTKKPEDMYRIIXSIFALGRRRLELFWRGFY

SEQ ID NO: 124098 - protein, 56 aa, Setaria italica
  misc_feature (49)..(49): Xaa can be any naturally occurring amino acid
  Transcript Sequence Number=SeqID_58124
  Gene Ontology: Mol. function=metal ion binding
  Homolog annotation: Hit_ID=B6SKD0; Match level="QueryCoverage=89%, HitCoverage=9%, E-value=9e-19, Identity=92%"; Hit description=Zinc finger, C3HC4 type family protein
DGLRNSFQVLDEIHRQPASLSLSMVSVQAPESVVNSLPCKSYKKLETPXCSDDMEQ

SEQ ID NO: 124099 - protein, 56 aa, Setaria italica
  Transcript Sequence Number=SeqID_58125
VKRMSLTDAQHTGLETVNDTRLGTVTSSVCCASVKRMSLSSDVIVSCGVISCVKHL

SEQ ID NO: 124100 - protein, 95 aa, Setaria italica
  Transcript Sequence Number=SeqID_58126
  Gene Ontology: Mol. function=protein binding
  Homolog annotation: Hit_ID=B9RTY8; Match level="QueryCoverage=75%, HitCoverage=10%, E-value=2e-13, Identity=52%"; Hit description =Protein binding protein, putative
CFDLQGHKGAPEPEQHVSAQFCAPEDQSTIFIDNNGLDLLLDLLTSMSSKHQQDGSAALYKLANKAAALSPMDAAPPSPTPQVYLGEQYVKVLNY

SEQ ID NO: 124101 - protein, 95 aa, Setaria italica
  misc_feature (50)..(50): Xaa can be any naturally occurring amino acid
  Transcript Sequence Number=SeqID_58127
  Gene Ontology: Mol. function=protein binding
  Homolog annotation: Hit_ID=UPI0000196DE0; Match level="QueryCoverage =77%, HitCoverage=10%, E-value=2e-19, Identity=63%"; Hit description =armadillo/beta-catenin repeat family protein / BTB/POZ domain -containing protein
GNKGLCGKKHWKRLEEKINGRVLKHLLYMMRVGEKTVQRRVALALAHLCXPEDQSTIFIDNNGLDLLLDLLTSMKTRKQYKQRIGYKTRQLVNKN

SEQ ID NO: 124102 - protein, 83 aa, Setaria italica
  Transcript Sequence Number=SeqID_58128
  Gene Ontology: Mol. function=protein binding
  Homolog annotation: Hit_ID=UPI0000196DE0; Match level="QueryCoverage =98%, HitCoverage=17%, E-value=8e-20, Identity=47%"; Hit description =armadillo/beta-catenin repeat family protein / BTB/POZ domain -containing protein
VLLRCASSWRHADRVAAKRATHVLAELAKNEEAAFALGLLAVKPEHQQLIVDAGALPPLVNLLRRQKNTTNSRVVNSVIKRAA

SEQ ID NO: 124103 - protein, 26 aa, Setaria italica
  Transcript Sequence Number=SeqID_58129
VVNCLLIQIITCNSVPRCICTCKLSN

SEQ ID NO: 124104 - protein, 53 aa, Setaria italica
  Transcript Sequence Number=SeqID_58130
  Gene Ontology: Mol. function=serine-type peptidase activity; Cellular component=integral to membrane; Biological process=proteolysis
  Homolog annotation: Hit_ID=B6SNF4; Match level="QueryCoverage=90%, HitCoverage=27%, E-value=2e-17, Identity=83%"; Hit description =Mitochondrial inner membrane protease subunit 1
VPQGHVWVQGDNVYASRDSRHFGAVPYGLITGKIFCRVWPLEGFGSIDSNQSP

SEQ ID NO: 124105 - protein, 60 aa, Setaria italica
  Transcript Sequence Number=SeqID_58131
  Subcellular localization annotation: CTP_CleavageSite=56; ConfidenceScore=5.04e-01
NCLWIHGLFTAHTLHSLRKSIAQGNASSGVHLADTVFKNLGRVSFVRTTITIIVFVADAG

SEQ ID NO: 124106 - protein, 90 aa, Setaria italica
  Transcript Sequence Number=SeqID_58132
GCGSKAASTWKIQDHADKFFHSNLFYSNMIKGTSYENTWSTSYYCQFLQLLRKFHPYEKQKKKRAERDGSVNQTGVPDRRLHGIPFLQQH

SEQ ID NO: 124107 - protein, 101 aa, Setaria italica
  misc_feature (36)..(36): Xaa can be any naturally occurring amino acid
  misc_feature (41)..(41): Xaa can be any naturally occurring amino acid
  Transcript Sequence Number=SeqID_58133
  Gene Ontology: Mol. function=3'-5' exonuclease activity; Cellular component=intracellular; Biological process=nucleobase, nucleoside, nucleotide and nucleic acid metabolic process
  Homolog annotation: Hit_ID=B9RRW2; Match level="QueryCoverage=85%, HitCoverage=25%, E-value=2e-32, Identity=79%"; Hit description=3'-5' exonuclease, putative
RDSEALYFQFGIKLHNVMDTQIAYSLIGEQEGKENXDDYIXFVSLLADPRYCGIPYPEKEEVRTLLRQDPNFWKIRPLSDMMVRAARRHKDTLLNFSIIFS

SEQ ID NO: 124108 - protein, 81 aa, Setaria italica
  Transcript Sequence Number=SeqID_58134
  Gene Ontology: Mol. function=2 iron, 2 sulfur cluster binding; Biological process=abscisic acid biosynthetic process
  Homolog annotation: Hit_ID=Q69R21; Match level="QueryCoverage=81%, HitCoverage=7%, E-value=2e-18, Identity=69%"; Hit description =Probable aldehyde oxidase 4
  Pfam annotation: Domain name=DHODB_Fe-S_bind; Domain location=52-80; Score=-3.7; E_value=0.038; Accession=PF10418.1; Description=Iron -sulfur cluster binding domain of
MASSMSSVVGKATAVERLVFALNGRRYEVAAADVDPSTRLLEFIRTRTPFKGTKLGCGEGGCGACVVLIAKYNPKTNEVTV

SEQ ID NO: 124109 - protein, 95 aa, Setaria italica
  misc_feature (43)..(43): Xaa can be any naturally occurring amino acid
  misc_feature (71)..(71): Xaa can be any naturally occurring amino acid
  Transcript Sequence Number=SeqID_58135
  Gene Ontology: Mol. function=small conjugating protein ligase activity; Biological process=regulation of protein metabolic process
  Homolog annotation: Hit_ID=B2L1Z0; Match level="QueryCoverage=91%, HitCoverage=9%, E-value=4e-23, Identity=58%"; Hit description=PHO2
  Pfam annotation: Domain name=UQ_con; Domain location=22-95; Score= -36.7; E_value=0.018; Accession=PF00179.18; Description=Ubiquitin -conjugating enzyme
TVSHHFVKESGHENVTRGWVKKVQQEWTILQNDLPDGIHARVXEERMDLLRACIVGAAGTPYHDNLFFLDXIFFPPDYPHEPPSVHYHSGVSAEP

SEQ ID NO: 124110 - protein, 45 aa, Setaria italica
  Transcript Sequence Number=SeqID_58136
  Gene Ontology: Mol. function=small conjugating protein ligase activity; Biological process=regulation of protein metabolic process
MQIHDGAKCEMLVRDSEALKPIPPILFEDAPYFYYPGQRVRIVQP

SEQ ID NO: 124111 - protein, 59 aa, Setaria italica
  misc_feature (36)..(36): Xaa can be any naturally occurring amino acid
  misc_feature (59)..(59): Xaa can be any naturally occurring amino acid
  Transcript Sequence Number=SeqID_58137
  Gene Ontology: Mol. function=small conjugating protein ligase activity; Biological process=regulation of protein metabolic process
TIKKPIPPILFEDAPYFYYPGQRVRIVQPSIFESAXWLCGSWRANRDDGVVSHVDVGLX

SEQ ID NO: 124112 - protein, 51 aa, Setaria italica
  Transcript Sequence Number=SeqID_58138
VSTHSLHCRATSSIADSVTACRTNPFYIYCPLECIHPPSLYTTPRRAHLLL

SEQ ID NO: 124113 - protein, 44 aa, Setaria italica
  misc_feature (21)..(21): Xaa can be any naturally occurring amino acid
  Transcript Sequence Number=SeqID_58139
YKIPVVPPTDPSDCGTNLIHXFSRIIHWVAEKRDTILNTNPEMI

SEQ ID NO: 124114 - protein, 137 aa, Setaria italica
  Transcript Sequence Number=SeqID_58140
  Gene Ontology: Mol. function=cysteine-type endopeptidase activity; Cellular component=chloroplast; Biological process=proteolysis
  Homolog annotation: Hit_ID=B4FNB7; Match level="QueryCoverage=98%, HitCoverage=31%, E-value=9e-35, Identity=59%"; Hit description=Latex- abundant protein
DRPIRPTSHHGGDDQDEAYGQSSGDGRIKNRSLPLSTLIEMLKEQTGKEDIDVGSIRMTLFNIFGDDASPKIKKFMKVMLGKFHQGQSGEHGGGGVMGMVGALAQEFLKAKLEGNEEEAFKPALEQEVHSVDEVYAG

SEQ ID NO: 124115 - protein, 37 aa, Setaria italica
  Transcript Sequence Number=SeqID_58141
ARDAALNAIQSPLLDIGIERATGIVWNIRLAFGSTRS

SEQ ID NO: 124116 - protein, 96 aa, Setaria italica
  Transcript Sequence Number=SeqID_58142
  Gene Ontology: Cellular component=membrane; Biological process=proton transport
  Homolog annotation: Hit_ID=B9T1Y7; Match level="QueryCoverage=89%, HitCoverage=10%, E-value=1e-15, Identity=51%"; Hit description =Vacuolar proton atpase, putative
ISVFSLLLHIFSNNILQAGGILASSHNHAASAERELDENIYDREVDEGNAYLLEQGVHQGSSGNSGVRFVSGIILKSKALAFERMLSRATRGNMLF

SEQ ID NO: 124117 - protein, 61 aa, Setaria italica
  Transcript Sequence Number=SeqID_58143
  Subcellular localization annotation: CTP_CleavageSite=36; ConfidenceScore=5.27e-01
IVKQYSKYLSCLSSSIGTRMAKKLSFPFISRRGQIYISMFFVSNYNLHLCWRNCTMNLPST

SEQ ID NO: 124118 - protein, 64 aa, Setaria italica
  Transcript Sequence Number=SeqID_58144
SVSTILSKRGTKRKKMRDRLDSDHQLLKMVYVHLIFVRLANNCRIADVGWMILAPDVKSVPPAK

SEQ ID NO: 124119 - protein, 103 aa, Setaria italica
  misc_feature (12)..(12): Xaa can be any naturally occurring amino acid
  Transcript Sequence Number=SeqID_58145
  Gene Ontology: Cellular component=membrane
  Homolog annotation: Hit_ID=B9S1R2; Match level="QueryCoverage=71%, HitCoverage=18%, E-value=4e-25, Identity=77%"; Hit description=Auxin- induced protein 5NG4, putative
  Subcellular localization annotation: CTP_CleavageSite=15; ConfidenceScore=5.19e-01
LALAVLAPLAFXQHRGSHAKARPPITWRLLVSFFVLGLTGIFANQLLFLLGLSYTNPTYAAAIQPSIPVFTFILAVIMGTETVSLISIEGRRPKYLVGHSSLT

SEQ ID NO: 124120 - protein, 51 aa, Setaria italica
  Transcript Sequence Number=SeqID_58146
MLGVCRDKQDHPFHIIRVLSLTKPANSNLTCYISLVTNPTAPGRAGYSFTR

SEQ ID NO: 124121 - protein, 58 aa, Setaria italica
  Transcript Sequence Number=SeqID_58147
TDASFFPDLLRRAYMLTSHKLLTKELTEYSWIRPHASIPHCNYTIPHTYTRKLRRNLS

SEQ ID NO: 124122 - protein, 59 aa, Setaria italica
  Transcript Sequence Number=SeqID_58148
  Subcellular localization annotation: CTP_CleavageSite=47; ConfidenceScore=5.12e-01
QPYTAAVQLVAGAGDKMNLQCPFYEPKTSSLLTRPAPPFAKSIRSVHCAAISLQRTRSL

SEQ ID NO: 124123 - protein, 95 aa, Setaria italica
  misc_feature (22)..(22): Xaa can be any naturally occurring amino acid
  Transcript Sequence Number=SeqID_58149
  Gene Ontology: Mol. function=ubiquitin-protein ligase activity; Cellular component=ubiquitin ligase complex; Biological process =ubiquitin-dependent protein catabolic process
  Homolog annotation: Hit_ID=A1E0Y2; Match level="QueryCoverage=96%, HitCoverage=12%, E-value=8e-23, Identity=60%"; Hit description=ACRE 276-like protein
  Pfam annotation: Domain name=Arm; Domain location=29-69; Score=18.5; E_value=0.027; Accession=PF00514.15; Description=Armadillobeta -catenin-like repeat
RLIVSVLKNGWIRGQENAAATXFSLSVVHDYKKKIMNEPGAVEELASMLTRGTPRGKKDAVMALFNLSTHPESSGRMLESSAVVALIESLRNEQP

SEQ ID NO: 124124 - protein, 43 aa, Setaria italica
  Transcript Sequence Number=SeqID_58150
  Gene Ontology: Mol. function=ARF GTPase activator activity; Cellular component=cytoplasm; Biological process=regulation of ARF GTPase activity
  Homolog annotation: Hit_ID=Q5W7F2; Match level="QueryCoverage=100%, HitCoverage=5%, E-value=7e-18, Identity=97%"; Hit description=ADP -ribosylation factor GTPase-activating protein AGD3
LSNIEAKKRFEFLEAVSGTMDAHLRYFKQGYELLHQMEPYINQ

SEQ ID NO: 124125 - protein, 55 aa, Setaria italica
  Transcript Sequence Number=SeqID_58151
VVDTHVGVRVGALRTGMVPVRLLCDGGAMAPRGGSGGDVVGPMSKCQVYLFRVRW

SEQ ID NO: 124126 - protein, 47 aa, Setaria italica
  Transcript Sequence Number=SeqID_58152
RNQLLPSCRRNMRIIYGIRSLCAYGISSMASKQLAALVPRMRLQFKL

SEQ ID NO: 124127 - protein, 42 aa, Setaria italica
  misc_feature (37)..(37): Xaa can be any naturally occurring amino acid
  Transcript Sequence Number=SeqID_58153
  Gene Ontology: Mol. function=DNA binding; Cellular component=nucleus
  Homolog annotation: Hit_ID=Q2R2F0; Match level="QueryCoverage=80%, HitCoverage=9%, E-value=7e-11, Identity=78%"; Hit description=AT hook motif family protein, expressed
  Pfam annotation: Domain name=zf-4CXXC_R1; Domain location=3-42; Score= -27.2; E_value=0.0052; Accession=PF10497.1; Description=Zinc-finger domain of monoamine-oxida
LIIYFGLTFCNQCRYGENVLEAKKNPNWMCPVCRGIXNCSIC

SEQ ID NO: 124128 - protein, 45 aa, Setaria italica
  Transcript Sequence Number=SeqID_58154
  Gene Ontology: Mol. function=oxidoreductase activity; Cellular component=chloroplast envelope; Biological process=oxidation reduction
  Homolog annotation: Hit_ID=B6SMW2; Match level="QueryCoverage=100%, HitCoverage=17%, E-value=2e-13, Identity=77%"; Hit description=IN2-2 protein
KVQLATKFGIRLDADGSREIRGDPAYVRASCEGSLKRLGVDCIDL

SEQ ID NO: 124129 - protein, 50 aa, Setaria italica
  misc_feature (43)..(43): Xaa can be any naturally occurring amino acid
  Transcript Sequence Number=SeqID_58155
  Gene Ontology: Mol. function=oxidoreductase activity; Cellular component=chloroplast envelope; Biological process=auxin mediated signaling pathway
  Homolog annotation: Hit_ID=B6TD84; Match level="QueryCoverage=100%, HitCoverage=14%, E-value=4e-16, Identity=86%"; Hit description=Auxin- induced protein PCNT115
MAAAPVTVVRRMKLGSQGLEVSAQGLGCMGMSAFYGPPKPEPXMIELIHH

SEQ ID NO: 124130 - protein, 106 aa, Setaria italica
  Transcript Sequence Number=SeqID_58156
  Gene Ontology: Mol. function=transferase activity, transferring nitrogenous groups; Biological process=cellular amino acid and derivative metabolic process
  Homolog annotation: Hit_ID=Q5Z7R2; Match level="QueryCoverage=100%, HitCoverage=33%, E-value=1e-40, Identity=79%"; Hit description =Putative nicotianamine aminotransferase B
IADTANKLGMLVIADEVYGHLVYGSTPFVPMGVFGETVPLLTLGAISKRWAVPGWRFGWIAICDQKCILKETKVFHSLRSFRMLTGDPATFVLVSLCVNVPHIVFS

SEQ ID NO: 124131 - protein, 44 aa, Setaria italica
  Transcript Sequence Number=SeqID_58157
PLVTLGLLESCHQKEAVFVMDLVLFLAGATCAFFPRETKGCHIQ

SEQ ID NO: 124132 - protein, 45 aa, Setaria italica
  Transcript Sequence Number=SeqID_58158
SPLVTLGLLESCHQKEAVFVMDLVLFLAGATCAFFPRETKGCHIQ

SEQ ID NO: 124133 - protein, 59 aa, Setaria italica
  Transcript Sequence Number=SeqID_58159
NSIDVAIGVLDLTSVQKWLLFLARFLFAELVNNTPFLFEYRSETDTWQQSEAVLAGGGC

SEQ ID NO: 124134 - protein, 77 aa, Setaria italica
  Transcript Sequence Number=SeqID_58160
  Gene Ontology: Mol. function=ATP-dependent helicase activity; Cellular component=vacuole; Biological process=nuclear-transcribed mRNA catabolic process, nonsense-mediated decay
  Homolog annotation: Hit_ID=Q2QZE8; Match level="QueryCoverage=76%, HitCoverage=4%, E-value=3e-23, Identity=89%"; Hit description =Retrotransposon protein, putative, unclassified, expressed
IRKIVDEIPPARQTLMYTATWPKEVTKIAGDLLRDPVQVNIGSIDELVANKSITQLLLVGWFPTLFGYLSFFSFVYF

SEQ ID NO: 124135 - protein, 102 aa, Setaria italica
  Transcript Sequence Number=SeqID_58161
  Gene Ontology: Mol. function=nucleotide binding; Biological process =defense response
RLQDVSGLGHVKHLRIEDGELKSLPDWLGKHGSAPETLAVVGREELLRSLVPGGKDWPAISGIGKVYGYLSDGSPFFTYSKITNELETFGNRKLDVSSVAVH

SEQ ID NO: 124136 - protein, 102 aa, Setaria italica
  Transcript Sequence Number=SeqID_58162
RTNTDPNNGTTTTNQDIGAARNLINTYIWSFCFLLPGELWLSRHRVLRYILGLCRVFVAMWFVFCSFGACELMNGALECSVLVFICLLETDCKSCFVRNCTR

SEQ ID NO: 124137 - protein, 120 aa, Setaria italica
  misc_feature (50)..(50): Xaa can be any naturally occurring amino acid
  misc_feature (67)..(67): Xaa can be any naturally occurring amino acid
  Transcript Sequence Number=SeqID_58163
  Gene Ontology: Mol. function=RNA binding
  Homolog annotation: Hit_ID=Q6Z5M7; Match level="QueryCoverage=70%, HitCoverage=42%, E-value=2e-22, Identity=46%"; Hit description =Putative KH domain protein
MSSGRYMAYSPSPSTTPHSPRIAGLRAPSAAVAEQEKYLAELLAERHKLXPFIPVIPHSVRLLNQEXPAYSWLGGSQGSSSGLIVKKTMKYNFVGRILGPRGNSLKRVEANTDCRVLIRG

SEQ ID NO: 124138 - protein, 131 aa, Setaria italica
  Transcript Sequence Number=SeqID_58164
ALYFNFRPNTLNFGFTTSVGGNQGHKGNNQQKQQQHQQNHQQHQQQQKQGANPGKDCHNNKNNNGGQKDQGKQGGVGSLMQGLKAFKSQHNNKHQLPELYSEDDDMYDDEDDEFDDDYEEELRYLGDKMSQ

SEQ ID NO: 124139 - protein, 49 aa, Setaria italica
  Transcript Sequence Number=SeqID_58165
MLLFSPYTGYYNPYNYYYHPHPGSAGYPASNGDVETMFSDENTKGCVVM

SEQ ID NO: 124140 - protein, 49 aa, Setaria italica
  Transcript Sequence Number=SeqID_58166
CRWRDVKLRAFDNAKHRTYVDLKVLTVKCLTSTSADDCKYHSTVILVKI

SEQ ID NO: 124141 - protein, 53 aa, Setaria italica
  Transcript Sequence Number=SeqID_58167
  Gene Ontology: Mol. function=DNA binding; Biological process=protein modification process
  Homolog annotation: Hit_ID=Q43703; Match level="QueryCoverage=96%, HitCoverage=7%, E-value=1e-14, Identity=84%"; Hit description =Initiator-binding protein
IVQGKRSARKKEAQSPDQMMCAFDLLATVAGKLLDEGEGSLGNMSAGAPALAA

SEQ ID NO: 124142 - protein, 66 aa, Setaria italica
  Transcript Sequence Number=SeqID_58168
  Gene Ontology: Mol. function=DNA binding; Biological process=protein modification process
  Homolog annotation: Hit_ID=Q10NC6; Match level="QueryCoverage=77%, HitCoverage=7%, E-value=5e-19, Identity=90%"; Hit description =Initiator-binding protein, putative, expressed
NKGTKVRKERLGRQQRTKTISPQQRRGEPVPQELLDRVLAAQAYWSQQQAKLQPKTPPLTEARLLT

SEQ ID NO: 124143 - protein, 61 aa, Setaria italica
  Transcript Sequence Number=SeqID_58169
FVNFGFCLIFLRVLNSSDSWSAESMEAGAFAGDAAASLMPAATAGFHKNAPDMYNLLDPMD

SEQ ID NO: 124144 - protein, 46 aa, Setaria italica
  Transcript Sequence Number=SeqID_58170
AATAAMMNNLRGLNSNMMMMHQPQQQPQMMYHSSPQISPALPGWGW

SEQ ID NO: 124145 - protein, 89 aa, Setaria italica
  Transcript Sequence Number=SeqID_58171
  Subcellular localization annotation: CTP_CleavageSite=50; ConfidenceScore=5.37e-01
TGDVVARSLLAVSKAAHKDLQKKFPIVRTMTTQQEKSRRQRKGNRSRRWRSAATAAIPPKIPWSAKCCTGFVPNHLRAWQATGVATGIY

SEQ ID NO: 124146 - protein, 81 aa, Setaria italica
  Transcript Sequence Number=SeqID_58172
  Gene Ontology: Mol. function=protein dimerization activity; Cellular component=nucleus; Biological process=regulation of transcription, DNA-dependent
  Homolog annotation: Hit_ID=Q5IRE7; Match level="QueryCoverage=51%, HitCoverage=11%, E-value=1e-09, Identity=71%"; Hit description=ABRE -binding factor BZ-1
  Subcellular localization annotation: CTP_CleavageSite=6; ConfidenceScore=5.28e-01
TRKQCGASAPNDKTGQPGRLATLSNVRITDTAIKPCVSTGSDFRFSGAQSTEWQAKVRLMWQLEWTINFPFPFPFPFPPSC

SEQ ID NO: 124147 - protein, 77 aa, Setaria italica
  Transcript Sequence Number=SeqID_58173
  Gene Ontology: Mol. function=protein dimerization activity; Cellular component=nucleus; Biological process=regulation of transcription, DNA-dependent
  Homolog annotation: Hit_ID=Q5IRE7; Match level="QueryCoverage=71%, HitCoverage=15%, E-value=4e-19, Identity=90%"; Hit description=ABRE -binding factor BZ-1
  Pfam annotation: Domain name=bZIP_1; Domain location=1-49; Score =37.6; E_value=5.1e-08; Accession=PF00170.13; Description=bZIP transcription factor
SARRSRLRKQAETEELARKVELLTAENASLRSEISKVAESSQKLRMENSSLMEKLADSASEEEQEAAADQQTAAAPP

SEQ ID NO: 124148 - protein, 62 aa, Setaria italica
  Transcript Sequence Number=SeqID_58174
YPLCALPPFCVSQLNTEAVVRTAEEVGFEAVVSELDVADDDVGRVGRLINSFDAMVGVHGAD

SEQ ID NO: 124149 - protein, 61 aa, Setaria italica
  misc_feature (46)..(46): Xaa can be any naturally occurring amino acid
  misc_feature (54)..(54): Xaa can be any naturally occurring amino acid
  Transcript Sequence Number=SeqID_58175
  Gene Ontology: Mol. function=oxidoreductase activity; Biological process=oxidation reduction
  Homolog annotation: Hit_ID=Q2RAP0; Match level="QueryCoverage=88%, HitCoverage=9%, E-value=2e-21, Identity=90%"; Hit description=L -galactono-1,4-lactone dehydrogenase 1, mitochondrial
MKMLVAATYYSFPLPADALHKKAVPFKYAPLPEDLHAVSNWSATHXVHARVLLXPDSLPAL

SEQ ID NO: 124150 - protein, 43 aa, Setaria italica
  Transcript Sequence Number=SeqID_58176
KNIGTHTCCGLITQIFRLPCCSICKCIFTCYSLTKEPDKYSLA

SEQ ID NO: 124151 - protein, 100 aa, Setaria italica
  misc_feature (79)..(79): Xaa can be any naturally occurring amino acid
  Transcript Sequence Number=SeqID_58177
  Gene Ontology: Mol. function=galactonolactone dehydrogenase activity; Biological process=oxidation reduction
  Homolog annotation: Hit_ID=Q2RAP0; Match level="QueryCoverage=90%, HitCoverage=15%, E-value=4e-35, Identity=78%"; Hit description=L -galactono-1,4-lactone dehydrogenase 1, mitochondrial
KKSEGYRMGWSDEILGFDCGGQQWVSENCFPTGTLAKPSTKDLDYIEKLLQLIEKEDIPAPAPIEQRWTARSKSPMSPXSSSEEDVFSWVLNLFLFHRFF

SEQ ID NO: 124152 - protein, 34 aa, Setaria italica
  Transcript Sequence Number=SeqID_58178
  Homolog annotation: Hit_ID=Q2RAP0; Match level="QueryCoverage=91%, HitCoverage=5%, E-value=6e-09, Identity=96%"; Hit description=L -galactono-1,4-lactone dehydrogenase 1, mitochondrial
PVDAYNKARMELDPNKVLSNAKLEKLFPVLEPVK

SEQ ID NO: 124153 - protein, 106 aa, Setaria italica
  misc_feature (5)..(5): Xaa can be any naturally occurring amino acid
  Transcript Sequence Number=SeqID_58179
  Gene Ontology: Mol. function=DNA binding; Biological process =regulation of transcription
  Homolog annotation: Hit_ID=Q84UP8; Match level="QueryCoverage=100%, HitCoverage=30%, E-value=2e-18, Identity=52%"; Hit description=Myb family transcription factor-like protein
SDQAXGFENGSAGEICDDNSLDLHGYGGGGSGRPESAAAAARHGREDWTGFPSESNTGSMHSLKEQMQSKSLEILSDMNSCVSETTSSTSELNLEFTLGRPQNRPN

SEQ ID NO: 124154 - protein, 60 aa, Setaria italica
  Transcript Sequence Number=SeqID_58180
  Gene Ontology: Mol. function=protein serine/threonine kinase activity; Cellular component=integral to membrane; Biological process=protein amino acid phosphorylation
  Homolog annotation: Hit_ID=B6U286; Match level="QueryCoverage=75%, HitCoverage=7%, E-value=2e-12, Identity=80%"; Hit description =Nodulation receptor kinase
EGGFGAVYRGILPHGQEVAVKVRSSSSTQGTREFNNEVQTNSAILALFLPQKKNHTSIKE

SEQ ID NO: 124155 - protein, 85 aa, Setaria italica
  misc_feature (64)..(64): Xaa can be any naturally occurring amino acid
  misc_feature (72)..(72): Xaa can be any naturally occurring amino acid
  Transcript Sequence Number=SeqID_58181
  Gene Ontology: Mol. function=protein serine/threonine kinase activity; Cellular component=integral to membrane; Biological process=protein amino acid phosphorylation
  Homolog annotation: Hit_ID=B6U286; Match level="QueryCoverage=69%, HitCoverage=9%, E-value=2e-25, Identity=94%"; Hit description =Nodulation receptor kinase
MVSCFITLYLLFTCNTLIIIFIFWFEGEASKRKVLDWPTRLSVCIGAARGLVYLHNFAGRCIIXHRDIKSSXNILMDHSMCGKVA

SEQ ID NO: 124156 - protein, 58 aa, Setaria italica
  misc_feature (46)..(46): Xaa can be any naturally occurring amino acid
  Transcript Sequence Number=SeqID_58182
  Gene Ontology: Mol. function=protein dimerization activity; Cellular component=nucleus; Biological process=regulation of transcription, DNA-dependent
  Homolog annotation: Hit_ID=B6T7L6; Match level="QueryCoverage=96%, HitCoverage=21%, E-value=2e-17, Identity=77%"; Hit description=DNA binding protein
YCYCNPGMQGATSSQVLGQGACDTTNIQCMGIAKSGSTKLPVCGGXDAAVCLPNVEKK

SEQ ID NO: 124157 - protein, 50 aa, Setaria italica
  Transcript Sequence Number=SeqID_58183
  Subcellular localization annotation: CTP_CleavageSite=42; ConfidenceScore=5.06e-01
SSPGSAARRTSRLGYSSLRLLALVFPCCRKLCFVSVLLPRLPVMTKPFLD

SEQ ID NO: 124158 - protein, 53 aa, Setaria italica
  Transcript Sequence Number=SeqID_58184
  Gene Ontology: Mol. function=structural constituent of ribosome; Cellular component=intracellular; Biological process=translation
  Homolog annotation: Hit_ID=Q45NI6; Match level="QueryCoverage=71%, HitCoverage=28%, E-value=7e-13, Identity=92%"; Hit description =Ribosomal protein L32
DQHNRSYCAEIAHNVSTRKRKEIVERAAQLDIVVTNKLTRAAICLTYYSSSWL

SEQ ID NO: 124159 - protein, 45 aa, Setaria italica
  Transcript Sequence Number=SeqID_58185
  Gene Ontology: Mol. function=structural constituent of ribosome; Cellular component=intracellular; Biological process=translation
  Homolog annotation: Hit_ID=Q45NI6; Match level="QueryCoverage=84%, HitCoverage=28%, E-value=8e-13, Identity=92%"; Hit description =Ribosomal protein L32
DQHNRSYCAEIAHNVSTRKRKEIVERAAQLDIVVTNKLTRAANLT

SEQ ID NO: 124160 - protein, 88 aa, Setaria italica
  Transcript Sequence Number=SeqID_58186
  Subcellular localization annotation: CTP_CleavageSite=44; ConfidenceScore=5.67e-01
NKLSLPPLFVVSSPPPSSARRPYTWLFFSGGDDWATRAAPGLRRAQRRRRVSTRFVLDCNSQQWMMGTSISQTRTRSCALPSATIRPA

SEQ ID NO: 124161 - protein, 79 aa, Setaria italica
  Transcript Sequence Number=SeqID_58187
  Gene Ontology: Mol. function=structural constituent of ribosome; Cellular component=intracellular; Biological process=translation
  Homolog annotation: Hit_ID=P49211; Match level="QueryCoverage=94%, HitCoverage=56%, E-value=1e-27, Identity=78%"; Hit description=60S ribosomal protein L32-1
  Pfam annotation: Domain name=Ribosomal_L32e; Domain location=18-79; Score=22.9; E_value=1.9e-07; Accession=PF01655.10; Description =Ribosomal protein L32
TSEEMAVPLLTQKIVKKRVKQFKRPHLDRYKCLKPSWRRPKGIDSRVRRKFKGCTLMPNIGYGSDKKTRHYLPNKFKKF

SEQ ID NO: 124162 - protein, 69 aa, Setaria italica
  misc_feature (35)..(35): Xaa can be any naturally occurring amino acid
  Transcript Sequence Number=SeqID_58188
  Gene Ontology: Mol. function=structural constituent of ribosome; Cellular component=intracellular; Biological process=translation
  Homolog annotation: Hit_ID=Q3HVK3; Match level="QueryCoverage=49%, HitCoverage=25%, E-value=2e-10, Identity=88%"; Hit description=Ly200- like protein
  Pfam annotation: Domain name=Ribosomal_L32e; Domain location=3-58; Score=-43.2; E_value=0.046; Accession=PF01655.10; Description =Ribosomal protein L32
MMHNKLLEFVRRKFKGCTLMPNIGYGSDKSTRHYXPNKFKKFVGEVVPGGLVRAVANVRRKFKGCTLMP

SEQ ID NO: 124163 - protein, 62 aa, Setaria italica
  Transcript Sequence Number=SeqID_58189
YFDDILKDTEHHACTHTHTCNPPVHDHSHTHTCVHVHTKIVAASPEAAETAESPSENNASKN

SEQ ID NO: 124164 - protein, 68 aa, Setaria italica
  Transcript Sequence Number=SeqID_58190
VPCNQQLRINIRGWRILLNAKVAWFGATEVEETLCSGAVSSPRSPPSSTSVAPKQGMEDSSERQGSLV

SEQ ID NO: 124165 - protein, 47 aa, Setaria italica
  Transcript Sequence Number=SeqID_58191
CGHVVCDFSTVCPVVHHKQRKEIVERAAQLDIVVTNKLARLRSQEDE

SEQ ID NO: 124166 - protein, 44 aa, Setaria italica
  misc_feature (43)..(43): Xaa can be any naturally occurring amino acid
  Transcript Sequence Number=SeqID_58192
AHRTSSLVCLVSRCSLMRRDHKHHQESFISFQHLASRQLRPYXP

SEQ ID NO: 124167 - protein, 31 aa, Setaria italica
  Transcript Sequence Number=SeqID_58193
FPIFYSECAFSMFIPFSCLIGSIMPRYLQDR

SEQ ID NO: 124168 - protein, 49 aa, Setaria italica
  Transcript Sequence Number=SeqID_58194
KRPRRHLCWDGKNTILVAQHKWRLGRFPWQHLSSVSRSIPPHSLVSIPS

SEQ ID NO: 124169 - protein, 72 aa, Setaria italica
  misc_feature (68)..(68): Xaa can be any naturally occurring amino acid
  Transcript Sequence Number=SeqID_58195
  Gene Ontology: Mol. function=voltage-gated chloride channel activity; Cellular component=integral to membrane; Biological process=chloride transport
  Homolog annotation: Hit_ID=B9ST82; Match level="QueryCoverage=84%, HitCoverage=7%, E-value=2e-15, Identity=67%"; Hit description =Voltage-gated clc-type chloride channel, putative
MENCPKTDNSPSISSCVTRGFQYRGSERGLLTCFPDTDLTTAKNLMEAKGIKQLPVVKRGVGHRTAGXRKPI

SEQ ID NO: 124170 - protein, 149 aa, Setaria italica
  Transcript Sequence Number=SeqID_58196
  Gene Ontology: Mol. function=methyltransferase activity; Cellular component=nucleus; Biological process=tRNA processing
  Homolog annotation: Hit_ID=B9S623; Match level="QueryCoverage=99%, HitCoverage=48%, E-value=3e-44, Identity=55%"; Hit description=tRNA, putative
  Pfam annotation: Domain name=GCD14; Domain location=1-148; Score= -50.8; E_value=5.7e-10; Accession=PF08704.2; Description=tRNA methyltransferase complex GCD14
IDCDQAAKAISLEVNVRDIQGEGFPEEHRAATDAVFLDLPQPWLAIPSVGSMLKQDGILCSFSPCIEQVQRACEAMRSCFTDIRTFEIRTYEVRDGALKSGTADESNMGPPQKRKRSTASGENADHAQKNNSILVRPCSTAKGHTGYLS

SEQ ID NO: 124171 - protein, 69 aa, Setaria italica
  Transcript Sequence Number=SeqID_58197
GSWVSYDGDSLEQTIARSRCHKGRLLYYFPRQLSKQTEEVESVSSWCGWHTDHGSLTGLTCGLFTKDSV

SEQ ID NO: 124172 - protein, 37 aa, Setaria italica
  Transcript Sequence Number=SeqID_58198
AHHCDRYVMQQGVGSYDGDSLEQTIARSRCHKGRLLY

SEQ ID NO: 124173 - protein, 130 aa, Setaria italica
  misc_feature (109)..(109): Xaa can be any naturally occurring amino acid
  Transcript Sequence Number=SeqID_58199
  Gene Ontology: Mol. function=mannosyl-oligosaccharide glucosidase activity; Biological process=oligosaccharide metabolic process
  Homolog annotation: Hit_ID=Q8RZJ2; Match level="QueryCoverage=99%, HitCoverage=14%, E-value=4e-53, Identity=76%"; Hit description =Putative alpha-glucosidase 1
NESGKSITMASHVPSSRGPVLLASGSHDEIGDWELYLRSEDDLEIHRAGFKSMSMHNLSDLVQQAVATNAMQTGNLNLPDMTEDSSNIMTYQVSIKTPAQIDIVFLSGXASKNPKIEERISNLTGPMLSA

SEQ ID NO: 124174 - protein, 74 aa, Setaria italica
  misc_feature (31)..(31): Xaa can be any naturally occurring amino acid
  Transcript Sequence Number=SeqID_58200
  Gene Ontology: Mol. function=mannosyl-oligosaccharide glucosidase activity; Biological process=oligosaccharide metabolic process
  Homolog annotation: Hit_ID=Q8RZJ2; Match level="QueryCoverage=77%, HitCoverage=6%, E-value=6e-26, Identity=92%"; Hit description =Putative alpha-glucosidase 1
TRTKNSSNNLRKLRYKETPLSLIAGLMWIGXKNGQYFLRHVCQDSDELSTYGWTAHNGRDYGHQMLVDHGLLLT

SEQ ID NO: 124175 - protein, 75 aa, Setaria italica
  Transcript Sequence Number=SeqID_58201
  Homolog annotation: Hit_ID=Q94FW8; Match level="QueryCoverage=53%, HitCoverage=12%, E-value=3e-14, Identity=95%"; Hit description=Heme oxygenase 2 (Fragment)
  Subcellular localization annotation: CTP_CleavageSite=16; ConfidenceScore=5.05e-01
MPSMRGSCCTWWTASLSSTPSSGSSPSPPMSPIRDKILDGRELEFCKWDTDAELLLKDAREKLNELSKHWTRKDR

SEQ ID NO: 124176 - protein, 100 aa, Setaria italica
  Transcript Sequence Number=SeqID_58202
  Gene Ontology: Mol. function=binding; Cellular component =intracellular; Biological process=RNA processing
  Homolog annotation: Hit_ID=B9S614; Match level="QueryCoverage=89%, HitCoverage=9%, E-value=6e-34, Identity=71%"; Hit description=XPA -binding protein, putative
CNFALLLLSRLQQAIESGLPDRDVLTMCMKFAELERSLGEIDRSRAIYVHASNYADPNNSDFWKKWNDFEIQHGNEDTFREMLRIKRTVAASRSQTHFIL

SEQ ID NO: 124177 - protein, 108 aa, Setaria italica
  Transcript Sequence Number=SeqID_58203
  Gene Ontology: Mol. function=binding; Cellular component =intracellular; Biological process=RNA processing
  Homolog annotation: Hit_ID=B9S614; Match level="QueryCoverage=81%, HitCoverage=9%, E-value=3e-32, Identity=73%"; Hit description=XPA -binding protein, putative
FVQRYKRSKLERARELFHEAVQQAPPDEKKPLYLQWAKLEEDYGLAKRAMNVYDEAVRAVPNSEKMAMYEIYIARAAELFGVPRTRQISCTLSEHLCLGAQIQIACSY

SEQ ID NO: 124178 - protein, 81 aa, Setaria italica
  Transcript Sequence Number=SeqID_58204
  Homolog annotation: Hit_ID=B6TMF3; Match level="QueryCoverage=56%, HitCoverage=22%, E-value=5e-16, Identity=82%"; Hit description =Wound/stress protein
PSTFRTVYRSRLPTVLVTCNYVEVTSTGPHLGCAQQLFTVEQWLATDAPPYRLYKTVDKCHEKRSAAATAGDDVEAAATAL

SEQ ID NO: 124179 - protein, 136 aa, Setaria italica
  Transcript Sequence Number=SeqID_58205
  Homolog annotation: Hit_ID=B9I2V4; Match level="QueryCoverage=54%, HitCoverage=12%, E-value=3e-14, Identity=53%"; Hit description=PAF1 complex component
EDSHRSPIEDEGQYEKDMQPDDVVADEDMHYESDENRELNTKEKPVGPPLDLVVPFRQPPARPDKVSYCHVMRIRLSYIFDHILLLSFLMRQFHVVHCLMFIDHQSRFEFSCFGACSLIANFYQFYKVICVLPFFM

SEQ ID NO: 124180 - protein, 95 aa, Setaria italica
  Transcript Sequence Number=SeqID_58206
  Homolog annotation: Hit_ID=B9I2V4; Match level="QueryCoverage=100%, HitCoverage=15%, E-value=2e-33, Identity=72%"; Hit description=PAF1 complex component
DMHYESDENRELNTKEKPVGPPLDLVVPFRQPPARPDKMNVIKVSNIMGIDPKPFDPKTYVEEDVFVTDESGTKKRIRLEDNIVRWRTVRNPDGN

SEQ ID NO: 124181 - protein, 64 aa, Setaria italica
  Transcript Sequence Number=SeqID_58207
REKVNRKYTQPARPRRQLSPGFLEDALDEDDEPEYGSRRVPGRRRFEDELEAEALAERRIINAN

SEQ ID NO: 124182 - protein, 83 aa, Setaria italica
  Transcript Sequence Number=SeqID_58208
STSPIRGREDELDEDEYEEDAEEAPLSDEEMEAPKRKRESGGGGHRREELVSEEEEEDDDDSPPRKQQAVQHRRKAVVFDDSD

SEQ ID NO: 124183 - protein, 62 aa, Setaria italica
  Transcript Sequence Number=SeqID_58209
  Subcellular localization annotation: CTP_CleavageSite=36; ConfidenceScore=5.41e-01
GTRREPYSGSSSSSKASSKNRNVPRNTSYPPARPPRRQVDEYSESEREESEYETDGEDIEHS

SEQ ID NO: 124184 - protein, 49 aa, Setaria italica
  Transcript Sequence Number=SeqID_58210
YQYLSGGMNGSIIYEVDRPENTGLSRSIKVYPLESVFQTSTILFFECLI

SEQ ID NO: 124185 - protein, 60 aa, Setaria italica
  Transcript Sequence Number=SeqID_58211
FEFQNEELKSIKYAPYKETRTHEKPFVLNNVFRAAASNALQEVYQQDQQYFKKKYALSEN

SEQ ID NO: 124186 - protein, 123 aa, Setaria italica
  misc_feature (44)..(44): Xaa can be any naturally occurring amino acid
  misc_feature (67)..(67): Xaa can be any naturally occurring amino acid
  Transcript Sequence Number=SeqID_58212
  Gene Ontology: Mol. function=peroxidase activity; Biological process =response to oxidative stress
  Homolog annotation: Hit_ID=B9RP42; Match level="QueryCoverage=98%, HitCoverage=29%, E-value=2e-27, Identity=51%"; Hit description=L -ascorbate peroxidase 1, cytosolic, putative
TNSRKMVALSGAHTIGGKGFGSPIVFDNSYFKVLLEKKPQTSSXDNLSIEIHLKFKVIKTYCVVFVXAGMEAMVGLRTDWALTEDEECLRWIRIYAEDQARFFDDFRDTYIKLVDSGATWRAA

SEQ ID NO: 124187 - protein, 32 aa, Setaria italica
  Transcript Sequence Number=SeqID_58213
RCWGEYRLDVPTRVPFFFIIKLLSTWLHYLQA

SEQ ID NO: 124188 - protein, 126 aa, Setaria italica
  misc_feature (52)..(52): Xaa can be any naturally occurring amino acid
  Transcript Sequence Number=SeqID_58214
  Gene Ontology: Mol. function=nucleic acid binding; Cellular component= mitochondrion; Biological process=translation
  Homolog annotation: Hit_ID=B6SIF0; Match level="QueryCoverage=88%, HitCoverage=71%, E-value=2e-42, Identity=72%"; Hit description =Glycine-rich RNA-binding protein 2
  Pfam annotation: Domain name=RRM_1; Domain location=50-120; Score =107.1; E_value=5.9e-29; Accession=PF00076.14; Description=RNA recognition motif. (a.k.a. RRM, RBD, o
  Subcellular localization annotation: CTP_CleavageSite=41; ConfidenceScore=5.52e-01
PRPIPSSGFSVQWRPHKLGSLLRHSALTSGAPASSAPALFNAARLMSTKLFXGGLSWGTDDQTLRQAFSTFGEVTEARIITDRETGRSRGFGFVNFSNSDEAKEAVSSMDGQELDGRSVRVKLTTK

SEQ ID NO: 124189 - protein, 48 aa, Setaria italica
  Transcript Sequence Number=SeqID_58215
ILAKKGVIVLPDIYANSGGVIVSYFEWVQVIACTYFAISLHICFLVLI

SEQ ID NO: 124190 - protein, 61 aa, Setaria italica
  misc_feature (8)..(8): Xaa can be any naturally occurring amino acid
  misc_feature (11)..(11): Xaa can be any naturally occurring amino acid
  Transcript Sequence Number=SeqID_58216
  Gene Ontology: Mol. function=oxidoreductase activity; Cellular component=mitochondrion; Biological process=amino acid metabolic process
  Homolog annotation: Hit_ID=P52596; Match level="QueryCoverage=95%, HitCoverage=14%, E-value=3e-26, Identity=94%"; Hit description =Glutamate dehydrogenase
  Pfam annotation: Domain name=ELFV_dehydrog_N; Domain location=1-46; Score=-53.1; E_value=0.0066; Accession=PF02812.10; Description =GluLeuPheVal dehydrogenase, dimeri
ELERLTRXFTXKIHDLIGTHTDVPAPDMGTNAQTMAWMLDEYSKFHGHSPAVVTGKPIVSE

SEQ ID NO: 124191 - protein, 50 aa, Setaria italica
  Transcript Sequence Number=SeqID_58217
  Gene Ontology: Mol. function=oxidoreductase activity; Cellular component=mitochondrial matrix; Biological process=amino acid metabolic process
  Homolog annotation: Hit_ID=Q5F2M8; Match level="QueryCoverage=100%, HitCoverage=12%, E-value=1e-17, Identity=82%"; Hit description =Glutamate dehydrogenase 2
WDEEKVNNELEKYMSSAFQHLKAMCKSLDCDLRMGAFTLGVNRVARATLL

SEQ ID NO: 124192 - protein, 142 aa, Setaria italica
  misc_feature (32)..(32): Xaa can be any naturally occurring amino acid
  Transcript Sequence Number=SeqID_58218
TSIWTTLFFYCRFDHIMKPDNLTDSKNHKIDXVVSCDSFTENQLLLTEMLLKDPYLLETAKAITGFHAPVSAIHVNTGKWLDKGNEVLSDVGREVIRRKGKRTEAMVDVSTTRTANLKLQTLSDLIRELDGDIQSLNIPRKL

SEQ ID NO: 124193 - protein, 62 aa, Setaria italica
  Transcript Sequence Number=SeqID_58219
KHTHSDANSVWDFGWNRLRDLPIEKNEVVKDLEKNILGGIITDVARELIDVSLRHGCCACEA

SEQ ID NO: 124194 - protein, 52 aa, Setaria italica
  Transcript Sequence Number=SeqID_58220
LLVEVLRSIQGECPMEKDGDKHKDGPFSPTTVHAPWDSRARRTETNTRTGPS

SEQ ID NO: 124195 - protein, 66 aa, Setaria italica
  Transcript Sequence Number=SeqID_58221
  Subcellular localization annotation: CTP_CleavageSite=28; ConfidenceScore=5.26e-01
DGGCSKTLADSSSLGSKKTPLKVIAGASAAAAGLAVLGAGAFLFIMRKRRKNNVINSSSKLLKSAA

SEQ ID NO: 124196 - protein, 42 aa, Setaria italica
  Transcript Sequence Number=SeqID_58222
GGGGPDTEVQADFFPMVRQYRSGRVERFMNMHPLPAAYDDSW

SEQ ID NO: 124197 - protein, 76 aa, Setaria italica
  Transcript Sequence Number=SeqID_58223
EPVPKYVTTGGRMQIEPYYGGGARPDFRSYSYSAGGGGGMGMSSYSYQYEYGGGAAGAAADGDLKRSKSSKRRWLA

SEQ ID NO: 124198 - protein, 85 aa, Setaria italica
  Transcript Sequence Number=SeqID_58224
  Gene Ontology: Mol. function=transferase activity
  Homolog annotation: Hit_ID=B6T7B6; Match level="QueryCoverage=85%, HitCoverage=22%, E-value=9e-32, Identity=86%"; Hit description =Glutathione S-transferase, C-terminal-like
MLLNSVLSIRIISELVYDAINNGVYKCGFAKQQGPYDEAVTRLYEALDKCEEILGKQPYICGNQLTEADIRLFVTLIRFEVNSVN

SEQ ID NO: 124199 - protein, 74 aa, Setaria italica
  misc_feature (5)..(5): Xaa can be any naturally occurring amino acid
  misc_feature (12)..(12): Xaa can be any naturally occurring amino acid
  Transcript Sequence Number=SeqID_58225
LVRDXFGAYSLXVLSSCAVLCLRILCLAVSEAASIANNLLLFFSLWNASISCLSESELVMLVASLFKLKITKLG

SEQ ID NO: 124200 - protein, 82 aa, Setaria italica
  Transcript Sequence Number=SeqID_58226
  Gene Ontology: Mol. function=threonine-type endopeptidase activity; Cellular component=proteasome core complex; Biological process =ubiquitin-dependent protein catabolic process
  Homolog annotation: Hit_ID=A7P2U5; Match level="QueryCoverage=100%, HitCoverage=35%, E-value=8e-38, Identity=90%"; Hit description =Proteasome subunit alpha type
KALTPNIGVVYSGMGPDFRVLVRKSRKQAQQYYRLYKEHIPVTQLVRETAAVMQEFTQSGGVRPFGVSLLIAGYDDNGPQLY

SEQ ID NO: 124201 - protein, 75 aa, Setaria italica
  misc_feature (48)..(48): Xaa can be any naturally occurring amino acid
  misc_feature (56)..(56): Xaa can be any naturally occurring amino acid
  Transcript Sequence Number=SeqID_58227
  Gene Ontology: Mol. function=threonine-type endopeptidase activity; Cellular component=proteasome core complex; Biological process =ubiquitin-dependent protein catabolic process
  Homolog annotation: Hit_ID=A7P2U5; Match level="QueryCoverage=89%, HitCoverage=28%, E-value=6e-22, Identity=85%"; Hit description =Proteasome subunit alpha type
LVQIEHALTAVGSGQTSLGIKAANGVVIATEKKLPSILVDETSVQRFXALTPNIGXVVYSGDGSRPRSGSKLPMV

SEQ ID NO: 124202 - protein, 64 aa, Setaria italica
  Transcript Sequence Number=SeqID_58228
TDLLQCLVMLTLEPSWMHIVDKKVNVRWVDVVFDLLPAAYFIVVLSTVSLFVYPLFRYLFFRGF

SEQ ID NO: 124203 - protein, 38 aa, Setaria italica
  Transcript Sequence Number=SeqID_58229
DAKYSTHLYVPVPVACRSGRGSLRKISVPERTTSDTII

SEQ ID NO: 124204 - protein, 148 aa, Setaria italica
  Transcript Sequence Number=SeqID_58230
  Gene Ontology: Mol. function=electron carrier activity; Cellular component=nucleus
  Homolog annotation: Hit_ID=Q2NBV4; Match level="QueryCoverage=71%, HitCoverage=34%, E-value=2e-19, Identity=42%"; Hit description=SyrP protein, putative
MPFLQSNNDFLADCFRSPTEIVYSGILMLLILPENLTATVADRAAQLGMKLEWTDDGVKTIMGPIPAVKWDESRGRKIWFNSMVAAYTGWKDARNDPVKAVTFGDGSPLPADVIAECGKILEEECVAVPWQHGDILLIDNWAVLHSRR

SEQ ID NO: 124205 - protein, 41 aa, Setaria italica
  misc_feature (15)..(15): Xaa can be any naturally occurring amino acid
  Transcript Sequence Number=SeqID_58231
  Gene Ontology: Mol. function=electron carrier activity; Cellular component=nucleus
EKDGLIYTRVLGEGXDDPSSPIGRGWQSTFLTKDKAVAEER

SEQ ID NO: 124206 - protein, 36 aa, Setaria italica
  Transcript Sequence Number=SeqID_58232
MVGKEFICCSDCSEPTIMDKNTKLGYCKSGADLTTQ

SEQ ID NO: 124207 - protein, 74 aa, Setaria italica
  Transcript Sequence Number=SeqID_58233
  Gene Ontology: Mol. function=structural constituent of ribosome; Cellular component=ribonucleoprotein complex; Biological process =translation
  Homolog annotation: Hit_ID=B4FAZ7; Match level="QueryCoverage=98%, HitCoverage=31%, E-value=7e-34, Identity=95%"; Hit description=50S ribosomal protein L13
  Pfam annotation: Domain name=Ribosomal_L13; Domain location=1-74; Score=85.5; E_value=1.9e-22; Accession=PF00572.10; Description =Ribosomal protein L13
VNAEKVAVSGKKRSQKLYRRHSGRPGGMKEETFDQLQKRIPERIIEHAVRGMLPKGRLGRRLFTHLKVYKGADA

SEQ ID NO: 124208 - protein, 70 aa, Setaria italica
  Transcript Sequence Number=SeqID_58234
TRESLSIEMDEVMNSSPEGFTHCLDSHPHSHASAPGSVNLFVIWTPKAEISSYFLSLSSHVLWKAEIWVE

SEQ ID NO: 124209 - protein, 88 aa, Setaria italica
  Transcript Sequence Number=SeqID_58235
ISRAPKATGRPQNSYKRPLDDHRSLEKTYQLEIFRNPIRHSLFHHFLYKVGFGFLMLFFTTYLFLTFHVISFLSTFYFSCMFTFKLII

SEQ ID NO: 124210 - protein, 38 aa, Setaria italica
  Transcript Sequence Number=SeqID_58236
NVIYKRMEGVLTWLNQTFSAIRNLHMQSIRRLSYMLIK

SEQ ID NO: 124211 - protein, 61 aa, Setaria italica
  Transcript Sequence Number=SeqID_58237
  Gene Ontology: Mol. function=sodium:hydrogen antiporter activity; Cellular component=integral to membrane; Biological process=sodium ion transport
  Homolog annotation: Hit_ID=Q6UUW2; Match level="QueryCoverage=70%, HitCoverage=7%, E-value=7e-16, Identity=97%"; Hit description =Sodium/hydrogen exchanger
  Subcellular localization annotation: CTP_CleavageSite=55; ConfidenceScore=5.15e-01
VRKVTFFFTNSYLLPPIIFNAGFQVKKKQFFRNFMTIILFGAVGTLISFVIITLVGNHTMD

SEQ ID NO: 124212 - protein, 43 aa, Setaria italica
  Transcript Sequence Number=SeqID_58238
  Gene Ontology: Mol. function=sodium:hydrogen antiporter activity; Cellular component=integral to membrane; Biological process=sodium ion transport
  Homolog annotation: Hit_ID=C0PFZ2; Match level="QueryCoverage=95%, HitCoverage=7%, E-value=8e-15, Identity=97%"; Hit description =Sodium/hydrogen exchanger
TFATLSFIAEIFLFLYVGMDALDIEKWKLASSSPKEPIALSIR

SEQ ID NO: 124213 - protein, 129 aa, Setaria italica
  misc_feature (74)..(74): Xaa can be any naturally occurring amino acid
  Transcript Sequence Number=SeqID_58239
  Gene Ontology: Mol. function=protein serine/threonine kinase activity; Biological process=protein amino acid phosphorylation
  Homolog annotation: Hit_ID=Q1KMQ1; Match level="QueryCoverage=94%, HitCoverage=18%, E-value=1e-53, Identity=80%"; Hit description =Serine/threonine kinase-like protein ABC1036
  Pfam annotation: Domain name=Pkinase; Domain location=1-125; Score= -82.0; E_value=0.0013; Accession=PF00069.17; Description=Protein kinase domain
VEERALCFEYLQGGTLEKLLSDESCGLGWHKRYKIIRGVCEGLHYLHNGSKDPIYHLDLKPANIMLDKNMVPKXIGDFGLSRLFDSTQTCTTKVIIGTPGYMPPEYINRYQITQKFDVFSLAYNHTSNG

SEQ ID NO: 124214 - protein, 108 aa, Setaria italica
  misc_feature (48)..(48): Xaa can be any naturally occurring amino acid
  misc_feature (81)..(81): Xaa can be any naturally occurring amino acid
  misc_feature (83)..(83): Xaa can be any naturally occurring amino acid
  misc_feature (97)..(97): Xaa can be any naturally occurring amino acid
  Transcript Sequence Number=SeqID_58240
  Gene Ontology: Mol. function=protein serine/threonine kinase activity; Biological process=protein amino acid phosphorylation
  Homolog annotation: Hit_ID=B9V0F9; Match level="QueryCoverage=91%, HitCoverage=16%, E-value=3e-19, Identity=51%"; Hit description =Protein kinase domain containing protein-2
YSQTPTSVMPRDFTFHLLEQITNKFSKDRIIGYGGYGVVYKGVLDNGXEVAVKKLYNKHPGLDDDKQFTNECTNLMRLQHXNXVRLVGYCYEIAHKXVEYDGQYVYAG

SEQ ID NO: 124215 - protein, 60 aa, Setaria italica
  Transcript Sequence Number=SeqID_58241
KDHLQTRFCHTVPNDCSFSPATRLCLQIVAFFIQCFMEYDQAKFPAIIVLQLTNFPLIHC

SEQ ID NO: 124216 - protein, 49 aa, Setaria italica
  Transcript Sequence Number=SeqID_58242
  Gene Ontology: Mol. function=transporter activity; Cellular component= integral to membrane; Biological process=transport
  Homolog annotation: Hit_ID=Q6H4E8; Match level="QueryCoverage=83%, HitCoverage=7%, E-value=1e-12, Identity=85%"; Hit description =Transporter-like protein
MLNTLCFLHSPIFAEIVPEKQRTSIYALDRTFESILASFAPPVVGLLSQ

SEQ ID NO: 124217 - protein, 42 aa, Setaria italica
  Transcript Sequence Number=SeqID_58243
IEGDYLLLLGAKMIELQLDSDSDFLDGFSINSSTIDESAEKS

SEQ ID NO: 124218 - protein, 94 aa, Setaria italica
  Transcript Sequence Number=SeqID_58244
  Gene Ontology: Mol. function=zinc ion binding; Cellular component =intracellular
LVLPCFGLSVIEPEVVAETTLTAKLEDEADTCFKEADQYKEAELEVSNLLDKDTPMLPCFLPSPSEAIGTDGSSTTCGAGRTSSLPNYQYDDQY

SEQ ID NO: 124219 - protein, 86 aa, Setaria italica
  Transcript Sequence Number=SeqID_58245
  Gene Ontology: Mol. function=metal ion binding
  Homolog annotation: Hit_ID=B6SJ98; Match level="QueryCoverage=100%, HitCoverage=27%, E-value=9e-22, Identity=66%"; Hit description=S -ribonuclease binding protein SBP1
  Subcellular localization annotation: CTP_CleavageSite=80; ConfidenceScore=5.41e-01
MDMPRPPQLAGVSPAAVYFASGGASGNRRKRPREAMAPPPAAAKEEYVNLFTLQPQQSTSFANMAQFQSQNRVSSSPSPAATALVS

SEQ ID NO: 124220 - protein, 75 aa, Setaria italica
  Transcript Sequence Number=SeqID_58246
  Gene Ontology: Mol. function=protein tyrosine kinase activity
  Homolog annotation: Hit_ID=B6SSJ5; Match level="QueryCoverage=73%, HitCoverage=6%, E-value=2e-15, Identity=70%"; Hit description=Wound and phytochrome signaling involved receptor like kinase
DHLCFPLKLVTDLWYLTLCCGRSLDKHTSGPPATCSYDVLCFGKVLLELVTGNFGISGSNDAASEEWLANTLKPR

SEQ ID NO: 124221 - protein, 71 aa, Setaria italica
  Transcript Sequence Number=SeqID_58247
  Homolog annotation: Hit_ID=B6TJQ3; Match level="QueryCoverage=95%, HitCoverage=18%, E-value=5e-09, Identity=48%"; Hit description=GDSL -motif lipase/hydrolase-like protein
PVVPAVYVFGDSLVDAGNNDFLPPPAPRAVPPNGVDLPRTVLRRTGRFTNGYNLADITGERIGHPPEQTSP

SEQ ID NO: 124222 - protein, 47 aa, Setaria italica
  Transcript Sequence Number=SeqID_58248
MIEFQKIAEVIGDWYFERDAAKEIDCAYPCDSTCHNLIPSDQVGFLR

SEQ ID NO: 124223 - protein, 73 aa, Setaria italica
  misc_feature (34)..(34): Xaa can be any naturally occurring amino acid
  Transcript Sequence Number=SeqID_58249
  Homolog annotation: Hit_ID=O65250; Match level="QueryCoverage=84%, HitCoverage=15%, E-value=3e-21, Identity=64%"; Hit description =F21E10.11 protein
PSRSGMFINSCFAHCQSELQDTWFAPDSPMIHDXEVIGDWYFERDAAKEIDCAYPCDSTCHNLIPSDQELRMY

SEQ ID NO: 124224 - protein, 82 aa, Setaria italica
  misc_feature (44)..(44): Xaa can be any naturally occurring amino acid
  misc_feature (58)..(58): Xaa can be any naturally occurring amino acid
  Transcript Sequence Number=SeqID_58250
  Homolog annotation: Hit_ID=O80537; Match level="QueryCoverage=96%, HitCoverage=20%, E-value=5e-14, Identity=51%"; Hit description =F14J9.21 protein
  Pfam annotation: Domain name=PAE; Domain location=1-82; Score=-216.2; E_value=0.023; Accession=PF03283.5; Description=Pectinacetylesterase
GATTVKCLSDAGFFLDLNDISGINNIRQFFSSLVSVQGVQKNLXNKDCQNSTDYPYLXCFFPQYALPYIRTPYFILNSAYDV

SEQ ID NO: 124225 - protein, 43 aa, Setaria italica
  misc_feature (26)..(26): Xaa can be any naturally occurring amino acid
  Transcript Sequence Number=SeqID_58251
  Homolog annotation: Hit_ID=B6UCS5; Match level="QueryCoverage=83%, HitCoverage=9%, E-value=3e-10, Identity=88%"; Hit description =Hydroxyacid oxidase 1
NICKCAARIAIECGVAGIIMSNHGGXAQLDYLPATICCLEEVC

SEQ ID NO: 124226 - protein, 119 aa, Setaria italica
  misc_feature (14)..(14): Xaa can be any naturally occurring amino acid
  misc_feature (38)..(38): Xaa can be any naturally occurring amino acid
  Transcript Sequence Number=SeqID_58252
  Gene Ontology: Mol. function=DNA-dependent ATPase activity
  Homolog annotation: Hit_ID=Q94CQ8; Match level="QueryCoverage=70%, HitCoverage=32%, E-value=8e-20, Identity=63%"; Hit description =P0660F12.22 protein
YAAVRIRGNVSRRXELRYSEDQLMQATGIALSVQIIKXKLAPASLKEAGIDIRFGKGICHESETLEMASSVGVVVKDGSGYWINGVFLPGKAEAEKFLLENAGVADEICNTVRNQFLQR

SEQ ID NO: 124227 - protein, 48 aa, Setaria italica
  Transcript Sequence Number=SeqID_58253
QVAALIPKCEIEGEIYTNSEDIQSRLMTQALRKIQYTLCRSESLYLFL

SEQ ID NO: 124228 - protein, 49 aa, Setaria italica
  Transcript Sequence Number=SeqID_58254
  Gene Ontology: Mol. function=ion channel activity; Cellular component= spliceosome; Biological process=RNA splicing
  Homolog annotation: Hit_ID=B6U5W5; Match level="QueryCoverage=100%, HitCoverage=12%, E-value=4e-21, Identity=97%"; Hit description=Prp18 domain containing protein
KKLLNEWNQELDDMTELEKRTAKGKSMVATFKQCARYLSPLFEFCRKKV

SEQ ID NO: 124229 - protein, 78 aa, Setaria italica
  Transcript Sequence Number=SeqID_58255
TNSFRTGEEFALEFMQNRANTTKPLVPIISDDRTISTSFTPWGEEANISGDKPSKKLLTFPPFSETSSQGSNKRNQGQ

SEQ ID NO: 124230 - protein, 37 aa, Setaria italica
  Transcript Sequence Number=SeqID_58256
HYLSGQRLIFVVFLNPFLIANHNISWHEQNHIASLFS

SEQ ID NO: 124231 - protein, 154 aa, Setaria italica
  misc_feature (43)..(43): Xaa can be any naturally occurring amino acid
  Transcript Sequence Number=SeqID_58257
  Gene Ontology: Mol. function=sequence-specific DNA binding; Cellular component=nucleus; Biological process=regulation of transcription, DNA-dependent
  Homolog annotation: Hit_ID=Q9AV49; Match level="QueryCoverage=95%, HitCoverage=17%, E-value=3e-73, Identity=89%"; Hit description =Homeobox-leucine zipper protein HOX9
QSTAQHTIVRAEMLPSGYLVRQCEGGGSIVRIVDHLDLDAWSXPEVLRPLYESSRVVAQKMTTAALRHIRQIAQETSGEVAYALGRQPAVLRTFSQRLSRGFNDAISGFNDDGWSVMGGDGTEDVIIACNSKKTRNSSNPASAFGAPGGIICAK

SEQ ID NO: 124232 - protein, 110 aa, Setaria italica
  misc_feature (58)..(58): Xaa can be any naturally occurring amino acid
  Transcript Sequence Number=SeqID_58258
  Gene Ontology: Mol. function=sequence-specific DNA binding; Cellular component=nucleus; Biological process=regulation of transcription, DNA-dependent
  Homolog annotation: Hit_ID=Q9AV49; Match level="QueryCoverage=100%, HitCoverage=13%, E-value=2e-52, Identity=90%"; Hit description =Homeobox-leucine zipper protein HOX9
GASIVRIVDHLDLDAWSVPEVLRPLYESSRVVAQKMTTAALRHIRQNCSETSGEVAYXLGRQPAVLRTFSQRLSRGFNDAISGFNDDGWSVMGGDGTEDVIIACNSKKTR

SEQ ID NO: 124233 - protein, 107 aa, Setaria italica
  misc_feature (21)..(21): Xaa can be any naturally occurring amino acid
  misc_feature (30)..(30): Xaa can be any naturally occurring amino acid
  Transcript Sequence Number=SeqID_58259
  Gene Ontology: Mol. function=sequence-specific DNA binding; Cellular component=nucleus; Biological process=regulation of transcription, DNA-dependent
  Homolog annotation: Hit_ID=Q6TAQ6; Match level="QueryCoverage=100%, HitCoverage=14%, E-value=1e-51, Identity=81%"; Hit description =Homeobox-leucine zipper protein HOX10
PCEGGGSIVHIVDHLDLKAWXVPEVLRPLXLRHLRQIAQETSGEVVYALGRQPAVLRTFSQRLSRGFNDAISGFNDDGWSIMGGDGIEDVVVACNSTKKIRNNSNVG

SEQ ID NO: 124234 - protein, 119 aa, Setaria italica
  misc_feature (18)..(18): Xaa can be any naturally occurring amino acid
  misc_feature (51)..(51): Xaa can be any naturally occurring amino acid
  Transcript Sequence Number=SeqID_58260
  Gene Ontology: Mol. function=sequence-specific DNA binding; Cellular component=nucleus; Biological process=regulation of transcription, DNA-dependent
  Homolog annotation: Hit_ID=Q9AV49; Match level="QueryCoverage=96%, HitCoverage=13%, E-value=5e-52, Identity=85%"; Hit description =Homeobox-leucine zipper protein HOX9
SAETSPCSLPGLRSMRFXGSQIIMPLAHTVENEEILEVVRLEGQALTHDDXSLSRDIHLLQLCTGIEEKSMGSCFQLVFAPIDELFPDDAPLISSGFRVIPLDIKSDGVPSGKNIRFGL

SEQ ID NO: 124235 - protein, 111 aa, Setaria italica
  Transcript Sequence Number=SeqID_58261
  Gene Ontology: Mol. function=sequence-specific DNA binding; Cellular component=nucleus; Biological process=regulation of transcription, DNA-dependent
  Homolog annotation: Hit_ID=Q9AV49; Match level="QueryCoverage=98%, HitCoverage=12%, E-value=2e-54, Identity=93%"; Hit description =Homeobox-leucine zipper protein HOX9
GGGSIVRIVDHLDLDAWSVPEVLRPLYESSRVVAQKMTTAALRHIRQIAQETSGEVAYALGRQPAVLRTFSQRLSRGFNDAISGFNDDGWSVMGGDGTEDVIIACKLQKKN

SEQ ID NO: 124236 - protein, 79 aa, Setaria italica
  misc_feature (29)..(29): Xaa can be any naturally occurring amino acid
  Transcript Sequence Number=SeqID_58262
  Gene Ontology: Mol. function=sequence-specific DNA binding; Cellular component=nucleus; Biological process=regulation of transcription, DNA-dependent
  Homolog annotation: Hit_ID=Q10SW1; Match level="QueryCoverage=98%, HitCoverage=12%, E-value=2e-37, Identity=93%"; Hit description =Rolled leaf1, putative, expressed
IVVAQKMTTVALRHLRQIAQETSGEVVYXLGRQPAVLRTFSQRLSRGFNDAISGFNDDGWSIMGGDGIEDVVVACNSTK

SEQ ID NO: 124237 - protein, 145 aa, Setaria italica
  Transcript Sequence Number=SeqID_58263
  Gene Ontology: Mol. function=sequence-specific DNA binding; Cellular component=nucleus; Biological process=regulation of transcription, DNA-dependent
  Homolog annotation: Hit_ID=Q9AV49; Match level="QueryCoverage=88%, HitCoverage=15%, E-value=7e-54, Identity=78%"; Hit description =Homeobox-leucine zipper protein HOX9
FNLSPVSTCVSFNHQYLTQDGVPSGRTLDLASSLEVGTTTQHASGDGSPDDCNLRSVLTIAFQFPYEIHLQDSVAAMARQYVRSIVSAVQRVSMAISPSRSGLSTGQKIISGFPEAATLVRWICKSYQYHLGVDLVSHSDEAGES

SEQ ID NO: 124238 - protein, 65 aa, Setaria italica
  Transcript Sequence Number=SeqID_58264
FFFVDQTLHNFQFRHKITLDSRPRTSATNIRLITADDFPRRDHTKMDLLIRPARHHTKDQFTKQN

SEQ ID NO: 124239 - protein, 44 aa, Setaria italica
  Transcript Sequence Number=SeqID_58265
GSLVVCERSLSGSGVVRMQLGHTSACRQVQLSPLLAGNNCNNFK

SEQ ID NO: 124240 - protein, 82 aa, Setaria italica
  Transcript Sequence Number=SeqID_58266
  Gene Ontology: Mol. function=nucleoside-triphosphatase activity; Cellular component=membrane; Biological process=transport
  Homolog annotation: Hit_ID=Q8GU84; Match level="QueryCoverage=74%, HitCoverage=4%, E-value=1e-27, Identity=93%"; Hit description=PDR -like ABC transporter
LGIRHDFLGYVVPRLSFKNSFTTLMDVLAGRKTSGAVEGDVTLSGYPKKQETFARISGYCEQTDIHSPNVTVYESIAYSAWL

SEQ ID NO: 124241 - protein, 113 aa, Setaria italica
  Transcript Sequence Number=SeqID_58267
DEVQQLQQEVSKINKNSDTIESLARDTERRVETLSSEVKKIEDIIAEQWIQIRQFEQAFVLTKMMASKVHERSRPLQMVFKWPGKEQFLRYLTLAPPTASSMVLNVVHVAIFS

SEQ ID NO: 124242 - protein, 63 aa, Setaria italica
  Transcript Sequence Number=SeqID_58268
  Gene Ontology: Mol. function=nucleotide binding; Cellular component =integral to membrane; Biological process=protein insertion into membrane
  Homolog annotation: Hit_ID=Q10AQ3; Match level="QueryCoverage=98%, HitCoverage=16%, E-value=2e-29, Identity=96%"; Hit description =ARTEMIS protein, chloroplast, putative, expressed
MLPTLVTIPVWIGLYRALSNVANEGLLTEGFFWIPSLAGPTTIGARQNGQGISWLFPFTDGHP

SEQ ID NO: 124243 - protein, 37 aa, Setaria italica
  Transcript Sequence Number=SeqID_58269
TLVTIPVWIGLYRALSNVANEVDILKLPSCRCHSSFY

SEQ ID NO: 124244 - protein, 83 aa, Setaria italica
  Transcript Sequence Number=SeqID_58270
  Gene Ontology: Mol. function=transition metal ion binding; Cellular component=nucleus; Biological process=positive regulation of MAPKKK cascade
  Homolog annotation: Hit_ID=B9RNT1; Match level="QueryCoverage=87%, HitCoverage=72%, E-value=1e-22, Identity=65%"; Hit description =Steroid binding protein, putative
  Pfam annotation: Domain name=Cyt-b5; Domain location=1-81; Score=3.5; E_value=0.063; Accession=PF00173.20; Description=Cytochrome b5-like HemeSteroid binding doma
RTTNTDGQRSNDVTSGRSFYGPGGAYAIFAGREASRALGKMSKDEADVSGDLSGLTEKELGVLADWETKFQAKYPIVARLTDA

SEQ ID NO: 124245 - protein, 53 aa, Setaria italica
  Transcript Sequence Number=SeqID_58271
YGFVIALTPIFHSDYLLCNYTASKHIHPDRSQSVRRDVCACLLCNYKAIQLNS

SEQ ID NO: 124246 - protein, 48 aa, Setaria italica
  Transcript Sequence Number=SeqID_58272
IRKHCFFFTVNERNGDKLQGLQHFLHLHNQQHVHKQYDGGAVSTYAIK

SEQ ID NO: 124247 - protein, 53 aa, Setaria italica
  Transcript Sequence Number=SeqID_58273
PNTFDSYCYCHVFPCDERSNYLSFDNLVANEIKKIILCYFFYDILVISRCSDF

SEQ ID NO: 124248 - protein, 70 aa, Setaria italica
  misc_feature (28)..(28): Xaa can be any naturally occurring amino acid
  Transcript Sequence Number=SeqID_58274
  Gene Ontology: Mol. function=chlorophyllase activity; Cellular component=chloroplast; Biological process=chlorophyll catabolic process
  Homolog annotation: Hit_ID=A9YTW2; Match level="QueryCoverage=98%, HitCoverage=21%, E-value=1e-13, Identity=55%"; Hit description =Putative chlorophyllase
DLRRLACASNRVKFSALIGLDPVAGTRXSSQISPKILTYEPSSFDIAMPVLVIGTGLGEEKKNILFPPCG

SEQ ID NO: 124249 - protein, 71 aa, Setaria italica
  Transcript Sequence Number=SeqID_58275
PSIAFPNRFGVKGLPLSLSRMHGCNSVHYFYSVHYDLDLGKDIQQQVTFSFWKHGNKQATDTCLNHKDLLS

SEQ ID NO: 124250 - protein, 54 aa, Setaria italica
  Transcript Sequence Number=SeqID_58276
  Subcellular localization annotation: CTP_CleavageSite=30; ConfidenceScore=5.15e-01
LSTAFKNATMMPATVLLIRSLQFLPSLHMQVMNFGAFVLFLVYCFVSYFCFFLF

SEQ ID NO: 124251 - protein, 95 aa, Setaria italica
  misc_feature (85)..(85): Xaa can be any naturally occurring amino acid
  Transcript Sequence Number=SeqID_58277
  Gene Ontology: Mol. function=chlorophyllase activity; Cellular component=vacuole; Biological process=chlorophyll catabolic process
  Homolog annotation: Hit_ID=Q8GTM4; Match level="QueryCoverage=70%, HitCoverage=21%, E-value=7e-16, Identity=60%"; Hit description =Chlorophyllase 1
  Pfam annotation: Domain name=Chlorophyllase; Domain location=3-95; Score=-189.5; E_value=0.058; Accession=PF07224.3; Description =Chlorophyllase
  Subcellular localization annotation: CTP_CleavageSite=30; ConfidenceScore=5.31e-01
YLVFVLRGLTYSYSLSLKVVRSRTFPSFALAGHSRGGHTAFSLVLGHGKTNLKFSALIGLDPVAGTGKSSQISPKILTYEPSSFXIAMPVLVIGT

SEQ ID NO: 124252 - protein, 59 aa, Setaria italica
  Transcript Sequence Number=SeqID_58278
  Subcellular localization annotation: CTP_CleavageSite=22; ConfidenceScore=5.30e-01
KTSLPLTFDFFKKNFSELLVTPCAKQKRFCQRKGPHLFFTSVSALLTTRVLILLTSPHS

SEQ ID NO: 124253 - protein, 57 aa, Setaria italica
  Transcript Sequence Number=SeqID_58279
  Homolog annotation: Hit_ID=B6TL27; Match level="QueryCoverage=98%, HitCoverage=30%, E-value=5e-13, Identity=56%"; Hit description=ABA -induced protein
GKPLPFVFAQVVQHLPLRDANGRFVPEKFEAVFKKHAHTRPDALTGMELQELLQANR

SEQ ID NO: 124254 - protein, 54 aa, Setaria italica
  Transcript Sequence Number=SeqID_58280
GTAPNSSSRNHLIGTLSTQYHKPCRAIKFPQSDKPQPGSLRPVRKRGGGTDQSR

SEQ ID NO: 124255 - protein, 85 aa, Setaria italica
  Transcript Sequence Number=SeqID_58281
LTFSISVSLEGNISSIPNSIINDSKMSTDNGLDTSFINHAAVAWAEMRRQWVGHQAEVPKKAPREPVISWCTTYDDLLSTSERFP

SEQ ID NO: 124256 - protein, 62 aa, Setaria italica
  misc_feature (13)..(13): Xaa can be any naturally occurring amino acid
  misc_feature (49)..(49): Xaa can be any naturally occurring amino acid
  Transcript Sequence Number=SeqID_58282
  Gene Ontology: Mol. function=nucleotidyltransferase activity
VLTEMTDEYFVAXCYGKIPQAPSSDLVFIPLQAYLKVLKFIECVQYGKXERGYEPKRRIGKE

SEQ ID NO: 124257 - protein, 65 aa, Setaria italica
  misc_feature (25)..(25): Xaa can be any naturally occurring amino acid
  Transcript Sequence Number=SeqID_58283
  Gene Ontology: Mol. function=nucleotidyltransferase activity; Biological process=RNA processing
  Homolog annotation: Hit_ID=B9RA84; Match level="QueryCoverage=100%, HitCoverage=13%, E-value=1e-18, Identity=63%"; Hit description =Poly(A) polymerase, putative
GIEDIKKAKVRTVIPAGTSFQEDCXIAARLGFSFPKETAYYVRTLACSVARLDKGRILMEMNYML

SEQ ID NO: 124258 - protein, 44 aa, Setaria italica
  Transcript Sequence Number=SeqID_58284
CWFLGTKIGNPCAWISLNASAAGRSTVVATFTFDSDSNIETLGP

SEQ ID NO: 124259 - protein, 94 aa, Setaria italica
  Transcript Sequence Number=SeqID_58285
  Gene Ontology: Cellular component=peroxisome
  Homolog annotation: Hit_ID=B6TC68; Match level="QueryCoverage=44%, HitCoverage=16%, E-value=1e-13, Identity=88%"; Hit description =Peroxisomal biogenesis factor 19
  Subcellular localization annotation: CTP_CleavageSite=37; ConfidenceScore=5.18e-01
SGSGAKGPVLGLGLGLPDPKAPKRRGAKPPPLPRGACASEALEKLTRETREAVRGLETATGGVPSLDDDAMMEEFVQRQVTKEVTTRGRQGIIG

SEQ ID NO: 124260 - protein, 45 aa, Setaria italica
  Transcript Sequence Number=SeqID_58286
  Homolog annotation: Hit_ID=B6TJ23; Match level="QueryCoverage=73%, HitCoverage=18%, E-value=7e-09, Identity=87%"; Hit description =Caltractin
SDIDIQRLAIETGEHFTIDEVREMIEAADENGESPACPCLPLPGR

SEQ ID NO: 124261 - protein, 28 aa, Setaria italica
  Transcript Sequence Number=SeqID_58287
SNRLILAKRSPQLVILDRNVSSDSSFLY

SEQ ID NO: 124262 - protein, 86 aa, Setaria italica
  Transcript Sequence Number=SeqID_58288
  Gene Ontology: Mol. function=DNA (cytosine-5-)-methyltransferase activity; Cellular component=chromatin; Biological process =regulation of transcription, DNA-dependent
  Homolog annotation: Hit_ID=Q8SBB4; Match level="QueryCoverage=72%, HitCoverage=8%, E-value=2e-29, Identity=90%"; Hit description =Cytosine-specific methyltransferase
  Pfam annotation: Domain name=Chromo; Domain location=1-52; Score =53.5; E_value=8.3e-13; Accession=PF00385.16; Description='chromo' (CHRromatin Organisation MOdifier)
EKLIGICYGGSGRENGLYFKVQWAGYGPEEDTWEPIDNLSDCPLKIKEFVQEGYRRKILPLPVSIYLVLIFLMFSSTLMFGDYIYI

SEQ ID NO: 124263 - protein, 81 aa, Setaria italica
  misc_feature (13)..(13): Xaa can be any naturally occurring amino acid
  Transcript Sequence Number=SeqID_58289
  Homolog annotation: Hit_ID=B4FMC9; Match level="QueryCoverage=100%, HitCoverage=48%, E-value=2e-26, Identity=74%"; Hit description=GPI -anchored protein
MAVACGRLLLFLXYGPTALAGVASAAGPFLSDGVFQVSAGSTGRSLLQARKDCPVNFEFQNYTIITSKCKGPKFPAKQCCA

SEQ ID NO: 124264 - protein, 66 aa, Setaria italica
  Transcript Sequence Number=SeqID_58290
GAMIKLKPHQLQHPIFEGNERSYRSVEQQRYYHTQDSNPCKRWTTRSKQLACMDYCLECGTTTLLP

SEQ ID NO: 124265 - protein, 66 aa, Setaria italica
  Transcript Sequence Number=SeqID_58291
SIYLTYHLIEFKFVSGPFRSSDVSLLSFSQGKVIKLHSCSWQIHGRYAVAVNVIVCAYSIAQSFGE

SEQ ID NO: 124266 - protein, 88 aa, Setaria italica
  misc_feature (28)..(28): Xaa can be any naturally occurring amino acid
  Transcript Sequence Number=SeqID_58292
  Gene Ontology: Mol. function=bile acid:sodium symporter activity; Cellular component=membrane; Biological process=sodium ion transport
  Homolog annotation: Hit_ID=B6TKE8; Match level="QueryCoverage=100%, HitCoverage=21%, E-value=3e-25, Identity=70%"; Hit description=Bile acid sodium symporter
GVHSLAGRRQPVVDRVSVLPPATRVSWXERGSGGVAMRRRLWVSASGSMEQDDVGEDAVLPSQVVEEGKVDLLKILRSANTVIPHIVL

SEQ ID NO: 124267 - protein, 96 aa, Setaria italica
  Transcript Sequence Number=SeqID_58293
  Gene Ontology: Mol. function=arginine decarboxylase activity; Biological process=putrescine biosynthetic process
  Homolog annotation: Hit_ID=A3B825; Match level="QueryCoverage=95%, HitCoverage=14%, E-value=6e-44, Identity=92%"; Hit description =Arginine decarboxylase
  Pfam annotation: Domain name=Orn_DAP_Arg_deC; Domain location=2-96; Score=44.4; E_value=4.4e-10; Accession=PF00278.14; Description =Pyridoxal-dependent decarboxylase, C-terminal sheet domain
GRLPEAPRTYHINLSVFTSLPDMWAIGQQFPIIPIQRLQERPAVDGVLSDLTCDSDGKVCEFIGGRHSLPLHELPTHATRGYYLGMFLGGAYQEAL

SEQ ID NO: 124268 - protein, 64 aa, Setaria italica
  Transcript Sequence Number=SeqID_58294
KCMLNCLISIENSCFARRWLFVLTPVRAVICKTIISLDLFRYPFLLSNTCATCKHMLSVSYFSL

SEQ ID NO: 124269 - protein, 94 aa, Setaria italica
  Transcript Sequence Number=SeqID_58295
  Gene Ontology: Mol. function=catalytic activity
  Homolog annotation: Hit_ID=Q0J2R1; Match level="QueryCoverage=97%, HitCoverage=33%, E-value=1e-38, Identity=69%"; Hit description =Probable protein phosphatase 2C 67
NIRPIFPQERSRIQKAGGSVGSNGRLQGRIEVSRAFGDRQFKKVFGPSDAVEFVQNQLKETSSASLAVRRLVKEAVRERRCKDNCTAVLIVFKH

SEQ ID NO: 124270 - protein, 95 aa, Setaria italica
  misc_feature (72)..(72): Xaa can be any naturally occurring amino acid
  Transcript Sequence Number=SeqID_58296
  Gene Ontology: Mol. function=catalytic activity; Cellular component =protein serine/threonine phosphatase complex; Biological process =protein amino acid dephosphorylation
  Homolog annotation: Hit_ID=Q0J2R1; Match level="QueryCoverage=97%, HitCoverage=25%, E-value=8e-40, Identity=84%"; Hit description =Probable protein phosphatase 2C 67
FPQERSRIQKAGGSVGSNGRLQGRIEVSRAFGDRQFKKVGLISTPDVHSFELTKKDHFIILGCDGLWGVFGXPSDAVEFVQNQLKVLSISVSANS

SEQ ID NO: 124271 - protein, 37 aa, Setaria italica
  Transcript Sequence Number=SeqID_58297
  Gene Ontology: Mol. function=catalytic activity
  Homolog annotation: Hit_ID=Q0J2R1; Match level="QueryCoverage=100%, HitCoverage=10%, E-value=1e-11, Identity=91%"; Hit description =Probable protein phosphatase 2C 67
MLETSSASLAVRRLVKEAVRERRCKDNCTAVLIVFKH

SEQ ID NO: 124272 - protein, 62 aa, Setaria italica
  Transcript Sequence Number=SeqID_58298
KVLHQQFDIIVVSSDSNACSTARASKQTSDWHSPVGEDLADLVDVHDAGEGREPCKQTQGKA

SEQ ID NO: 124273 - protein, 60 aa, Setaria italica
  misc_feature (41)..(41): Xaa can be any naturally occurring amino acid
  Transcript Sequence Number=SeqID_58299
  Gene Ontology: Mol. function=hydro-lyase activity; Cellular component= cytoplasm; Biological process=fatty acid biosynthetic process
  Homolog annotation: Hit_ID=C3UJT3; Match level="QueryCoverage=88%, HitCoverage=23%, E-value=1e-20, Identity=94%"; Hit description =Putative beta-hydroxyacyl-ACP dehydratase
  Pfam annotation: Domain name=FabA; Domain location=8-60; Score=-24.4; E_value=8.9e-05; Accession=PF07977.5; Description=FabA-like domain
MHVDVRVRFPFLLVDRVIEYKAGEYAVGIKNVTINDNFFPXGHFPERPIMPGVLMVEAMA

SEQ ID NO: 124274 - protein, 69 aa, Setaria italica
  Transcript Sequence Number=SeqID_58300
EGGGSTTRFYRGTTTTLATNPTSAANGAQKGDREAAVDAEIARVNKLPAHSSYAIHRMKVLGRLLLMLR

SEQ ID NO: 124275 - protein, 121 aa, Setaria italica
  misc_feature (24)..(24): Xaa can be any naturally occurring amino acid
  misc_feature (87)..(87): Xaa can be any naturally occurring amino acid
  Transcript Sequence Number=SeqID_58301
  Homolog annotation: Hit_ID=Q1M2Z4; Match level="QueryCoverage=84%, HitCoverage=57%, E-value=2e-22, Identity=52%"; Hit description=Ampk protein (Fragment)
LNLEDGPAPSDSTSSDGDASENPXSQKLSSDELKSLLADSERSKLLRRLSEANQYNRFLKRQLQLKDDAVVKFKSELAALELELQGXRKINGKYIQSHLLSRLEAVHGKVMDQIKDVDSLK

SEQ ID NO: 124276 - protein, 69 aa, Setaria italica
  Transcript Sequence Number=SeqID_58302
VVTHWFSDPNLLEHTKLCSFPTFLENKYYDMLKLMGNTNGIISSGSLQFSKMRMYNSTKLRSGKGDPKH

SEQ ID NO: 124277 - protein, 109 aa, Setaria italica
  Transcript Sequence Number=SeqID_58303
  Gene Ontology: Mol. function=transferase activity, transferring nitrogenous groups; Cellular component=mitochondrion; Biological process=biosynthetic process
  Homolog annotation: Hit_ID=Q8W360; Match level="QueryCoverage=81%, HitCoverage=33%, E-value=5e-45, Identity=94%"; Hit description =Putative aminotransferase
SRDEVLLFDPAYETYETCIELARGVPVYVRLDPPSWTLNEDKFLKSFTSRTKAVVLNSPHNPTGKVFSKEELLIIAQACQKMDCFAITDEVDLQQIVKAALSSLSLHVY

SEQ ID NO: 124278 - protein, 123 aa, Setaria italica
  Transcript Sequence Number=SeqID_58304
LDVLFLHQFRRMNFQKSIDSCNMEAGVVKTWVNFLEDTWQLQSSYNEQKENTTNNELERCTSNFLKLTKHHLCNFKDLLSPSIERIRTYVDNLAVLNSREESIEHGRRNRIENLLEKLEELDQ

SEQ ID NO: 124279 - protein, 48 aa, Setaria italica
  Transcript Sequence Number=SeqID_58305
PIPCVPFLSPVACLRVGTSTSLKKSCELTFLNQAIQNNHAHPTFHVVA

SEQ ID NO: 124280 - protein, 46 aa, Setaria italica
  Transcript Sequence Number=SeqID_58306
DLTAEVSELEKQRDELEAQLKKVNISLNAAVGRLKQTREERDQFYE

SEQ ID NO: 124281 - protein, 36 aa, Setaria italica
  Transcript Sequence Number=SeqID_58307
MLAVGRLKQTREERDQFYEANNQMIFSLQAKENELS

SEQ ID NO: 124282 - protein, 54 aa, Setaria italica
  Transcript Sequence Number=SeqID_58308
SLFPEIITRSLILISMLQLTLIVDTEVLTLDKTHHSFLEHLAQLQEFQHVHLLA

SEQ ID NO: 124283 - protein, 155 aa, Setaria italica
  misc_feature (68)..(68): Xaa can be any naturally occurring amino acid
  Transcript Sequence Number=SeqID_58309
  Homolog annotation: Hit_ID=Q9LR63; Match level="QueryCoverage=90%, HitCoverage=47%, E-value=7e-18, Identity=37%"; Hit description =F21B7.22
  Pfam annotation: Domain name=DUF789; Domain location=1-155; Score =36.5; E_value=1.2e-13; Accession=PF05623.4; Description=Protein of unknown function (DUF789)
WEGFSSDDGESGDPHDRLLFQYLEFDSPFCREPLTDKVSSLSARFPGLKSLKSSDLSLRSWISVACSXKFCRYPIYRIPTGPTLKDLDACFLTFHRLSTRVGDHVGAIQYAWGSSPNISLPVFGMASYKFSKSVWSSNDEDWQLASGLLQAAADW

SEQ ID NO: 124284 - protein, 93 aa, Setaria italica
  Transcript Sequence Number=SeqID_58310
QGIDTVSLVYEGGACDAVALLALFVPFSVFHYLGYWLSSSQRAIRLSCRSNGSVFADTDFPHCFVLWDSGVRAWRHRGKQKVRPGSCYERCIK

SEQ ID NO: 124285 - protein, 33 aa, Setaria italica
  Transcript Sequence Number=SeqID_58311
KAITFVYTCDAGCEVVRLLLILHFQFIVHTEIC

SEQ ID NO: 124286 - protein, 64 aa, Setaria italica
  Transcript Sequence Number=SeqID_58312
  Pfam annotation: Domain name=NdhL; Domain location=1-64; Score=12.4; E_value=7.2e-05; Accession=PF10716.1; Description=NADH dehydrogenase transmembrane subunit
VEAPAALATVTGEEDIDLLAILPPLAVFAFFYFLIAPPVIMNWMRLRWYKRDFVETYLQFMFTY

SEQ ID NO: 124287 - protein, 84 aa, Setaria italica
  Transcript Sequence Number=SeqID_58313
  Subcellular localization annotation: CTP_CleavageSite=67; ConfidenceScore=5.63e-01
HGLAREASLPSRCRSWRPPPHGASSPRPPPRRRPLRSYPDGRRRRSLRRRHSAPPSSGSSATYLFFPALMVWAPFVNFRKFPRD

SEQ ID NO: 124288 - protein, 54 aa, Setaria italica
  Transcript Sequence Number=SeqID_58314
NPMLPNCLKSPVACPPLHPVLVLLMLVHEGRKLDEVPNGSTMQLDLCMCWGADV

SEQ ID NO: 124289 - protein, 57 aa, Setaria italica
  Transcript Sequence Number=SeqID_58315
IELHSRAIRDFIELPSFVNKHQQHQVGIIPVLILQALHGSQSLGTHANISLPNEIRL

SEQ ID NO: 124290 - protein, 36 aa, Setaria italica
  Transcript Sequence Number=SeqID_58316
VISHMGSGQRWLLTNIKKQLLDHYRTALRKFILPPE

SEQ ID NO: 124291 - protein, 53 aa, Setaria italica
  Transcript Sequence Number=SeqID_58317
  Gene Ontology: Mol. function=inositol or phosphatidylinositol phosphatase activity
  Homolog annotation: Hit_ID=Q75LV1; Match level="QueryCoverage=94%, HitCoverage=14%, E-value=7e-19, Identity=82%"; Hit description =Putative inositol polyphosphate 5-phosphatase
HVRVPSWTDRILFKVDHSSGLDAVLSSYESLDCVRSSDHKPVKAHLCLSAQRG

SEQ ID NO: 124292 - protein, 74 aa, Setaria italica
  Transcript Sequence Number=SeqID_58318
  Gene Ontology: Mol. function=inositol or phosphatidylinositol phosphatase activity
  Homolog annotation: Hit_ID=Q75LV1; Match level="QueryCoverage=100%, HitCoverage=22%, E-value=2e-21, Identity=71%"; Hit description =Putative inositol polyphosphate 5-phosphatase
MADTHILLGQKSMQSLQMLLFGSKSSEKYIGEMKVDKHAVGGFGGMIGRKKGAVAMYINFSGIRMVFVVCHLAG

SEQ ID NO: 124293 - protein, 127 aa, Setaria italica
  misc_feature (82)..(82): Xaa can be any naturally occurring amino acid
  misc_feature (102)..(102): Xaa can be any naturally occurring amino acid
  misc_feature (110)..(110): Xaa can be any naturally occurring amino acid
  misc_feature (119)..(119): Xaa can be any naturally occurring amino acid
  Transcript Sequence Number=SeqID_58319
  Gene Ontology: Mol. function=binding
MSGPLMGVRSSAGNLRSRHVSRDSGDYYFDTPNSTDDILHQGGSGVHGINANELQSALQGHQHLLSRADIALILLAEIAYEXNDEDFRENLPLLFHVTCVSXDSSEDIVXEHCQDLLVXLLYSLAGR

SEQ ID NO: 124294 - protein, 121 aa, Setaria italica
  misc_feature (89)..(89): Xaa can be any naturally occurring amino acid
  misc_feature (99)..(99): Xaa can be any naturally occurring amino acid
  Transcript Sequence Number=SeqID_58320
  Gene Ontology: Mol. function=binding
DVRQLRFPLTFSDGHLQLLAEVYLAHSAHWLLRDSGDYYFDTPNSTDDILHQGGSGVHGINANELQSALQGHQHLLSRADIALILLAEXAYENDEDFRXNLPLLFHVTCVSMDSSEDIVLE

SEQ ID NO: 124295 - protein, 34 aa, Setaria italica
  Transcript Sequence Number=SeqID_58321
VCHQIPIRLFRMIFNVYTSYNSWLHEPRSAGGRT

SEQ ID NO: 124296 - protein, 42 aa, Setaria italica
  Transcript Sequence Number=SeqID_58322
FVDLNCIDDNKDHIHCQPLASKAIVNLSEFLNYDTIPVIEWL

SEQ ID NO: 124297 - protein, 87 aa, Setaria italica
  misc_feature (24)..(24): Xaa can be any naturally occurring amino acid
  Transcript Sequence Number=SeqID_58323
  Gene Ontology: Mol. function=protein serine/threonine kinase activity; Biological process=protein amino acid phosphorylation
  Subcellular localization annotation: CTP_CleavageSite=70; ConfidenceScore=5.80e-01
FLSACSDIHIRSNVSCPVSPCGSXPLLKSRSPQHTSGRMSPSPISSPRTTSGTSTPLSGGNGAIPFNHLRYATYSSEGFGTTSRGRE

SEQ ID NO: 124298 - protein, 72 aa, Setaria italica
  Transcript Sequence Number=SeqID_58324
SLNPLEHLAAISCRPKPKVAMQTRNTSLGLEGQTIYQRRGVKLSSKHRYNISYIPLRKKIRTYQLCIQTVFQ

SEQ ID NO: 124299 - protein, 42 aa, Setaria italica
  Transcript Sequence Number=SeqID_58325
NLRPIGHQHGLRDHNLSSMPIKYSILSRRVIHHKSIFFVMKG

SEQ ID NO: 124300 - protein, 78 aa, Setaria italica
  Transcript Sequence Number=SeqID_58326
  Gene Ontology: Mol. function=binding
  Homolog annotation: Hit_ID=B9RRH8; Match level="QueryCoverage=98%, HitCoverage=9%, E-value=1e-12, Identity=43%"; Hit description=TPR repeat-containing protein R13F6.10, putative
FPFLQHAADLVKDYLKFMDDHLKESADLTCLAYRHRTYSKYLSVKSDSVTLHLKQKAEFLDEVESILGNVSHGTKLVE

SEQ ID NO: 124301 - protein, 64 aa, Setaria italica
  Transcript Sequence Number=SeqID_58327
LMAPPGDNGQFHRSRESMETFPGKRGNRLELQRTRRHRVVEDLPMLGGRHHWADPTGVRPATVT

SEQ ID NO: 124302 - protein, 66 aa, Setaria italica
  Transcript Sequence Number=SeqID_58328
GFYDWWQQASGMFNKEAGRGFNSLVVIGAWILWKMRNDIVFNGALPRMDQALLLAQDEADHWMLAG

SEQ ID NO: 124303 - protein, 124 aa, Setaria italica
  Transcript Sequence Number=SeqID_58329
LQKKLNLGEGKYYKTSRKTSTTTWHKVTNTSAMKEHMTKCLSHGQSQCFIAATPLPRAMEYETTFKWRHSRRKISTSKGLFYDVSLRICKHVWFAHKKAEGMDAFRQTLIVVTVYENMRVSNAF

SEQ ID NO: 124304 - protein, 83 aa, Setaria italica
  Transcript Sequence Number=SeqID_58330
GLLQKKLKNLGALPSLMEILQTSIKLLQLHGTNNKYQCNERTHEKCLSHGQSQCFIAATPLPRAMEYETAFKWRNSRRKISTS

SEQ ID NO: 124305 - protein, 51 aa, Setaria italica
  Transcript Sequence Number=SeqID_58331
SSSYTMPKNVVINSPFRIVQVPLSDLCSMQSSGNTPSVLNGSTEGEWLILL

SEQ ID NO: 124306 - protein, 69 aa, Setaria italica
  Transcript Sequence Number=SeqID_58332
  Gene Ontology: Mol. function=translation initiation factor activity; Biological process=regulation of translational initiation
  Homolog annotation: Hit_ID=B9R879; Match level="QueryCoverage=91%, HitCoverage=12%, E-value=6e-18, Identity=71%"; Hit description =Translation initiation factor, putative
KTYFKKSPGRIGFMRVDTLSLLLSMANIGAYSDVLVVDMVGGLIVGAVAERLGGKLCLSFTYLRSNLIG

SEQ ID NO: 124307 - protein, 124 aa, Setaria italica
  misc_feature (40)..(40): Xaa can be any naturally occurring amino acid
  Transcript Sequence Number=SeqID_58333
HRIFPVQETCVLSEKDLHATVSKLFLDFLRSKNNQDEPIXRRGIDETETKAQKNSNEGSNQQALMDREQCFKVVAAAVKSIAENSVVDLKSPEVAVLVEMLPFLGTLGSSVAGVSVLPAELIST

SEQ ID NO: 124308 - protein, 65 aa, Setaria italica
  Transcript Sequence Number=SeqID_58334
LLHQCFNGVEFIQFSTSMYYVALVQISLLFRSHTLIHVLFKLSPTFVCTTRLTCFLIYFHHPSLL

SEQ ID NO: 124309 - protein, 97 aa, Setaria italica
  misc_feature (82)..(82): Xaa can be any naturally occurring amino acid
  Transcript Sequence Number=SeqID_58335
KEDKNNQDEPIKFAVAYNRRGIDETETKAQKNSNEGSNQQALMDREQCFKVVAAAVKSIAENSVVDLKSPEVAVLVEMLPFXVPLGSSVAGVSVLPA

SEQ ID NO: 124310 - protein, 82 aa, Setaria italica
  Transcript Sequence Number=SeqID_58336
VNYCDEFGGCTSMPCGDCHDGFSLLRCRSWECGHCLIGDIRWGLSPDPSELHTGPCCSPSQNSVSYDAEIKVLIPCCLPFWC

SEQ ID NO: 124311 - protein, 109 aa, Setaria italica
  misc_feature (5)..(5): Xaa can be any naturally occurring amino acid
  misc_feature (65)..(65): Xaa can be any naturally occurring amino acid
  Transcript Sequence Number=SeqID_58337
  Homolog annotation: Hit_ID=B6U194; Match level="QueryCoverage=81%, HitCoverage=13%, E-value=9e-14, Identity=51%"; Hit description=Zinc finger C-x8-C-x5-C-x3-H type family protein
EDYEXAPADFDIRAQHESEQFNGMGENGQIGQLCDGYERKRRRSSSERSMDRPFHSDRRFLHRGXDRDGIDGSDLRHQLRRRRISGPSNKPIKTQETGLNRGTGQLGRE

SEQ ID NO: 124312 - protein, 67 aa, Setaria italica
  Transcript Sequence Number=SeqID_58338
RACNDSLANHTRCTQQKCSCQACLIVFVFVPCILASPFCSCKYCRPLVLLLFRLESMCSNLFGLSHS

SEQ ID NO: 124313 - protein, 44 aa, Setaria italica
  Transcript Sequence Number=SeqID_58339
HAGLMLARPSEQSHSRGAFISSLNAGMCSSSTHCVVIRTPLLGV

SEQ ID NO: 124314 - protein, 82 aa, Setaria italica
  Transcript Sequence Number=SeqID_58340
  Gene Ontology: Mol. function=geranylgeranyl-diphosphate geranylgeranyltransferase activity; Cellular component=chloroplast; Biological process=carotenoid biosynthetic process
  Homolog annotation: Hit_ID=B6UV92; Match level="QueryCoverage=67%, HitCoverage=12%, E-value=1e-19, Identity=83%"; Hit description =Chloroplast phytoene synthase 3
MLAISPSSISDVSLLSVPYLQCVSRAIDSARRGRIYLPQDELEMAGLSEADIFNGRVTDGWKGFMRDQITRARSFFRQAEEG

SEQ ID NO: 124315 - protein, 90 aa, Setaria italica
  Transcript Sequence Number=SeqID_58341
  Gene Ontology: Mol. function=binding; Cellular component =mitochondrial inner membrane; Biological process=transport
  Homolog annotation: Hit_ID=B6TV90; Match level="QueryCoverage=80%, HitCoverage=22%, E-value=2e-29, Identity=90%"; Hit description =Mitochondrial aspartate-glutamate transporter AGC1
  Pfam annotation: Domain name=Mito_carr; Domain location=26-89; Score=- 3.8; E_value=0.0073; Accession=PF00153.19; Description=Mitochondrial carrier protein
MLFFTSLNSALGHWQNKEEAPSQLKIVGVQASGGIIAGAVTSFVTTPIDTIKTRLQVMDNENKPKAGQVVKKLIAEDWIGKGFCLPFRVF

SEQ ID NO: 124316 - protein, 121 aa, Setaria italica
  Transcript Sequence Number=SeqID_58342
  Subcellular localization annotation: CTP_CleavageSite=62; ConfidenceScore=5.26e-01
RCGVRGTSSPWNWFSPETKHAAQTRIRQSSMYSDHPRRSRRNPGRARPPTNLLVEEDVTEVSSNEIGPTIPDTSKFEALSLNDSPSTLDSTDGVVVHTSDTSSGLPDSAIMEPSAAVEVVS

SEQ ID NO: 124317 - protein, 53 aa, Setaria italica
  Transcript Sequence Number=SeqID_58343
QRSCGYEALSPETDAFKLARCHQDAKLVEFRLRDDNLRVIWVLTVQASSLKTK

SEQ ID NO: 124318 - protein, 54 aa, Setaria italica
  Transcript Sequence Number=SeqID_58344
RGSDSLGSTRRIFASGADWRIRMGISWDPYRPRHKCAAALSSRKGSGAPNIKRT

SEQ ID NO: 124319 - protein, 122 aa, Setaria italica
  misc_feature (68)..(68): Xaa can be any naturally occurring amino acid
  Transcript Sequence Number=SeqID_58345
  Gene Ontology: Mol. function=nucleic acid binding; Cellular component= mitochondrion
  Homolog annotation: Hit_ID=B9SH52; Match level="QueryCoverage=70%, HitCoverage=77%, E-value=1e-22, Identity=58%"; Hit description =Glycine-rich RNA-binding protein, putative
  Pfam annotation: Domain name=RRM_1; Domain location=43-110; Score =59.9; E_value=9.7e-15; Accession=PF00076.14; Description=RNA recognition motif. (a.k.a. RRM, RBD, o
PRLPHHQTRGPSPPPRCAIAAIQLHYSSLQALRRSYHSALPHQGLSWSVDERSLTDAFSSFGTITEVXIMYDKNSGRSRGFVFVHFSNDHEAKFAKDSMDGKVMLGCPFGISFPRLSTVRKN

SEQ ID NO: 124320 - protein, 97 aa, Setaria italica
  Transcript Sequence Number=SeqID_58346
  Gene Ontology: Mol. function=transporter activity; Cellular component= membrane; Biological process=oligopeptide transport
  Homolog annotation: Hit_ID=Q6J933; Match level="QueryCoverage=78%, HitCoverage=27%, E-value=5e-17, Identity=50%"; Hit description =Nitrate transporter (Fragment)
TSPERDPALETLAGSLLFCAIAAANYLSTALVNITRKVTARHGHTSWLTDNINNGKLDYYYYFIAILGVLNLFYFLTCSHYYQHGATWPYIDSSESM

SEQ ID NO: 124321 - protein, 61 aa, Setaria italica
  Transcript Sequence Number=SeqID_58347
  Gene Ontology: Mol. function=aspartic-type endopeptidase activity; Cellular component=membrane; Biological process=intracellular protein transport
  Homolog annotation: Hit_ID=Q9SRV7; Match level="QueryCoverage=100%, HitCoverage=19%, E-value=8e-18, Identity=65%"; Hit description =Putative syntaxin-131
LEQMDRNNLENRKKPGCGKGTSVDRSRMSMTITLKKKMKERMNDFQNLRQTIQEEYREVVE

SEQ ID NO: 124322 - protein, 51 aa, Setaria italica
  Transcript Sequence Number=SeqID_58348
LQLLGTLLVWFALDSGNRSFFLSSSSSMCKGLEKVINICDDWRVKNSKHGH

SEQ ID NO: 124323 - protein, 76 aa, Setaria italica
  misc_feature (54)..(54): Xaa can be any naturally occurring amino acid
  misc_feature (72)..(72): Xaa can be any naturally occurring amino acid
  Transcript Sequence Number=SeqID_58349
LGALASAMEEPNVGGGAAAADPAGGGAAVGAGASPWRKTTPPPAAGEAAVMGAXSWPALEEARQKVAPESPXKAGA

SEQ ID NO: 124324 - protein, 118 aa, Setaria italica
  Transcript Sequence Number=SeqID_58350
  Gene Ontology: Mol. function=kinase activity
  Homolog annotation: Hit_ID=Q6UC87; Match level="QueryCoverage=99%, HitCoverage=34%, E-value=5e-47, Identity=79%"; Hit description =Putative calcium-dependent protein kinase CPK1 adapter protein 2
VLSVGTNGMLNEMRQRVEDMVLETTRQRQRAAENEQELSRVKQDFESLRTYVSTLVSVRETLLSSEKQFETMEKLFDRLVAKTNQLETEKAQKEAEVQKVMEENVRLRAMLDKKEAQL

SEQ ID NO: 124325 - protein, 38 aa, Setaria italica
  Transcript Sequence Number=SeqID_58351
SGDGFRGTGAPPKYRFVTGSPWDWTDHELAILKEGLAR

SEQ ID NO: 124326 - protein, 114 aa, Setaria italica
  misc_feature (35)..(35): Xaa can be any naturally occurring amino acid
  Transcript Sequence Number=SeqID_58352
  Gene Ontology: Mol. function=hydrolase activity; Cellular component =chloroplast
  Homolog annotation: Hit_ID=Q6ER78; Match level="QueryCoverage=93%, HitCoverage=20%, E-value=1e-51, Identity=92%"; Hit description =Putative metallo beta subunit lactamase
KRFQAGPFEVEPIRVTHSVPDCCGLVLRCGDGIIXFHTRDWKIDESPVDGKIFDREALEELSKEGVTLMMSDSTNVLSPGRSISESVVAGSLLRHISEAKGRVITNNKLRLTKQ

SEQ ID NO: 124327 - protein, 41 aa, Setaria italica
  Transcript Sequence Number=SeqID_58353
  Gene Ontology: Mol. function=DNA binding
EIRPCLHAALSSCPVNCPLSHMERMVAEILRKMVRKYSGKR

SEQ ID NO: 124328 - protein, 110 aa, Setaria italica
  misc_feature (66)..(66): Xaa can be any naturally occurring amino acid
  Transcript Sequence Number=SeqID_58354
  Gene Ontology: Mol. function=DNA binding
LRPILSRSPARSLEGSYKTHPDNPDVEAEETLPEAVSTTPDDATTSSNGEAFFSSDLHQPKTLEHXWESFKSPTAVKIARIVNGGNKQNLGKIGILGKDPTQSAPAPVKS

SEQ ID NO: 124329 - protein, 144 aa, Setaria italica
  misc_feature (30)..(30): Xaa can be any naturally occurring amino acid
  Transcript Sequence Number=SeqID_58355
  Gene Ontology: Mol. function=DNA binding
  Homolog annotation: Hit_ID=Q011B3; Match level="QueryCoverage=86%, HitCoverage=29%, E-value=2e-17, Identity=41%"; Hit description =Putative metallo beta subunit lactamase (ISS)
MYSDGDKAFGTSTDLCIDERLRIASDGIFXVSMEIIRPQKEHASTQSGLKGKFKITTRCLWLDNGRLLDALYKAAHAALSSCPVNCPLSHMERMVAEILRKMVRKYSGKRPDVIAVATENTYLSRFSSSNYLCKFFKFLIFFWV

SEQ ID NO: 124330 - protein, 61 aa, Setaria italica
  Transcript Sequence Number=SeqID_58356
  Gene Ontology: Mol. function=carbohydrate binding; Biological process= carbohydrate metabolic process
  Homolog annotation: Hit_ID=B6SPF9; Match level="QueryCoverage=100%, HitCoverage=19%, E-value=7e-27, Identity=95%"; Hit description =Apospory-associated protein C
MAGTASVERVKDRATGLDKFVLREARGSSVEVYLYGGQVTFWKNNFGHQLLFVSNKATFKP

SEQ ID NO: 124331 - protein, 55 aa, Setaria italica
  Transcript Sequence Number=SeqID_58357
MVGQSADGPIYVVQPQDGLDHIARDVFDAFVTYQEIRTFWPTLILLGSGMLLAVA

SEQ ID NO: 124332 - protein, 77 aa, Setaria italica
  misc_feature (77)..(77): Xaa can be any naturally occurring amino acid
  Transcript Sequence Number=SeqID_58358
PQKPLSSTNPLLRVVSRQNSSCYQLSCYWVSIHLQIKTLVSVQCIDYERQVCKAGGHWSSLRLPYYYLFFPYVHVSX

SEQ ID NO: 124333 - protein, 55 aa, Setaria italica
  Transcript Sequence Number=SeqID_58359
QSGAGLVVLSPQYGGIWPFSIDLDTMDSAPVTRDMGKMVYRCELPWPPALHTCLS

SEQ ID NO: 124334 - protein, 75 aa, Setaria italica
  Transcript Sequence Number=SeqID_58360
  Gene Ontology: Mol. function=cysteine-type peptidase activity; Biological process=proteolysis
DGGSSNVILIIFWLKSLTLLLWFQFVRTHWSLVIICMPAKEDQTGPIILHLDSLKFHSSRLNRSHHTSFGFSEVS

SEQ ID NO: 124335 - protein, 62 aa, Setaria italica
  Transcript Sequence Number=SeqID_58361
MFHLKEILEESKQEKEHSKVTPDSPESIVEKLEQQEPETPEARASTKLISDGGSETKRRKSK

SEQ ID NO: 124336 - protein, 96 aa, Setaria italica
  misc_feature (65)..(65): Xaa can be any naturally occurring amino acid
  Transcript Sequence Number=SeqID_58362
SPLTKQSTEDSAFYMLNTLVENVGLDIMNPYISEIWSALFTRLQSRQAVKFVNSLVVFMSLVLVXYGSGVLVSSVDAIQPNLISPKFLLVVFLVFP

SEQ ID NO: 124337 - protein, 55 aa, Setaria italica
  Transcript Sequence Number=SeqID_58363
TYELARPSKDSSSVTPFEQLALPAPPSSSGSKSHVEPAVKPNIDLLSGDVFFKPE

SEQ ID NO: 124338 - protein, 57 aa, Setaria italica
  Transcript Sequence Number=SeqID_58364
  Homolog annotation: Hit_ID=B6U0L8; Match level="QueryCoverage=70%, HitCoverage=5%, E-value=3e-11, Identity=77%"; Hit description=VHS and GAT domain protein
  Subcellular localization annotation: CTP_CleavageSite=34; ConfidenceScore=5.11e-01
VPPQHPVPPQHPSPYSNGLNSNTLAPYDQGSNLTSASSWNGQFAHGAIPPQQSPNYV

SEQ ID NO: 124339 - protein, 51 aa, Setaria italica
  Transcript Sequence Number=SeqID_58365
CSDDWNLYFFFICRPLLTVEHSRLSYQKVVLNVAGMIINKSVDWNSSDLNL

SEQ ID NO: 124340 - protein, 55 aa, Setaria italica
  Transcript Sequence Number=SeqID_58366
SSFPKGSHLLNHFCICQIFNPGKGLSSLSFLFAQPFPRVEYLTDTKGKPSLESLL

SEQ ID NO: 124341 - protein, 127 aa, Setaria italica
  Transcript Sequence Number=SeqID_58367
  Subcellular localization annotation: CTP_CleavageSite=61; ConfidenceScore=5.52e-01
SHKSPNSLNLASTFCLISSALGRPHPEESLVARRSTSRCMPLAPAVLTSCCPTHPCTQKTRCRRGSSTGHEVVRQLARCRFEVVTSYSHGRLLPVVAGAPPGTRIPLAMRWSVSHQAVACPRWSMSS

SEQ ID NO: 124342 - protein, 91 aa, Setaria italica
  misc_feature (17)..(17): Xaa can be any naturally occurring amino acid
  Transcript Sequence Number=SeqID_58368
  Subcellular localization annotation: CTP_CleavageSite=16; ConfidenceScore=5.29e-01
MRRFLAHLQRQSHIVLXSPTRKPSPTTTLPFLLPRRLLSEDASPPAAAPPPPPIAADVPNAGTLFPALFDPIGEGKLRNPTSRDTDLQCFR

SEQ ID NO: 124343 - protein, 87 aa, Setaria italica
  Transcript Sequence Number=SeqID_58369
  Subcellular localization annotation: CTP_CleavageSite=63; ConfidenceScore=5.40e-01
PLCALPIPCCVSQRSGSGRADGRAAFRGPTGDPRRRSSIGSRLRAPWYHGRRRFVRGSVEFLQAVTFSSPSSSPSSLGLHGHGMVQS

SEQ ID NO: 124344 - protein, 139 aa, Setaria italica
  misc_feature (18)..(18): Xaa can be any naturally occurring amino acid
  Transcript Sequence Number=SeqID_58370
  Gene Ontology: Mol. function=protein serine/threonine kinase activity; Cellular component=plasma membrane; Biological process =protein amino acid phosphorylation
  Homolog annotation: Hit_ID=Q9FM43; Match level="QueryCoverage=72%, HitCoverage=28%, E-value=2e-51, Identity=88%"; Hit description =Protein kinase ATN1
  Pfam annotation: Domain name=Pkinase_Tyr; Domain location=1-119; Score=-127.1; E_value=2.8e-05; Accession=PF07714.9; Description =Protein tyrosine kinase
SWFRLREETLTEMMTAEXTGTYRWMAPELYSTVTLRHGEKKHYNHKVDVYSFAIVLWELLHNRLPFEGMSNLQAAYAAAFKNIRPSADNLPQELSEILTSCWKEDPNDRPNFTQIVQMLLTINLIPTLLRPTKKTLRNP

SEQ ID NO: 124345 - protein, 103 aa, Setaria italica
  misc_feature (29)..(29): Xaa can be any naturally occurring amino acid
  Transcript Sequence Number=SeqID_58371
SCVHCFPPSLFAENLLLTADQRTVKLVDXGLGLREETLTEMMTAETGTYRWMAPEVSIIHSYLSNSGSFVFCIIFVNVSWNVSTAVQHSYVEAWRKSITTTKW

SEQ ID NO: 124346 - protein, 37 aa, Setaria italica
  Transcript Sequence Number=SeqID_58372
  Gene Ontology: Mol. function=protein serine/threonine kinase activity
MESGSSFYAGEGLSIDPKWLIDPKLLFVGPRIGEGAH

SEQ ID NO: 124347 - protein, 54 aa, Setaria italica
  Transcript Sequence Number=SeqID_58373
LHLVHRQSQKFGRKEHMIQSGGASKWLLVELDCCSILLLNIYAACIQEEASSVE

SEQ ID NO: 124348 - protein, 58 aa, Setaria italica
  Transcript Sequence Number=SeqID_58374
  Gene Ontology: Mol. function=metal ion binding
  Homolog annotation: Hit_ID=B9S5Q7; Match level="QueryCoverage=96%, HitCoverage=14%, E-value=9e-18, Identity=64%"; Hit description =Ubiquitin-protein ligase, putative
  Pfam annotation: Domain name=zf-C3HC4; Domain location=6-45; Score =13.4; E_value=0.003; Accession=PF00097.17; Description=Zinc finger, C3HC4 type (RING finger)
GDGQLCVVCLRKRRKAAFIPCGHLVCCCKCALRMERETEPLCPMCRQDIRYMMRIYDS

SEQ ID NO: 124349 - protein, 90 aa, Setaria italica
  Transcript Sequence Number=SeqID_58375
  Gene Ontology: Mol. function=metal ion binding
LGLGTAAVAVASWVKYLAVSGQLRLVASAATASIADLRSLLPGDGGEPRVAAVRGYVRPKPGGNILRVPWSGEHGVVTKHTQMCLFTEWR

SEQ ID NO: 124350 - protein, 82 aa, Setaria italica
  Transcript Sequence Number=SeqID_58376
  Gene Ontology: Mol. function=transcription factor binding; Cellular component=intracellular; Biological process=regulation of transcription, DNA-dependent
  Homolog annotation: Hit_ID=B9T5U9; Match level="QueryCoverage=62%, HitCoverage=15%, E-value=7e-17, Identity=74%"; Hit description=GTP -binding protein yptv3, putative
  Subcellular localization annotation: CTP_CleavageSite=61; ConfidenceScore=5.11e-01
MMFWRDGGGSGSGSGRDSLSGGPPCGQVRVLVVGDSGVGKSSLVHLLLNGSAVARPAQTIGCAVGVKHITYSSPNNWMCSWC

SEQ ID NO: 124351 - protein, 59 aa, Setaria italica
  Transcript Sequence Number=SeqID_58377
  Gene Ontology: Mol. function=transcription factor binding; Cellular component=intracellular; Biological process=regulation of transcription, DNA-dependent
  Homolog annotation: Hit_ID=B6TV03; Match level="QueryCoverage=100%, HitCoverage=17%, E-value=1e-18, Identity=74%"; Hit description=RAB, member of RAS oncogene family-like 3
KSSLVHLLLNGSAVARPAQTIGCAVGVKHITYSSPGSSSNSIKADAERNFFVELWDVSG

SEQ ID NO: 124352 - protein, 63 aa, Setaria italica
  misc_feature (25)..(25): Xaa can be any naturally occurring amino acid
  Transcript Sequence Number=SeqID_58378
FQESSYMDPNQSLCLGALFNIAATXNGLDMGRRLCIFGFCRSIEMLSDVVEDTVLEHGGENEN

SEQ ID NO: 124353 - protein, 46 aa, Setaria italica
  misc_feature (44)..(44): Xaa can be any naturally occurring amino acid
  Transcript Sequence Number=SeqID_58379
VSPCLSLVCKGRHFWQVVTAEKASNDGLQEKLTMSVAVPLLWGXPP

SEQ ID NO: 124354 - protein, 59 aa, Setaria italica
  Transcript Sequence Number=SeqID_58380
DQLSVCKQMKRGTMHAGKNNDGKEKAFDSVSNNGPVLNDRKEKAFDSVSDNGPVLNDDD

SEQ ID NO: 124355 - protein, 98 aa, Setaria italica
  misc_feature (75)..(75): Xaa can be any naturally occurring amino acid
  Transcript Sequence Number=SeqID_58381
  Gene Ontology: Mol. function=unfolded protein binding; Cellular component=cell wall; Biological process=protein folding
  Homolog annotation: Hit_ID=B6UCZ5; Match level="QueryCoverage=100%, HitCoverage=18%, E-value=1e-40, Identity=81%"; Hit description=Heat shock protein 83
VVVSTKSPKSDKQYVWEGEADSSSYTVREEKDPEKLIPRGTRLTLYLKRDDKGFAHPERIQKTCKELLSVCSFPXYTWQEKGFTKEVEVDEDPAEPKR

SEQ ID NO: 124356 - protein, 81 aa, Setaria italica
  Transcript Sequence Number=SeqID_58382
  Gene Ontology: Mol. function=unfolded protein binding; Cellular component=cell wall; Biological process=protein folding
  Homolog annotation: Hit_ID=B9T0C8; Match level="QueryCoverage=100%, HitCoverage=10%, E-value=3e-37, Identity=92%"; Hit description=Heat shock protein, putative
LKRVFISDDFDGELFPRYLSFVKGVVDSNDLPLNVSREILQESRIVRIMRKRLVRKAFDMILGISCSENRDDYERFWENYG

SEQ ID NO: 124357 - protein, 55 aa, Setaria italica
  Transcript Sequence Number=SeqID_58383
VAIQNLASYKDKKFVDISKEDLDLGMHIEVLSISHYLLANLPYCGKIVSFCFHPD

SEQ ID NO: 124358 - protein, 80 aa, Setaria italica
  Transcript Sequence Number=SeqID_58384
  Gene Ontology: Mol. function=unfolded protein binding; Cellular component=cell wall; Biological process=protein folding
  Homolog annotation: Hit_ID=B9T0C8; Match level="QueryCoverage=68%, HitCoverage=6%, E-value=2e-15, Identity=61%"; Hit description=Heat shock protein, putative
MQVACRSNPDDPEALKVLDVLFETAMISSGFTPDNPAELSGKIYDMMSSAIAGKWSSQSQAPFASAFPEHDAPHVPSFPP

SEQ ID NO: 124359 - protein, 62 aa, Setaria italica
  Transcript Sequence Number=SeqID_58385
  Gene Ontology: Mol. function=unfolded protein binding; Cellular component=cell wall; Biological process=protein folding
  Homolog annotation: Hit_ID=B9T0C8; Match level="QueryCoverage=91%, HitCoverage=7%, E-value=2e-15, Identity=63%"; Hit description=Heat shock protein, putative
IKGLNVACRSNPDDPEALKVLDVLFETAMISSGFTPDNPAELSGKIYDMMSSAIAGNGTYNK

SEQ ID NO: 124360 - protein, 47 aa, Setaria italica
  Transcript Sequence Number=SeqID_58386
KSVQDLQCNFNPSNSFRMITVHVKSFSCQSHCSYDCIWTFYFYIASI

SEQ ID NO: 124361 - protein, 49 aa, Setaria italica
  Transcript Sequence Number=SeqID_58387
  Gene Ontology: Mol. function=nucleic acid binding; Cellular component= ribosome
  Homolog annotation: Hit_ID=B6TDF7; Match level="QueryCoverage=73%, HitCoverage=14%, E-value=1e-13, Identity=97%"; Hit description =Plastid-specific 30S ribosomal protein 2
LSPVCLAYLLLRVSDELRDMFAAHGTVERAEVMYDKYTNRSRRFGFVTM

SEQ ID NO: 124362 - protein, 67 aa, Setaria italica
  misc_feature (7)..(7): Xaa can be any naturally occurring amino acid
  Transcript Sequence Number=SeqID_58388
GCDLFVXYRSEEDLEHAPFIYVVDGALSSVAAETNPHDAPVPPCITQLEGGLVQVAIEVEDRAQRSA

SEQ ID NO: 124363 - protein, 130 aa, Setaria italica
  misc_feature (10)..(10): Xaa can be any naturally occurring amino acid
  misc_feature (36)..(36): Xaa can be any naturally occurring amino acid
  misc_feature (73)..(73): Xaa can be any naturally occurring amino acid
  Transcript Sequence Number=SeqID_58389
AVDAGRVTGXIVRRFNDLEASALFRWLLQVQGDFRXERLLADDLFFAKLAMELGSGVIAKTAAEYEKRRENFXSKRFDIVIADVIMAIVADFMLVYLPAPTVSLQPPLARNAGAIANFFHNCPDNAFQVN

SEQ ID NO: 124364 - protein, 77 aa, Setaria italica
  misc_feature (41)..(41): Xaa can be any naturally occurring amino acid
  Transcript Sequence Number=SeqID_58390
GYFRERLLADDLFFAKLAMELGVGVIAKTAAEYEKRRENFXKEIDIVIADVIMAIVADFMLVYLPAPTVSLQPPLAR

SEQ ID NO: 124365 - protein, 55 aa, Setaria italica
  Transcript Sequence Number=SeqID_58391
  Gene Ontology: Mol. function=ATP binding
  Homolog annotation: Hit_ID=Q8RU45; Match level="QueryCoverage=78%, HitCoverage=9%, E-value=6e-13, Identity=74%"; Hit description =Putative rubisco activase
HITVSLALQWVDQIGGHEKLGEKLLKQKRGEKLPTFIPPKQTIEALIESGHSSWL

SEQ ID NO: 124366 - protein, 116 aa, Setaria italica
  misc_feature (49)..(49): Xaa can be any naturally occurring amino acid
  Transcript Sequence Number=SeqID_58392
  Gene Ontology: Mol. function=mismatched DNA binding; Cellular component=nucleus; Biological process=mismatch repair
  Homolog annotation: Hit_ID=B9SAN7; Match level="QueryCoverage=99%, HitCoverage=12%, E-value=2e-37, Identity=72%"; Hit description=DNA mismatch repair protein pms2, putative
  Pfam annotation: Domain name=MutL_C; Domain location=32-114; Score =4.3; E_value=3e-05; Accession=PF08676.3; Description=MutL C terminal dimerisation domain
PSGDEAKSNSLAAATNELDRLFSKDDFGQMEVVGQFNLGFIIGKLDQDXFIVDQHAADEKYNFEGLSQSTTLNIQPLLQPLRLDLSPEEEVIVSMNMNTIRTNGFVLEEDLHCFPP

SEQ ID NO: 124367 - protein, 68 aa, Setaria italica
  Transcript Sequence Number=SeqID_58393
  Gene Ontology: Mol. function=mismatched DNA binding; Biological process=mismatch repair
  Homolog annotation: Hit_ID=B9SAN7; Match level="QueryCoverage=64%, HitCoverage=4%, E-value=9e-12, Identity=75%"; Hit description=DNA mismatch repair protein pms2, putative
AFQQKYWLPGEACKSSSRTNGFVLEEDLHASPGNHYLLKAVPFSKNITFGVQDVKELISMLLIIEQSP

SEQ ID NO: 124368 - protein, 82 aa, Setaria italica
  Transcript Sequence Number=SeqID_58394
IWHFPVICGFLVVQHGPSVHTSKLFDLYSGIVLFEFYKEKKQEGNGRNNFLASYKVTAALLNTLYEKCHAPCVTLVPSLCYY

SEQ ID NO: 124369 - protein, 53 aa, Setaria italica
  Transcript Sequence Number=SeqID_58395
FWERMLCTHISRLFSRAWSSPRFMCHAINIMDDVERKHYHSNGLGTPSINIGS

SEQ ID NO: 124370 - protein, 100 aa, Setaria italica
  misc_feature (93)..(93): Xaa can be any naturally occurring amino acid
  Transcript Sequence Number=SeqID_58396
  Gene Ontology: Mol. function=nucleic acid binding
  Homolog annotation: Hit_ID=Q6J734; Match level="QueryCoverage=100%, HitCoverage=11%, E-value=7e-52, Identity=95%"; Hit description=AML15
  Pfam annotation: Domain name=RRM_2; Domain location=1-93; Score =213.5; E_value=5.5e-61; Accession=PF04059.4; Description=RNA recognition motif 2
MIKNIPNKYTSKMLLAAIDELHKGTYDFFYLPIDFKNKCNVGYAFINMISPTHIISFYQAFNGKKWEKFNSEKVASLAYARIQGRTALISHFXNSSLMNE

SEQ ID NO: 124371 - protein, 56 aa, Setaria italica
  Transcript Sequence Number=SeqID_58397
IVFHRHVNAYAIDWKCILGFIRGISNSFHSFQAHAIIYLLQQQRGAGCSPVFPDFR

SEQ ID NO: 124372 - protein, 42 aa, Setaria italica
  Transcript Sequence Number=SeqID_58398
GCRPQTLRPARTHATPRHKIHLILYTQFWGSITFTLDSQIMI

SEQ ID NO: 124373 - protein, 48 aa, Setaria italica
  Transcript Sequence Number=SeqID_58399
DIPTEIMKHVKLSENKEYCNNNFWHLANSNGSQMNNYCKLGPKLPDCH

SEQ ID NO: 124374 - protein, 85 aa, Setaria italica
  misc_feature (6)..(6): Xaa can be any naturally occurring amino acid
  misc_feature (23)..(23): Xaa can be any naturally occurring amino acid
  misc_feature (38)..(38): Xaa can be any naturally occurring amino acid
  Transcript Sequence Number=SeqID_58400
  Gene Ontology: Mol. function=ATPase activity, coupled to transmembrane movement of ions, phosphorylative mechanism; Cellular component=integral to membrane; Biological process=phospholipid transport
  Homolog annotation: Hit_ID=Q10LU3; Match level="QueryCoverage=94%, HitCoverage=6%, E-value=1e-27, Identity=79%"; Hit description =Phospholipid-translocating P-type ATPase, flippase family protein, expressed
EFIEWXESMKKLVPPLHERSAKXRQTAGLVECNLTLLXTGIEDKLQDGVPEAIESLRQAGIKVWVLTGDKQETAISIGLSIVRTS

SEQ ID NO: 124375 - protein, 58 aa, Setaria italica
  Transcript Sequence Number=SeqID_58401
  Gene Ontology: Mol. function=ATPase activity, coupled to transmembrane movement of ions, phosphorylative mechanism; Cellular component=integral to membrane; Biological process=phospholipid transport
  Homolog annotation: Hit_ID=Q10LU3; Match level="QueryCoverage=65%, HitCoverage=2%, E-value=5e-10, Identity=81%"; Hit description =Phospholipid-translocating P-type ATPase, flippase family protein, expressed
DWSSVFYSLIYTSVPTVVVGILDKDLSHNTLHSWSRCFLFPYIHLSSNCSRLAFWTRT

SEQ ID NO: 124376 - protein, 54 aa, Setaria italica
  Transcript Sequence Number=SeqID_58402
  Gene Ontology: Mol. function=ATPase activity, coupled to transmembrane movement of ions, phosphorylative mechanism; Cellular component=integral to membrane; Biological process=phospholipid transport
  Homolog annotation: Hit_ID=Q10LU3; Match level="QueryCoverage=96%, HitCoverage=3%, E-value=9e-26, Identity=100%"; Hit description =Phospholipid-translocating P-type ATPase, flippase family protein, expressed
SIPIFPNYGTIYNMAASRTYWLSVCLIIVLGLLPRFLCKVIYQTFWPSDIQITM

SEQ ID NO: 124377 - protein, 80 aa, Setaria italica
  Transcript Sequence Number=SeqID_58403
MDSLLASYASSDDEADEAPPAPAPAAARGGEAGAKPPTASSGGGGGIFSSLPQPKSAALFSSLPPPKSCPCPQRGPGTVT

SEQ ID NO: 124378 - protein, 68 aa, Setaria italica
  misc_feature (1)..(27): Xaa can be any naturally occurring amino acid
  Transcript Sequence Number=SeqID_58404
XXXXXXXXXXXXXXXXXXXXXXXXXXXRLQLHQPSMASCCSFSTKGWLQKCVLICCQLPCCTNNPTPC

SEQ ID NO: 124379 - protein, 55 aa, Setaria italica
  Transcript Sequence Number=SeqID_58405
LVHLLQKVSLLEELANSLHFSNGITAGSTYHLLGIKSQQLGAHILLELEVNVNAN

SEQ ID NO: 124380 - protein, 76 aa, Setaria italica
  Transcript Sequence Number=SeqID_58406
ELANSLHFSNGITAGSTYHLLGIKSQQLGAHILLEHGRRDDRSDPELLQRIHRPTMSSSSICIYIISFPCRSILQP

SEQ ID NO: 124381 - protein, 123 aa, Setaria italica
  misc_feature (115)..(115): Xaa can be any naturally occurring amino acid
  Transcript Sequence Number=SeqID_58407
TDENKQKDENNVSPDILCTRNLENRCLSVSLPFHPSYSFFDDALTDTINVWFYSFSKLRHYYQLASSFFPIKHSLVHKSLQHVFCLAFYLRLNLQNMLFIDCTLLARTAPLLSKXIPTKHHQR

SEQ ID NO: 124382 - protein, 62 aa, Setaria italica
  Transcript Sequence Number=SeqID_58408
GAAFGSPVFTVDGVLVGICFDNRGAVRANKVQSIKQHVLKIQTQIKACNMSFAYTQTKRYCK

SEQ ID NO: 124383 - protein, 96 aa, Setaria italica
  Transcript Sequence Number=SeqID_58409
  Gene Ontology: Mol. function=catalytic activity; Cellular component =membrane; Biological process=plant-type hypersensitive response
  Homolog annotation: Hit_ID=B6TB18; Match level="QueryCoverage=93%, HitCoverage=29%, E-value=2e-43, Identity=92%"; Hit description=Lipid phosphate phosphatase 3
  Pfam annotation: Domain name=PAP2; Domain location=3-96; Score=19.4; E_value=0.00015; Accession=PF01569.13; Description=PAP2 superfamily
SFQVYDNITTGVICHGEKSVIKEGHKSFPSGHSSWSFAGLGFLAWYLAGKITAFDRKGHVAKLCIVFLPLLTASLVAVSRVDDYWHHWQDVLLALL

SEQ ID NO: 124384 - protein, 100 aa, Setaria italica
  misc_feature (75)..(75): Xaa can be any naturally occurring amino acid
  misc_feature (94)..(94): Xaa can be any naturally occurring amino acid
  Transcript Sequence Number=SeqID_58410
  Gene Ontology: Mol. function=catalytic activity; Cellular component =membrane; Biological process=plant-type hypersensitive response
  Homolog annotation: Hit_ID=B6TB18; Match level="QueryCoverage=89%, HitCoverage=28%, E-value=1e-42, Identity=91%"; Hit description=Lipid phosphate phosphatase 3
  Pfam annotation: Domain name=PAP2; Domain location=1-98; Score=35.1; E_value=2.7e-07; Accession=PF01569.13; Description=PAP2 superfamily
VVNSKVRFYKSFPSGHSSWSFAGLGFLAWYLAGKITAFDRKGHVAKLCIVFLPLLTASLVAVSRVDDYWHHWQDXFAGAIIGLTVASFCYLQFXPYPLML

SEQ ID NO: 124385 - protein, 139 aa, Setaria italica
  misc_feature (13)..(13): Xaa can be any naturally occurring amino acid
  Transcript Sequence Number=SeqID_58411
  Gene Ontology: Mol. function=ARF GTPase activator activity; Cellular component=Golgi apparatus; Biological process=regulation of ARF GTPase activity
  Homolog annotation: Hit_ID=Q5KQL0; Match level="QueryCoverage=96%, HitCoverage=34%, E-value=5e-44, Identity=68%"; Hit description =Putative zinc finger protein
KPNESLYEQKPEXPKPVVPALTTTSTTKSGPSLHSRFEYMENEPSADSKSGGSHVTGHVAPPKTSDFFQEYGMGNGFQKKSSNASKTQIQETDEARKKFSNAKAISSSQFFGTQNREEKEAQLYPYKKFRRVNLTNNQI

SEQ ID NO: 124386 - protein, 55 aa, Setaria italica
  Transcript Sequence Number=SeqID_58412
WPPISSATSTECFKHSIEPRLVAFSYLHQNTASSFDCGASPTIQSNYLDNKTLSK

SEQ ID NO: 124387 - protein, 71 aa, Setaria italica
  Transcript Sequence Number=SeqID_58413
  Gene Ontology: Mol. function=ubiquitin thiolesterase activity; Cellular component=nucleus; Biological process=ubiquitin-dependent protein catabolic process
  Homolog annotation: Hit_ID=Q2QQM3; Match level="QueryCoverage=100%, HitCoverage=6%, E-value=2e-36, Identity=100%"; Hit description =Ubiquitin-specific protease 12, putative, expressed
EAEVAVRRMVDYWTYDSKKETGYVGLKNQGATCYMNSLLQTLYHIPYFRKAVYHMPTTENDMPSGSIPLAL

SEQ ID NO: 124388 - protein, 102 aa, Setaria italica
  Transcript Sequence Number=SeqID_58414
DYPCMHNGVSTPCMNQNESELHKFQKQIVYKEPSWLLINGTGMTTVRQKGVAKPNTAFVQPDNFSYIQIHIIRTGRELKLVGYFLKNTKQTTAAGLRCATRG

SEQ ID NO: 124389 - protein, 83 aa, Setaria italica
  misc_feature (16)..(16): Xaa can be any naturally occurring amino acid
  Transcript Sequence Number=SeqID_58415
  Gene Ontology: Mol. function=metal ion binding
  Homolog annotation: Hit_ID=B6TIX4; Match level="QueryCoverage=95%, HitCoverage=18%, E-value=1e-21, Identity=65%"; Hit description =Palmitoyltransferase ZDHHC9
SCTFRDLEAGLGGMFXEKEGRIAHASPDMSRDELPVEFVDGRAGMHSRESSWVRRGTDEFEASMAAFGLEADGGNSVARTGTH

SEQ ID NO: 124390 - protein, 82 aa, Setaria italica
  misc_feature (35)..(35): Xaa can be any naturally occurring amino acid
  misc_feature (56)..(56): Xaa can be any naturally occurring amino acid
  Transcript Sequence Number=SeqID_58416
  Gene Ontology: Mol. function=metal ion binding
  Homolog annotation: Hit_ID=B6TIX4; Match level="QueryCoverage=71%, HitCoverage=13%, E-value=6e-19, Identity=80%"; Hit description =Palmitoyltransferase ZDHHC9
VFYCSPLTIGVSPYLVVFFVNWVRKPVPWDEPRQXLDIRDLEAGLGGMFEEKEGRXAHASPDMSRDELPVEFVDGRAGMHSR

SEQ ID NO: 124391 - protein, 66 aa, Setaria italica
  misc_feature (40)..(40): Xaa can be any naturally occurring amino acid
  Transcript Sequence Number=SeqID_58417
  Gene Ontology: Mol. function=metal ion binding
  Homolog annotation: Hit_ID=B6TJ53; Match level="QueryCoverage=65%, HitCoverage=9%, E-value=5e-13, Identity=74%"; Hit description =Palmitoyltransferase ZDHHC9
ILKQTYLRRIITDNCYSPFQEQIFRARVTVEQGLQQTALXSRGFMSPNMGKPIGDLEMGRKPVPWD

SEQ ID NO: 124392 - protein, 43 aa, Setaria italica
  Transcript Sequence Number=SeqID_58418
  Homolog annotation: Hit_ID=B6SIX4; Match level="QueryCoverage=100%, HitCoverage=36%, E-value=3e-13, Identity=83%"; Hit description =Succinate dehydrogenase subunit 3
MEKYNNNTRFAPLRDAPFAVRGALGSSSSNLEQARGYTSSPLA

SEQ ID NO: 124393 - protein, 45 aa, Setaria italica
  Transcript Sequence Number=SeqID_58419
RNSRMVNCLQSFGNGQCNPSIYYLFFLLVCIYIYIIMYEYMDVVH

SEQ ID NO: 124394 - protein, 36 aa, Setaria italica
  misc_feature (8)..(8): Xaa can be any naturally occurring amino acid
  Transcript Sequence Number=SeqID_58420
VHDHREKXPGYVACTIAAAIAAVAILFGITKGTHVW

SEQ ID NO: 124395 - protein, 77 aa, Setaria italica
  Transcript Sequence Number=SeqID_58421
  Subcellular localization annotation: CTP_CleavageSite=72; ConfidenceScore=5.15e-01
ERAGPTRQQSGSEAKANMPVHGTGASILSIVRCHGQARALLRFWSRSSCVRRRPPSQGRGTLELNKPEGTLREMQVG

SEQ ID NO: 124396 - protein, 84 aa, Setaria italica
  Transcript Sequence Number=SeqID_58422
MDRYVRLSFRSRSVLWPFFFDSEDLWVAPWIPLVDLFSDFSPGSGRSGKDPGGCGWGSSRRAGGRLGLVQRRGSRADGGGASPL

SEQ ID NO: 124397 - protein, 101 aa, Setaria italica
  Transcript Sequence Number=SeqID_58423
PAIQLSAGHNQDFTKSLSQAPELQSCKPVDKKHRSDHMLFHFTKTFYQPSWDILIRKCFLKYTKQRKLANHKSNRILTRQAFLIIFTNKIRAKTGWTIWLF

SEQ ID NO: 124398 - protein, 63 aa, Setaria italica
  Transcript Sequence Number=SeqID_58424
HAFDYCAFLMFGDNLCLLDHDPSLQIMSLIIVLLASSMIFVYFRVQLVAVGSSIFLLMTKLHG

SEQ ID NO: 124399 - protein, 93 aa, Setaria italica
  Transcript Sequence Number=SeqID_58425
SSIALLQQRFRELERIREKREERLLHVLAPRPAATATAAQREMPVKWFFHPELLYPCRPLRDTAVTAAALFPAVVRTYLSLFVNLFFKSFFFL

SEQ ID NO: 124400 - protein, 69 aa, Setaria italica
  Transcript Sequence Number=SeqID_58426
  Gene Ontology: Mol. function=transferase activity; Biological process= response to stress
  Homolog annotation: Hit_ID=Q9FQA4; Match level="QueryCoverage=100%, HitCoverage=28%, E-value=4e-19, Identity=66%"; Hit description =Glutathione S-transferase GST 35
ERAVARFWVAYIDDKLAPPWDRVFRAKTDEERDEAMMQIFSAAGALEGGLRECSKGKDFFGGDSVGYVD

SEQ ID NO: 124401 - protein, 51 aa, Setaria italica
  Transcript Sequence Number=SeqID_58427
QRQGLYFQSRATGVVVDFSEPSTVYDNVKQVCQLSTLLTISKIVLLLTYSK

SEQ ID NO: 124402 - protein, 74 aa, Setaria italica
  misc_feature (29)..(29): Xaa can be any naturally occurring amino acid
  misc_feature (34)..(34): Xaa can be any naturally occurring amino acid
  Transcript Sequence Number=SeqID_58428
KMQTQDIACLKVVILDLLNARESLIEKNXNTVFXQVKYVSDILFEFTISNHFCPQHYKVVKFPSSSVFTKNEYQ

SEQ ID NO: 124403 - protein, 58 aa, Setaria italica
  Transcript Sequence Number=SeqID_58429
MASSARNIMFRHLKTLTISPALASGVTSQHHQLQQRAPVEGAPFFAPMVERFNCCPAL

SEQ ID NO: 124404 - protein, 103 aa, Setaria italica
  Transcript Sequence Number=SeqID_58430
MTPAHHTFDFSIYLSIVLSVYASVLMCPFAQPLLQDSCDMPPEHGMPTGTADAVANRRPRRLFGRPSERKNPLNLQFERQVARLESRQQQQRCTDVLLLNFLP

SEQ ID NO: 124405 - protein, 58 aa, Setaria italica
  misc_feature (41)..(41): Xaa can be any naturally occurring amino acid
  Transcript Sequence Number=SeqID_58431
IPEPSRSAISCPGLRGQCNSSNLRYLDSAQNSVFTGSAQEXCYAAETRNEGVARHTRG

SEQ ID NO: 124406 - protein, 52 aa, Setaria italica
  Transcript Sequence Number=SeqID_58432
  Gene Ontology: Mol. function=transferase activity
DEEEYPALRRWAAEYSSSEAVKECLPDRARLLSYFGAIREKCVLVANSTLPK

SEQ ID NO: 124407 - protein, 66 aa, Setaria italica
  Transcript Sequence Number=SeqID_58433
CAVGGECNDDGDRRPNMLKHYWMMMMMSSMFIWAPSSWPPRRTSPDRAEVGEKPGHVRPAGTPSPL

SEQ ID NO: 124408 - protein, 58 aa, Setaria italica
  Transcript Sequence Number=SeqID_58434
  Homolog annotation: Hit_ID=B9RJH4; Match level="QueryCoverage=93%, HitCoverage=12%, E-value=5e-10, Identity=57%"; Hit description=WD -repeat protein, putative
YRGKRLNGYRNYESLSRSHELLDSECKQVDKKSTFYDFCFNTRLARTMVVHFQMLRYF

SEQ ID NO: 124409 - protein, 54 aa, Setaria italica
  Transcript Sequence Number=SeqID_58435
HCCDIGQHCNTILSPGPISRWTSILSGRRCCQDICGIWYGRLFMISEPLLDNSC

SEQ ID NO: 124410 - protein, 100 aa, Setaria italica
  misc_feature (11)..(11): Xaa can be any naturally occurring amino acid
  Transcript Sequence Number=SeqID_58436
  Homolog annotation: Hit_ID=Q9SGZ4; Match level="QueryCoverage=82%, HitCoverage=15%, E-value=2e-24, Identity=65%"; Hit description =F28K19.28
LGGRIGAVRGXLRFSPDGRFLAAAEAADFVHVYDAAAGYAGAEQEVDLFGEVAGAAFSPDGEALFVSVADRTYGGVLEFRRRSVRYVLTFVTFVFFSFLC

SEQ ID NO: 124411 - protein, 46 aa, Setaria italica
  Transcript Sequence Number=SeqID_58437
  Homolog annotation: Hit_ID=C3SA93; Match level="QueryCoverage=100%, HitCoverage=11%, E-value=4e-14, Identity=78%"; Hit description=WD-40 repeat family
FCTNLTGNNYSITNAVDIFESPDGATRVMAANNDCVVRTFDTARIN

SEQ ID NO: 124412 - protein, 64 aa, Setaria italica
  Transcript Sequence Number=SeqID_58438
AAGTLTTGWEYVSCQLKWCAKHGIRLELLCVIILKLRNLLWAASKHDVYLVQNYSVMHWSPLFQ

SEQ ID NO: 124413 - protein, 62 aa, Setaria italica
  Transcript Sequence Number=SeqID_58439
SAMGHKGFTYNVSLTGPLFHGINVGAIVCHRFVKVVLTWDFNNTKFLSAFVLQIIDTTIYRL

SEQ ID NO: 124414 - protein, 66 aa, Setaria italica
  Transcript Sequence Number=SeqID_58440
FCTRYTSCFEAAHRRFLNFRMMTHNSSKRIPCFAHHFNWHETVTRSISLHTMSVSMRSLSNAMCKV

SEQ ID NO: 124415 - protein, 61 aa, Setaria italica
  Transcript Sequence Number=SeqID_58441
ILRFTDCRHRIWNIECSISSCILSMKIEALSKLTCMSLCAIPLMHWYQPYNFTSTDRTSST

SEQ ID NO: 124416 - protein, 67 aa, Setaria italica
  Transcript Sequence Number=SeqID_58442
RMHDSGTWHLSFLNGKSIMKLVDPFSHPACTDGRISSTLYVLMCDPTNALVPTLQFYKHRPNKTRQT

SEQ ID NO: 124417 - protein, 60 aa, Setaria italica
  Transcript Sequence Number=SeqID_58443
HASMTEEPSAGNYPTLSSFSFTNKQQKTNDLMITLEETHLQKEATSSQNISHVNNHIKHN

SEQ ID NO: 124418 - protein, 44 aa, Setaria italica
  Transcript Sequence Number=SeqID_58444
KACKYDRRALGWNYPTLSSFSSSTSHVLNCMNKKSEEISILNCL

SEQ ID NO: 124419 - protein, 112 aa, Setaria italica
  misc_feature (42)..(42): Xaa can be any naturally occurring amino acid
  Transcript Sequence Number=SeqID_58445
LKEADEEAAAAVPQEAVAVIPQEAAVVVLQEAAVVVSQPQKXLPVPTTHAPTLFQPGEGSQSQGILNNNAFKHASIGSGFQPFVRNKDSNNTKESLKAEDNMNSSVASSSTV

SEQ ID NO: 124420 - protein, 105 aa, Setaria italica
  Transcript Sequence Number=SeqID_58446
LPSSGCCCSRKLLLVPLAERFKLYAFTHDMGSRGRMLFDLNELPAEADEEAAAAVPQEAIAVIPQVSLVLLSCYKKLLSSCHNLRNPFLFPQRMPQLCFSQGKDL

SEQ ID NO: 124421 - protein, 106 aa, Setaria italica
  Transcript Sequence Number=SeqID_58447
  Homolog annotation: Hit_ID=B9RJG9; Match level="QueryCoverage=100%, HitCoverage=7%, E-value=5e-37, Identity=70%"; Hit description =Splicing endonuclease positive effector sen1, putative
WPFTLVQGPPGTGKTHTVWGMLNVIHLVQYQHYYAALLKKLAPESYKQVSGSTSTSSETVAAGSIDELLQSMDQNLFRIPPPPPPPFKLCPKPRMLVCAPSNAATD

SEQ ID NO: 124422 - protein, 76 aa, Setaria italica
  Transcript Sequence Number=SeqID_58448
  Gene Ontology: Mol. function=aspartic-type endopeptidase activity; Cellular component=nucleus; Biological process=regulation of transcription, DNA-dependent
  Homolog annotation: Hit_ID=B6SYP8; Match level="QueryCoverage=97%, HitCoverage=21%, E-value=8e-12, Identity=51%"; Hit description =Nuclear transcription factor Y subunit A-10
  Pfam annotation: Domain name=CBFB_NFYA; Domain location=16-72; Score =133.0; E_value=9.7e-37; Accession=PF02045.7; Description=CCAAT -binding transcription factor (CBF-BNF-YA) subunit B
MQSSGRLLLPLNAPADAPIYVNPKQYEGILRRRRARAKAERENRLAKGRKPYLHESRHLHAMRRARGSGGRFLKQR

SEQ ID NO: 124423 - protein, 87 aa, Setaria italica
  misc_feature (2)..(2): Xaa can be any naturally occurring amino acid
  misc_feature (14)..(14): Xaa can be any naturally occurring amino acid
  Transcript Sequence Number=SeqID_58449
  Subcellular localization annotation: CTP_CleavageSite=27; ConfidenceScore=5.42e-01
SXLIKFLVFFHNLXVFSSISSWASCLCSSTFFAASSCCPISAPTTARPLHHPASPALHPHAHSPRHGVPPPPPPRPPHHLSSSTTAA

SEQ ID NO: 124424 - protein, 81 aa, Setaria italica
  Transcript Sequence Number=SeqID_58450
  Gene Ontology: Mol. function=Rab GTPase activator activity; Cellular component=intracellular; Biological process=regulation of Rab GTPase activity
  Homolog annotation: Hit_ID=UPI000034ED46; Match level="QueryCoverage =76%, HitCoverage=14%, E-value=2e-21, Identity=70%"; Hit description =RabGAP/TBC domain-containing protein
STSIGVRAQLTTLSTIMKSVDPKLHEHLEHLDGGEYLFAFRMLMVLFRREFSFVDTMYLWEVSCMDKNFIVISMRNAYAVS

SEQ ID NO: 124425 - protein, 105 aa, Setaria italica
  Transcript Sequence Number=SeqID_58451
  Gene Ontology: Mol. function=ligase activity; Cellular component =chloroplast envelope; Biological process=response to auxin stimulus
  Homolog annotation: Hit_ID=Q60EJ6; Match level="QueryCoverage=96%, HitCoverage=16%, E-value=2e-44, Identity=84%"; Hit description =Probable indole-3-acetic acid-amido synthetase GH3.4
SPAPGTSGGERKLMPSIADEMDRRSLMYTLLMPVMSQAVPGLDKGKCMYLYFVKAESRTPAGLPARPVLTSFYRSRHFLERPHDPYTVYTSPDEAVLCVDSYQSM

SEQ ID NO: 124426 - protein, 140 aa, Setaria italica
  misc_feature (40)..(40): Xaa can be any naturally occurring amino acid
  misc_feature (129)..(129): Xaa can be any naturally occurring amino acid
  Transcript Sequence Number=SeqID_58452
  Gene Ontology: Mol. function=structural molecule activity; Cellular component=COPI vesicle coat; Biological process=intracellular protein transport
  Homolog annotation: Hit_ID=Q9AUR8; Match level="QueryCoverage=82%, HitCoverage=9%, E-value=3e-61, Identity=95%"; Hit description =Coatomer subunit alpha-1
  Pfam annotation: Domain name=Coatomer_WDAD; Domain location=1-140; Score=-197.3; E_value=1.2e-05; Accession=PF04053.6; Description =Coatomer WD associated region
LVLSLIGSTSYFLLLVVLVGYSIKTLDVPIYITRVVGNNXFCLDRDGKNKLIAVDASEYIFKLALLRKRYDHVMSMIKNSQLCGQAVISYLQQKGFPEVALHFVKDEKTRFNLALESGNIQIAVASAKXIDDKDHWYRAS

SEQ ID NO: 124427 - protein, 109 aa, Setaria italica
  misc_feature (22)..(22): Xaa can be any naturally occurring amino acid
  misc_feature (65)..(65): Xaa can be any naturally occurring amino acid
  Transcript Sequence Number=SeqID_58453
  Gene Ontology: Mol. function=structural molecule activity; Cellular component=COPI vesicle coat; Biological process=intracellular protein transport
  Homolog annotation: Hit_ID=Q9AUR8; Match level="QueryCoverage=100%, HitCoverage=9%, E-value=2e-47, Identity=84%"; Hit description =Coatomer subunit alpha-1
  Pfam annotation: Domain name=COPI_C; Domain location=1-109; Score= -208.4; E_value=0.0003; Accession=PF06957.3; Description=Coatomer (COPI) alpha subunit C-terminu
ETPKAVGNARSAVFVAPTPGIXVSQIWTQRSSLAGEHAAAGNFDTAMRLLSRQLGIKNFTPLKPXLDLHMGSHTYLRALAAAPVISVAVEKGWNESASPNVRGPPALVF

SEQ ID NO: 124428 - protein, 69 aa, Setaria italica
  Transcript Sequence Number=SeqID_58454
GGFSWASTRRTDKTNGKDNDANSLQVDLYMKQGHQTDLPEDMELKRRTMIDNGKILSYFAADTFVILLL

SEQ ID NO: 124429 - protein, 78 aa, Setaria italica
  Transcript Sequence Number=SeqID_58455
  Gene Ontology: Mol. function=acyltransferase activity; Biological process=metabolic process
  Homolog annotation: Hit_ID=B6TWM4; Match level="QueryCoverage=98%, HitCoverage=20%, E-value=6e-37, Identity=92%"; Hit description=JD1
ESVSRLPLVGLISKCLGCIFVQRESKSSDSKGVSGAVTERVQEVCQDKNTPMMLLFPEGTTTNGDYLLPFKTGAFLAS

SEQ ID NO: 124430 - protein, 55 aa, Setaria italica
  Transcript Sequence Number=SeqID_58456
  Gene Ontology: Mol. function=metal ion binding
  Homolog annotation: Hit_ID=Q6Z748; Match level="QueryCoverage=100%, HitCoverage=30%, E-value=3e-23, Identity=89%"; Hit description=RING zinc finger protein-like
DADISVLPRYRYSDPSENGEKGTDEGVMIPILNNSGTSTSERILLREDAECCICL

SEQ ID NO: 124431 - protein, 90 aa, Setaria italica
  Transcript Sequence Number=SeqID_58457
  Gene Ontology: Mol. function=metal ion binding; Cellular component =integral to membrane
  Homolog annotation: Hit_ID=Q6Z748; Match level="QueryCoverage=81%, HitCoverage=40%, E-value=1e-32, Identity=91%"; Hit description=RING zinc finger protein-like
EGASDADISVLPRYRYSDPSENGEKGTDEGVMIPILNNSGTSTSERILLREDAECCICLSSYEDGAELSALPCLTYSTFLIWLLICLFYL

SEQ ID NO: 124432 - protein, 61 aa, Setaria italica
  misc_feature (1)..(17): Xaa can be any naturally occurring amino acid
  Transcript Sequence Number=SeqID_58458
XXXXXXXXXXXXXXXXXKFVNCEFITKPYAKSSTTQKIFTGDISKAICKLGFIHLQVVTTS

SEQ ID NO: 124433 - protein, 79 aa, Setaria italica
  misc_feature (52)..(52): Xaa can be any naturally occurring amino acid
  Transcript Sequence Number=SeqID_58459
  Gene Ontology: Mol. function=transferase activity, transferring groups other than amino-acyl groups
  Homolog annotation: Hit_ID=A6Q0N8; Match level="QueryCoverage=100%, HitCoverage=22%, E-value=1e-28, Identity=68%"; Hit description =Putative acyl transferase 3
AEKVLGSSIMEVVDMIRQAKDRMAVEFFQFAKEETDQDPFQMTFNYGFGPRXFAGPLVNNDFIASVVILKAPLPLDGTR

SEQ ID NO: 124434 - protein, 128 aa, Setaria italica
  misc_feature (91)..(91): Xaa can be any naturally occurring amino acid
  Transcript Sequence Number=SeqID_58460
  Homolog annotation: Hit_ID=B9T1T3; Match level="QueryCoverage=79%, HitCoverage=14%, E-value=1e-31, Identity=70%"; Hit description =Protein ABC1, mitochondrial, putative
KQRQQGGPELVQEIRKQANDARDSTISMPYRIQRIEDFVGQLESGDLKLRVRVLESERAARKATVLQMATMYTALGGTLLNVGVTLNGQGXQIIANGSFIGADFITSKIGAKKRGNRRSTVGNRSNGA

SEQ ID NO: 124435 - protein, 81 aa, Setaria italica
  Transcript Sequence Number=SeqID_58461
ELLETQLGRVLGEVMENYNEVEVVAVRDGFAYLATTESLNDSGTPSWFLSLCLETMILEKLFQRTYDSSVHPYVMPWPPFF

SEQ ID NO: 124436 - protein, 68 aa, Setaria italica
  Transcript Sequence Number=SeqID_58462
KNFQERPIAAASLGQVHRAVLHNGERVAVKGSKMSSLVKTQKHTRFNDDPFQEELKVLPSDEGFSWAK

SEQ ID NO: 124437 - protein, 70 aa, Setaria italica
  Transcript Sequence Number=SeqID_58463
  Gene Ontology: Mol. function=transferase activity, transferring glycosyl groups; Biological process=metabolic process
  Homolog annotation: Hit_ID=Q8LKT5; Match level="QueryCoverage=94%, HitCoverage=14%, E-value=4e-23, Identity=78%"; Hit description =Putative glucosyl transferase
GSVVYVAFGSFTVFDPCQFQELALGLELTGRPFLWVVRPNFTTGELSKAWFDEFLARVAGKGMVVSWLSP

SEQ ID NO: 124438 - protein, 55 aa, Setaria italica
  Transcript Sequence Number=SeqID_58464
LMELSHRLVDHGFEVTFVNTEAHHALVVGALQAAGGTSALAGIHLASISDGVEDD

SEQ ID NO: 124439 - protein, 94 aa, Setaria italica
  Transcript Sequence Number=SeqID_58465
PFHSLADVEVHPDIKKNFWDLQNWPKYVLVRYTWEEQSEIDVAGGFYVLFGSGLVLSFILAIYVLQSSQEKLTRFVREAVADSSLPEGGVAKVE

SEQ ID NO: 124440 - protein, 105 aa, Setaria italica
  Transcript Sequence Number=SeqID_58466
MIDFHLVRNILVAGLLFTQSLWTVCLPGFNSIFMWILQKYSGNDLLGVTAKVVDMPHHYVEVHPDIKKNFWDLQNWPKYVLVRYTWEEQSEIDVAGGFYVLFGSG

SEQ ID NO: 124441 - protein, 58 aa, Setaria italica
  Transcript Sequence Number=SeqID_58467
RTEQAQIQINRKTSEVPMIDFHLKYSGNDLLGVTAKVVDMPHHYVEVHPDIKNIFGQF

SEQ ID NO: 124442 - protein, 35 aa, Setaria italica
  Transcript Sequence Number=SeqID_58468
GYCFLHGGSDAVDPPKKRGRPKGVRSTNGAPNDNS

SEQ ID NO: 124443 - protein, 93 aa, Setaria italica
  misc_feature (44)..(44): Xaa can be any naturally occurring amino acid
  Transcript Sequence Number=SeqID_58469
HRFHCCRTQKKSALDSDKSIKPNPSDKSEATEHSGSDTKKEILXASGEEGTNGAADDTSKPADITPVKPRRGRPPGPKSLEKKAAGKNKPSRF

SEQ ID NO: 124444 - protein, 119 aa, Setaria italica
  misc_feature (76)..(76): Xaa can be any naturally occurring amino acid
  Transcript Sequence Number=SeqID_58470
  Gene Ontology: Mol. function=DNA binding; Cellular component=nucleus
  Homolog annotation: Hit_ID=B9RNW7; Match level="QueryCoverage=95%, HitCoverage=11%, E-value=2e-35, Identity=66%"; Hit description =Nucleic acid binding protein, putative
DNTIVISEITRITAPDAPYDDDAMRDVFSLIVGSFQNLDDTESPLFGRRLSILDTVAKVRSCVVMLDLECDDLINXMFHHFLRTVSSEHSNAVISCMETIMRLVIEESEDVQPQIASCL

SEQ ID NO: 124445 - protein, 70 aa, Setaria italica
  Transcript Sequence Number=SeqID_58471
  Gene Ontology: Mol. function=metalloendopeptidase activity; Biological process=proteolysis
  Homolog annotation: Hit_ID=B9SMK4; Match level="QueryCoverage=82%, HitCoverage=7%, E-value=2e-19, Identity=77%"; Hit description =Oligopeptidase A, putative
VDHLKAVKDSADLRAAVEEVQPDKVKFQLRLGQSKPIYEAFKAIRNSSDWESLSDALRHATGDRQGTQGI

SEQ ID NO: 124446 - protein, 56 aa, Setaria italica
  Transcript Sequence Number=SeqID_58472
  Gene Ontology: Mol. function=metalloendopeptidase activity; Biological process=proteolysis
  Homolog annotation: Hit_ID=Q9LXA6; Match level="QueryCoverage=98%, HitCoverage=7%, E-value=4e-18, Identity=83%"; Hit description =Oligopeptidase A-like protein
HFREEVYRAYLTRASSGELDNTNIIAQILKLRQEKAKILGYKNYAEVSMAQKMATV

SEQ ID NO: 124447 - protein, 57 aa, Setaria italica
  misc_feature (32)..(32): Xaa can be any naturally occurring amino acid
  Transcript Sequence Number=SeqID_58473
  Gene Ontology: Mol. function=metalloendopeptidase activity; Biological process=proteolysis
  Homolog annotation: Hit_ID=B9SMK4; Match level="QueryCoverage=94%, HitCoverage=6%, E-value=8e-18, Identity=77%"; Hit description =Oligopeptidase A, putative
RGGAWMNVVFSRSRVLARNGLPARLPVAHMVXCNQTPPVGDKPSLMTFREVSNIREM

SEQ ID NO: 124448 - protein, 67 aa, Setaria italica
  Transcript Sequence Number=SeqID_58474
CTLFPFCLIQLSSVSISSLMCPAELLVPHPEPAAQLMRTFMPPAATGAAARTHGIPNFQVRPCIQFR

SEQ ID NO: 124449 - protein, 81 aa, Setaria italica
  Transcript Sequence Number=SeqID_58475
  Gene Ontology: Mol. function=oxidoreductase activity; Biological process=metabolic process
  Homolog annotation: Hit_ID=B6T753; Match level="QueryCoverage=60%, HitCoverage=14%, E-value=1e-19, Identity=85%"; Hit description =Dehydrogenase/reductase SDR family member 7
FTFKGKNPDSRIEVLPMDLSAGEESLKQVVHAAESLFSNAGIDYMIHNAAFERPVNITLTLCYHFNTLPYKHSIFIVTSFS

SEQ ID NO: 124450 - protein, 75 aa, Setaria italica
  Transcript Sequence Number=SeqID_58476
RTARTARERSRSIGTARSAHGVGQHTTPLHCCTPERGDRRGNKNLAAGHGGVPCRSRGCPTARTPGTRHPCRSVL

SEQ ID NO: 124451 - protein, 84 aa, Setaria italica
  Transcript Sequence Number=SeqID_58477
  Gene Ontology: Mol. function=catalytic activity; Biological process =biosynthetic process
  Homolog annotation: Hit_ID=B6U0C2; Match level="QueryCoverage=83%, HitCoverage=22%, E-value=4e-16, Identity=65%"; Hit description =Phenazine biosynthesis protein
MVPRRRGTPIHLTVAQPVFSILRRAFAPPLQVELCGHATLASAHFLFTSVLAEHETLIEFATKSGILTAEKVPAPASAAASGEG

SEQ ID NO: 124452 - protein, 72 aa, Setaria italica
  Transcript Sequence Number=SeqID_58478
  Gene Ontology: Mol. function=catalytic activity; Biological process =biosynthetic process
  Homolog annotation: Hit_ID=B6U0C2; Match level="QueryCoverage=83%, HitCoverage=20%, E-value=6e-17, Identity=66%"; Hit description =Phenazine biosynthesis protein
GVTLSPVWSSQVDAFTAEPFKGNPASVCVLDDAERAADARWMQAVATEFNLSQTAFLLRDSSSAAAAAPRFG

SEQ ID NO: 124453 - protein, 57 aa, Setaria italica
  misc_feature (39)..(39): Xaa can be any naturally occurring amino acid
  Transcript Sequence Number=SeqID_58479
  Gene Ontology: Mol. function=hydrolase activity, acting on glycosyl bonds; Biological process=polysaccharide catabolic process
  Homolog annotation: Hit_ID=Q0D5Q2; Match level="QueryCoverage=96%, HitCoverage=5%, E-value=2e-15, Identity=71%"; Hit description=Beta -amylase
SPLEADFKAAAAEAGHPEWELPDDAGEYNDTPENTQFLXENGTYQTEKEVLLTWYSN

SEQ ID NO: 124454 - protein, 40 aa, Setaria italica
  Transcript Sequence Number=SeqID_58480
AYCRTIGYKLNKLLCSADYNHVLRQNCAVKPEVGCFSNKL

SEQ ID NO: 124455 - protein, 72 aa, Setaria italica
  Transcript Sequence Number=SeqID_58481
  Gene Ontology: Mol. function=hydrolase activity, acting on glycosyl bonds; Biological process=polysaccharide catabolic process
  Homolog annotation: Hit_ID=P55005; Match level="QueryCoverage=69%, HitCoverage=10%, E-value=1e-21, Identity=94%"; Hit description=Beta -amylase
RNVACENALGRYDATAYNTILRNARPQGINKNGPPEHKLYGFTYLRVSDELLPDAVGSGSGGGPGALPGPTI

SEQ ID NO: 124456 - protein, 39 aa, Setaria italica
  Transcript Sequence Number=SeqID_58482
IGWDKKPRVTCCLACLSELLMSVSVIYHSIYMFRSNHTP

SEQ ID NO: 124457 - protein, 88 aa, Setaria italica
  misc_feature (72)..(72): Xaa can be any naturally occurring amino acid
  misc_feature (79)..(79): Xaa can be any naturally occurring amino acid
  Transcript Sequence Number=SeqID_58483
  Gene Ontology: Mol. function=serine-type endopeptidase activity; Cellular component=nucleus; Biological process=proteolysis
  Homolog annotation: Hit_ID=B9RUD1; Match level="QueryCoverage=95%, HitCoverage=14%, E-value=4e-28, Identity=72%"; Hit description =Serine endopeptidase degp2, putative
SSIWSFSYLGFSEYTGEKALVKVLRNSKVHEFKIRLATHKRLVAAHVKGRPPSYYIVAGFVFAAVSVPYLRXSEYGKDXYEYDAPVKL

SEQ ID NO: 124458 - protein, 56 aa, Setaria italica
  Transcript Sequence Number=SeqID_58484
ILVWLQILSWPARSFSKNLSERDWLRSSAKIWDMVKKSPVIADYCKALQSSGLFRK

SEQ ID NO: 124459 - protein, 71 aa, Setaria italica
  Transcript Sequence Number=SeqID_58485
HARLREQDRDQKCSLHCPIGHHFCFPCLGKLLRSTRMNDLSMWDLMLTVDLLKHNIPDPSLLTSAASRNLA

SEQ ID NO: 124460 - protein, 70 aa, Setaria italica
  Transcript Sequence Number=SeqID_58486
  Homolog annotation: Hit_ID=B6SJR4; Match level="QueryCoverage=64%, HitCoverage=11%, E-value=7e-18, Identity=95%"; Hit description =Protein kinase Kelch repeat:Kelch
  Pfam annotation: Domain name=F-box; Domain location=3-50; Score=26.1; E_value=0.00015; Accession=PF00646.25; Description=F-box domain
MGELIPGLPEEVARECLVRVGFDQLPVVRRISRQWKSEVESPDYHRLRRAEGLARPAPLAAPGQARAPAA

SEQ ID NO: 124461 - protein, 71 aa, Setaria italica
  Transcript Sequence Number=SeqID_58487
  Gene Ontology: Mol. function=dopamine beta-monooxygenase activity; Cellular component=integral to membrane; Biological process =histidine catabolic process
  Homolog annotation: Hit_ID=B6T412; Match level="QueryCoverage=71%, HitCoverage=13%, E-value=3e-22, Identity=96%"; Hit description =Dopamine beta-monooxygenase
LARPDKTSKVRRFWNWYHHNIGRAAILLAIGNIFLGLSIAQETNAYIVSYGVFVAVWVVAVAAFEIERRLD

SEQ ID NO: 124462 - protein, 69 aa, Setaria italica
  Transcript Sequence Number=SeqID_58488
MAFAASQRQLHTNSFLFMYCHSLQRHAQDESSSLINIVLLHVVTDVHGRTFGVWTLLTCTLCFLCALNL

SEQ ID NO: 124463 - protein, 78 aa, Setaria italica
  Transcript Sequence Number=SeqID_58489
  Homolog annotation: Hit_ID=B6SYE3; Match level="QueryCoverage=82%, HitCoverage=10%, E-value=1e-15, Identity=67%"; Hit description=Zinc finger C-x8-C-x5-C-x3-H type family protein
LSPVCLAYPLLRVSVGSAKAGLLAPAGSGNHRGSEEGSQVQHQSNLKVPQFKYAEGSSKHELYRSLVHVYGEDNERLA

SEQ ID NO: 124464 - protein, 52 aa, Setaria italica
  Transcript Sequence Number=SeqID_58490
  Gene Ontology: Mol. function=transferase activity, transferring glycosyl groups; Cellular component=integral to Golgi membrane
  Homolog annotation: Hit_ID=Q4JEY4; Match level="QueryCoverage=53%, HitCoverage=6%, E-value=6e-10, Identity=92%"; Hit description =Sialyltransferase-like protein
MLTWNFSLQLTLFSFRTRYFSEARKGHTPLHGRAYYQMMECLGVSFLLALSP

SEQ ID NO: 124465 - protein, 93 aa, Setaria italica
  Transcript Sequence Number=SeqID_58491
VIESWRDRLETSSQLEQLRVCFEIGTECTDYDPRRRPDAKQIVDRLVKAESMDRFTETDVSNFFSIAPVNSCNMEFHFREYVYISVFVCVTQT

SEQ ID NO: 124466 - protein, 67 aa, Setaria italica
  Transcript Sequence Number=SeqID_58492
MHSTTWYFNDFTVWAVFLLLLLSSTDSLTACRLNDIDNWKSICIKQLFKGFLLVYIMLRFGHDMEKR

SEQ ID NO: 124467 - protein, 80 aa, Setaria italica
  Transcript Sequence Number=SeqID_58493
  Gene Ontology: Mol. function=DNA binding; Biological process =regulation of transcription
  Homolog annotation: Hit_ID=B6U1F3; Match level="QueryCoverage=85%, HitCoverage=16%, E-value=7e-23, Identity=77%"; Hit description=CDPK substrate protein 1
  Subcellular localization annotation: CTP_CleavageSite=43; ConfidenceScore=5.32e-01
VLIERELRSTPVPPHQNTVAPIRGQFHTSTGSVGPLCSPPAVRFSSVSNPEQYSNPSPYNSQAPSYLSKFLSNAQFIGIH

SEQ ID NO: 124468 - protein, 40 aa, Setaria italica
  Transcript Sequence Number=SeqID_58494
NPGEPMAVVAPSPTGGSNTAKARMRWNYLETYNRRTNFKL

SEQ ID NO: 124469 - protein, 47 aa, Setaria italica
  misc_feature (15)..(15): Xaa can be any naturally occurring amino acid
  Transcript Sequence Number=SeqID_58495
  Gene Ontology: Mol. function=1,2-diacylglycerol 3-beta-galactosyltrans ferase activity; Cellular component=plastid inner membrane; Biological process=carbohydrate metabolic process
  Homolog annotation: Hit_ID=Q9SM44; Match level="QueryCoverage=91%, HitCoverage=8%, E-value=4e-12, Identity=83%"; Hit description =Monogalactosyldiacylglycerol synthase, chloroplastic
WGACDCIITKAGPGXTIAEAMIRGLPIILNDYIAGQVFSLAPIVESA

SEQ ID NO: 124470 - protein, 34 aa, Setaria italica
  Transcript Sequence Number=SeqID_58496
LEIATSFCREVAKGLMKYQPDVIISVHPLMQHVP

SEQ ID NO: 124471 - protein, 73 aa, Setaria italica
  misc_feature (8)..(8): Xaa can be any naturally occurring amino acid
  Transcript Sequence Number=SeqID_58497
  Gene Ontology: Mol. function=endonuclease activity; Cellular component=nucleus; Biological process=response to DNA damage stimulus
  Homolog annotation: Hit_ID=B6TDH7; Match level="QueryCoverage=98%, HitCoverage=10%, E-value=6e-31, Identity=88%"; Hit description=XPG I- region family protein
ASICEVGXSQDSGVQFRDIINAYLEPKCHSPDSEAVQRACSQRPFLRSQLQQICEQYFEWSPEKTDEYILPKE

SEQ ID NO: 124472 - protein, 58 aa, Setaria italica
  Transcript Sequence Number=SeqID_58498
KHLGSTSKRRGKIFCPACNMLVKYLLLISYKSYLQLGYLLAPKVICNPEIFELAQFCL

SEQ ID NO: 124473 - protein, 54 aa, Setaria italica
  Transcript Sequence Number=SeqID_58499
  Gene Ontology: Mol. function=nucleotide binding; Cellular component =plasma membrane; Biological process=small GTPase mediated signal transduction
  Homolog annotation: Hit_ID=Q40198; Match level="QueryCoverage=94%, HitCoverage=23%, E-value=3e-18, Identity=86%"; Hit description=RAB11H
VLPFTEVLTQIYRVVSKKALDIGDDPAAPPKGQTINVGGKDDVSAVKKSACCSS

SEQ ID NO: 124474 - protein, 100 aa, Setaria italica
  Transcript Sequence Number=SeqID_58500
  Gene Ontology: Mol. function=nucleotide binding; Cellular component =recycling endosome membrane; Biological process=small GTPase mediated signal transduction
  Homolog annotation: Hit_ID=B6U632; Match level="QueryCoverage=86%, HitCoverage=39%, E-value=1e-26, Identity=74%"; Hit description=Ras -related protein Rab11B
  Pfam annotation: Domain name=MMR_HSR1; Domain location=18-98; Score= -16.7; E_value=0.035; Accession=PF01926.15; Description=GTPase of unknown function
  Pfam annotation: Domain name=Miro; Domain location=19-98; Score=-2.9; E_value=0.02; Accession=PF08477.5; Description=Miro-like protein
  Pfam annotation: Domain name=Ras; Domain location=19-97; Score=-17.1; E_value=4.9e-08; Accession=PF00071.14; Description=Ras family
  Pfam module annotation: Pfam domain module=MMR_HSR1::Miro::Ras; Domain location=18-98::19-98::19-97
SIQEHKIRKRQAALQILFKVVLIGDSGVGKSNLLSRFARDEFSLETRSTIGVEFATKTVQVDGKLVKAQIWDTAGQGEVRTPLLRLRDSALVLCVLCDVV

SEQ ID NO: 124475 - protein, 76 aa, Setaria italica
  Transcript Sequence Number=SeqID_58501
  Gene Ontology: Mol. function=nucleotide binding; Cellular component =plasma membrane; Biological process=small GTPase mediated signal transduction
  Homolog annotation: Hit_ID=O04486; Match level="QueryCoverage=84%, HitCoverage=29%, E-value=3e-29, Identity=89%"; Hit description=Ras -related protein RABA2a
  Pfam annotation: Domain name=Ras; Domain location=5-76; Score=-18.6; E_value=6.2e-08; Accession=PF00071.14; Description=Ras family
LPLVQSLTTLPVVQVEGKIIKAQIWDTAGQERYRAITSAYYRGALGAVLVYDVSKPTTFENISRWLKELRDHADSN

SEQ ID NO: 124476 - protein, 51 aa, Setaria italica
  misc_feature (34)..(34): Xaa can be any naturally occurring amino acid
  Transcript Sequence Number=SeqID_58502
  Gene Ontology: Mol. function=nucleotide binding; Biological process =small GTPase mediated signal transduction
RVVSKKALDIGDDPAAPPRGQIILASNIDGLSSXGGKDDVSAVKKSGCCSS

SEQ ID NO: 124477 - protein, 58 aa, Setaria italica
  Transcript Sequence Number=SeqID_58503
  Gene Ontology: Mol. function=nucleotide binding; Cellular component =plasma membrane; Biological process=small GTPase mediated signal transduction
  Homolog annotation: Hit_ID=Q40521; Match level="QueryCoverage=58%, HitCoverage=15%, E-value=6e-13, Identity=97%"; Hit description=Ras -related protein Rab11B
HYSFGFCHSNISRTQLTITFHCLCRYRAITSAYYRGAVGALVVYDVTRHVTFENVERW

SEQ ID NO: 124478 - protein, 24 aa, Setaria italica
  Transcript Sequence Number=SeqID_58504
RCRRVYSSAHLIDTVAYIVITCHL

SEQ ID NO: 124479 - protein, 79 aa, Setaria italica
  misc_feature (27)..(27): Xaa can be any naturally occurring amino acid
  Transcript Sequence Number=SeqID_58505
  Gene Ontology: Mol. function=catalytic activity; Biological process =cellular metabolic process
  Homolog annotation: Hit_ID=A2Q5H4; Match level="QueryCoverage=97%, HitCoverage=35%, E-value=9e-09, Identity=46%"; Hit description=RNA polymerase Rpb4
PNSRMLMNCEAAELLQEIHEHMAILSXDPKIKIPESFDKAFQYAKDGNQFTTASSVKQALEPLKKCGVNDGEICMIANN

SEQ ID NO: 124480 - protein, 48 aa, Setaria italica
  Transcript Sequence Number=SeqID_58506
PPVHPSGHKQFCQRSHVLKSKCLTSLVSWEFISDFCLVRFFCCKMSDC

SEQ ID NO: 124481 - protein, 48 aa, Setaria italica
  Transcript Sequence Number=SeqID_58507
YPLCALPISCCVSQSHVLKSKCLTSLVSWEFISDFCLVRFFCCKMSDC

SEQ ID NO: 124482 - protein, 50 aa, Setaria italica
  Transcript Sequence Number=SeqID_58508
PLQRDELSSRYGPLCEEVMHCLEVETGTQYANTLSGYPVANRKPLKVFAY

SEQ ID NO: 124483 - protein, 82 aa, Setaria italica
  Transcript Sequence Number=SeqID_58509
  Gene Ontology: Mol. function=integrase activity; Biological process =DNA integration
VHEKDNLPRIRNFDHMLTKLLEKCRDKKNEMNTLVHVSMQRVKSTQMNIRDIMNELIAFQEGMSHQDDFANLKIVSDLTHVL

SEQ ID NO: 124484 - protein, 71 aa, Setaria italica
  Transcript Sequence Number=SeqID_58510
  Gene Ontology: Mol. function=integrase activity; Biological process =DNA integration
KLVAHLENCLHEAREEARTNKCSADRRAVEYDALRSSALRIHGLFERLNSCVTAPGVTGFAESLRSLAVSL

SEQ ID NO: 124485 - protein, 108 aa, Setaria italica
  Transcript Sequence Number=SeqID_58511
  Gene Ontology: Mol. function=integrase activity; Biological process =DNA integration
ESSVAMDEASSTSEQPSKQTEELPRDNEDKIVSIDKEGQMLTQLTMADTSDVPVEDHHALELRNKELLVSELQNALDEKSKQLGETESRLSAMADEVNSLKRELEHAR

SEQ ID NO: 124486 - protein, 68 aa, Setaria italica
  Transcript Sequence Number=SeqID_58512
HYYYLIECFIYYNINVCYNLNSSARNVDCLPIFHFSHMVFVADFCSILWLNLQLTISMASRPVCSSSN

SEQ ID NO: 124487 - protein, 61 aa, Setaria italica
  Transcript Sequence Number=SeqID_58513
RAHVSKLNRVTIIGDVALASAFRSNGYEGSKISELHHLLGRDRGWCQCASYLERRRRRRFC

SEQ ID NO: 124488 - protein, 30 aa, Setaria italica
  Transcript Sequence Number=SeqID_58514
ISFLLCVSPLFLNLDHLPPFFPSLIIRTSF

SEQ ID NO: 124489 - protein, 60 aa, Setaria italica
  Transcript Sequence Number=SeqID_58515
SIDITPLVELGALGYDILPLEYPPLLKSVFRVCTCNPSMLWYGTHTNNKHIEDIPPDNYC

SEQ ID NO: 124490 - protein, 58 aa, Setaria italica
  Transcript Sequence Number=SeqID_58516
HFTTRIPTIIEISLQSFVHVILACYGTAHTPTTNILKTYHQTRLLLGTCKFLTCYLGP

SEQ ID NO: 124491 - protein, 48 aa, Setaria italica
  Transcript Sequence Number=SeqID_58517
NLYHMLCPVFAAFVCLLFWCIGNFTAGGIAYGLDRLVMLLAGESSIRD

SEQ ID NO: 124492 - protein, 122 aa, Setaria italica
  misc_feature (20)..(20): Xaa can be any naturally occurring amino acid
  misc_feature (63)..(63): Xaa can be any naturally occurring amino acid
  Transcript Sequence Number=SeqID_58518
  Gene Ontology: Mol. function=aspartate-tRNA ligase activity; Cellular component=cytoplasm; Biological process=tRNA aminoacylation for protein translation
  Homolog annotation: Hit_ID=Q5ZD71; Match level="QueryCoverage=99%, HitCoverage=19%, E-value=3e-56, Identity=87%"; Hit description =Putative aspartyl-tRNA synthetase
  Pfam annotation: Domain name=GAD; Domain location=51-117; Score=0.9; E_value=0.0064; Accession=PF02938.6; Description=GAD domain
AGGIKLPNPFPRLTYAEAIXNRYGTDRPDLRFDWELKDVSGAFLGSSFKVFADTLENGGIIKXALCVPGGATVFSNTDLKKGTVYTEASKAGAKGLPFLKVMENGDLEGIGPLVSSMKPEKK

SEQ ID NO: 124493 - protein, 47 aa, Setaria italica
  Transcript Sequence Number=SeqID_58519
  Gene Ontology: Mol. function=aspartate-tRNA ligase activity; Cellular component=cytoplasm; Biological process=tRNA aminoacylation for protein translation
  Homolog annotation: Hit_ID=Q5ZD71; Match level="QueryCoverage=72%, HitCoverage=5%, E-value=2e-12, Identity=94%"; Hit description =Putative aspartyl-tRNA synthetase
TVPFFRSVFEWNSDEQRYEALHHPFTAPNPKDMNDLPSARAPSNLHT

SEQ ID NO: 124494 - protein, 80 aa, Setaria italica
  Transcript Sequence Number=SeqID_58520
  Gene Ontology: Mol. function=aspartate-tRNA ligase activity; Cellular component=cytoplasm; Biological process=tRNA aminoacylation for protein translation
  Homolog annotation: Hit_ID=Q5ZD71; Match level="QueryCoverage=62%, HitCoverage=8%, E-value=3e-20, Identity=96%"; Hit description =Putative aspartyl-tRNA synthetase
QIFIPEAPCNLIIFFKARNHQHLLEQQRIFEIIGISPEQAEEKFGYLLESLDMGAPPHGGIAYGLDRLVMLLAGECYQRT

SEQ ID NO: 124495 - protein, 46 aa, Setaria italica
  Transcript Sequence Number=SeqID_58521
  Gene Ontology: Mol. function=aspartate-tRNA ligase activity; Cellular component=cytoplasm; Biological process=tRNA aminoacylation for protein translation
  Homolog annotation: Hit_ID=Q5ZD71; Match level="QueryCoverage=93%, HitCoverage=7%, E-value=2e-11, Identity=76%"; Hit description =Putative aspartyl-tRNA synthetase
LYCRVGALKVAADRVLVLNSVTCSLPFPVTTAETVKEKFPEEIRLR

SEQ ID NO: 124496 - protein, 43 aa, Setaria italica
  Transcript Sequence Number=SeqID_58522
DTNDLKNSLFVHTFVDSQTATSNLLITGPNIRCFVYFSTISTY

SEQ ID NO: 124497 - protein, 103 aa, Setaria italica
  Transcript Sequence Number=SeqID_58523
  Gene Ontology: Mol. function=UDP-glucose 4-epimerase activity; Cellular component=integral to membrane; Biological process =galactose metabolic process
  Homolog annotation: Hit_ID=Q2LC83; Match level="QueryCoverage=89%, HitCoverage=21%, E-value=6e-46, Identity=95%"; Hit description=UDP-D- xylose epimerase 1
GSFIHIFHKNALQFIQADLGDPKAVNRIFAENAFDAVMHFAAVAYVGESTLEPLRYYHNITANTLVVLEAMATHSVKTLIYSSTCATYGEPEKMPITEETPQF

SEQ ID NO: 124498 - protein, 92 aa, Setaria italica
  Transcript Sequence Number=SeqID_58524
  Gene Ontology: Mol. function=UDP-glucose 4-epimerase activity; Cellular component=integral to membrane; Biological process =galactose metabolic process
  Homolog annotation: Hit_ID=Q2LC83; Match level="QueryCoverage=100%, HitCoverage=21%, E-value=6e-44, Identity=93%"; Hit description=UDP-D- xylose epimerase 1
LSRGNIGAIKVLQNLFPEPGRLQFIQADLGDPKAVNRIFAENAFDAVMHFAAVAYVGESTLEPLRYYHNITANTLVVLEAMATHSVKTLIYS

SEQ ID NO: 124499 - protein, 48 aa, Setaria italica
  Transcript Sequence Number=SeqID_58525
  Gene Ontology: Mol. function=UDP-glucose 4-epimerase activity; Cellular component=integral to membrane; Biological process =galactose metabolic process
  Homolog annotation: Hit_ID=Q2LC83; Match level="QueryCoverage=95%, HitCoverage=10%, E-value=1e-19, Identity=100%"; Hit description=UDP -D-xylose epimerase 1
SQVNRIFAENAFDAVMHFAAVAYVGESTLEPLRYYHNITANTLVVLEA

SEQ ID NO: 124500 - protein, 98 aa, Setaria italica
  Transcript Sequence Number=SeqID_58526
KVRLDTIGDMQKEQSLILFLVVMKKVYRRAEWWGFLRTTSRISYIRICWVLILLYSSQKCYLHYSSESKVHISHVAKLGLPPKYSVGKKNTDAYKLYS

SEQ ID NO: 124501 - protein, 66 aa, Setaria italica
  Transcript Sequence Number=SeqID_58527
PFAPDMVKFAPAFVAWQHQGAMIHLKQRVMDSLCGWFACLPLLAHSCWTTKLRHATWDRQGTQGIG

SEQ ID NO: 124502 - protein, 94 aa, Setaria italica
  Transcript Sequence Number=SeqID_58528
  Gene Ontology: Mol. function=zinc ion binding; Cellular component =nucleus; Biological process=regulation of transcription, DNA -dependent
  Homolog annotation: Hit_ID=Q9XI07; Match level="QueryCoverage=94%, HitCoverage=11%, E-value=8e-21, Identity=60%"; Hit description =SWI/SNF complex subunit SWI3C
AQCIYHFIRLPVEDGLLENVEVSNGSMPFRAQSNGFPHLDSNGSTSGIPVQSFRHGNELPFINSSNPVMSLVAFLASVIGPRVAASCAHADKLK

SEQ ID NO: 124503 - protein, 80 aa, Setaria italica
  misc_feature (16)..(16): Xaa can be any naturally occurring amino acid
  misc_feature (21)..(21): Xaa can be any naturally occurring amino acid
  misc_feature (52)..(52): Xaa can be any naturally occurring amino acid
  Transcript Sequence Number=SeqID_58529
  Gene Ontology: Mol. function=zinc ion binding
EVETLLLKECEQVERXRQRIXADRARMRSAMLGSTGMPGSSSTMPSNPVSMXPRPVGVPGSMPQASMPTAYANNMQEHDV

SEQ ID NO: 124504 - protein, 71 aa, Setaria italica
  Transcript Sequence Number=SeqID_58530
  Gene Ontology: Mol. function=transferase activity
  Homolog annotation: Hit_ID=Q5ZDJ2; Match level="QueryCoverage=74%, HitCoverage=16%, E-value=8e-11, Identity=66%"; Hit description =Acetyltransferase 1-like
MPVAMVESGLPRVEGEDRKRASAAYVVDHSLENSPENGIAPNPQLKPKDGELGTLNGTLHIVDDLSSLSIR

SEQ ID NO: 124505 - protein, 66 aa, Setaria italica
  Transcript Sequence Number=SeqID_58531
  Gene Ontology: Mol. function=transferase activity
  Homolog annotation: Hit_ID=Q5ZDJ3; Match level="QueryCoverage=78%, HitCoverage=5%, E-value=3e-18, Identity=78%"; Hit description =Acetyltransferase 1-like
LVVLLFFFGSPKLSKYWRSIKLIEDSTNSTSSGNNVLGPVNEWQIQDCVDVHKLLETVFGDQDVAN

SEQ ID NO: 124506 - protein, 98 aa, Setaria italica
  Transcript Sequence Number=SeqID_58532
  Gene Ontology: Mol. function=transferase activity
  Homolog annotation: Hit_ID=Q5ZDJ3; Match level="QueryCoverage=92%, HitCoverage=10%, E-value=1e-42, Identity=87%"; Hit description =Acetyltransferase 1-like
LASFCRQLHGKSLIEVNRSFLEKHNASLTHRAAAAEMMYLLEPNKKMEAIKLIEDSTNSTSSGNNVLGPVNEWQIQDCVDVHKLLETVFGDQDVANRL

SEQ ID NO: 124507 - protein, 89 aa, Setaria italica
  Transcript Sequence Number=SeqID_58533
IIGWGREVFSIWLLSWFQLVPFCCHFVDSERIAFRPRYGEVCAGVCCLAASGCDDSFEAAGHGFIVWVVRLSTAARSLFVWYLLKFLVY

SEQ ID NO: 124508 - protein, 104 aa, Setaria italica
  misc_feature (30)..(30): Xaa can be any naturally occurring amino acid
  misc_feature (71)..(71): Xaa can be any naturally occurring amino acid
  misc_feature (84)..(84): Xaa can be any naturally occurring amino acid
  Transcript Sequence Number=SeqID_58534
  Gene Ontology: Mol. function=zinc ion binding
  Subcellular localization annotation: CTP_CleavageSite=37; ConfidenceScore=5.11e-01
YKTTSGIPVQSFRHGNELPFINSSNPVMSXGPRVAASCAHAALSFLTRDDDPRLSSEGMHADGRGNGANPXFHNHNGASPAISXPENVKHAAMCGLSAAAMKSK

SEQ ID NO: 124509 - protein, 49 aa, Setaria italica
  Transcript Sequence Number=SeqID_58535
QSSKHSVTFIASLYSLADQVGLAEKTAVLFTKDGDQHNNLHTTCTACHE

SEQ ID NO: 124510 - protein, 45 aa, Setaria italica
  Transcript Sequence Number=SeqID_58536
CSLTLVGSESIYRSLLFMNPDNYKYFIAVQKCLDHYQHIGQGTFA

SEQ ID NO: 124511 - protein, 69 aa, Setaria italica
  Transcript Sequence Number=SeqID_58537
  Gene Ontology: Mol. function=sequence-specific DNA binding; Cellular component=nucleus; Biological process=regulation of transcription, DNA-dependent
  Homolog annotation: Hit_ID=B6SMI9; Match level="QueryCoverage=72%, HitCoverage=23%, E-value=7e-22, Identity=96%"; Hit description =WRKY55-superfamily of TFs having WRKY and zinc finger domains
  Pfam annotation: Domain name=WRKY; Domain location=29-58; Score=-5.1; E_value=0.0034; Accession=PF03106.7; Description=WRKY DNA -binding domain
MSPAPSSHQSQMNSRKEKRMRKVDTFAPHNDGHQWRKYGEKKINNTNFPRSGRDEHPSIFLFAFVLVSS

SEQ ID NO: 124512 - protein, 54 aa, Setaria italica
  Transcript Sequence Number=SeqID_58538
SRGEVVDGIELNFDAAPLPPEWQRCLDIQVHAYRTCSPAGFSSMHGQSSPYAHA

SEQ ID NO: 124513 - protein, 52 aa, Setaria italica
  Transcript Sequence Number=SeqID_58539
LVPSAVPANDPITMGGNISETTIKLTTSLMGIQCDQTNNIPHGYSMRSGLAI

SEQ ID NO: 124514 - protein, 57 aa, Setaria italica
  Transcript Sequence Number=SeqID_58540
CVTGLEKERRKNRMSEEIDYWTVVSWPTSPPPKMTPPAAIRALGCRRADHLAHTAPC

SEQ ID NO: 124515 - protein, 72 aa, Setaria italica
  misc_feature (37)..(37): Xaa can be any naturally occurring amino acid
  Transcript Sequence Number=SeqID_58541
  Gene Ontology: Mol. function=hydrolase activity; Cellular component =cytosol
  Homolog annotation: Hit_ID=B6U183; Match level="QueryCoverage=84%, HitCoverage=21%, E-value=4e-28, Identity=96%"; Hit description=Nudix hydrolase 2
NVGAVREVKEETGIDAEFVEVLAFRQSHKSFFEKSDXFFVCLLRPLSYDITKQDSEIEACQVLGTKIPTLNC

SEQ ID NO: 124516 - protein, 50 aa, Setaria italica
  Transcript Sequence Number=SeqID_58542
  Gene Ontology: Mol. function=dihydroxy-acid dehydratase activity; Biological process=branched chain family amino acid biosynthetic process
  Homolog annotation: Hit_ID=A6MZY7; Match level="QueryCoverage=98%, HitCoverage=18%, E-value=2e-18, Identity=81%"; Hit description =Dihydroxy-acid dehydratase (Fragment)
CRVIDVDLTEEQLEERRRKWSPPSYKATRGALWKYVKLVAPASRGCVTDE

SEQ ID NO: 124517 - protein, 46 aa, Setaria italica
  Transcript Sequence Number=SeqID_58543
KVTAKNHGTAQSHNGNNLTYIGHSHSLFGDHISQLCTSRRKLIHML

SEQ ID NO: 124518 - protein, 48 aa, Setaria italica
  Transcript Sequence Number=SeqID_58544
GVMEFSCSFSSACHFLQVGLGMIFLQKKKSRSRRNLQEITHGHALTKK

SEQ ID NO: 124519 - protein, 125 aa, Setaria italica
  misc_feature (48)..(48): Xaa can be any naturally occurring amino acid
  Transcript Sequence Number=SeqID_58545
EFDPLPPGAFGAPIVPEQPKQPYRSYEPKMFSGRDPKPMKASAFLPTXDPLLPNTVNGKRKSLVGSSSHLGSQAVHEYQFLPEQPSDVYERASQSRFYDTSTEASNSRIASLSNGNTTNLLPIGS

SEQ ID NO: 124520 - protein, 80 aa, Setaria italica
  misc_feature (23)..(23): Xaa can be any naturally occurring amino acid
  misc_feature (66)..(66): Xaa can be any naturally occurring amino acid
  Transcript Sequence Number=SeqID_58546
  Homolog annotation: Hit_ID=B9RVT3; Match level="QueryCoverage=80%, HitCoverage=3%, E-value=7e-10, Identity=56%"; Hit description =Homeobox protein, putative
SLVFLFSIGSNFGIPQVAGFETXLASSERMGYHDEDTYRVDRKRKHNEEAKIAKEVEAHEKTIRKXLEKQDLLNRKREEQ

SEQ ID NO: 124521 - protein, 41 aa, Setaria italica
  Transcript Sequence Number=SeqID_58547
FDERAIRGPMHHEAADRGRYPFPPGTLLGMVMNLSFFIMSL

SEQ ID NO: 124522 - protein, 122 aa, Setaria italica
  misc_feature (20)..(20): Xaa can be any naturally occurring amino acid
  misc_feature (35)..(35): Xaa can be any naturally occurring amino acid
  Transcript Sequence Number=SeqID_58548
  Gene Ontology: Mol. function=phosphoprotein phosphatase activity; Biological process=actin cytoskeleton organization and biogenesis
  Homolog annotation: Hit_ID=Q6K8Z4; Match level="QueryCoverage=84%, HitCoverage=7%, E-value=2e-42, Identity=84%"; Hit description=Formin- like protein 7
SVMMPNMEAKRQRQHPSVAXKNKKKVLLIDLQRSXKNCEIMLRNIKMPLPDLMGSVLALDDSIVDGDQVDYLIKFCPTKEEMELLKGYTGKKENLGNCEQVIFYFPCAIIFSLGDELCLANS

SEQ ID NO: 124523 - protein, 45 aa, Setaria italica
  Transcript Sequence Number=SeqID_58549
HIYCNPQKIFFFLFQKLKEFLADAQAEGRSLALLYSTAGKSADSL

SEQ ID NO: 124524 - protein, 49 aa, Setaria italica
  Transcript Sequence Number=SeqID_58550
VLRGTLQKHENLVNFVEHHKIQLLEDSSSSGFRLITLASRCSFPGGDDD

SEQ ID NO: 124525 - protein, 56 aa, Setaria italica
  Transcript Sequence Number=SeqID_58551
  Gene Ontology: Mol. function=tetrahydrofolylpolyglutamate synthase activity; Biological process=folic acid and derivative biosynthetic process
  Homolog annotation: Hit_ID=B6U8C5; Match level="QueryCoverage=87%, HitCoverage=8%, E-value=9e-16, Identity=83%"; Hit description =Folylpolyglutamate synthase
MIIDFNPLKVSLQVVQHLDPKKLEGQPLGLHGEHQYTNAGLAVALANTWLEKQGHL

SEQ ID NO: 124526 - protein, 122 aa, Setaria italica
  Transcript Sequence Number=SeqID_58552
  Gene Ontology: Mol. function=electron carrier activity; Biological process=oxidation reduction
  Homolog annotation: Hit_ID=Q9ATU9; Match level="QueryCoverage=93%, HitCoverage=25%, E-value=2e-33, Identity=58%"; Hit description =Putative cytochrome P450
RNATAPLLESWESLLDNVGGSREIVVDDYLRKLSADVIARVCFGSSFTRGEEIFCKLRQLQKQFLSKMPWKYLPTRANREIRKLEEEVRLLILDVIKEHNNSVDNDLLRVIIDGAQGRQLQG

SEQ ID NO: 124527 - protein, 38 aa, Setaria italica
  Transcript Sequence Number=SeqID_58553
  Gene Ontology: Mol. function=electron carrier activity; Biological process=response to oxidative stress
  Homolog annotation: Hit_ID=B6UBA1; Match level="QueryCoverage=86%, HitCoverage=9%, E-value=5e-10, Identity=96%"; Hit description =Peroxidase 1
RDVEVDAASILSNGHVHFDVPAGRLDGFVSKAEEAQAE

SEQ ID NO: 124528 - protein, 88 aa, Setaria italica
  Transcript Sequence Number=SeqID_58554
  Gene Ontology: Mol. function=cysteine-type endopeptidase activity; Biological process=proteolysis
  Homolog annotation: Hit_ID=Q7XJE6; Match level="QueryCoverage=86%, HitCoverage=20%, E-value=3e-35, Identity=86%"; Hit description =Metacaspase-1
VSRFHSNPSTSSPLDFETQGMIVDDEINAALVRPLPHGVKLHALIDACHSGTALDLPFLCRMNRSGQYVWEDHRPRSGVWKGTSGWGG

SEQ ID NO: 124529 - protein, 78 aa, Setaria italica
  misc_feature (52)..(52): Xaa can be any naturally occurring amino acid
  misc_feature (73)..(73): Xaa can be any naturally occurring amino acid
  Transcript Sequence Number=SeqID_58555
  Gene Ontology: Mol. function=kinase activity; Biological process =fatty acid biosynthetic process
  Homolog annotation: Hit_ID=B6TF90; Match level="QueryCoverage=97%, HitCoverage=25%, E-value=4e-33, Identity=90%"; Hit description=SNF1 -related protein kinase regulatory subunit beta-1
  Pfam annotation: Domain name=AMPKBI; Domain location=1-76; Score =73.7; E_value=6.9e-19; Accession=PF04739.7; Description=5'-AMP -activated protein kinase, beta subunit, complex-interacting region
SLEMDFTKEPPALPSQLHLGVLNSQNSEESCARPQHIVLNHLFIEKGWGAHXLVALGLTHRFESKYVTVVLYXKPIER

SEQ ID NO: 124530 - protein, 69 aa, Setaria italica
  misc_feature (41)..(41): Xaa can be any naturally occurring amino acid
  misc_feature (54)..(54): Xaa can be any naturally occurring amino acid
  Transcript Sequence Number=SeqID_58556
  Homolog annotation: Hit_ID=B6TF90; Match level="QueryCoverage=75%, HitCoverage=17%, E-value=2e-15, Identity=86%"; Hit description=SNF1 -related protein kinase regulatory subunit beta-1
  Subcellular localization annotation: CTP_CleavageSite=29; ConfidenceScore=5.11e-01
DAGSPPGSPGRSLSPRMFVPQTPVPPLQRAADVTPVFNQIXLMNEQEEEYDGPXKGIPALIVWTLGGRV

SEQ ID NO: 124531 - protein, 109 aa, Setaria italica
  Transcript Sequence Number=SeqID_58557
  Gene Ontology: Mol. function=transporter activity; Cellular component= intracellular
  Homolog annotation: Hit_ID=B9T0K7; Match level="QueryCoverage=79%, HitCoverage=14%, E-value=1e-09, Identity=45%"; Hit description =Transporter, putative
VTVSYLKIVLDEGTFHRFIKLLLALIVKGFAFFHIAYGQQETTVNNPLPPAEPEPVSDDYPAVETFSVDHISPIIERLQRLEGKVDELGSKPPEIPLEKERSLLESWIE

SEQ ID NO: 124532 - protein, 78 aa, Setaria italica
  Transcript Sequence Number=SeqID_58558
  Gene Ontology: Mol. function=transporter activity; Cellular component= intracellular; Biological process=transport
  Homolog annotation: Hit_ID=Q2L3A5; Match level="QueryCoverage=76%, HitCoverage=14%, E-value=4e-24, Identity=81%"; Hit description=SEC14 cytosolic factor (Secretion factor 14) family protein (Fragment)
LYPLQTLSSTGASQTTFGLGKVEPNKLMHITTVDRYMKYHVQEFEKAFRDRFPACSIAAKRHIDSTTTILDVDGVGLK

SEQ ID NO: 124533 - protein, 63 aa, Setaria italica
  Transcript Sequence Number=SeqID_58559
PELGPSQASWQQFDLRYSSELFRFAMDNDKDACASPLNGPISGYSPTYSTKTSIRKEAKKTPI

SEQ ID NO: 124534 - protein, 34 aa, Setaria italica
  Transcript Sequence Number=SeqID_58560
QRERQGGGQVGIFDATNSTRKRRHMLMKMAEGNC

SEQ ID NO: 124535 - protein, 25 aa, Setaria italica
  Transcript Sequence Number=SeqID_58561
IRHKKVRRANLYYLKHKLPRFSTFK

SEQ ID NO: 124536 - protein, 42 aa, Setaria italica
  Transcript Sequence Number=SeqID_58562
STGYQMCNIYSFIVYFGLQCNDSFVLGIQDSYFLIMNLISPF

SEQ ID NO: 124537 - protein, 114 aa, Setaria italica
  misc_feature (73)..(73): Xaa can be any naturally occurring amino acid
  Transcript Sequence Number=SeqID_58563
  Gene Ontology: Mol. function=protein serine/threonine kinase activity; Biological process=protein amino acid phosphorylation
  Homolog annotation: Hit_ID=C3SA69; Match level="QueryCoverage=100%, HitCoverage=17%, E-value=4e-29, Identity=43%"; Hit description =Serine/threonine protein kinase (Fragment)
RWSFFRNLAQNEFPQKDETQDLAKIEEGAYPFDRLEHDTTNVKNLAPQNDIHMEVPPVAPHTNVDSSISPPGXKTEEARAVGPVMDASFKDTDFEYLQIIKNEDLEELRELGSG

SEQ ID NO: 124538 - protein, 83 aa, Setaria italica
  Transcript Sequence Number=SeqID_58564
  Homolog annotation: Hit_ID=C3SA69; Match level="QueryCoverage=95%, HitCoverage=7%, E-value=5e-24, Identity=69%"; Hit description =Serine/threonine protein kinase (Fragment)
LVQILQAECSIHCYKNPPPHPGRVFHSERIPREQAGFLNRLSKSEDSLNPEFLIRQSQSGVASENIAENTDSTFEGTEKTNLS

SEQ ID NO: 124539 - protein, 95 aa, Setaria italica
  misc_feature (34)..(34): Xaa can be any naturally occurring amino acid
  misc_feature (84)..(84): Xaa can be any naturally occurring amino acid
  Transcript Sequence Number=SeqID_58565
  Subcellular localization annotation: CTP_CleavageSite=41; ConfidenceScore=5.26e-01
ASINDFDQFINLNSDSRPVNSSRDRLQNLDNRQXSSINFVPQEMLSRPTPSAVSGDNTANLHSYYGHGMQNLQGNYANPATNDXIYDIEGQTSIP

SEQ ID NO: 124540 - protein, 77 aa, Setaria italica
  Transcript Sequence Number=SeqID_58566
MEAAIRCQRRLMYFPLVLLCGKSSLAKMTVETCAAGDSPPASGGSGHELEVAQWQELGLEEFALRESKPVHVSYSIV

SEQ ID NO: 124541 - protein, 79 aa, Setaria italica
  Transcript Sequence Number=SeqID_58567
EGEEGERHVCQERAVADSFFLDGCFGPRARVGCRWISQPAILAGWLNHLGEVNGALALPRPAPFLLLLQCSIMKWGTCT

SEQ ID NO: 124542 - protein, 88 aa, Setaria italica
  misc_feature (77)..(77): Xaa can be any naturally occurring amino acid
  Transcript Sequence Number=SeqID_58568
AAYLQFDLGPRRGERFPAPLRLWWALFLLLSVLAAAAHVATSLDGRPVPTHSWALDAVSVVAAVVLLCAGLLGGREXGGSAAEEPLLR

SEQ ID NO: 124543 - protein, 58 aa, Setaria italica
  Transcript Sequence Number=SeqID_58569
ECMSVMSKSCTETRNGAHSSCLTPMARSQSMLCAPFLVSVHDCTRMYVSYVLGRSGRF

SEQ ID NO: 124544 - protein, 61 aa, Setaria italica
  Transcript Sequence Number=SeqID_58570
  Gene Ontology: Mol. function=RNA-directed DNA polymerase activity; Cellular component=exocyst; Biological process=exocytosis
  Homolog annotation: Hit_ID=Q259N6; Match level="QueryCoverage=100%, HitCoverage=11%, E-value=1e-22, Identity=71%"; Hit description =H0723C07.3 protein
ELRESLRLAVAEILLPAYRSFIKRFGPLIENSKAPGKYVKHTPEQLELLLGNLFEGKQERA

SEQ ID NO: 124545 - protein, 81 aa, Setaria italica
  Transcript Sequence Number=SeqID_58571
  Gene Ontology: Mol. function=serine-type carboxypeptidase activity; Cellular component=extracellular region; Biological process =proteolysis
  Homolog annotation: Hit_ID=Q7XKJ9; Match level="QueryCoverage=95%, HitCoverage=15%, E-value=3e-25, Identity=75%"; Hit description =OSJNBa0038O10.8 protein
MERHAMGLRPRERLRANASADAVAQWGGWRAWYYRQQVAGWAVEYEEGLTLVTVRGAGHQVPLFAPARSLAMLYHFLRGQD

SEQ ID NO: 124546 - protein, 95 aa, Setaria italica
  misc_feature (58)..(58): Xaa can be any naturally occurring amino acid
  Transcript Sequence Number=SeqID_58572
SAKTHLLRCEIKQARSHGCLGVSTDCRLTFQQRSSAEEANTLQLNCLTSGTLATTNSXRGTTTTATSRRTDSIQRLRSSDSSTAGLGRRRRRLPY

SEQ ID NO: 124547 - protein, 81 aa, Setaria italica
  Transcript Sequence Number=SeqID_58573
  Gene Ontology: Mol. function=DNA binding; Cellular component =chromatin; Biological process=regulation of transcription, DNA -dependent
  Homolog annotation: Hit_ID=B6TXE9; Match level="QueryCoverage=100%, HitCoverage=64%, E-value=2e-32, Identity=89%"; Hit description =HMG1/2-like protein
  Pfam annotation: Domain name=HMG_box; Domain location=1-52; Score =39.0; E_value=1.8e-08; Accession=PF00505.11; Description=HMG (high mobility group) box
YKEKHPNVKQVSVIGKAGGDKWKSLSEAEKAPFVTKAEKLKAEYTKKMDAYNNKPSGGPTASGDSDKSKSEVNDEDEEGDE

SEQ ID NO: 124548 - protein, 78 aa, Setaria italica
  Transcript Sequence Number=SeqID_58574
  Subcellular localization annotation: CTP_CleavageSite=19; ConfidenceScore=5.07e-01
AVCPSRCSSSSCPLLELVVASVPEVRQFSCSVFASSALDRCWNVSLQSVPYPQASVRPCLVLSHILIDVVFADQVIQS

SEQ ID NO: 124549 - protein, 131 aa, Setaria italica
  misc_feature (77)..(77): Xaa can be any naturally occurring amino acid
  Transcript Sequence Number=SeqID_58575
  Gene Ontology: Mol. function=transferase activity, transferring groups other than amino-acyl groups
  Homolog annotation: Hit_ID=Q5VP59; Match level="QueryCoverage=96%, HitCoverage=30%, E-value=7e-20, Identity=42%"; Hit description =Putative anthocyanin 5-aromatic acyltransferase
SYSGHAVADGHAVWQFLRAWSAASREGHGSLAAPGFVQPTFDRAGIWHPKSAEIARSVLSKVAPALPLLRSTSSKPXIMKQSRRTFLLRADEIRSLKQHILEQSRAINRGEPWKPPSTYVAVSSLAWASIA

SEQ ID NO: 124550 - protein, 48 aa, Setaria italica
  Transcript Sequence Number=SeqID_58576
RLIALLCSRMCCFRDRISSARSRKVLLLCFMISGLDDVDLSCSIKSIF

SEQ ID NO: 124551 - protein, 34 aa, Setaria italica
  Transcript Sequence Number=SeqID_58577
SVYLLTCHFNRDIVLLHVAREKIHTLKRGVMERF

SEQ ID NO: 124552 - protein, 67 aa, Setaria italica
  Transcript Sequence Number=SeqID_58578
  Gene Ontology: Mol. function=oxidoreductase activity; Cellular component=cytoplasm; Biological process=oxidation reduction
  Homolog annotation: Hit_ID=Q8S531; Match level="QueryCoverage=100%, HitCoverage=13%, E-value=1e-32, Identity=97%"; Hit description =Cytosolic aldehyde dehydrogenase RF2C
MKFKTIEEVIQKANNTRYGLAAGIVTKNIDIANTVSRSIRAGAIWINCYFAFDPDAPFGGYKMSGFG

SEQ ID NO: 124553 - protein, 72 aa, Setaria italica
  Transcript Sequence Number=SeqID_58579
  Gene Ontology: Mol. function=oxidoreductase activity; Cellular component=cytoplasm; Biological process=oxidation reduction
  Homolog annotation: Hit_ID=Q8S531; Match level="QueryCoverage=75%, HitCoverage=10%, E-value=5e-25, Identity=92%"; Hit description =Cytosolic aldehyde dehydrogenase RF2C
SIRSANLCRIRDIPGAAHLLRYYAGAADKIHGETLKMAQRMHGYTLKEPVGVVGHIVPWNYPALRLQGTQGD

SEQ ID NO: 124554 - protein, 64 aa, Setaria italica
  Transcript Sequence Number=SeqID_58580
  Gene Ontology: Mol. function=metal ion binding
  Homolog annotation: Hit_ID=B6SKK2; Match level="QueryCoverage=96%, HitCoverage=11%, E-value=1e-26, Identity=95%"; Hit description=Zinc ion binding protein
  Pfam annotation: Domain name=DUF500; Domain location=4-64; Score= -29.9; E_value=0.002; Accession=PF04366.4; Description=Family of unknown function (DUF500)
PQGNAHMSIGAGISASAGHLGRAAEADFRAGDGGYAACYTYSCSKGAFVGCALNGSVVSTRDSV

SEQ ID NO: 124555 - protein, 76 aa, Setaria italica
  Transcript Sequence Number=SeqID_58581
TNPPAAARDWAGRAVWRCSARPVVACLLAPAAYQQRLTHPGKTIDLGAGADGIKEVQVGDKSLDANLRRSGGSWLK

SEQ ID NO: 124556 - protein, 75 aa, Setaria italica
  misc_feature (1)..(1): Xaa can be any naturally occurring amino acid
  Transcript Sequence Number=SeqID_58582
  Subcellular localization annotation: CTP_CleavageSite=56; ConfidenceScore=5.09e-01
XLKLGDSSGAALRWCWYPWRGRANKNVEARLTRSTKNSPWQRAAHRNKHPSRPSPSASPSQWQRSLSSQISRLQP

SEQ ID NO: 124557 - protein, 111 aa, Setaria italica
  Transcript Sequence Number=SeqID_58583
  Gene Ontology: Mol. function=thiopurine S-methyltransferase activity; Cellular component=cytoplasm; Biological process=metabolic process
  Homolog annotation: Hit_ID=B6T6T8; Match level="QueryCoverage=98%, HitCoverage=39%, E-value=5e-57, Identity=99%"; Hit description =Cysteine sulfinate desulfinase/cysteine desulfurase and related enzymes
YSTSGASGTNAAVIRGALRAEKPELLTVILPQSLKKQPPESQELLSKVQNLIEKPQYDHLPLIEASRLCNMDIISKIQQVICFAFHDSKLLMETCQEAKNLRKIVTLFYLD

SEQ ID NO: 124558 - protein, 83 aa, Setaria italica
  Transcript Sequence Number=SeqID_58584
  Gene Ontology: Mol. function=thiopurine S-methyltransferase activity; Cellular component=cytoplasm; Biological process=metabolic process
  Homolog annotation: Hit_ID=B6T6T8; Match level="QueryCoverage=92%, HitCoverage=27%, E-value=7e-38, Identity=96%"; Hit description =Cysteine sulfinate desulfinase/cysteine desulfurase and related enzymes
PTRSTKRRQPPESQELLSKVQNLIEKPQYDHLPLIEASRLCNMDIISKIQQVICFAFHDSKLLMETCQEAKNLRKIVTLFYLD

SEQ ID NO: 124559 - protein, 47 aa, Setaria italica
  Transcript Sequence Number=SeqID_58585
PELLTVILPQSLKKQPPESQELLSKVSLPGVSILTWSFSSQNYFQTC

SEQ ID NO: 124560 - protein, 78 aa, Setaria italica
  Transcript Sequence Number=SeqID_58586
  Homolog annotation: Hit_ID=B6T6T8; Match level="QueryCoverage=100%, HitCoverage=26%, E-value=3e-27, Identity=75%"; Hit description =Cysteine sulfinate desulfinase/cysteine desulfurase and related enzymes
VLGWTQGAKKQTPTPPAVARLNRLLCGYMRRDGHEGDVRSQGRDDAIMFGPDDDGVKIPTQTETLVKGTAMVAEPEYK

SEQ ID NO: 124561 - protein, 70 aa, Setaria italica
  Transcript Sequence Number=SeqID_58587
FSVRSRAEQQGRRRGSGGTFASAGGGRSGGGCGGDDGDEAVVGASSPASDEAVPVPVVMIDQDSDRDATI

SEQ ID NO: 124562 - protein, 75 aa, Setaria italica
  Transcript Sequence Number=SeqID_58588
NYKLSHKTKFHIMRLWVLATFCLLCFRIRYLVVCVYVVGRWHPLFMRIHSLFECFNLFKCTISAHLSLCLYLVFM

SEQ ID NO: 124563 - protein, 57 aa, Setaria italica
  Transcript Sequence Number=SeqID_58589
  Gene Ontology: Mol. function=amino acid binding; Cellular component =chloroplast envelope
  Homolog annotation: Hit_ID=B6TWB2; Match level="QueryCoverage=100%, HitCoverage=20%, E-value=3e-24, Identity=91%"; Hit description=ACT domain containing protein
MKALKDLGLDVTKGTVATDSAATQTKFHIMRFGRKVEDPDMLERIRLTVINNLLKYH

SEQ ID NO: 124564 - protein, 160 aa, Setaria italica
  Transcript Sequence Number=SeqID_58590
CFAVNHSSDTQISNSDMKTIIMKLSEKEPRLLLSVLKSVIEMIDAKEELTNKVAPFEVKRLYSLVLWLITSIKELKDSGYIGFVHEIGVLSSDKNAVPRFCLAKLLWKLLNLSTIGEKCIIDAALLLIEMVNNNNVEEKLRKLPVLSLPNLAKVLRQSRP

SEQ ID NO: 124565 - protein, 43 aa, Setaria italica
  Transcript Sequence Number=SeqID_58591
FNICTSEARNHKRVLASQMCKELWPIVNYIYEIFFEVFLVHYQ

SEQ ID NO: 124566 - protein, 101 aa, Setaria italica
  Transcript Sequence Number=SeqID_58592
LGDGLSMEVKLMKRREEMLVRKEQEIRKALISKNGKSEELTALQQQLQSAKEEASAAVKKLKEAESETKDLRTMTRRMVLSKEEMVNFLIIFLLFQRCHQA

SEQ ID NO: 124567 - protein, 120 aa, Setaria italica
  misc_feature (41)..(41): Xaa can be any naturally occurring amino acid
  Transcript Sequence Number=SeqID_58593
VEYVTSAGQRAKNGSETGSDGLEDADKLVHDLTVTAGKATXRTMLSVDKGLQELAFLKVEDAVLFALAQHHRSNVVGPADPDIKSTGDEKFTEAFDLSKEEEEDVKLVPGCVDQSTSAIA

SEQ ID NO: 124568 - protein, 45 aa, Setaria italica
  Transcript Sequence Number=SeqID_58594
VANLGDGLSMEVKLMKRREEMLVRKEVQVYLHVYLFTLTGIIWIF

SEQ ID NO: 124569 - protein, 112 aa, Setaria italica
  misc_feature (68)..(68): Xaa can be any naturally occurring amino acid
  misc_feature (85)..(85): Xaa can be any naturally occurring amino acid
  Transcript Sequence Number=SeqID_58595
MHMLACDPSIIAIMNKHKMASWNHDRNGSCRICRRQLLSGHMLSGRKIFDSYEDEFVLEPGIAAAGHXLGGESSSLASARAMSGXAAYQRLLNASAKEYRVSSTELKYSPAV

SEQ ID NO: 124570 - protein, 125 aa, Setaria italica
  misc_feature (21)..(21): Xaa can be any naturally occurring amino acid
  misc_feature (57)..(57): Xaa can be any naturally occurring amino acid
  Transcript Sequence Number=SeqID_58596
  Gene Ontology: Cellular component=cytoplasm; Biological process =protein modification process
  Homolog annotation: Hit_ID=Q9FKI1; Match level="QueryCoverage=95%, HitCoverage=15%, E-value=5e-58, Identity=85%"; Hit description =Similarity to zinc metalloproteinase
  Pfam annotation: Domain name=WLM; Domain location=17-125; Score=74.6; E_value=3.6e-19; Accession=PF08325.2; Description=WLM domain
SGRPQISLKLPQGQYIFCDFXTLHLPGIELNPPPSEALKRMHMLACDPGIIAIMNKXKWRVGIMTEMAPVGYVGVSPKCILGFNKNMGEEISLRLRTDDLKGFRKYESIKKTLLHELAHMVHSEH

SEQ ID NO: 124571 - protein, 79 aa, Setaria italica
  Transcript Sequence Number=SeqID_58597
  Gene Ontology: Mol. function=nucleic acid binding
  Homolog annotation: Hit_ID=B6TMR7; Match level="QueryCoverage=69%, HitCoverage=21%, E-value=8e-17, Identity=78%"; Hit description=THO complex subunit 4
FVILSRRADAVAAVKKYNNVQLDGKPMKIEIVGTNTPTAAAALPVVNGGQARNAVKRYVFTNSCQYQICRGMFGSIKNN

SEQ ID NO: 124572 - protein, 94 aa, Setaria italica
  Transcript Sequence Number=SeqID_58598
  Subcellular localization annotation: CTP_CleavageSite=74; ConfidenceScore=5.72e-01
VVLVWVPNYFLTSLVLSCPFPSSFNWRSRLRNAVKSAPRGGPTGMPQRRPHQRGGGRRGGGSGGRRGKERSKPRSAEELDADLEKYHADAMQTN

SEQ ID NO: 124573 - protein, 81 aa, Setaria italica
  misc_feature (70)..(70): Xaa can be any naturally occurring amino acid
  Transcript Sequence Number=SeqID_58599
  Gene Ontology: Mol. function=nucleic acid binding
  Homolog annotation: Hit_ID=B6TMR7; Match level="QueryCoverage=82%, HitCoverage=26%, E-value=2e-21, Identity=76%"; Hit description=THO complex subunit 4
VSGGVGPTRRPFKRAGNRQAPYQPPKAPDAAWQHDMYPGVAAGGGSGGRVSAIETGTKLYISNLDFGVSXNEDIKVYASPA

SEQ ID NO: 124574 - protein, 56 aa, Setaria italica
  Transcript Sequence Number=SeqID_58600
  Gene Ontology: Mol. function=palmitoyl-(protein) hydrolase activity; Biological process=protein modification process
YTKTLPLFVSLQGNLIGRAVVEYCDDGPPVKNFISLGGPHAGTASVPLCGSGIFCI

SEQ ID NO: 124575 - protein, 48 aa, Setaria italica
  Transcript Sequence Number=SeqID_58601
RLPQNPNCEYYVPLGHISDNEECSFYVVWLTCYSIVGLKDVFLTCLLY

SEQ ID NO: 124576 - protein, 59 aa, Setaria italica
  Transcript Sequence Number=SeqID_58602
  Gene Ontology: Mol. function=palmitoyl-(protein) hydrolase activity; Biological process=protein modification process
HTITRRLTALPFPPREIGSGTWDSWVMPLQQQADIICNKVKEMEQLKSGYNIVGLSQVC

SEQ ID NO: 124577 - protein, 96 aa, Setaria italica
  misc_feature (73)..(73): Xaa can be any naturally occurring amino acid
  Transcript Sequence Number=SeqID_58603
  Gene Ontology: Mol. function=palmitoyl-(protein) hydrolase activity; Biological process=protein modification process
DWRRVHAYDGRLFVQTKLYEEDWIGLKTLDEAGRVKFVSVAGGHLGISKGDMKKYIVPYLVDRSSSEKTRSVXSDLLGAAWHSTEGSSWGWTEGDD

SEQ ID NO: 124578 - protein, 86 aa, Setaria italica
  Transcript Sequence Number=SeqID_58604
SCAAAAAPEEINSHGGRAISCETDDHDSSLESFWADLLESSMKNDTSVRGGSLTPNQQTNYGMMDSGNNIFNTNATSNVSELSLPP

SEQ ID NO: 124579 - protein, 65 aa, Setaria italica
  Transcript Sequence Number=SeqID_58605
IFACVCCLGGRWTDLNFDKLMAEAGTRWFRPNEIYAVLANHARFKVHAQPIDKPASMCSSFTMKP

SEQ ID NO: 124580 - protein, 109 aa, Setaria italica
  Transcript Sequence Number=SeqID_58606
  Gene Ontology: Mol. function=calcium ion binding; Cellular component =nucleus; Biological process=regulation of transcription, DNA -dependent
  Homolog annotation: Hit_ID=O23463; Match level="QueryCoverage=87%, HitCoverage=10%, E-value=2e-25, Identity=62%"; Hit description =Calmodulin-binding transcription activator 5
  Pfam annotation: Domain name=CG-1; Domain location=29-109; Score =104.8; E_value=2.9e-28; Accession=PF03859.8; Description=CG-1 domain
AGGAGARDPLVASEIHGFLTCADLNFDKLMAEAGTRWFRPNEIYAVLANHARFKVHAQPIDKPASGTVVLYDRKVVRNFRKDGHNWKKKKDGKTVQEAHEKLKVVCANN

SEQ ID NO: 124581 - protein, 128 aa, Setaria italica
  misc_feature (11)..(11): Xaa can be any naturally occurring amino acid
  misc_feature (22)..(22): Xaa can be any naturally occurring amino acid
  Transcript Sequence Number=SeqID_58607
  Gene Ontology: Cellular component=small-subunit processome; Biological process=rRNA processing
EDDNTEQNEDXIKVTGKRTFGXLAKNTHEDVNKRQKLHETESSDSEYDSDPAQHLGNNEPTTKQDDIQLGTALLDDEQNDLYKSFDDIMKNPGPKTTFEVGMLAGDSWKKVNSSKGNGNSNVNRTLTK

SEQ ID NO: 124582 - protein, 52 aa, Setaria italica
  Transcript Sequence Number=SeqID_58608
FMIGASDFWHLLSLNNTKLGPDLRSIVHNHVLLVAMKLLFMPCSTRFLVGSR

SEQ ID NO: 124583 - protein, 55 aa, Setaria italica
  Transcript Sequence Number=SeqID_58609
MAPSSKLAVALLLAVAVLAAASPAATAQTNHKNCDKDKKITVQNLCAHDVVLTLE

SEQ ID NO: 124584 - protein, 115 aa, Setaria italica
  misc_feature (50)..(50): Xaa can be any naturally occurring amino acid
  misc_feature (65)..(65): Xaa can be any naturally occurring amino acid
  misc_feature (89)..(89): Xaa can be any naturally occurring amino acid
  misc_feature (108)..(108): Xaa can be any naturally occurring amino acid
  Transcript Sequence Number=SeqID_58610
  Gene Ontology: Mol. function=transferase activity, transferring glycosyl groups
  Homolog annotation: Hit_ID=B9GPT1; Match level="QueryCoverage=93%, HitCoverage=16%, E-value=4e-40, Identity=81%"; Hit description =Glycosyltransferase
LSLSSCLSERIKAMSQVLSKARDLLYDCKAITHRLRAMLLSADEQVRSLXKKQSTFLSQLAAKTXSQNGIHCLSMRLTIDYYLLSPEKXEKFPNSENLENPDLYHYAXFSDNVLA

SEQ ID NO: 124585 - protein, 124 aa, Setaria italica
  misc_feature (22)..(22): Xaa can be any naturally occurring amino acid
  Transcript Sequence Number=SeqID_58611
  Gene Ontology: Mol. function=transferase activity, transferring glycosyl groups
  Homolog annotation: Hit_ID=B9IC41; Match level="QueryCoverage=97%, HitCoverage=17%, E-value=4e-60, Identity=88%"; Hit description =Glycosyltransferase
  Pfam annotation: Domain name=Glyco_transf_8; Domain location=1-124; Score=-56.8; E_value=0.015; Accession=PF01501.12; Description =Glycosyl transferase family 8
NPPGDATIHVENVDDFKWLNSXYCPVLKQLESAAMKEYYFKADRPKTLSAGSSNLKYRNPKYLSMLNHLRFYLPQVYPKLNKILFLDDDIVVQRDLTGLWEVDLNGNVNGAVETCGESFHRILY

SEQ ID NO: 124586 - protein, 110 aa, Setaria italica
  misc_feature (70)..(70): Xaa can be any naturally occurring amino acid
  Transcript Sequence Number=SeqID_58612
  Gene Ontology: Mol. function=transferase activity, transferring glycosyl groups; Cellular component=integral to membrane
  Homolog annotation: Hit_ID=B9IC41; Match level="QueryCoverage=93%, HitCoverage=14%, E-value=8e-52, Identity=83%"; Hit description =Glycosyltransferase
TIVLILEEWKRKDITGIYHKWQNMNENRLLWKLGTLPPGLLTFYKLTHPLDKSWHVLGLGYNPTIERSEXDNAAVIHYNGNMKPWLEIAMTKYRPYWTKYINYEHPYIHG

SEQ ID NO: 124587 - protein, 67 aa, Setaria italica
  Transcript Sequence Number=SeqID_58613
  Gene Ontology: Mol. function=transferase activity, transferring glycosyl groups
VSDWSRKHNFELQNLSSSQMDDLHLLGRPEEITRRKLRDRRTGVRKKMEVVQQDDEALVKLENTGIE

SEQ ID NO: 124588 - protein, 74 aa, Setaria italica
  Transcript Sequence Number=SeqID_58614
HGHGQDVQMPNLGQQGEAVAGGAAPLQQPLGQGVQGDCGEVAAVANAMFNDQFNDQMYYIDHELSIDVFSQDDD

SEQ ID NO: 124589 - protein, 42 aa, Setaria italica
  Transcript Sequence Number=SeqID_58615
  Homolog annotation: Hit_ID=Q9AUL3; Match level="QueryCoverage=92%, HitCoverage=10%, E-value=3e-14, Identity=89%"; Hit description =Putative angio-associated migratory cell protein
GSEDCNVWMWNADHNAFLNTFAGHSSTVTCGDFTPDGTITVP

SEQ ID NO: 124590 - protein, 54 aa, Setaria italica
  Transcript Sequence Number=SeqID_58616
CAPVAHFVTYILSHLKYALSMIVQLIFSFSGDSEDVDDSTYIFQGHKDEVFTVA

SEQ ID NO: 124591 - protein, 76 aa, Setaria italica
  misc_feature (5)..(5): Xaa can be any naturally occurring amino acid
  Transcript Sequence Number=SeqID_58617
  Homolog annotation: Hit_ID=Q9AUL3; Match level="QueryCoverage=89%, HitCoverage=18%, E-value=6e-21, Identity=73%"; Hit description =Putative angio-associated migratory cell protein
  Pfam annotation: Domain name=WD40; Domain location=26-64; Score=32.9; E_value=1.3e-06; Accession=PF00400.24; Description=WD domain, G-beta repeat
WLGSXSRYVASGCIDGKVRIWDSLSGDCAREFSGHADVVQSLATTADGNALVSASTDGSARVFDISKYILCSSIIT

SEQ ID NO: 124592 - protein, 39 aa, Setaria italica
  Transcript Sequence Number=SeqID_58618
STSYFQSTYLLSNKIFFTELISSGSSHISMLVSLGGTKP

SEQ ID NO: 124593 - protein, 106 aa, Setaria italica
  misc_feature (77)..(77): Xaa can be any naturally occurring amino acid
  Transcript Sequence Number=SeqID_58619
  Gene Ontology: Mol. function=electron carrier activity; Cellular component=extracellular region; Biological process=response to oxidative stress
  Homolog annotation: Hit_ID=B6T750; Match level="QueryCoverage=64%, HitCoverage=19%, E-value=2e-27, Identity=88%"; Hit description =Peroxidase 17
  Subcellular localization annotation: CTP_CleavageSite=59; ConfidenceScore=5.38e-01
GNEPNPERTTLTNKPSNLQRNLRTTLRGFLNSDQTLFSDNARTRRVVKRFSKDQNAFFRAFAEGMIKMGELQNPRKXGEIRRNCRVANNSPATTPKEVAAYRVMDF

SEQ ID NO: 124594 - protein, 99 aa, Setaria italica
  Transcript Sequence Number=SeqID_58620
  Gene Ontology: Mol. function=electron carrier activity; Cellular component=extracellular region; Biological process=response to oxidative stress
  Homolog annotation: Hit_ID=B6T750; Match level="QueryCoverage=74%, HitCoverage=21%, E-value=4e-34, Identity=91%"; Hit description =Peroxidase 17
  Subcellular localization annotation: CTP_CleavageSite=53; ConfidenceScore=5.35e-01
YVPNPVAPSTNQYFKDLVALRGFLNSDQTLFSDNARTRRVVKRFSKDQNAFFRAFAEGMIKMGELQNPRKGEIRRNCRVANNSPATTPKEVAAYRVMDF

SEQ ID NO: 124595 - protein, 91 aa, Setaria italica
  Transcript Sequence Number=SeqID_58621
  Gene Ontology: Mol. function=RNA binding; Biological process =hemolysis by symbiont of host red blood cells
  Homolog annotation: Hit_ID=B6UCU6; Match level="QueryCoverage=78%, HitCoverage=23%, E-value=2e-34, Identity=97%"; Hit description =Hemolysin A
DGKIALDSGLSTGGFTDCLLQNGASHVYGVDVGYGQVAEKIRTHERVSVIERTNLRYLSQLPQPVDLVTLDLSFISILLVLFSVHCIIIHI

SEQ ID NO: 124596 - protein, 66 aa, Setaria italica
  misc_feature (44)..(44): Xaa can be any naturally occurring amino acid
  Transcript Sequence Number=SeqID_58622
  Gene Ontology: Mol. function=RNA binding; Biological process =hemolysis by symbiont of host red blood cells
  Homolog annotation: Hit_ID=Q53M53; Match level="QueryCoverage=100%, HitCoverage=22%, E-value=1e-29, Identity=93%"; Hit description =Hemolysin A family protein, expressed
VMPAVIKVMKMDSTLITLIKPQFEARRSQVGGGGIVRDPLVHKXVLDRIISGVEEFGFCNKGWIES

SEQ ID NO: 124597 - protein, 73 aa, Setaria italica
  misc_feature (56)..(56): Xaa can be any naturally occurring amino acid
  Transcript Sequence Number=SeqID_58623
  Gene Ontology: Mol. function=oxidoreductase activity; Cellular component=mitochondrial matrix; Biological process=metabolic process
  Homolog annotation: Hit_ID=B1Q3F8; Match level="QueryCoverage=57%, HitCoverage=8%, E-value=2e-15, Identity=85%"; Hit description =Succinic semialdehyde dehydrogenase
FLSKCCSCFIFFLSIYYHVEIYTSCISIFLSFFFALQPVGVVGAITPWNFPLAMIXRKVGPALACGCTVVVKP

SEQ ID NO: 124598 - protein, 58 aa, Setaria italica; identical to SEQ ID NO: 93522
  Transcript Sequence Number=SeqID_58624

SEQ ID NO: 124599 - protein, 72 aa, Setaria italica
  Transcript Sequence Number=SeqID_58625
RMLVCTRTHASSIRTSHDSKFSTNRSEQAAKRAKDKYIYQSSEITSKCIATSAIKRKGRCKQFMSGITNNTR

SEQ ID NO: 124600 - protein, 80 aa, Setaria italica
  Transcript Sequence Number=SeqID_58626
  Gene Ontology: Mol. function=GTP binding; Cellular component =intracellular
  Homolog annotation: Hit_ID=B6TMG1; Match level="QueryCoverage=72%, HitCoverage=11%, E-value=2e-20, Identity=84%"; Hit description =Nucleolar GTP-binding protein 2
LFVPPPQQSDDGASEGAEPVEKTEEDGVSSDRTAAAMKAIAGIISSQQNMNVPCHKEHDGDNEDSESEDNEDSEVPEQSE

SEQ ID NO: 124601 - protein, 96 aa, Setaria italica
  misc_feature (9)..(9): Xaa can be any naturally occurring amino acid
  misc_feature (88)..(88): Xaa can be any naturally occurring amino acid
  Transcript Sequence Number=SeqID_58627
  Gene Ontology: Mol. function=GTP binding; Cellular component =intracellular; Biological process=ribosome biogenesis
  Homolog annotation: Hit_ID=B6TMG1; Match level="QueryCoverage=97%, HitCoverage=17%, E-value=6e-46, Identity=95%"; Hit description =Nucleolar GTP-binding protein 2
  Pfam annotation: Domain name=MMR_HSR1; Domain location=6-84; Score =63.5; E_value=8.2e-16; Accession=PF01926.15; Description=GTPase of unknown function
LYKQAISVXFVGYPNVGKSSVINTLRSKSVCKVAPIPGETKVWQYITLTKKIFLIDCPGVVYQNNDSETDIVLKGVVRVTNLADAAEXHIGEVLRR

SEQ ID NO: 124602 - protein, 109 aa, Setaria italica
  Transcript Sequence Number=SeqID_58628
  Gene Ontology: Mol. function=GTP binding; Cellular component =intracellular; Biological process=ribosome biogenesis
  Homolog annotation: Hit_ID=B6TMG1; Match level="QueryCoverage=83%, HitCoverage=17%, E-value=3e-48, Identity=97%"; Hit description =Nucleolar GTP-binding protein 2
RQQTNNLKEINNFVEFTPDSSDVVVQVLDARDPMGTRCYHLEKHLKENCKHKHLVFLLNKCDLIPAWATKGWLRTLSKNYPTLAFHASINKSFGKGSLLSVLRQFARLK

SEQ ID NO: 124603 - protein, 60 aa, Setaria italica
  Transcript Sequence Number=SeqID_58629
TIKEFYFSFGLNLGMDWGGENLSLFPIRKQLERSPSFPSTFNDAKPKPKNIDALRPPSLP

SEQ ID NO: 124604 - protein, 59 aa, Setaria italica
  misc_feature (20)..(20): Xaa can be any naturally occurring amino acid
  misc_feature (32)..(32): Xaa can be any naturally occurring amino acid
  Transcript Sequence Number=SeqID_58630
LSCCCWLSCCWWWLICCCCXRCCCCCNCCCCXLRCCCCCSCCWLSCCCCCCSFCSSSIG

SEQ ID NO: 124605 - protein, 79 aa, Setaria italica
  Transcript Sequence Number=SeqID_58631
  Subcellular localization annotation: CTP_CleavageSite=53; ConfidenceScore=5.69e-01
LTYTGEHNHAAPTHRNSLAGTTRHKFPSSSRTAVPTRPPPQGRRNTRTQSKPRGPEESPWATSRTPPHPPPTPRPRRRR

SEQ ID NO: 124606 - protein, 81 aa, Setaria italica
  misc_feature (39)..(39): Xaa can be any naturally occurring amino acid
  Transcript Sequence Number=SeqID_58632
  Subcellular localization annotation: CTP_CleavageSite=55; ConfidenceScore=5.67e-01
FRRHPPTRRTARHPPCKSSRPRSPPATPPPRAAPQSPPXPPPQGRRNTRTQSKPRGPEESPWATSRTPPHPPPTPRPRRRR

SEQ ID NO: 124607 - protein, 70 aa, Setaria italica
  Transcript Sequence Number=SeqID_58633
FVRDGWHFFIILSFFLLWNIGCNKPLCRWLSVLITSIGKLMLTYVNCVGMACYIEAYCNQSLAFCTWHLG

SEQ ID NO: 124608 - protein, 104 aa, Setaria italica
  misc_feature (56)..(56): Xaa can be any naturally occurring amino acid
  misc_feature (75)..(75): Xaa can be any naturally occurring amino acid
  Transcript Sequence Number=SeqID_58634
  Gene Ontology: Mol. function=zinc ion binding; Biological process =proteolysis
  Homolog annotation: Hit_ID=Q8W3G0; Match level="QueryCoverage=86%, HitCoverage=12%, E-value=7e-23, Identity=50%"; Hit description =Putative far-red impaired response protein
  Pfam annotation: Domain name=MULE; Domain location=26-100; Score =36.2; E_value=1.3e-07; Accession=PF10551.1; Description=MULE transposase domain
DQEGRMTNFFYRDGKCRNDYGCFGDAIIFDTTYRTNKYNLICAPFVGVDHHWQNVXFGCAFLLDESVASYVWLFXSFLESMGGKSPKAMLCVRENLLNCLHNGF

SEQ ID NO: 124609 - protein, 70 aa, Setaria italica
  Transcript Sequence Number=SeqID_58635
NWRSKSCHPDGKKLNIQKNRGQHPNPCWAGEHTTHPAAACFDAQRFGCSGQAQLMQEWRSPSPGAQVVVV

SEQ ID NO: 124610 - protein, 69 aa, Setaria italica
  Transcript Sequence Number=SeqID_58636
SLPQTNIELLLLYAQEVAQQQPEEPLPSRPAERANELTNVKKHRQALLSFRCSWHHQNLNWGYCSICRQ

SEQ ID NO: 124611 - protein, 151 aa, Setaria italica
  misc_feature (108)..(108): Xaa can be any naturally occurring amino acid
  misc_feature (120)..(120): Xaa can be any naturally occurring amino acid
  misc_feature (144)..(144): Xaa can be any naturally occurring amino acid
  Transcript Sequence Number=SeqID_58637
  Gene Ontology: Mol. function=protein tyrosine/serine/threonine phosphatase activity; Cellular component=intracellular; Biological process=protein amino acid dephosphorylation
  Homolog annotation: Hit_ID=Q2R8T5; Match level="QueryCoverage=96%, HitCoverage=20%, E-value=5e-59, Identity=77%"; Hit description=mRNA capping enzyme, C-terminal domain containing protein, expressed
FLKLLFLVHCTHGHNRTGFMIIHYLMRTHVSCVAEAINIFAQRRPPGIYKRDYIEALYSFYHEVPENMMIGCPPTPEWKRPDDLDLNGEAKQDDDDDNGDIEPPNNEXEEKVITNDDVLXDAVPYDQQEALRVLCYRLLEMPLXRGHTQFQ

SEQ ID NO: 124612 - protein, 91 aa, Setaria italica
  misc_feature (56)..(56): Xaa can be any naturally occurring amino acid
  Transcript Sequence Number=SeqID_58638
  Gene Ontology: Mol. function=protein tyrosine/serine/threonine phosphatase activity; Cellular component=nucleoplasm; Biological process=protein amino acid dephosphorylation
  Homolog annotation: Hit_ID=Q2R8T5; Match level="QueryCoverage=100%, HitCoverage=13%, E-value=3e-46, Identity=93%"; Hit description=mRNA capping enzyme, C-terminal domain containing protein, expressed
GLVIDLTNTTRYYSPAEWTKQGTKHVKIPCKGRDAVPDNESVNVFVYEAMMFLDRXKQSKNPKYILVHCTHGHNRTGFMIIHYLMRTHVSC

SEQ ID NO: 124613 - protein, 76 aa, Setaria italica
  Transcript Sequence Number=SeqID_58639
  Gene Ontology: Mol. function=protein tyrosine/serine/threonine phosphatase activity; Biological process=protein amino acid dephosphorylation
  Homolog annotation: Hit_ID=Q2R8T5; Match level="QueryCoverage=78%, HitCoverage=8%, E-value=2e-22, Identity=83%"; Hit description=mRNA capping enzyme, C-terminal domain containing protein, expressed
  Pfam annotation: Domain name=mRNA_cap_C; Domain location=1-70; Score =14.2; E_value=2.3e-05; Accession=PF03919.7; Description=mRNA capping enzyme, C-terminal domain
ERGKKKLMDHARISFPEEIDPPSVAGRIVECSWNKEEQCWVCMRIRADKSTPNDINTYRKGRIEGRQLLNRKLKLN

SEQ ID NO: 124614 - protein, 74 aa, Setaria italica
  Transcript Sequence Number=SeqID_58640
  Subcellular localization annotation: CTP_CleavageSite=55; ConfidenceScore=5.51e-01
RLPNPNPADPSLTQQPPLLRSPPAPPCPPARCHRPPLRRPTTGERRPARPRRPPPAARGASPREPITELYEVAD

SEQ ID NO: 124615 - protein, 37 aa, Setaria italica
  Transcript Sequence Number=SeqID_58641
  Gene Ontology: Mol. function=protein tyrosine/serine/threonine phosphatase activity; Biological process=protein amino acid dephosphorylation
  Homolog annotation: Hit_ID=Q2R8T5; Match level="QueryCoverage=97%, HitCoverage=5%, E-value=3e-14, Identity=97%"; Hit description=mRNA capping enzyme, C-terminal domain containing protein, expressed
QFPGSHPVSLNSENLQLLRQRYYYATWKADGTRYMMA

SEQ ID NO: 124616 - protein, 82 aa, Setaria italica
  Transcript Sequence Number=SeqID_58642
  Subcellular localization annotation: CTP_CleavageSite=32; ConfidenceScore=5.48e-01
AGKASSASMTLNASFCWQQRKLIPFRVSSCSRAPPVWHLYFSWALDHISCRTLVLRRLVGNTHTRMPLSGHSTFIYRSTYVL

SEQ ID NO: 124617 - protein, 86 aa, Setaria italica
  Transcript Sequence Number=SeqID_58643
  Gene Ontology: Mol. function=catalytic activity
  Homolog annotation: Hit_ID=B6SYY5; Match level="QueryCoverage=41%, HitCoverage=5%, E-value=3e-12, Identity=86%"; Hit description=Acyl CoA synthetase
ELRKGTNYNLGNQVDLYKTIEKDLITPTFKLKRPQLLKYYKDRIDQMYNDAKGGANCVTVLTSAYGPEHCDSTEACTLLIITYFLS

SEQ ID NO: 124618 - protein, 112 aa, Setaria italica
  misc_feature (94)..(94): Xaa can be any naturally occurring amino acid
  Transcript Sequence Number=SeqID_58644
  Gene Ontology: Mol. function=catalytic activity; Cellular component =plasma membrane; Biological process=metabolic process
  Homolog annotation: Hit_ID=Q2R2L5; Match level="QueryCoverage=100%, HitCoverage=16%, E-value=7e-44, Identity=76%"; Hit description=AMP -binding enzyme family protein, expressed
GAMKIIDRKKNIFKLSQGEYVAVDVVERAYMQSPLVASVWVYGNSFESFLVAVVVPERQALDEWAAANNKTSDFAELCNDPKAKGYIQDELNKXTGKKLGVSQYYMMYHIKL

SEQ ID NO: 124619 - protein, 39 aa, Setaria italica
  Transcript Sequence Number=SeqID_58645
YCHTVRPSYSNITRIVSIRCTMMLRRGELCDSINKCLWP

SEQ ID NO: 124620 - protein, 114 aa, Setaria italica
  misc_feature (72)..(72): Xaa can be any naturally occurring amino acid
  Transcript Sequence Number=SeqID_58646
  Gene Ontology: Mol. function=catalytic activity; Cellular component =plasma membrane; Biological process=metabolic process
  Homolog annotation: Hit_ID=B6SYY5; Match level="QueryCoverage=98%, HitCoverage=16%, E-value=6e-57, Identity=91%"; Hit description=Acyl CoA synthetase
YKNTPRGEICLRGHTLFSGYYKRPSLTEEVFSDGWFHTGDIGEWQPNGAMKIIDRKKNIFKLSQGEYVAVEXRERAYMQSPLVASVWVYGNSFESFLVAVVVPERQALDEWAAA

SEQ ID NO: 124621 - protein, 104 aa, Setaria italica
  Transcript Sequence Number=SeqID_58647
  Gene Ontology: Mol. function=catalytic activity; Cellular component =plasma membrane; Biological process=metabolic process
  Homolog annotation: Hit_ID=B6SYY5; Match level="QueryCoverage=87%, HitCoverage=13%, E-value=3e-41, Identity=83%"; Hit description=Acyl CoA synthetase
IKGKQRTLRSTITLVAVVVPERQALDEWAAANNKTSDFAELCNDPKAKGYIQDELNKTGKKLGLRGFEMLKAIHLEPVPFSIEKDLITPTFKLKRPQLLKYYKD

SEQ ID NO: 124622 - protein, 105 aa, Setaria italica
  misc_feature (78)..(78): Xaa can be any naturally occurring amino acid
  Transcript Sequence Number=SeqID_58648
  Gene Ontology: Mol. function=catalytic activity; Cellular component =plasma membrane; Biological process=metabolic process
  Homolog annotation: Hit_ID=B6SYY5; Match level="QueryCoverage=91%, HitCoverage=14%, E-value=1e-42, Identity=86%"; Hit description=Acyl CoA synthetase
YFCFFGKLIFSFLGKQKYHLFVSREAHICTIMYTSGTTGDPKGVIITNRAIIAGVMTTEHLLKETDKVITEEDSYFSXLPLAHIFDQVIENYCISKGASIGFWQG

SEQ ID NO: 124623 - protein, 41 aa, Setaria italica
  Transcript Sequence Number=SeqID_58649
  Gene Ontology: Mol. function=nucleic acid binding; Cellular component= chromatin; Biological process=chromatin assembly or disassembly
  Homolog annotation: Hit_ID=B9SYQ4; Match level="QueryCoverage=95%, HitCoverage=2%, E-value=2e-11, Identity=89%"; Hit description =Chromodomain helicase DNA binding protein, putative
MSRAHRIGQQETVNIYRFVTCKSVEEDILERAKKKMVVNSA

SEQ ID NO: 124624 - protein, 64 aa, Setaria italica
  misc_feature (43)..(43): Xaa can be any naturally occurring amino acid
  misc_feature (59)..(59): Xaa can be any naturally occurring amino acid
  Transcript Sequence Number=SeqID_58650
  Subcellular localization annotation: CTP_CleavageSite=21; ConfidenceScore=5.19e-01
MDKVVSMDYFLQLQQRSMPSRKMTRMNTTFWPFITIPSHFNWXPAKNTSRTTRFLQPIXICHHW

SEQ ID NO: 124625 - protein, 103 aa, Setaria italica
  Transcript Sequence Number=SeqID_58651
  Gene Ontology: Mol. function=helicase activity
  Homolog annotation: Hit_ID=Q7XAM4; Match level="QueryCoverage=98%, HitCoverage=23%, E-value=1e-41, Identity=79%"; Hit description =Chromodomain-helicase-DNA-binding protein-like protein
MTMRLWNYVATFSNMSGEQLHDLYLKLSQDVEGGVGPSHGGNFTSNPPSKGGTSNQLHPSRNQRPTRSLQYTSESFHNNENSGSSEAWKRRRRADPDNQFDYF

SEQ ID NO: 124626 - protein, 116 aa, Setaria italica
  misc_feature (17)..(17): Xaa can be any naturally occurring amino acid
  Transcript Sequence Number=SeqID_58652
  Gene Ontology: Mol. function=nucleic acid binding; Cellular component= chromatin; Biological process=chromatin assembly or disassembly
  Homolog annotation: Hit_ID=B9SYQ4; Match level="QueryCoverage=99%, HitCoverage=6%, E-value=6e-53, Identity=92%"; Hit description =Chromodomain helicase DNA binding protein, putative
GGLGINLATADTVIIFXTLDWNPQNDLQAMSRAHRIGQQETVNIYRFVTCKSVEEDILERAKKKMVLDHLVIQKLNAEGRLEKKESKKGGSMFDKNELSAILRFGAEELFKEDKTR

SEQ ID NO: 124627 - protein, 83 aa, Setaria italica
  Transcript Sequence Number=SeqID_58653
CLDSRGDARNCLQLYTEHPSDTISPKQPKQIYMVACDLPRGRVEKVLLVQFCHLIEIWVHLEKLISTMIYSSIFIHVLCVALQ

SEQ ID NO: 124628 - protein, 62 aa, Setaria italica
  Transcript Sequence Number=SeqID_58654
  Gene Ontology: Mol. function=nucleic acid binding; Cellular component= chromatin; Biological process=chromatin assembly or disassembly
  Homolog annotation: Hit_ID=A9TTS1; Match level="QueryCoverage=96%, HitCoverage=4%, E-value=2e-16, Identity=75%"; Hit description=SNF2 family DNA-dependent ATPase (Fragment)
QHILEKRILLKASAPHILDTLQMVKMLDILAEYLSLRGFQFQRLDGSTRADLRHQAMEHFNA

SEQ ID NO: 124629 - protein, 64 aa, Setaria italica
  misc_feature (41)..(41): Xaa can be any naturally occurring amino acid
  Transcript Sequence Number=SeqID_58655
  Gene Ontology: Mol. function=nucleic acid binding
  Homolog annotation: Hit_ID=B9HP20; Match level="QueryCoverage=100%, HitCoverage=4%, E-value=1e-11, Identity=54%"; Hit description =Chromatin remodeling complex subunit
IDLIVDDVGGVLAKAPHEAQIELFDLLIDGCQEAVKENTDXQAVKPYELLARVEELQFLAKRIA

SEQ ID NO: 124630 - protein, 75 aa, Setaria italica
  misc_feature (49)..(49): Xaa can be any naturally occurring amino acid
  Transcript Sequence Number=SeqID_58656
  Gene Ontology: Mol. function=ATP-dependent DNA helicase activity; Biological process=DNA repair
  Homolog annotation: Hit_ID=UPI0001A7B0CB; Match level="QueryCoverage =81%, HitCoverage=5%, E-value=2e-13, Identity=63%"; Hit description =ATP binding / ATP-dependent DNA helicase/ DNA binding / hydrolase
MPFPHCDMPRIAPRLAPAKYLLEKRAVVDVDNGKLLNEDSDIRSVLQFXLMDDVSEFLSTHFSSTNRKGQDKEPK

SEQ ID NO: 124631 - protein, 95 aa, Setaria italica
  misc_feature (27)..(27): Xaa can be any naturally occurring amino acid
  misc_feature (82)..(82): Xaa can be any naturally occurring amino acid
  Transcript Sequence Number=SeqID_58657
  Gene Ontology: Cellular component=vacuole
  Homolog annotation: Hit_ID=B9RHR0; Match level="QueryCoverage=98%, HitCoverage=12%, E-value=2e-24, Identity=62%"; Hit description =Protein regulator of cytokinesis, putative
DTPLEEQQMFQNVTCNIAASEHEITEXPNTLSVDYLSYVESEVLRLEQLKASKDRKGPLVLEKETELEEHRRRAHLIGEEGXAAEFSTEGYEAGA

SEQ ID NO: 124632 - protein, 72 aa, Setaria italica
  Transcript Sequence Number=SeqID_58658
RFLVGGRRIWEEDGREGKIKRVEESIRIRREAEPVELVQAVKKLQKVFAREEKWRKELPLVLKQKISYDIVR

SEQ ID NO: 124633 - protein, 83 aa, Setaria italica
  Transcript Sequence Number=SeqID_58659
  Homolog annotation: Hit_ID=Q5QLI3; Match level="QueryCoverage=86%, HitCoverage=23%, E-value=5e-24, Identity=77%"; Hit description =Transcription factor-like protein
DSRIYQRIDFRVPPELRNLLRTKDSGSQKWAEMCKLEVMPSQSFIFLQLFELKDDFIQEEIRKPSYQSICSRFTGWFSKPMMK

SEQ ID NO: 124634 - protein, 90 aa, Setaria italica
  misc_feature (76)..(76): Xaa can be any naturally occurring amino acid
  Transcript Sequence Number=SeqID_58660
  Gene Ontology: Mol. function=molecular_function; Cellular component =cellular_component; Biological process=biological_process
  Homolog annotation: Hit_ID=B9SEI0; Match level="QueryCoverage=95%, HitCoverage=27%, E-value=3e-46, Identity=96%"; Hit description =Coiled-coil domain-containing protein, putative
MSSLAAARADNFYYPPEWSPKKGGLNKFHGQHALRERARKLDQGILIIRFEMPFNIWCGGCNSMIAKGVRFNAEKXQVGNYYSTKVLALV

SEQ ID NO: 124635 - protein, 34 aa, Setaria italica
  Transcript Sequence Number=SeqID_58661
  Homolog annotation: Hit_ID=B9SEI0; Match level="QueryCoverage=94%, HitCoverage=10%, E-value=7e-11, Identity=90%"; Hit description =Coiled-coil domain-containing protein, putative
MCQIWSFTMKSPCCKHEIVIQTDPKNTEYVIISG

SEQ ID NO: 124636 - protein, 95 aa, Setaria italica
  Transcript Sequence Number=SeqID_58662
  Subcellular localization annotation: CTP_CleavageSite=42; ConfidenceScore=5.03e-01
AIFSSRLASPPREPELRSRWTRFSPSPPAVPPARPRRYAWTPASRRRLIHGLHLKPLEKPPRKPLPTAGPGHTCWTGTGPPRLHHHPPTRSGSNR

SEQ ID NO: 124637 - protein, 55 aa, Setaria italica
  Transcript Sequence Number=SeqID_58663
TVRRKAAQVKARGAKGAADEAFADDGRKKVTVFFGTQTGTAEGFAKVRSSCAATN

SEQ ID NO: 124638 - protein, 40 aa, Setaria italica
  Transcript Sequence Number=SeqID_58664
  Gene Ontology: Mol. function=electron carrier activity; Biological process=oxidation reduction
  Homolog annotation: Hit_ID=B6SS78; Match level="QueryCoverage=77%, HitCoverage=4%, E-value=4e-12, Identity=96%"; Hit description=NADPH-- cytochrome P450 reductase
DELLTEQGGKRLVPVGLGDDDQCIEDDFNAWSVFLVSLTC

SEQ ID NO: 124639 - protein, 45 aa, Setaria italica
  Transcript Sequence Number=SeqID_58665
VLISTSVIIFDNVSFGGFSSPWNMLGHVDSEIYGKPTRCISRRQV

SEQ ID NO: 124640 - protein, 64 aa, Setaria italica
  Transcript Sequence Number=SeqID_58666
HGAYPPAAYPAHSAQYGHMGSYHTGHGGGHHGGYGGKHKGGMFGGYGGKHKGGMFGGGKYRKWK

SEQ ID NO: 124641 - protein, 113 aa, Setaria italica
  Transcript Sequence Number=SeqID_58667
  Homolog annotation: Hit_ID=B4FKA1; Match level="QueryCoverage=76%, HitCoverage=29%, E-value=1e-31, Identity=86%"; Hit description =Myosin-like protein
  Pfam annotation: Domain name=MCC-bdg_PDZ; Domain location=35-105; Score=8.1; E_value=0.1; Accession=PF10506.1; Description=PDZ domain of MCC-2 bdg protein for U
  Subcellular localization annotation: CTP_CleavageSite=41; ConfidenceScore=5.01e-01
SLLSSLVKFFVSLTLSFSNPFRSKYCLLHLRSEAGKLQSLRQELAAKVQGLLKELEHHKSESQKIPAMIAERDALRQELIQARAALEYEKNAKPELTAQVQAMEKDLVAMAQE

SEQ ID NO: 124642 - protein, 91 aa, Setaria italica
  Transcript Sequence Number=SeqID_58668
NYPLLLTSSPECRRVRKRGVGKGGFVLPLPALCSSWPRARLLRAAHPISGHPAPVDIRGLEANRFDLRTLEPIFQYLDWIDDIFYHVLTHW

SEQ ID NO: 124643 - protein, 54 aa, Setaria italica
  misc_feature (7)..(7): Xaa can be any naturally occurring amino acid
  Transcript Sequence Number=SeqID_58669
  Gene Ontology: Mol. function=ATPase activity, coupled to transmembrane movement of substances; Cellular component=integral to membrane; Biological process=transport
  Homolog annotation: Hit_ID=Q8GU58; Match level="QueryCoverage=100%, HitCoverage=6%, E-value=2e-19, Identity=63%"; Hit description=MRP -like ABC transporter
AGNKIGXVGRTGSGKSTLISSLFRLVDPAEPTLFRGTVRNNLDPLGLHSDQEIW

SEQ ID NO: 124644 - protein, 59 aa, Setaria italica
  Transcript Sequence Number=SeqID_58670
NSTLWSFRCLIVHTSQFYHKLLPLITNRSPLRGLQYGKDIYHENISHDDSSNVNLYDFF

SEQ ID NO: 124645 - protein, 99 aa, Setaria italica
  Transcript Sequence Number=SeqID_58671
  Gene Ontology: Mol. function=structural molecule activity
  Homolog annotation: Hit_ID=B6SUF8; Match level="QueryCoverage=42%, HitCoverage=18%, E-value=2e-11, Identity=71%"; Hit description=VAP27
AQKEAPPDMQCKDKFLVQSVIVAEDTLPKDITGDMFTKQSGNVVDEVKLKVVYVPPPKPPSPVREGSEEGSSPRPSLSDGSTLNYQEMQTTRESDEPPS

SEQ ID NO: 124646 - protein, 76 aa, Setaria italica
  Transcript Sequence Number=SeqID_58672
  Subcellular localization annotation: CTP_CleavageSite=46; ConfidenceScore=5.15e-01
VNLHPARTFPSVRLYFVPMHLFSCTTLLQRYSIAYSGSSVISNCVRGSYLTQAVSLSLDLVLALMSACGTNELGNY

SEQ ID NO: 124647 - protein, 76 aa, Setaria italica
  misc_feature (23)..(23): Xaa can be any naturally occurring amino acid
  Transcript Sequence Number=SeqID_58673
  Homolog annotation: Hit_ID=B6T2U8; Match level="QueryCoverage=100%, HitCoverage=34%, E-value=2e-29, Identity=79%"; Hit description =Cation cation antiporter
VELARQLKETSLLMNQSVQETEXERVVEHSLAGTSHANARAVEVYSLTSKTTCFQWLLLFVMTCMFFMVVLLIRIT

SEQ ID NO: 124648 - protein, 77 aa, Setaria italica
  Transcript Sequence Number=SeqID_58674
  Gene Ontology: Cellular component=mitochondrial matrix
  Homolog annotation: Hit_ID=B6T2U8; Match level="QueryCoverage=70%, HitCoverage=22%, E-value=3e-15, Identity=70%"; Hit description =Cation cation antiporter
DNVPVQAKYILVNCRLCFSRYPAMGISRTQVNLLRLLDSAPRQENQAKLIHYVTTSRELLEQLAAETTSEGISSVSK

SEQ ID NO: 124649 - protein, 51 aa, Setaria italica
  Transcript Sequence Number=SeqID_58675
LYLCGSLDFRHSILLLHPCTLFVCMQLQDIYAKKFSSPLFRLLFRAQAENS

SEQ ID NO: 124650 - protein, 53 aa, Setaria italica
  Transcript Sequence Number=SeqID_58676
ASARKQDFLKQKNKKEPESCVFKKEKETESWHRLSWVQKVQRATGVKPCLNCI

SEQ ID NO: 124651 - protein, 132 aa, Setaria italica
  Transcript Sequence Number=SeqID_58677
  Gene Ontology: Mol. function=exonuclease activity; Cellular component= intracellular
  Homolog annotation: Hit_ID=B6THB1; Match level="QueryCoverage=58%, HitCoverage=17%, E-value=1e-24, Identity=66%"; Hit description =Histone mRNA exonuclease 1
NFKNISKPSYFNQWVNLRIPFETAFGAGRRNLQEAVREAGLQWDGRLHCGLDDARNTARLLVELMRRGVRISITGSLVPPPLPEPEPEPEPEPELQHQRRCGDHTRTNARTILLRLWELDADMSFLPLGCLI

SEQ ID NO: 124652 - protein, 32 aa, Setaria italica
  Transcript Sequence Number=SeqID_58678
HVLPLLLLPRTTKICCSQILVVRGSNNMSYPC

SEQ ID NO: 124653 - protein, 79 aa, Setaria italica
  Transcript Sequence Number=SeqID_58679
  Homolog annotation: Hit_ID=B6T4C2; Match level="QueryCoverage=100%, HitCoverage=35%, E-value=2e-32, Identity=84%"; Hit description=CBS domain containing protein
GVVVKNDRAKASHGPQTKIEEVMTSPAITLASDKTVMDAAVLMLKKKIHRVPIVNQDEQVIGIITRADVLRELEGLLKI

SEQ ID NO: 124654 - protein, 156 aa, Setaria italica
  Transcript Sequence Number=SeqID_58680
  Homolog annotation: Hit_ID=Q6V9H6; Match level="QueryCoverage=86%, HitCoverage=46%, E-value=1e-52, Identity=75%"; Hit description=Brown planthopper-induced resistance protein 1
GAKINTGTRRSAAKRSPTFQCRASTFVDASVRLELDENPEAIISGEWPENSFLLSYDDLRAYLESQEAVQEGDQRVALLSETMSTPVLVATAEQTLEEVECHFEAVSGLPVVDSSLQYCCLGLVVKNDRAKASHGVSSPFPSFSLSLTQLGRKHTH

SEQ ID NO: 124655 - protein, 79 aa, Setaria italica; identical to SEQ ID NO: 124653
  Transcript Sequence Number=SeqID_58681
  Homolog annotation: Hit_ID=B6T4C2; Match level="QueryCoverage=100%, HitCoverage=35%, E-value=2e-32, Identity=84%"; Hit description=CBS domain containing protein

SEQ ID NO: 124656 - protein, 74 aa, Setaria italica
  Transcript Sequence Number=SeqID_58682
  Homolog annotation: Hit_ID=Q6V9H6; Match level="QueryCoverage=98%, HitCoverage=25%, E-value=2e-23, Identity=71%"; Hit description=Brown planthopper-induced resistance protein 1
PRGAKINTGTRRSAAKRSPTFQCRASTFVDASVRLELDENPEAIISGEWPENSFLLSYDDLRAYLESQEAVQEG

SEQ ID NO: 124657 - protein, 72 aa, Setaria italica
  Transcript Sequence Number=SeqID_58683
VSWCGTFTRKRSQTLPGLFLPILERTPTDCRSACCHSKHHGHIYKKFWLLSMDCCPSKSSAGLPTREEHQHG

SEQ ID NO: 124658 - protein, 60 aa, Setaria italica
  Transcript Sequence Number=SeqID_58684
KLFRAYFCRFWSALLLIVDLPAATQKHHGHIYKKFWLLSMDCCPSKSSAGLPTREEHQHK

SEQ ID NO: 124659 - protein, 77 aa, Setaria italica
  misc_feature (2)..(2): Xaa can be any naturally occurring amino acid
  misc_feature (6)..(6): Xaa can be any naturally occurring amino acid
  Transcript Sequence Number=SeqID_58685
  Homolog annotation: Hit_ID=B6T4C2; Match level="QueryCoverage=100%, HitCoverage=35%, E-value=9e-29, Identity=84%"; Hit description=CBS domain containing protein
DXLRAXLESQEAVQEGDQRVALLSETMSTPVLVATAEQTLEEVECHFEAVSGLPVVDSSLRCVGVVVKNDRAKASHG

SEQ ID NO: 124660 - protein, 72 aa, Setaria italica
  Transcript Sequence Number=SeqID_58686
  Homolog annotation: Hit_ID=B6T4C2; Match level="QueryCoverage=100%, HitCoverage=33%, E-value=6e-27, Identity=85%"; Hit description=CBS domain containing protein
LESQEAVQEGDQRVALLSETMSTPVLVATAEQTLEEVECHFEAVSGLPVVDSSLRCVGVVVKNDRAKASHGT

SEQ ID NO: 124661 - protein, 76 aa, Setaria italica
  Transcript Sequence Number=SeqID_58687
  Homolog annotation: Hit_ID=B6T4C2; Match level="QueryCoverage=80%, HitCoverage=27%, E-value=5e-24, Identity=86%"; Hit description=CBS domain containing protein
LEEVECHFEAVSGLPVVDSSLRCVGVVVKNDRAKASHGPQTKIEEVMTSPAITLASDKTVMGNCCFHITFFFPRML

SEQ ID NO: 124662 - protein, 46 aa, Setaria italica
  Transcript Sequence Number=SeqID_58688
  Homolog annotation: Hit_ID=B6T4C2; Match level="QueryCoverage=91%, HitCoverage=18%, E-value=2e-13, Identity=85%"; Hit description=CBS domain containing protein
VTSTDAAVLMLKKKIHRVPIVNQDEQVIGIITRADVLRELEGLLKI

SEQ ID NO: 124663 - protein, 48 aa, Setaria italica
  misc_feature (41)..(41): Xaa can be any naturally occurring amino acid
  Transcript Sequence Number=SeqID_58689
  Homolog annotation: Hit_ID=B6T4C2; Match level="QueryCoverage=100%, HitCoverage=21%, E-value=4e-16, Identity=85%"; Hit description=CBS domain containing protein
SDKTVMDAAVLMLKKKIHRVPIVNQDEQVIGIITRADVLSXLEGLLKI

SEQ ID NO: 124664 - protein, 82 aa, Setaria italica
  Transcript Sequence Number=SeqID_58690
LLSALLLVPVLIFAPLAMEQLWRVLMHAMDGRKLLAITLWWVAHWFLYVLLQILAGEGGIYKTTSQGAEVDRNAWKAWPHHP

SEQ ID NO: 124665 - protein, 77 aa, Setaria italica
  Transcript Sequence Number=SeqID_58691
ALSALLLVPVLIFAPPGNGATLEGVDACHGWKETIGDHSLVGGSLVSVCSSADPCRGRGGFIKRQVRELRWIGMHGR

SEQ ID NO: 124666 - protein, 45 aa, Setaria italica
  Transcript Sequence Number=SeqID_58692
VSTLLVPVLIFAPPGNGATLEGVDACHGWKETIGDHSLVGGSLVS

SEQ ID NO: 124667 - protein, 39 aa, Setaria italica
  Transcript Sequence Number=SeqID_58693
  Homolog annotation: Hit_ID=B6T4C2; Match level="QueryCoverage=100%, HitCoverage=17%, E-value=1e-11, Identity=84%"; Hit description=CBS domain containing protein
VLMLKKKIHRVPIVNQDEQVIGIITRADVLRELEGLLKI

SEQ ID NO: 124668 - protein, 47 aa, Setaria italica
  Transcript Sequence Number=SeqID_58694
WLERSLLLQSLFVAVTSSNRSVDGMDFLLRSCMKLATCYVCACAQVV

SEQ ID NO: 124669 - protein, 47 aa, Setaria italica
  Transcript Sequence Number=SeqID_58695
VTTVDLLLEHQNRSICRCYTCTLRSNLKHTWKEKGDMKTTITHHCFI

SEQ ID NO: 124670 - protein, 70 aa, Setaria italica
  Transcript Sequence Number=SeqID_58696
GVVLLQGKDLKLFRAYFCRFWSALLLIVDLPAATQKHHGHIYKKFWLLSMDCCPSKSSAGLPTREEHQHG

SEQ ID NO: 124671 - protein, 40 aa, Setaria italica
  Transcript Sequence Number=SeqID_58697
  Homolog annotation: Hit_ID=B6T4C2; Match level="QueryCoverage=90%, HitCoverage=16%, E-value=3e-10, Identity=88%"; Hit description=CBS domain containing protein
KIEEVMTSPAITLASDKTVMDAAVLMLKKKIHRVPITCSS

SEQ ID NO: 124672 - protein, 35 aa, Setaria italica
  Transcript Sequence Number=SeqID_58698
QPQTKIEEVMTSPAITLASDKTVMDAAVLMLKKKI

SEQ ID NO: 124673 - protein, 41 aa, Setaria italica
  Transcript Sequence Number=SeqID_58699
  Homolog annotation: Hit_ID=B6T4C2; Match level="QueryCoverage=100%, HitCoverage=18%, E-value=3e-12, Identity=85%"; Hit description=CBS domain containing protein
AAVLMLKKKIHRVPIVNQDEQVIGIITRADVLRELEGLLKI

SEQ ID NO: 124674 - protein, 49 aa, Setaria italica
  Transcript Sequence Number=SeqID_58700
GKDLKLFRAYFCRFWSALLLIVDLPAATQKHHGHILQEVLASEHGLLPF

SEQ ID NO: 124675 - protein, 60 aa, Setaria italica
  Transcript Sequence Number=SeqID_58701
  Subcellular localization annotation: CTP_CleavageSite=41; ConfidenceScore=5.21e-01
MCWVVVKNDRAKASHGVSSPFPSFSLSLTQLGRKHTHNKLLVSYKSEGENPFRLLIYCCL

SEQ ID NO: 124676 - protein, 46 aa, Setaria italica
  Transcript Sequence Number=SeqID_58702
DLFLVKVPHQETYSLCCTACATKCCKLVNTESKFPCKSTTPGNLLS

SEQ ID NO: 124677 - protein, 65 aa, Setaria italica
  misc_feature (1)..(16): Xaa can be any naturally occurring amino acid
  Transcript Sequence Number=SeqID_58703
XXXXXXXXXXXXXXXXFFFFLQCNTESKFPGVVLLQGKDLKLFRAYFCRFWSALLLIVDLPAATQ

SEQ ID NO: 124678 - protein, 134 aa, Setaria italica
  Transcript Sequence Number=SeqID_58704
  Gene Ontology: Cellular component=integral to membrane
  Homolog annotation: Hit_ID=B6U1H1; Match level="QueryCoverage=100%, HitCoverage=22%, E-value=2e-70, Identity=94%"; Hit description=Auxin- independent growth promoter-like protein
GITLHCPETKEPPSLWENPRAATASWKPCAERRSDEPSDVPSEKETSGYIFIHAEGGLNQQRIAICNAVAIARIMSATLILPVLKQDQIWKDQTKFEDIFDVDHFINYLKDDVRIVRDIPDWFTEKDELFTSIK

SEQ ID NO: 124679 - protein, 70 aa, Setaria italica
  misc_feature (11)..(11): Xaa can be any naturally occurring amino acid
  Transcript Sequence Number=SeqID_58705
  Homolog annotation: Hit_ID=B4FAK0; Match level="QueryCoverage=100%, HitCoverage=18%, E-value=9e-30, Identity=90%"; Hit description =Lysine ketoglutarate reductase trans-splicing related 1
  Pfam annotation: Domain name=DUF707; Domain location=1-70; Score= -133.4; E_value=1.7e-05; Accession=PF05212.4; Description=Protein of unknown function (DUF707)
NVDGWHHLEWXDKAIHILAHNQTKWWFAKRFLHPDVMAIYDFIFLWDEDLGVDNFNPRRYLDIIGFLEGL

SEQ ID NO: 124680 - protein, 72 aa, Setaria italica
  misc_feature (11)..(11): Xaa can be any naturally occurring amino acid
  Transcript Sequence Number=SeqID_58706
GDHKKQWIQTXLIIAGYKKINVISHNTARTLTNSCKLCSCRLELAAPQMHIWIDPRLASARGRPPRGHSAKP

SEQ ID NO: 124681 - protein, 84 aa, Setaria italica
  misc_feature (52)..(52): Xaa can be any naturally occurring amino acid
  Transcript Sequence Number=SeqID_58707
  Gene Ontology: Mol. function=protein kinase activity; Cellular component=plasma membrane; Biological process=protein amino acid phosphorylation
  Homolog annotation: Hit_ID=Q6I5Q6; Match level="QueryCoverage=100%, HitCoverage=15%, E-value=9e-28, Identity=73%"; Hit description =Putative serine/threonine protein kinase
FVAPEYAMTGQLTVKSDVYSFGVVLLELITGRKAIDSTRPAAEQNLVSWWSXLFVYWQARPLFNDRRKLPKMADPGLEGRFPTR

SEQ ID NO: 124682 - protein, 73 aa, Setaria italica
  Transcript Sequence Number=SeqID_58708
  Gene Ontology: Mol. function=protein kinase activity; Biological process=protein amino acid phosphorylation
  Homolog annotation: Hit_ID=Q7XVM0; Match level="QueryCoverage=87%, HitCoverage=9%, E-value=8e-31, Identity=93%"; Hit description =OSJNBa0072K14.3 protein
MVNKEFLVEVLMLSLLHHQNLVNLVGYCADGDQRLLVYEYMPLGSLEDHLHDLPPGKEALDWNTRIVKICLAG

SEQ ID NO: 124683 - protein, 64 aa, Setaria italica
  Transcript Sequence Number=SeqID_58709
AAAAVGGGAEAAVAAPPRAERSPTGSNKSKAKGNGSKKELAVLKDANGNVISAQTFTFRQLAAA

SEQ ID NO: 124684 - protein, 46 aa, Setaria italica
  Transcript Sequence Number=SeqID_58710
  Gene Ontology: Cellular component=chloroplast
  Homolog annotation: Hit_ID=B9S1U2; Match level="QueryCoverage=100%, HitCoverage=11%, E-value=4e-16, Identity=89%"; Hit description=Prli -interacting factor l, putative
FGEVDIDSSLVASHSSVAEDIVMVNNGCLCCTVRGDLVKMLLKLVK

SEQ ID NO: 124685 - protein, 71 aa, Setaria italica
  Transcript Sequence Number=SeqID_58711
  Gene Ontology: Mol. function=electron carrier activity; Biological process=metabolic process
  Homolog annotation: Hit_ID=B9SXD9; Match level="QueryCoverage=85%, HitCoverage=16%, E-value=2e-19, Identity=73%"; Hit description =Oxidoreductase, putative
SKLLFLLGYQGLHHGSSYLEHLNFLSAIRAQGASGPSVNLSDGLLSVAIGVAGQLSIEQGRFVTMEEVLGS

SEQ ID NO: 124686 - protein, 60 aa, Setaria italica
  Transcript Sequence Number=SeqID_58712
  Gene Ontology: Mol. function=electron carrier activity; Biological process=metabolic process
  Homolog annotation: Hit_ID=B9SXD9; Match level="QueryCoverage=100%, HitCoverage=16%, E-value=5e-18, Identity=75%"; Hit description =Oxidoreductase, putative
GVVTIMAEDERIKYQGLHHGSSYLEHLNFLSAIRAQGASGPSVNLSDGLLSVAIGVAGQL

SEQ ID NO: 124687 - protein, 57 aa, Setaria italica
  misc_feature (51)..(51): Xaa can be any naturally occurring amino acid
  Transcript Sequence Number=SeqID_58713
  Gene Ontology: Mol. function=electron carrier activity; Biological process=metabolic process
  Homolog annotation: Hit_ID=B9SXD9; Match level="QueryCoverage=96%, HitCoverage=14%, E-value=2e-15, Identity=72%"; Hit description =Oxidoreductase, putative
GSSYLEHLNFLSAIRAQGASGPSVNLSDGLLSVAIGVAGQLSIEQGRFVTXEEVLGS

SEQ ID NO: 124688 - protein, 82 aa, Setaria italica
  misc_feature (61)..(61): Xaa can be any naturally occurring amino acid
  Transcript Sequence Number=SeqID_58714
  Gene Ontology: Mol. function=electron carrier activity; Biological process=metabolic process
  Homolog annotation: Hit_ID=B9SXD9; Match level="QueryCoverage=69%, HitCoverage=15%, E-value=2e-20, Identity=77%"; Hit description =Oxidoreductase, putative
RVTGLADPHQESLRLSLQLANELGLPAPQLIDIVKSGTLRQVRMVAIREHRFPFLVKVNNXNRFNCNSGGTLVEKCCHLFDL

SEQ ID NO: 124689 - protein, 69 aa, Setaria italica
  Transcript Sequence Number=SeqID_58715
  Gene Ontology: Mol. function=electron carrier activity; Biological process=metabolic process
  Homolog annotation: Hit_ID=B9SXD9; Match level="QueryCoverage=78%, HitCoverage=14%, E-value=2e-18, Identity=77%"; Hit description =Oxidoreductase, putative
VVSPLVVYLPLSGTCKKVIEAAKNRPDIIVQVGLEYRYMPPVAKLIDIVKSGTLGQVRMVAIREHRFPS

SEQ ID NO: 124690 - protein, 29 aa, Setaria italica
  Transcript Sequence Number=SeqID_58716
KHFIYAASYLIIFQIPLLTNLLPGLHELY

SEQ ID NO: 124691 - protein, 54 aa, Setaria italica
  Transcript Sequence Number=SeqID_58717
  Gene Ontology: Mol. function=nucleoside-triphosphatase activity; Cellular component=chloroplast; Biological process=protein metabolic process
  Homolog annotation: Hit_ID=Q01L44; Match level="QueryCoverage=92%, HitCoverage=5%, E-value=1e-20, Identity=94%"; Hit description =H0502B11.7 protein
  Pfam annotation: Domain name=AAA_2; Domain location=1-52; Score= -28.3; E_value=0.0018; Accession=PF07724.6; Description=ATPase family associated with various
IGYGETGTLTEAVRRKPFTVVLLDEIEKAHPDIFNILLQIFEDGHLTDSQVMHQ

SEQ ID NO: 124692 - protein, 54 aa, Setaria italica
  Transcript Sequence Number=SeqID_58718
  Gene Ontology: Mol. function=nucleoside-triphosphatase activity; Cellular component=chloroplast; Biological process=protein metabolic process
  Homolog annotation: Hit_ID=Q01L44; Match level="QueryCoverage=94%, HitCoverage=5%, E-value=1e-13, Identity=72%"; Hit description =H0502B11.7 protein
ESSSYVAMKSLVMEELKAFFRPELLNRIDEMVVFRPLEKTQVCFFYILLLRWFY

SEQ ID NO: 124693 - protein, 54 aa, Setaria italica
  Transcript Sequence Number=SeqID_58719
  Gene Ontology: Mol. function=calcium ion binding
  Homolog annotation: Hit_ID=B9SSH4; Match level="QueryCoverage=100%, HitCoverage=39%, E-value=1e-09, Identity=59%"; Hit description =Calcium ion binding protein, putative
MSVEILDGSTVRSFVEDESAFNSSVDGRFAALDADHDGLLSYEEMAGELMSLRV

SEQ ID NO: 124694 - protein, 46 aa, Setaria italica
  Transcript Sequence Number=SeqID_58720
  Gene Ontology: Mol. function=calcium ion binding
MSVEILDGSTVRSFVEDERAFNSSVDGRFAALDADHDGLLSYAEMP

SEQ ID NO: 124695 - protein, 66 aa, Setaria italica
  misc_feature (9)..(9): Xaa can be any naturally occurring amino acid
  Transcript Sequence Number=SeqID_58721
TVLVNRNKXLPYALREDWPLVNQIVRYQSSFIQHDSNISYVRVNNSFSSFFLYFFKTGSRISLHYI

SEQ ID NO: 124696 - protein, 144 aa, Setaria italica
  misc_feature (23)..(23): Xaa can be any naturally occurring amino acid
  misc_feature (64)..(64): Xaa can be any naturally occurring amino acid
  misc_feature (133)..(133): Xaa can be any naturally occurring amino acid
  Transcript Sequence Number=SeqID_58722
  Gene Ontology: Mol. function=binding; Cellular component=nucleus
  Homolog annotation: Hit_ID=Q5N857; Match level="QueryCoverage=100%, HitCoverage=13%, E-value=2e-60, Identity=81%"; Hit description =Cyclin-like
MELDEVVSVIISCYEVNQNPLNXKEVVRLQDDDDLVINGNLAVVPVSGQNSAKVASDTMSVSEXNPAHWARVCLRNMANIAKEATTVRRVLDPLFRLFDNHDYWSPENGIALSVLQEMQKLMDKSGAAISTHXQHGHLLLSFTI

SEQ ID NO: 124697 - protein, 47 aa, Setaria italica
  Transcript Sequence Number=SeqID_58723
KLLAVNHIFYTNILLLRWYHINSRIFYTNILLLRWYHIDDLRVNNME

SEQ ID NO: 124698 - protein, 95 aa, Setaria italica
  Transcript Sequence Number=SeqID_58724
MIICLSHYGCCILYPAYVQEDAAESTLNAMQLLNHICDRVNPSIVWHACRSAAAQPRLLIPVVLVMMYNRWNGILVPDYGFMHLELIPMLVGFLP

SEQ ID NO: 124699 - protein, 56 aa, Setaria italica
  Transcript Sequence Number=SeqID_58725
DVILRESKSRVQQGDPKELAARAREDYLKLKQRLQLLTLGIGGVGVVSAYVSYSPE

SEQ ID NO: 124700 - protein, 48 aa, Setaria italica
  Transcript Sequence Number=SeqID_58726
  Gene Ontology: Mol. function=binding
  Homolog annotation: Hit_ID=Q5N857; Match level="QueryCoverage=93%, HitCoverage=4%, E-value=5e-13, Identity=77%"; Hit description=Cyclin- like
MASAMLIFSAKIADLHQIIPLVKAAAPEKMVDPHLCVMDDCHLTVRRL

SEQ ID NO: 124701 - protein, 61 aa, Setaria italica
  misc_feature (40)..(40): Xaa can be any naturally occurring amino acid
  Transcript Sequence Number=SeqID_58727
  Gene Ontology: Mol. function=binding; Cellular component=nucleus
  Homolog annotation: Hit_ID=Q5N857; Match level="QueryCoverage=95%, HitCoverage=5%, E-value=2e-23, Identity=86%"; Hit description=Cyclin- like
WARVCLRNMANIAKEATTVRRVLDPLFRLFDNHDYWSPEXGIALSVLQEMQKLMDKSGMQS

SEQ ID NO: 124702 - protein, 59 aa, Setaria italica
  Transcript Sequence Number=SeqID_58728
MVLVKSLGSSMKPNSSTMGMRHAWELVKKEMRSREETSQRAAFLQQGLALAWKEELHTD

SEQ ID NO: 124703 - protein, 93 aa, Setaria italica
  misc_feature (29)..(29): Xaa can be any naturally occurring amino acid
  Transcript Sequence Number=SeqID_58729
  Gene Ontology: Mol. function=drug transporter activity; Cellular component=membrane; Biological process=multidrug transport
  Homolog annotation: Hit_ID=B9RXM6; Match level="QueryCoverage=88%, HitCoverage=16%, E-value=2e-18, Identity=58%"; Hit description =Multidrug resistance pump, putative
LLTLILTSEPFSSVRVSNELGAGNPKSAXFSVWVVTAVSTLITIILSIVILCLRNYVSYLFTEGEVVSNAVADLCPLLAITIILNGIQPVLSG

SEQ ID NO: 124704 - protein, 54 aa, Setaria italica
  Transcript Sequence Number=SeqID_58730
IDNSSTVLQRSKLRFFNHKFTTNSQCTQSGKLHHPMFYVGTISDWMIEKNLVAT

SEQ ID NO: 124705 - protein, 116 aa, Setaria italica
  misc_feature (84)..(84): Xaa can be any naturally occurring amino acid
  Transcript Sequence Number=SeqID_58731
  Gene Ontology: Mol. function=aspartic-type endopeptidase activity; Cellular component=membrane; Biological process=RNA-dependent DNA replication
  Homolog annotation: Hit_ID=B9RXM6; Match level="QueryCoverage=84%, HitCoverage=19%, E-value=2e-30, Identity=64%"; Hit description =Multidrug resistance pump, putative
LCLRNYVSYLFTEGEVVSNAVADLCPLLAITIILNGIQPVLSGVAVGCGWQQFVAYVNIGCYYVVGVPLGALLGFVFKLGVKGXWGGMIGGTVMQTAICSTSSVLLLPLCSNQFSR

SEQ ID NO: 124706 - protein, 121 aa, Setaria italica
  misc_feature (101)..(101): Xaa can be any naturally occurring amino acid
  Transcript Sequence Number=SeqID_58732
  Gene Ontology: Cellular component=plasma membrane
  Homolog annotation: Hit_ID=B6TF42; Match level="QueryCoverage=98%, HitCoverage=27%, E-value=4e-54, Identity=85%"; Hit description=CBS domain containing protein
NGVFEDMPLYDILNEFQKGHSHMAVVIRKNIPNEPAEQPANDGGTFEVSIAIDDKNNEKVVKNLPPPLRRWKSYPNTQNTSNRGSKPKKWSKDQSDVLQIXIVSSPLPTLSEDEEAVGIIT

SEQ ID NO: 124707 - protein, 75 aa, Setaria italica
  misc_feature (33)..(33): Xaa can be any naturally occurring amino acid
  Transcript Sequence Number=SeqID_58733
  Homolog annotation: Hit_ID=B6TF42; Match level="QueryCoverage=86%, HitCoverage=15%, E-value=1e-26, Identity=87%"; Hit description=CBS domain containing protein
MNASVFEDMPLYDILNEFQKGHSHMAVVIRKTXPNEPAEQPANDGGTFEVSIAIDDKNNEKVVKNLPPPSTSQLR

SEQ ID NO: 124708 - protein, 30 aa, Setaria italica
  Transcript Sequence Number=SeqID_58734
IGLILVKNLLSVNPDDEVPIKSVTVRKIPR

SEQ ID NO: 124709 - protein, 124 aa, Setaria italica
  misc_feature (82)..(82): Xaa can be any naturally occurring amino acid
  Transcript Sequence Number=SeqID_58735
  Homolog annotation: Hit_ID=Q84NP6; Match level="QueryCoverage=93%, HitCoverage=23%, E-value=2e-44, Identity=75%"; Hit description=Leaf senescence related protein-like
  Pfam annotation: Domain name=DUF231; Domain location=1-124; Score =89.6; E_value=1.1e-23; Accession=PF03005.7; Description=Arabidopsis proteins of unknown function
RRKVGTDPVAYKEVLKTWAKWVDRNIDPNKTTVFFMGMSPNHITPEAWGNQGGIKCAMETLPITNRSTSLDVGTDWRLYAGXQEVLPTLRRVPVHFVDITALSELRKDAHTSVHTLRQGKLLTP

SEQ ID NO: 124710 - protein, 47 aa, Setaria italica
  Transcript Sequence Number=SeqID_58736
FSAVSCWYGFMFGRESARRELGGIIDDLRKSNTTSIASSEPDANSKP

SEQ ID NO: 124711 - protein, 58 aa, Setaria italica
  Transcript Sequence Number=SeqID_58737
KLTLLQTVAAAGVFSAVSCWYGFDVWKESARRELGGIIDDLRKSTTTASSEPDANSKP

SEQ ID NO: 124712 - protein, 68 aa, Setaria italica
  Transcript Sequence Number=SeqID_58738
LLLSSSLRFGRGRSSGGPSDRPVCLAVAVRGFADWGCLLCRCDPWPFRRHGLAASPVPAGNVTESGAP

SEQ ID NO: 124713 - protein, 102 aa, Setaria italica
  Transcript Sequence Number=SeqID_58739
  Gene Ontology: Mol. function=catalytic activity; Biological process =metabolic process
  Homolog annotation: Hit_ID=B9RK10; Match level="QueryCoverage=93%, HitCoverage=13%, E-value=2e-37, Identity=73%"; Hit description=1 -deoxyxylulose-5-phosphate synthase, putative
ILETGLSRTYNDCFVEALTAEAENDKCIVVVHGGMGMDRSLRLFQSSFPDRFFDLGIAEQHAVTFSAGLACGGLKPFCIIPSTFLQRAYDQIVEDVDMQKIT

SEQ ID NO: 124714 - protein, 120 aa, Setaria italica
  misc_feature (60)..(60): Xaa can be any naturally occurring amino acid
  Transcript Sequence Number=SeqID_58740
  Gene Ontology: Mol. function=catalytic activity; Biological process =metabolic process
  Homolog annotation: Hit_ID=B9RK10; Match level="QueryCoverage=96%, HitCoverage=16%, E-value=8e-46, Identity=72%"; Hit description=1 -deoxyxylulose-5-phosphate synthase, putative
  Pfam annotation: Domain name=Transket_pyr; Domain location=6-118; Score=-24.4; E_value=0.0052; Accession=PF02779.16; Description =Transketolase, pyrimidine binding dom
RNNNNDCFVEALTAEAENDKCIVVVHGGMGMDRSLRLFQSSFPDRFFDLGIAEQHAVTFXAGLACGGLKPFCIIPSTFLQRAYDQIVEDVDMQKIPVRFAITNAGLVGSEGPTNSGPFDI

SEQ ID NO: 124715 - protein, 98 aa, Setaria italica
  misc_feature (89)..(89): Xaa can be any naturally occurring amino acid
  Transcript Sequence Number=SeqID_58741
  Gene Ontology: Mol. function=catalytic activity; Biological process =metabolic process
  Homolog annotation: Hit_ID=B9RK10; Match level="QueryCoverage=90%, HitCoverage=12%, E-value=2e-31, Identity=71%"; Hit description=1 -deoxyxylulose-5-phosphate synthase, putative
MNYHNALVILCFCGGMGMDRSLRLFQSSFPDRFFDLGIAEQHAVTFSAGLACGGLKPFCIIPSTFLQRAYDQIVEDVDMQKIPVRFAIXTNAGLVGSG

SEQ ID NO: 124716 - protein, 52 aa, Setaria italica
  Transcript Sequence Number=SeqID_58742
HFFKRSVVLVFKKKCSFLPGLCALFQIGKGEILVEGKEIAFLGYGEVVQRCL

SEQ ID NO: 124717 - protein, 77 aa, Setaria italica
  misc_feature (61)..(61): Xaa can be any naturally occurring amino acid
  misc_feature (77)..(77): Xaa can be any naturally occurring amino acid
  Transcript Sequence Number=SeqID_58743
  Gene Ontology: Mol. function=catalytic activity; Biological process =metabolic process
  Homolog annotation: Hit_ID=Q9LFL9; Match level="QueryCoverage=96%, HitCoverage=10%, E-value=4e-17, Identity=59%"; Hit description=1-D -deoxyxylulose 5-phosphate synthase-like protein
PSNSSHDLLKFLETGLSRTYNDCFVEALTAEAENDKCIVVVHGGMGMDRSLRLFQSSFPDXFFDLGIAEQHAVTFSX

SEQ ID NO: 124718 - protein, 71 aa, Setaria italica
  Transcript Sequence Number=SeqID_58744
VEDRPICIRYPRGAIVGTSGTLTYGNPLQWRPIVLPDRYIEHASLAEQLDLAGLTAHHIAATALTLLGRHR

SEQ ID NO: 124719 - protein, 77 aa, Setaria italica
  misc_feature (33)..(33): Xaa can be any naturally occurring amino acid
  Transcript Sequence Number=SeqID_58745
TEGGVEGEGEDDGDGSSREEEEEDSMISDAASXAPADALLPIRYRGLKKLKKAFKALDHDDSLEDTASSPVNSPKVS

SEQ ID NO: 124720 - protein, 129 aa, Setaria italica
  Transcript Sequence Number=SeqID_58746
  Gene Ontology: Mol. function=4 iron, 4 sulfur cluster binding; Cellular component=integral to membrane; Biological process=protein -chromophore linkage
  Homolog annotation: Hit_ID=Q15B79; Match level="QueryCoverage=82%, HitCoverage=24%, E-value=3e-57, Identity=100%"; Hit description =Photosystem I P700 chlorophyll A apoprotein
ITYLVLGLLFLFGLFGKLLFTLWQGNVSQFNESSTYLMGWLRDYLWLNSSQLINGYNPFGMNSLSVWAWMFLFGHLVWATGFMFLISWRGYWQELIETLAWAHERTPLANLIRWRDKPVALSIVQARLV

SEQ ID NO: 124721 - protein, 77 aa, Setaria italica
  misc_feature (67)..(67): Xaa can be any naturally occurring amino acid
  misc_feature (72)..(72): Xaa can be any naturally occurring amino acid
  Transcript Sequence Number=SeqID_58747
  Gene Ontology: Mol. function=4 iron, 4 sulfur cluster binding; Cellular component=integral to membrane; Biological process=protein -chromophore linkage
  Homolog annotation: Hit_ID=B9TI65; Match level="QueryCoverage=93%, HitCoverage=22%, E-value=8e-36, Identity=95%"; Hit description =Photosystem I P700 chlorophyll A apoprotein (Fragment)
MLRPALILVKGALDARGSKLMPDKKDFGYSFPCDGPGRGGTCDISAWDAFYLAVFWMLNTIGWVTFXWHWKXITLWQ

SEQ ID NO: 124722 - protein, 49 aa, Setaria italica
  Transcript Sequence Number=SeqID_58748
  Gene Ontology: Mol. function=phosphoinositide binding; Biological process=cell communication
  Homolog annotation: Hit_ID=B9RRH9; Match level="QueryCoverage=87%, HitCoverage=7%, E-value=6e-09, Identity=65%"; Hit description =Sorting nexin-4, putative
IQDKKAAKSDALREYESIKENNKIEIKRFDKERRRDFIEMLKGFVVNQV

SEQ ID NO: 124723 - protein, 96 aa, Setaria italica
  misc_feature (12)..(12): Xaa can be any naturally occurring amino acid
  Transcript Sequence Number=SeqID_58749
  Homolog annotation: Hit_ID=Q01JK6; Match level="QueryCoverage=62%, HitCoverage=6%, E-value=9e-11, Identity=58%"; Hit description =H0112G12.14 protein
MPMQQQQPPPPXGTPWPSLHHAAGQPPPPSYPPPPPGQAWTNHSWAQNHGYPGHGNEEDWATKAKAWVAAKSVMGNHQIQQHAISTSRTESHHNGY

SEQ ID NO: 124724 - protein, 81 aa, Setaria italica
  Transcript Sequence Number=SeqID_58750
  Homolog annotation: Hit_ID=Q01JK6; Match level="QueryCoverage=48%, HitCoverage=4%, E-value=4e-10, Identity=74%"; Hit description =H0112G12.14 protein
QPAGLPAEVTEPLHPPVPQSSNDHMPFPMTGQQRETNHLLGTVCYCPCSICITCGCVSFRMELKIILQIEVLWCLQHSTFG

SEQ ID NO: 124725 - protein, 74 aa, Setaria italica
  Transcript Sequence Number=SeqID_58751
  Gene Ontology: Mol. function=isomerase activity; Cellular component =nucleus
  Homolog annotation: Hit_ID=B6TBM2; Match level="QueryCoverage=100%, HitCoverage=67%, E-value=2e-35, Identity=95%"; Hit description =Protein yippee-like OJ1003C07.11
  Pfam annotation: Domain name=Yippee; Domain location=1-74; Score =93.2; E_value=9.3e-25; Accession=PF03226.6; Description=Yippee putative zinc-binding protein
MGLLFVERLEGEGVFKCRRCRVDAASKDAIISRDFYGRTGRAYLFDHVVNICLGPNEDRYLVTGLHTVNDIYCS

SEQ ID NO: 124726 - protein, 70 aa, Setaria italica
  Transcript Sequence Number=SeqID_58752
MPSRHLQPALLRIPPIVIAGAAMSWTISKLSSQGQAKYNEAGNVFEQTIGAIRTVDPCLNISFISNCLDS

SEQ ID NO: 124727 - protein, 59 aa, Setaria italica
  Transcript Sequence Number=SeqID_58753
  Gene Ontology: Mol. function=small conjugating protein ligase activity; Cellular component=endoplasmic reticulum; Biological process=ubiquitin-dependent protein catabolic process
  Homolog annotation: Hit_ID=A7PNK7; Match level="QueryCoverage=67%, HitCoverage=23%, E-value=3e-16, Identity=97%"; Hit description =Ubiquitin carrier protein
YSCVYESCQSSDNAYYFELSVYPDGRVCISILHPPGEDPNGYELASERWTPVHTVESIV

SEQ ID NO: 124728 - protein, 76 aa, Setaria italica
  Transcript Sequence Number=SeqID_58754
SNIITTNCLMMSIIIVGTWMQLILKPLLVLYWLNSTRALLNSEERMSRPSKNLPINLLQDGTNDFQSRPLDSFVVI

SEQ ID NO: 124729 - protein, 95 aa, Setaria italica
  Transcript Sequence Number=SeqID_58755
  Gene Ontology: Mol. function=aspartic-type endopeptidase activity; Cellular component=chromatin
  Homolog annotation: Hit_ID=Q7XP97; Match level="QueryCoverage=47%, HitCoverage=1%, E-value=4e-11, Identity=71%"; Hit description =OSJNBa0060B20.14 protein
FGGITAIYLEKQSSASDIALNIIRTAVKRADVLPSLELEWRQGAVPKVGKVICIYRFDIRLTCNNPTVLIDASQHTLSLSNSYSAHELRSPWIDV

SEQ ID NO: 124730 - protein, 95 aa, Setaria italica
  Transcript Sequence Number=SeqID_58756
  Gene Ontology: Mol. function=protein phosphatase type 2A regulator activity; Cellular component=protein phosphatase type 2A complex; Biological process=signal transduction
  Homolog annotation: Hit_ID=B6SWX8; Match level="QueryCoverage=95%, HitCoverage=17%, E-value=3e-37, Identity=80%"; Hit description =Transposon protein
PKSVAIYHQQLSYCIVQFVEKDYKLADTVIRGLLKYWPVTNCQKEVLFLGELEEVLEATQPAEFQRCMVPLFKQIGRCLNSSHFQVAERTFVVRP

SEQ ID NO: 124731 - protein, 49 aa, Setaria italica
  misc_feature (19)..(19): Xaa can be any naturally occurring amino acid
  Transcript Sequence Number=SeqID_58757
  Gene Ontology: Mol. function=protein phosphatase type 2A regulator activity; Cellular component=protein phosphatase type 2A complex
  Homolog annotation: Hit_ID=B6SWX8; Match level="QueryCoverage=95%, HitCoverage=8%, E-value=6e-10, Identity=68%"; Hit description =Transposon protein
NCQKEVLFLGELEEVLEAXTQPAEFQRCMVPLFKQIGRCLNSSHFQVLL

SEQ ID NO: 124732 - protein, 45 aa, Setaria italica
  Transcript Sequence Number=SeqID_58758
KEVLFLGELEEVLEATQPAEFQRCMVPLFKQIGRCLNSSHFKLTM

SEQ ID NO: 124733 - protein, 141 aa, Setaria italica
  misc_feature (49)..(49): Xaa can be any naturally occurring amino acid
  Transcript Sequence Number=SeqID_58759
  Gene Ontology: Cellular component=integral to membrane
  Homolog annotation: Hit_ID=B4FU25; Match level="QueryCoverage=97%, HitCoverage=41%, E-value=1e-53, Identity=80%"; Hit description =Membrane protein
  Pfam annotation: Domain name=Rhomboid; Domain location=2-140; Score =165.6; E_value=1.5e-46; Accession=PF01694.14; Description=Rhomboid family
MALISCIWLHAGLVHLVVNMLSLVFIGIRLEQQFGFVRIGVIYLISGFXGGSVLSALFLRSNYISVGASGALFGLLGSMLSELIMNWTIYSNKAAAIVTLLFIIAINLAIGILPHADNFAHIGGFASGFLLGFVLLARPQI

SEQ ID NO: 124734 - protein, 40 aa, Setaria italica
  Transcript Sequence Number=SeqID_58760
MDAFVLTGSNVWPMILVIILAILVYYCMQHKAELLAILPR

SEQ ID NO: 124735 - protein, 60 aa, Setaria italica
  Transcript Sequence Number=SeqID_58761
RGCAALALAARAPGAAPPPESGPAASRVPGLGHLQFCARVATVRMAIIMLVCCVCWQAGC

SEQ ID NO: 124736 - protein, 57 aa, Setaria italica
  Transcript Sequence Number=SeqID_58762
LNVLCAVLLRLLTPPGTPRVPALEVAEKTPSPNILPKRTTTRSSSTTRASRVCSYFG

SEQ ID NO: 124737 - protein, 43 aa, Setaria italica
  Transcript Sequence Number=SeqID_58763
MACCFLRAAAAPRLLLYRTAASRQLPSPLTVLRKGFSGKSVLP

SEQ ID NO: 124738 - protein, 45 aa, Setaria italica
  Transcript Sequence Number=SeqID_58764
  Homolog annotation: Hit_ID=B4FJZ1; Match level="QueryCoverage=100%, HitCoverage=10%, E-value=2e-11, Identity=73%"; Hit description=DNA polymerase I
MACCFLRAAAAPRLHLYRTAASQQLPSPLTVLRKGVSGQSVLPLT

SEQ ID NO: 124739 - protein, 70 aa, Setaria italica
  Transcript Sequence Number=SeqID_58765
  Gene Ontology: Mol. function=hydroperoxide dehydratase activity; Cellular component=chloroplast; Biological process=fatty acid biosynthetic process
  Homolog annotation: Hit_ID=Q7Y0C8; Match level="QueryCoverage=78%, HitCoverage=10%, E-value=5e-13, Identity=83%"; Hit description =Allene oxide synthase 1, chloroplastic
MFQISPLLNLGLPKLVEDSLLHSFRLPPALVKKDYDRLADFFRDAARGVVDEGRRRPTEQITPERGKGKE

SEQ ID NO: 124740 - protein, 65 aa, Setaria italica
  Transcript Sequence Number=SeqID_58766
  Gene Ontology: Mol. function=binding
LWSLNFLLFVQVIDKVAPTLIDLTNISTLGDYKRLGDTIVTVLQECMQQSGNSRSTIRTQTKSEI

SEQ ID NO: 124741 - protein, 55 aa, Setaria italica
  Transcript Sequence Number=SeqID_58767
SGTSRSVLRCRSGQAWAFPDVMFWRLHQQIGLSSRSVAFDWARRLLMLYITMVCS

SEQ ID NO: 124742 - protein, 39 aa, Setaria italica
  Transcript Sequence Number=SeqID_58768
YVTWAVPFSRLLFCFLVDVHGSFSKYSLRNQQCNYSCKT

SEQ ID NO: 124743 - protein, 42 aa, Setaria italica
  Transcript Sequence Number=SeqID_58769
ALQLVKGPVGVVSVCGRARQGKSFILNQVRSWSVGSCLPGAY

SEQ ID NO: 124744 - protein, 56 aa, Setaria italica
  Transcript Sequence Number=SeqID_58770
MCIYLQYSHTIFYPQASGATPPERPAAGSSLPNVDVSHAGPVNPIGGNVIPVQKQA

SEQ ID NO: 124745 - protein, 44 aa, Setaria italica
  Transcript Sequence Number=SeqID_58771
CVFIGIQLQYCLLKDLDLIFSHISPKNSKWLQENLSDMDTKVKS

SEQ ID NO: 124746 - protein, 85 aa, Setaria italica
  misc_feature (52)..(52): Xaa can be any naturally occurring amino acid
  misc_feature (63)..(63): Xaa can be any naturally occurring amino acid
  misc_feature (67)..(67): Xaa can be any naturally occurring amino acid
  Transcript Sequence Number=SeqID_58772
  Gene Ontology: Mol. function=kinase activity
  Homolog annotation: Hit_ID=B6UIG4; Match level="QueryCoverage=100%, HitCoverage=35%, E-value=5e-29, Identity=55%"; Hit description =Choline/ethanolamine kinase
RGRCSEEESKQFQLNKDYEYASFNPVAFDISNHFCEMAADYHTATPHVLDFXTKYPDTEEQRXFVRXYLSSSGEKPSDEEVENLL

SEQ ID NO: 124747 - protein, 54 aa, Setaria italica
  Transcript Sequence Number=SeqID_58773
VSTATESQTTDDAVFNTPEQPKTQHISSAVEPLTFYRIYSSIARHVNKKPEGSN

SEQ ID NO: 124748 - protein, 52 aa, Setaria italica
  Transcript Sequence Number=SeqID_58774
LNWTKLSENGTISVWRKPTCHLHCDQEAKFLGSPPLCREDPDSACFRNISGQ

SEQ ID NO: 124749 - protein, 120 aa, Setaria italica
  misc_feature (100)..(100): Xaa can be any naturally occurring amino acid
  misc_feature (104)..(104): Xaa can be any naturally occurring amino acid
  Transcript Sequence Number=SeqID_58775
LRRIGQQDLPHHGMPANQFTDKSYHSFEGAKYHNEFSRSFPAPLEHNAYSPAGLVNGLATSNSMFTPENSQPGGTINDIVPDLTGDFIYKFQYLLFAQGXQQGXPVHHYYYPMPPLPPPQ

SEQ ID NO: 124750 - protein, 98 aa, Setaria italica
  Transcript Sequence Number=SeqID_58776
  Gene Ontology: Mol. function=transferase activity
  Homolog annotation: Hit_ID=Q2RBE2; Match level="QueryCoverage=93%, HitCoverage=12%, E-value=8e-18, Identity=54%"; Hit description =Nucleotidyltransferase family protein, putative, expressed
NDIVPDLTGDLLTNFNNLLFAQGCQQGNPVHHYYYPMPPTPLQYQNMRPSNGLGRKNSYGYTGMNGAIPSPPYPPGYVVWRPVYQTDDHIPMRGHGTG

SEQ ID NO: 124751 - protein, 96 aa, Setaria italica
  misc_feature (71)..(71): Xaa can be any naturally occurring amino acid
  misc_feature (90)..(90): Xaa can be any naturally occurring amino acid
  Transcript Sequence Number=SeqID_58777
  Gene Ontology: Mol. function=structural molecule activity; Cellular component=chloroplast
  Homolog annotation: Hit_ID=B6TD12; Match level="QueryCoverage=94%, HitCoverage=26%, E-value=2e-36, Identity=77%"; Hit description =Plastid-lipid associated protein 3
  Pfam annotation: Domain name=PAP_fibrillin; Domain location=13-96; Score=-0.5; E_value=1.6e-06; Accession=PF04755.4; Description=PAP _fibrillin
AAEEVDEQAERREDLKRCLVDTVYGSELGFRASTEVRGEVVELVTQLEAVNPTPAPVEAPDLLDGNWILIXGATPFVKVKQISQEIDSKXMTIVNA

SEQ ID NO: 124752 - protein, 79 aa, Setaria italica
  Transcript Sequence Number=SeqID_58778
PGQIPQDSSNWLSNLIQQRYQFYKHHVYGDMMSLALDLCMDHISSCRTTAILLGNKPWSWRLLLEMLELIKIMINQMEC

SEQ ID NO: 124753 - protein, 49 aa, Setaria italica
  Transcript Sequence Number=SeqID_58779
RLMITITRTSNANGKDWFFIILISSNISSNSLQLHGLLPRRMAVVRSGT

SEQ ID NO: 124754 - protein, 54 aa, Setaria italica
  Transcript Sequence Number=SeqID_58780
  Gene Ontology: Mol. function=4 iron, 4 sulfur cluster binding; Biological process=base-excision repair
  Homolog annotation: Hit_ID=B8YIE8; Match level="QueryCoverage=70%, HitCoverage=2%, E-value=2e-13, Identity=84%"; Hit description=DNA glycosylase/lyase 701
RYLLFNCNLCACRYELPDSHPLLQQLDLDQREPDDPTPYLLAIWTPDEINEISK

SEQ ID NO: 124755 - protein, 100 aa, Setaria italica
  misc_feature (91)..(91): Xaa can be any naturally occurring amino acid
  misc_feature (96)..(96): Xaa can be any naturally occurring amino acid
  Transcript Sequence Number=SeqID_58781
  Gene Ontology: Mol. function=imidazoleglycerol-phosphate dehydratase activity; Cellular component=cytoplasm; Biological process=amino acid biosynthetic process
  Homolog annotation: Hit_ID=P34048; Match level="QueryCoverage=98%, HitCoverage=50%, E-value=8e-49, Identity=95%"; Hit description =Imidazoleglycerol-phosphate dehydratase (Fragment)
  Pfam annotation: Domain name=IGPD; Domain location=2-100; Score =142.9; E_value=1e-39; Accession=PF00475.10; Description =Imidazoleglycerol-phosphate dehydratase
DTGIPFLDHMLDQLASHGLFDVYVKATGDTHIDDHHSNEDIALAIGTALLQSLGDRKGINRFGHFTAPLDEAAVEVILDLSGRPHLSCGLXIPTQXVGTI

SEQ ID NO: 124756 - protein, 79 aa, Setaria italica
  misc_feature (31)..(31): Xaa can be any naturally occurring amino acid
  Transcript Sequence Number=SeqID_58782
TIYIPDVIFLASLNGSSKGVLQDHSIASSKXWVEETNGAGSYIQLGYATYIWESALPSTTSMESLLMGLSKIECTTTEY

SEQ ID NO: 124757 - protein, 86 aa, Setaria italica
  misc_feature (77)..(77): Xaa can be any naturally occurring amino acid
  Transcript Sequence Number=SeqID_58783
  Gene Ontology: Mol. function=structural constituent of ribosome; Cellular component=ribonucleoprotein complex; Biological process =translation
  Homolog annotation: Hit_ID=Q8LJU5; Match level="QueryCoverage=97%, HitCoverage=43%, E-value=1e-37, Identity=88%"; Hit description=40S ribosomal protein S7
  Pfam annotation: Domain name=Ribosomal_S7e; Domain location=4-86; Score=-41.3; E_value=0.0041; Accession=PF01251.10; Description =Ribosomal protein S7e
VFQKDKGVEPTEFEDTVAQAFFDLENGNQELKSDLKDLYINGAVQMDVPGNRKAVIIHVPYMLQKSYKKIHVRLIRXLEKKFSGRM

SEQ ID NO: 124758 - protein, 80 aa, Setaria italica
  misc_feature (42)..(42): Xaa can be any naturally occurring amino acid
  Transcript Sequence Number=SeqID_58784
MRPERGGGGGGVAAELMAGGGGGGARPGLWRTPTPYLFLGLXAFMMGLIAVALLVLICTRRKSSRRRGSGEGLGNQAASS

SEQ ID NO: 124759 - protein, 63 aa, Setaria italica
  Transcript Sequence Number=SeqID_58785
PAFHFSPTNEEIMRSAIPPLLLLVITNISLFHDTRRAAARNSIDFTELRRAGRSSGNLVMSSM

SEQ ID NO: 124760 - protein, 50 aa, Setaria italica
  Transcript Sequence Number=SeqID_58786
  Homolog annotation: Hit_ID=B6TE55; Match level="QueryCoverage=100%, HitCoverage=11%, E-value=1e-14, Identity=80%"; Hit description =Receptor protein kinase TMK1
GLELTQRLNIAINVAHAITYLHEYKEHPIIHGGIRSSVVLLTDATGRTKG

SEQ ID NO: 124761 - protein, 58 aa, Setaria italica
  Transcript Sequence Number=SeqID_58787
  Homolog annotation: Hit_ID=Q6H899; Match level="QueryCoverage=75%, HitCoverage=5%, E-value=2e-12, Identity=79%"; Hit description =Nuclear protein ZAP-like
DYHHGITTVYPATDWEEAPPLYLQLDIRSLFHDDNLHGHSIQEVDMDTEDIDGTSCFN

SEQ ID NO: 124762 - protein, 38 aa, Setaria italica
  Transcript Sequence Number=SeqID_58788
VVFAFIVVFPIFWRPHIMASKFHRLALSLSHFIFPIAP

SEQ ID NO: 124763 - protein, 143 aa, Setaria italica
  Transcript Sequence Number=SeqID_58789
  Gene Ontology: Mol. function=protein serine/threonine kinase activity; Cellular component=plasma membrane; Biological process =protein amino acid phosphorylation
  Homolog annotation: Hit_ID=Q7XUH4; Match level="QueryCoverage=91%, HitCoverage=11%, E-value=1e-71, Identity=98%"; Hit description =OSJNBa0020J04.8 protein
  Pfam annotation: Domain name=Pkinase; Domain location=10-143; Score= -103.6; E_value=0.025; Accession=PF00069.17; Description=Protein kinase domain
  Pfam annotation: Domain name=Pkinase_Tyr; Domain location=2-143; Score=-148.8; E_value=0.00078; Accession=PF07714.9; Description =Protein tyrosine kinase
  Pfam module annotation: Pfam domain module=Pkinase::Pkinase_Tyr; Domain location=10-143::2-143
GLCLLVVLVYRCLAILRLPSTSADGAVIIEEGSFRKEAESLGKVKHRNLTVLRGYYAGPPPDVRLLVYDYMPNGNLATLLQEASHQDGHILNWPMRHLIALGVSRGLAFLHQSGVVHGDVKPQNILFDADFEPHLSDFGLEPM

SEQ ID NO: 124764 - protein, 90 aa, Setaria italica
  Transcript Sequence Number=SeqID_58790
AQTRTFKCYITTVLSAGSGNQVLLDAPNHLGFLMFEVPRKSEKLSSSGILFIAFFGSCCVKACLYLYCWTGIHASAHVNIHWSVYGLQPC

SEQ ID NO: 124765 - protein, 70 aa, Setaria italica
  misc_feature (57)..(57): Xaa can be any naturally occurring amino acid
  Transcript Sequence Number=SeqID_58791
  Subcellular localization annotation: CTP_CleavageSite=18; ConfidenceScore=5.14e-01
KKRNSKKPQSNTCRRRIPSVAEPNRVGSSPFSARSCRRHSQALHISLMCQKVKKKKXTIVKHDKLLDQFV

SEQ ID NO: 124766 - protein, 81 aa, Setaria italica
  Transcript Sequence Number=SeqID_58792
  Gene Ontology: Mol. function=transferase activity, transferring glycosyl groups; Cellular component=integral to membrane; Biological process=cell wall organization and biogenesis
  Homolog annotation: Hit_ID=Q6L538; Match level="QueryCoverage=50%, HitCoverage=5%, E-value=1e-17, Identity=100%"; Hit description =Probable xyloglucan glycosyltransferase 7
MGLLDSLPNVAAYFLLQIGFWKKFNLIFLFFLLRKLILPFYSFTLFCVILPMTMFVPEAELPAWVVCYIPATMSILNILPA

SEQ ID NO: 124767 - protein, 71 aa, Setaria italica
  Transcript Sequence Number=SeqID_58793
SSSVTESSVTEQGNTGSSSGFPKEESFTSSPPDAEEFQFDESFWSETLSMPLESFDVPSDALPFTKSRFDA

SEQ ID NO: 124768 - protein, 62 aa, Setaria italica
  Transcript Sequence Number=SeqID_58794
  Subcellular localization annotation: CTP_CleavageSite=37; ConfidenceScore=5.51e-01
VSIRLTSLGPYSSKSSLLFYSLSSLPCWSFLLSILVTVSTLSSFVYFMDLHSLTQSQMGITS

SEQ ID NO: 124769 - protein, 56 aa, Setaria italica
  Transcript Sequence Number=SeqID_58795
  Gene Ontology: Mol. function=transferase activity, transferring glycosyl groups; Cellular component=integral to membrane; Biological process=cell wall organization and biogenesis
  Homolog annotation: Hit_ID=Q6L538; Match level="QueryCoverage=67%, HitCoverage=5%, E-value=5e-15, Identity=100%"; Hit description =Probable xyloglucan glycosyltransferase 7
KALEDSGGWMERTTVEDMDIAVRAHLKGWKFVFLNDVEVLAQFSLLLMQHIPCVKA

SEQ ID NO: 124770 - protein, 56 aa, Setaria italica
  Transcript Sequence Number=SeqID_58796
  Gene Ontology: Mol. function=transferase activity, transferring glycosyl groups; Cellular component=integral to membrane; Biological process=cell wall organization and biogenesis
  Homolog annotation: Hit_ID=Q6L538; Match level="QueryCoverage=87%, HitCoverage=7%, E-value=2e-22, Identity=100%"; Hit description =Probable xyloglucan glycosyltransferase 7
QFKLTSFLFFLLRKLILPFYSFTLFCVILPMTMFVPEAELPAWVVCYIPATMSILQ

SEQ ID NO: 124771 - protein, 60 aa, Setaria italica
  Transcript Sequence Number=SeqID_58797
MLCRQIAVVPLLVILPVLESQNIVEQSVWPILLAESLKALGGLGLLSLGGKYLMRRVFEF

SEQ ID NO: 124772 - protein, 65 aa, Setaria italica
  Transcript Sequence Number=SeqID_58798
  Gene Ontology: Mol. function=solute:hydrogen antiporter activity; Cellular component=integral to membrane
  Homolog annotation: Hit_ID=B9HN64; Match level="QueryCoverage=70%, HitCoverage=9%, E-value=1e-16, Identity=91%"; Hit description =Potassium efflux antiporter (Fragment)
LLSTLAFTAFELPPNGAIGTKILQFLFNSRPDLVNIRSIDEAIVIGAALSLSSSAFVLQLLAEER

SEQ ID NO: 124773 - protein, 83 aa, Setaria italica
  misc_feature (62)..(62): Xaa can be any naturally occurring amino acid
  Transcript Sequence Number=SeqID_58799
  Subcellular localization annotation: CTP_CleavageSite=33; ConfidenceScore=5.08e-01
PSQRQKDADGARLATPEARPGPLGMRPQVTSSRASEPPASSGGLGAGGRASAERPQKPDLGXLPMVRLRYDSDWADDERDTGL

SEQ ID NO: 124774 - protein, 76 aa, Setaria italica
  misc_feature (57)..(57): Xaa can be any naturally occurring amino acid
  Transcript Sequence Number=SeqID_58800
  Gene Ontology: Mol. function=DNA-directed RNA polymerase activity; Cellular component=chloroplast; Biological process=transcription, DNA-dependent
  Homolog annotation: Hit_ID=P0C509; Match level="QueryCoverage=61%, HitCoverage=3%, E-value=2e-16, Identity=95%"; Hit description=DNA -directed RNA polymerase subunit beta''
MSIMDLYPLGSINLLYLKYQKEVDQFFFILQELHILPRSSSLKVLDNSIIGVDTQLXTKNTRSRLGGLVRVKKKKK

SEQ ID NO: 124775 - protein, 119 aa, Setaria italica
  Transcript Sequence Number=SeqID_58801
NQHQHLSSSFCKCWPAPAITYKRKRTNADAGSWDNMAMAPSNNAWDAGEGFGRSITKSDAGSSWGTEKQTNGEQAEINTWADKGAGMESSAGDDNWEMKSSAPEKSKKIWIMTHGATCQ

SEQ ID NO: 124776 - protein, 108 aa, Setaria italica
  Transcript Sequence Number=SeqID_58802
  Homolog annotation: Hit_ID=B8AHU1; Match level="QueryCoverage=95%, HitCoverage=5%, E-value=3e-31, Identity=66%"; Hit description=DNA -directed RNA polymerase
NVRTNLVEENAVDDVCLSPEPDGTHGKPTFEDNVEEQGIQNGSSWENDTTMNSSWEQNASAGNDSGDWGGWSNGAAAATKPLDQDNSCWDAHATVENNSTDWGGWGTE

SEQ ID NO: 124777 - protein, 87 aa, Setaria italica
  Transcript Sequence Number=SeqID_58803
  Gene Ontology: Mol. function=DNA-directed RNA polymerase activity; Biological process=transcription
  Homolog annotation: Hit_ID=B8AHU1; Match level="QueryCoverage=100%, HitCoverage=4%, E-value=7e-36, Identity=80%"; Hit description=DNA -directed RNA polymerase
QEILQTKVGYKNDMKDRKVILFLNDCSCPKKFCKERAALTVQSCLRRVTLADCATDISIEHQKQINLDETSEAAPTLVGHIHLDKAH

SEQ ID NO: 124778 - protein, 105 aa, Setaria italica
  Transcript Sequence Number=SeqID_58804
VNYLLLRLRCFISSGKRKKKNTRVVCFIPAWGLGLFYVQVRQLYPSNCYIYIQNYSSRGVRTFVQSSDVHKTGRAHRELQNLGIRKGNHLTDGDQLARFLTPHLS

SEQ ID NO: 124779 - protein, 72 aa, Setaria italica
  misc_feature (34)..(34): Xaa can be any naturally occurring amino acid
  Transcript Sequence Number=SeqID_58805
  Gene Ontology: Mol. function=protein binding; Cellular component =plasma membrane
  Homolog annotation: Hit_ID=B9T2K7; Match level="QueryCoverage=95%, HitCoverage=11%, E-value=3e-16, Identity=59%"; Hit description =Leucine-rich repeat-containing protein, putative
RLRVLRAEENPLQVPPRDVALKGAQAAVQYMTEXCAKRATRSQPTKTKKTWAQFCFFSRPNKRKHDRIDTAS

SEQ ID NO: 124780 - protein, 90 aa, Setaria italica
  Transcript Sequence Number=SeqID_58806
  Subcellular localization annotation: CTP_CleavageSite=54; ConfidenceScore=5.26e-01
TLHHDLFGDWRHKLLFSSLTSAEVQMGASSSIATIVSMGQQDVMPRAFPSTMLQLSSVKPKWSGFINLLTLLSARPTQLRITPGRSLLQL

SEQ ID NO: 124781 - protein, 146 aa, Setaria italica
  Transcript Sequence Number=SeqID_58807
  Gene Ontology: Mol. function=protein serine/threonine phosphatase activity; Cellular component=protein serine/threonine phosphatase complex; Biological process=protein amino acid dephosphorylation
  Homolog annotation: Hit_ID=B6SY45; Match level="QueryCoverage=100%, HitCoverage=40%, E-value=1e-69, Identity=85%"; Hit description =Ca2+/calmodulin-dependent protein kinase phosphatase
  Pfam annotation: Domain name=PP2C; Domain location=1-126; Score=-3.8; E_value=1.2e-05; Accession=PF00481.13; Description=Protein phosphatase 2C
GRAVELSRDHKPNCTVERLRIENLGGTVFDGYLNGQLAVARAIGDWHMKGSKGSICPLTPEPEFREVRLTEEDEFLIVGCDGLWDVMSSQCAVSMVRKELMAHNDPQRCSHELVQEALRRDCCDNLTVVVVCLLQDKNPTPYKIRR

SEQ ID NO: 124782 - protein, 38 aa, Setaria italica
  Transcript Sequence Number=SeqID_58808
IFRKQNSKHLQCETQLNFIGHGQRNNGQLFLSCEKLRL

SEQ ID NO: 124783 - protein, 67 aa, Setaria italica
  misc_feature (18)..(18): Xaa can be any naturally occurring amino acid
  Transcript Sequence Number=SeqID_58809
  Subcellular localization annotation: CTP_CleavageSite=45; ConfidenceScore=5.32e-01
MSGGVEPETPPGSSRSGXTTPVGGKPPRHHLTSIRHCASSARIASASAEFVSKLATTLALCPRTKRI

SEQ ID NO: 124784 - protein, 109 aa, Setaria italica
  misc_feature (9)..(9): Xaa can be any naturally occurring amino acid
  misc_feature (19)..(19): Xaa can be any naturally occurring amino acid
  Transcript Sequence Number=SeqID_58810
  Gene Ontology: Mol. function=RNA binding
IRRTPSPCXPVGVRMGVLXKKVEATAVASLNHDGADIAATLSSLSLSGNKMSNMETEVQNHVYHNFGDQTDMLFNVPKEHRQFSQQSLTQNTEVTPPIWENCIFRGIKR

SEQ ID NO: 124785 - protein, 84 aa, Setaria italica
  Transcript Sequence Number=SeqID_58811
  Gene Ontology: Mol. function=DNA binding
  Homolog annotation: Hit_ID=Q6ZIA2; Match level="QueryCoverage=98%, HitCoverage=26%, E-value=3e-24, Identity=64%"; Hit description =Regulatory protein-like
MAVWGNGAGDEANAELSQLLKNASMEDKTVILTSINQAYAAPGSLLDLFLESFRLGEGTARLLDHLLIVAVDPGALATCRSLHR

SEQ ID NO: 124786 - protein, 30 aa, Setaria italica
  Transcript Sequence Number=SeqID_58812
  Homolog annotation: Hit_ID=B6SWQ2; Match level="QueryCoverage=90%, HitCoverage=5%, E-value=4e-09, Identity=100%"; Hit description=Heat shock factor protein 2
YFQGFRKVHADRWEFAHEDFLRDSKHLLKR

SEQ ID NO: 124787 - protein, 44 aa, Setaria italica
  Transcript Sequence Number=SeqID_58813
  Gene Ontology: Mol. function=protein serine/threonine kinase activity; Biological process=protein amino acid phosphorylation
SFNLTFFCRHSLLLRTDSSLIQFNRQLKRCNYDLEAWRNLVEPT

SEQ ID NO: 124788 - protein, 67 aa, Setaria italica
  misc_feature (12)..(12): Xaa can be any naturally occurring amino acid
  misc_feature (34)..(34): Xaa can be any naturally occurring amino acid
  Transcript Sequence Number=SeqID_58814
  Gene Ontology: Mol. function=protein serine/threonine kinase activity; Cellular component=chloroplast; Biological process=protein amino acid phosphorylation
  Homolog annotation: Hit_ID=B6SXS7; Match level="QueryCoverage=98%, HitCoverage=11%, E-value=6e-24, Identity=83%"; Hit description =Serine/threonine-protein kinase SNT7
FGLMARSGTEDXGGFTEAQLQELREIKPKKGSAXRNVLASLLRVQRKIVRTINESMDDLTSQRKSIW

SEQ ID NO: 124789 - protein, 63 aa, Setaria italica
  Transcript Sequence Number=SeqID_58815
  Gene Ontology: Mol. function=protein serine/threonine kinase activity; Cellular component=chloroplast; Biological process=protein amino acid phosphorylation
  Homolog annotation: Hit_ID=B6SXS7; Match level="QueryCoverage=100%, HitCoverage=11%, E-value=5e-24, Identity=85%"; Hit description =Serine/threonine-protein kinase SNT7
GFTEAQLQELREIKPKKGSAQRNVLASLLRVQRKIVRTINESMDDLTSQRKSIWWSRWIPREE

SEQ ID NO: 124790 - protein, 65 aa, Setaria italica
  Transcript Sequence Number=SeqID_58816
  Gene Ontology: Mol. function=protein serine/threonine kinase activity; Cellular component=chloroplast; Biological process=protein amino acid phosphorylation
  Homolog annotation: Hit_ID=B6SXS7; Match level="QueryCoverage=92%, HitCoverage=10%, E-value=4e-22, Identity=83%"; Hit description =Serine/threonine-protein kinase SNT7
VGRPTKTTARASEGFDIMDLDDGIGWELLTSMVRYKARQRISAEAALAHPYFNREGLLGLSVMQN

SEQ ID NO: 124791 - protein, 74 aa, Setaria italica
  Transcript Sequence Number=SeqID_58817
  Gene Ontology: Mol. function=protein serine/threonine kinase activity; Cellular component=chloroplast; Biological process=protein amino acid phosphorylation
  Homolog annotation: Hit_ID=B6SXS7; Match level="QueryCoverage=98%, HitCoverage=13%, E-value=6e-32, Identity=90%"; Hit description =Serine/threonine-protein kinase SNT7
TILLQAFPSLRTDSSLIQFNRQLKRCNYDLEAWRNLVEPRATAELRRGFDIMDLDDGIGWELLTSMVRYKARQR

SEQ ID NO: 124792 - protein, 82 aa, Setaria italica
  Transcript Sequence Number=SeqID_58818
  Gene Ontology: Mol. function=protein serine/threonine kinase activity; Cellular component=chloroplast; Biological process=protein amino acid phosphorylation
  Homolog annotation: Hit_ID=B6SXS7; Match level="QueryCoverage=85%, HitCoverage=12%, E-value=4e-30, Identity=81%"; Hit description =Serine/threonine-protein kinase SNT7
GEDTLYGFRESKVKGKGAEEYWIIWRFEGEDTLYDLMQSKEFPYNVETKILGGVQNLPKGIGRENKIIKCILADHRNRAHPS

SEQ ID NO: 124793 - protein, 75 aa, Setaria italica
  Transcript Sequence Number=SeqID_58819
  Gene Ontology: Mol. function=protein serine/threonine kinase activity; Cellular component=chloroplast; Biological process=protein amino acid phosphorylation
  Homolog annotation: Hit_ID=B6SXS7; Match level="QueryCoverage=61%, HitCoverage=8%, E-value=9e-20, Identity=100%"; Hit description =Serine/threonine-protein kinase SNT7
SASQTFCLANAVCANDSTRKVVEALPILGRYAAPEQYIMSTQTPSAPSVPVATTLSPVLWQLNLPDRFDIYSLGL

SEQ ID NO: 124794 - protein, 78 aa, Setaria italica
  Transcript Sequence Number=SeqID_58820
GPALVILHLRRAPRGRHGAPIGDDATAAASESQFYCYGTREAEAAAAAQVLAPEQPGRIQKAVAATATSSAAPPSASV

SEQ ID NO: 124795 - protein, 78 aa, Setaria italica
  Transcript Sequence Number=SeqID_58821
  Gene Ontology: Mol. function=phosphotransferase activity, alcohol group as acceptor; Biological process=nucleobase, nucleoside, nucleotide and nucleic acid metabolic process
  Homolog annotation: Hit_ID=Q71F76; Match level="QueryCoverage=100%, HitCoverage=21%, E-value=2e-25, Identity=67%"; Hit description =DCK/dGK-like deoxyribonucleoside kinase
SITSFVKDNVVRELKEESKVPDMQSTKNKRITFCVEGNISVGKSTFLQKIANETVELRDLVEIVPEPVSKWQDIGPDH

SEQ ID NO: 124796 - protein, 63 aa, Setaria italica
  Transcript Sequence Number=SeqID_58822
  Gene Ontology: Mol. function=phosphotransferase activity, alcohol group as acceptor; Biological process=nucleobase, nucleoside, nucleotide and nucleic acid metabolic process
  Homolog annotation: Hit_ID=Q6Y0E8; Match level="QueryCoverage=73%, HitCoverage=42%, E-value=4e-13, Identity=76%"; Hit description =Putative deoxyguanosine kinase (Fragment)
HKSHAESITSFVKDNVVRELKEESSGGIKPLRLVERSIFSDRMVFVRAVHEANWLNGMELSYL

SEQ ID NO: 124797 - protein, 97 aa, Setaria italica
  Transcript Sequence Number=SeqID_58823
  Gene Ontology: Mol. function=protein binding; Cellular component =nucleus; Biological process=cell division
  Homolog annotation: Hit_ID=Q9LJN8; Match level="QueryCoverage=87%, HitCoverage=25%, E-value=9e-41, Identity=89%"; Hit description =Mitotic checkpoint protein
  Pfam annotation: Domain name=WD40; Domain location=46-84; Score=24.5; E_value=0.00044; Accession=PF00400.24; Description=WD domain, G-beta repeat
MLLYADLSLVCLASGYALSSVEGRVSMEFFDLSESAQSKKYAFKCHRKSEAGRDTVYPVNAIAFHPIYGTFATGGCDGFVNVWDGINKKRLYQYSKY

SEQ ID NO: 124798 - protein, 94 aa, Setaria italica
  Transcript Sequence Number=SeqID_58824
  Subcellular localization annotation: CTP_CleavageSite=62; ConfidenceScore=5.41e-01
NLRSTSEPDHPSASASDVTTATSATRYVRSQPVGQSYLVRLQGLLLRPVRHESLESGGEPAVANSRSVGPEELPSIVVDDGHQLPRIRLELGLE

SEQ ID NO: 124799 - protein, 67 aa, Setaria italica
  Transcript Sequence Number=SeqID_58825
YQLTHLISAILYASIKLESNFPLDGLCTFEFLRGPFLFVQREAVEALIQELPKFRLKAVPTDCSECP

SEQ ID NO: 124800 - protein, 71 aa, Setaria italica
  Transcript Sequence Number=SeqID_58826
  Gene Ontology: Mol. function=microtubule motor activity; Cellular component=microtubule associated complex; Biological process =microtubule-based movement
  Homolog annotation: Hit_ID=Q8GS71; Match level="QueryCoverage=91%, HitCoverage=6%, E-value=7e-27, Identity=75%"; Hit description =Kinesin-like protein
MTMEHGEDCCVRVAVHVRPLIGDEKLQGCKDCVAVVPGKPQVQIGSHSFTFDHVYGSTGTPSAAMFDECVA

SEQ ID NO: 124801 - protein, 54 aa, Setaria italica
  Transcript Sequence Number=SeqID_58827
  Gene Ontology: Mol. function=microtubule motor activity; Cellular component=microtubule associated complex; Biological process =microtubule-based movement
  Homolog annotation: Hit_ID=Q84VC0; Match level="QueryCoverage=81%, HitCoverage=7%, E-value=2e-17, Identity=100%"; Hit description =Kinesin-like protein (Fragment)
PDLNLSFSPAACISPADINAEETLNTLKYANRARNIQNKPIVNRNPVADEMKRM

SEQ ID NO: 124802 - protein, 67 aa, Setaria italica
  Transcript Sequence Number=SeqID_58828
IAEKGNGEAAKAKRADSSNGHYTSGVISLSSIRERNSAYNLLQPMSTWNHYLGEKSLPVLGNNRWAH

SEQ ID NO: 124803 - protein, 81 aa, Setaria italica
  misc_feature (49)..(49): Xaa can be any naturally occurring amino acid
  misc_feature (62)..(62): Xaa can be any naturally occurring amino acid
  Transcript Sequence Number=SeqID_58829
  Gene Ontology: Mol. function=microtubule motor activity; Cellular component=microtubule associated complex; Biological process =microtubule-based movement
  Homolog annotation: Hit_ID=Q84VC0; Match level="QueryCoverage=93%, HitCoverage=12%, E-value=5e-37, Identity=96%"; Hit description =Kinesin-like protein (Fragment)
TIVQVTQKEMTACLEQGSLSRATGSTNMNNQSSRSHAIFTITLEQMRKXDPIMTADGMPIEXMNEDYLCAKLHLVDLAGSE

SEQ ID NO: 124804 - protein, 63 aa, Setaria italica
  Transcript Sequence Number=SeqID_58830
  Homolog annotation: Hit_ID=Q69LA8; Match level="QueryCoverage=65%, HitCoverage=7%, E-value=3e-10, Identity=75%"; Hit description=KIF4 -like
VAVPAQKQLKYSAGIVNSPSKGIAAFNKEQLKVLSNISLPVIIIAVSYLSNIFTDNFECRWFL

SEQ ID NO: 124805 - protein, 75 aa, Setaria italica
  Transcript Sequence Number=SeqID_58831
  Gene Ontology: Mol. function=microtubule motor activity; Cellular component=microtubule associated complex; Biological process =microtubule-based movement
  Homolog annotation: Hit_ID=Q69LA8; Match level="QueryCoverage=96%, HitCoverage=12%, E-value=4e-30, Identity=97%"; Hit description=KIF4 -like
RLLAEVESLNADGQTHKLRDAQLQKLKSLEAQILDLKKKQENQVQLLKEKQKSDEAAKKLQEEIHFIKAQKVTTY

SEQ ID NO: 124806 - protein, 49 aa, Setaria italica
  misc_feature (37)..(37): Xaa can be any naturally occurring amino acid
  Transcript Sequence Number=SeqID_58832
YSVTIFTCFNEPYTLVSPCNSRSHAIFTITLEQMRKXDPIMTADGMPIE

SEQ ID NO: 124807 - protein, 42 aa, Setaria italica
  Transcript Sequence Number=SeqID_58833
MVEGEGVAPLVDGLFQGYNATVLAYGQTWGRGRPTPVGTACE

SEQ ID NO: 124808 - protein, 60 aa, Setaria italica
  Transcript Sequence Number=SeqID_58834
YFALEGGLAFLLLALCNASGGSCLLAGHEFLLVIEGAELEPKESVGYLPSLTVSVQLYNP

SEQ ID NO: 124809 - protein, 80 aa, Setaria italica
  Transcript Sequence Number=SeqID_58835
  Gene Ontology: Mol. function=peptidase activity
  Homolog annotation: Hit_ID=Q654G4; Match level="QueryCoverage=98%, HitCoverage=14%, E-value=4e-25, Identity=69%"; Hit description =Putative potyviral helper component protease-interacting protein 2
STAVPSLRDALTGDDWAARKAAAEALALLALEHGDDLISHKSSCITVFEAKRFDKVKIVRESMNRMIEAWREIPDVDEEV

SEQ ID NO: 124810 - protein, 125 aa, Setaria italica
  Transcript Sequence Number=SeqID_58836
  Gene Ontology: Mol. function=ubiquitin thiolesterase activity; Cellular component=cytoplasm; Biological process=ubiquitin-dependent protein catabolic process
  Homolog annotation: Hit_ID=B6SW43; Match level="QueryCoverage=92%, HitCoverage=18%, E-value=3e-55, Identity=89%"; Hit description=UBP25
RFGGALLSQVKCLVCKGESNKTDEIMDISLDLPGSSSVADALARFFQPEILEGANKYSCERCKKLTSARKQMFILRSPKVLVIQLKRFEGINGGKINRNIEFKEALVLSDFMYNKNQVKHEILIA

SEQ ID NO: 124811 - protein, 130 aa, Setaria italica
  Transcript Sequence Number=SeqID_58837
  Gene Ontology: Mol. function=ubiquitin thiolesterase activity; Biological process=ubiquitin-dependent protein catabolic process
  Homolog annotation: Hit_ID=B6SW43; Match level="QueryCoverage=74%, HitCoverage=15%, E-value=1e-27, Identity=68%"; Hit description=UBP25
  Subcellular localization annotation: CTP_CleavageSite=22; ConfidenceScore=5.08e-01
FVYSGPLIKPIHFKNSVTEKVKSNGKENLPSKMNPEVNESATLSVSNGRMTGKFVEPSKKSADGTISCGKIDDHSERKLQDANGNGHPIHSQYLGEASNGKDRAHSKRQLEEDKFKEELAESASSELRLS

SEQ ID NO: 124812 - protein, 105 aa, Setaria italica
  Transcript Sequence Number=SeqID_58838
  Gene Ontology: Mol. function=ubiquitin thiolesterase activity; Biological process=ubiquitin-dependent protein catabolic process
  Homolog annotation: Hit_ID=B6SW43; Match level="QueryCoverage=86%, HitCoverage=14%, E-value=1e-21, Identity=64%"; Hit description=UBP25
ELVVTEKVKSNGKENLPSKMNPEVNESATLSVSNGRMTGKFVEPSKKSADGTISCGKIDDHSERKLQDANGNGHPIHSQYLGEASNGNTTCAQQYSEKSSGALAL

SEQ ID NO: 124813 - protein, 117 aa, Setaria italica
  Transcript Sequence Number=SeqID_58839
PNDRPYYYYNLHPPLLLHLVHAGGGPSPTRAHRSPRRQLLHHRAPPQLLVVHPRSVVFFFPAWRGSLVRSWDLCISFPLLVNCCLSCDTLNQAFSGMVCATFDVLAACPAALRCSTA

SEQ ID NO: 124814 - protein, 73 aa, Setaria italica
  Transcript Sequence Number=SeqID_58840
  Gene Ontology: Mol. function=translation initiation factor activity; Cellular component=membrane; Biological process=proteolysis
  Homolog annotation: Hit_ID=Q1PF44; Match level="QueryCoverage=52%, HitCoverage=8%, E-value=4e-12, Identity=89%"; Hit description =Eukaryotic translation initiation factor 2 subunit 3/eIF2S3/eIF-2 -gamma
MMRFLFFFIAVAIELALNKTLGLPEHHCAVSKMARRGLMEQDLSKLDVTKLHPLSPEVISRQATINIGTIGHV

SEQ ID NO: 124815 - protein, 56 aa, Setaria italica
  Transcript Sequence Number=SeqID_58841
  Gene Ontology: Mol. function=translation initiation factor activity; Cellular component=membrane; Biological process=proteolysis
  Homolog annotation: Hit_ID=O64490; Match level="QueryCoverage=96%, HitCoverage=11%, E-value=6e-27, Identity=88%"; Hit description =F20D22.6 protein
ANAKIYKCEDDRCPRPMCYKAYGSGKEDSPHCDVPGFENTRMKLLRHVSFVDCPVW

SEQ ID NO: 124816 - protein, 80 aa, Setaria italica
  Transcript Sequence Number=SeqID_58842
  Subcellular localization annotation: CTP_CleavageSite=16; ConfidenceScore=5.32e-01
MSASRSALSAILFAVLAAVAFAATAPSPSPDGAPASAPANLLPKAAPTMAPTPAPAPAKMAPAPAPTKNAARPQGQRPVS

SEQ ID NO: 124817 - protein, 75 aa, Setaria italica
  Transcript Sequence Number=SeqID_58843
  Subcellular localization annotation: CTP_CleavageSite=77; ConfidenceScore=5.70e-01
KLKAQTDQRRQLHQPPPPVTATGNLRRQCRPHAPLSLPSSSPSWQRSPSPPRRRRLAPTAPPPRRQRTCYPRLPR

SEQ ID NO: 124818 - protein, 53 aa, Setaria italica
  Transcript Sequence Number=SeqID_58844
MSSVGSSSGTRATNGAAAISAAATAAGSADARFHSQLLQQDRTEITDPLKFHC

SEQ ID NO: 124819 - protein, 119 aa, Setaria italica
  misc_feature (105)..(105): Xaa can be any naturally occurring amino acid
  Transcript Sequence Number=SeqID_58845
  Gene Ontology: Cellular component=plasma membrane
FLTLVPRSSSQTFPHNSGRVSVSREKQDADEIEAYRASFGFSADEIVQTQSYVEIPDALDESFSISPFGNIAPATEICAFNDLPNEAQKVDKSFVYVKDGTSPKXSANQLSIDSPNKCC

SEQ ID NO: 124820 - protein, 82 aa, Setaria italica
  Transcript Sequence Number=SeqID_58846
SSPSIIHLASATPRTGLSSPIPEQEVPTAHWKTSRSACDTPYFRASPIPEQEATAQWKTSRSACDTPYARTSPANIFGLDSS

SEQ ID NO: 124821 - protein, 44 aa, Setaria italica
  Transcript Sequence Number=SeqID_58847
QATIPVRLFTIAVGVMWVMGAAALQKYIGSLGGIGASGVGSSSS

SEQ ID NO: 124822 - protein, 93 aa, Setaria italica
  Transcript Sequence Number=SeqID_58848
  Subcellular localization annotation: CTP_CleavageSite=46; ConfidenceScore=5.29e-01
SKEATQIEETGERTPMTSPPPEPRAARGRRRQPRTNTTPSRTTTPRARPTRPGNQAPPQDPRLPFRNRHRLPAPRPPPRRGTGSATPMRGGMS

SEQ ID NO: 124823 - protein, 74 aa, Setaria italica
  Transcript Sequence Number=SeqID_58849
IFLLFSYKSLFFFFLRKSSLPQLSVFPITNCCYIAEIQKFVEIRKESDENSTTHHSETEWSSSPHPDESVEELK

SEQ ID NO: 124824 - protein, 61 aa, Setaria italica
  Transcript Sequence Number=SeqID_58850
  Gene Ontology: Mol. function=metal ion binding; Cellular component =integral to membrane
  Homolog annotation: Hit_ID=B6TV66; Match level="QueryCoverage=88%, HitCoverage=13%, E-value=1e-22, Identity=90%"; Hit description =Protein binding protein
  Pfam annotation: Domain name=PHD; Domain location=8-52; Score=-2.1; E_ value=0.045; Accession=PF00628.21; Description=PHD-finger
  Pfam annotation: Domain name=zf-C3HC4; Domain location=9-49; Score =40.4; E_value=7e-09; Accession=PF00097.17; Description=Zinc finger, C3HC4 type (RING finger)
  Pfam module annotation: Pfam domain module=PHD::zf-C3HC4; Domain location=8-52::9-49
IAPFVRQVCCICLARYVDNDELRLLPCGHFFHKDCVDKWLKINALCPLCKAELDVVSTTVP

SEQ ID NO: 124825 - protein, 75 aa, Setaria italica
  Transcript Sequence Number=SeqID_58851
  Gene Ontology: Mol. function=metal ion binding
  Homolog annotation: Hit_ID=B6TV66; Match level="QueryCoverage=93%, HitCoverage=16%, E-value=1e-22, Identity=71%"; Hit description =Protein binding protein
SSDAINALGTYKFKLKKPRNGEGNEGGGGVLAAGTDKERVVSAEDAVCCICLARYVDNDELRLLPCGHLLTNKGN

SEQ ID NO: 124826 - protein, 52 aa, Setaria italica
  Transcript Sequence Number=SeqID_58852
ANTRAQAFADHFKMALDCFFAVWFVVGNVWVFGGHSSAHDAPNLYRCSTSPP

SEQ ID NO: 124827 - protein, 77 aa, Setaria italica
  misc_feature (52)..(52): Xaa can be any naturally occurring amino acid
  Transcript Sequence Number=SeqID_58853
  Gene Ontology: Mol. function=phosphatase activity; Biological process= metabolic process
  Homolog annotation: Hit_ID=Q9FIK4; Match level="QueryCoverage=88%, HitCoverage=21%, E-value=1e-16, Identity=63%"; Hit description=4 -nitrophenylphosphatase-like protein
NPCCFNCCSFSLETSRMCMVGDRLDTDILFGQSTGCKTLLVLSGCTSLPELXQDASNNIYPDLYTNSVYDLVELLQK

SEQ ID NO: 124828 - protein, 103 aa, Setaria italica
  misc_feature (33)..(33): Xaa can be any naturally occurring amino acid
  misc_feature (67)..(67): Xaa can be any naturally occurring amino acid
  misc_feature (83)..(83): Xaa can be any naturally occurring amino acid
  Transcript Sequence Number=SeqID_58854
  Gene Ontology: Mol. function=phosphatase activity; Cellular component= cytoplasm; Biological process=metabolic process
  Homolog annotation: Hit_ID=B6TQ54; Match level="QueryCoverage=97%, HitCoverage=33%, E-value=4e-48, Identity=96%"; Hit description=4 -nitrophenylphosphatase
SKKFRSLGLEVTEEEIFTSSFAAAMFLKLNNFXPEKKVYVVGEDGILEELKLAGFECFGGPEDGKKXNIKLEADFYFEHDKSXGAVVVGLDQYFNYYKMQLLL

SEQ ID NO: 124829 - protein, 121 aa, Setaria italica
  misc_feature (61)..(61): Xaa can be any naturally occurring amino acid
  misc_feature (100)..(100): Xaa can be any naturally occurring amino acid
  Transcript Sequence Number=SeqID_58855
  Gene Ontology: Mol. function=phosphatase activity; Cellular component= cytoplasm; Biological process=metabolic process
  Homolog annotation: Hit_ID=B6TQ54; Match level="QueryCoverage=92%, HitCoverage=37%, E-value=7e-53, Identity=87%"; Hit description=4 -nitrophenylphosphatase
CSCRYARICISENPGCLFIATNRDPTGHMTSAQEWPGAGTMVAAVSCSVQKEPIVVGKPSXFLMDFLLKSFSLETSRMCMVGDRLDTDILFGQSTGCKTXCLSGCTSLPELQALRITSIRI

SEQ ID NO: 124830 - protein, 45 aa, Setaria italica
  Transcript Sequence Number=SeqID_58856
YFSQINCKHLMLKVVFILNKHISSSIEDRFAEIICNSLLLYIHFY

SEQ ID NO: 124831 - protein, 53 aa, Setaria italica
  Transcript Sequence Number=SeqID_58857
CAVCASFLLLGGNTRVEAIYQISGKNKFISVIADSSAMSKRHSMVRARVPFQT

SEQ ID NO: 124832 - protein, 64 aa, Setaria italica
  Transcript Sequence Number=SeqID_58858
  Gene Ontology: Mol. function=heat shock protein binding; Cellular component=mitochondrion; Biological process=protein folding
  Homolog annotation: Hit_ID=B6TA99; Match level="QueryCoverage=84%, HitCoverage=12%, E-value=3e-16, Identity=72%"; Hit description =Chaperone protein dnaJ
  Pfam annotation: Domain name=DnaJ_C; Domain location=1-62; Score= -14.2; E_value=3.1e-05; Accession=PF01556.10; Description=DnaJ C terminal region
  Subcellular localization annotation: CTP_CleavageSite=29; ConfidenceScore=5.28e-01
NSKTAHLQAVLGGTVSVPTLTGNVTVKVRQGTQPGEKVVLRGKGIKAKNSSVFGNQYVHFNNQG

SEQ ID NO: 124833 - protein, 58 aa, Setaria italica
  Transcript Sequence Number=SeqID_58859
  Gene Ontology: Mol. function=heat shock protein binding; Biological process=protein folding
  Homolog annotation: Hit_ID=C4T7Z2; Match level="QueryCoverage=100%, HitCoverage=13%, E-value=1e-14, Identity=60%"; Hit description=DnaJ -like protein
NFCKTCKGEQVVKGKMSVKLDIMAGIDDNDIMKVFGKGGADVERNKPGDLYVTIKVRE

SEQ ID NO: 124834 - protein, 47 aa, Setaria italica
  Transcript Sequence Number=SeqID_58860
NPVPLHREQVHSREKIVKNFCKTCKGEQVVKGKMSVKLDMMSLSSIP

SEQ ID NO: 124835 - protein, 57 aa, Setaria italica
  Transcript Sequence Number=SeqID_58861
YDTMMQYLNFICKHGMNTHAYMMTHSIVFRVHTLCWLFHILYETWALSSVSHLKHRG

SEQ ID NO: 124836 - protein, 92 aa, Setaria italica
  Transcript Sequence Number=SeqID_58862
  Gene Ontology: Mol. function=DNA photolyase activity; Biological process=DNA repair
  Homolog annotation: Hit_ID=B6U742; Match level="QueryCoverage=65%, HitCoverage=13%, E-value=2e-28, Identity=100%"; Hit description =Photolyase/blue-light receptor PHR2
GDARRHRGDERQGARRPQHHRQRGPVPRRPALRRRTLVWFRADLRLHDHEPFHAAAGASSSLLPVFVFDPRDFGKSPSGFDRTGPYRANFLL

SEQ ID NO: 124837 - protein, 91 aa, Setaria italica
  misc_feature (24)..(24): Xaa can be any naturally occurring amino acid
  Transcript Sequence Number=SeqID_58863
  Gene Ontology: Mol. function=protein binding
  Homolog annotation: Hit_ID=A5HEG0; Match level="QueryCoverage=98%, HitCoverage=22%, E-value=8e-28, Identity=68%"; Hit description =Putative growth-regulating factor 1
  Pfam annotation: Domain name=WRC; Domain location=8-53; Score=90.1; E_ value=7.6e-24; Accession=PF08879.2; Description=WRC
SYFGKKLDPEPGRCRRTDGKKWRXSKEAAPDSKYCERHMHRGRNRSRKPVETQLVPPSQPPATAAAAVSAAAPLAVTTNGSGFQNHSLYPA

SEQ ID NO: 124838 - protein, 79 aa, Setaria italica
  Transcript Sequence Number=SeqID_58864
QSLYPAVLAGNGGRAGGGGGGGGGLATGTFGLGSTAQLHMDSAAAYATATGGGSKDLRCVSATSVTYSNCLVPVLVFSS

SEQ ID NO: 124839 - protein, 49 aa, Setaria italica
  Transcript Sequence Number=SeqID_58865
NTTKRTAFAQAIRTADTGEAKDMIFEPQCLLQNNWLQQCLTASMTQLSL

SEQ ID NO: 124840 - protein, 90 aa, Setaria italica
  Transcript Sequence Number=SeqID_58866
  Homolog annotation: Hit_ID=B9SLM8; Match level="QueryCoverage=52%, HitCoverage=8%, E-value=1e-14, Identity=76%"; Hit description=ATP binding protein, putative
  Subcellular localization annotation: CTP_CleavageSite=81; ConfidenceScore=5.06e-01
LSFNADAGDKNDYDWLLTPPGTPLFPSLDVESKRSPASQVGTPKTRPTALKSRVGYLNISYTLVLRSTRLLHSILLSSTCKFSEISPLGG

SEQ ID NO: 124841 - protein, 50 aa, Setaria italica
  Transcript Sequence Number=SeqID_58867
YALSVSCISFMTFHVGIAADDVVYKIVAVEHPKDPAHGPEGPKALKVITP

SEQ ID NO: 124842 - protein, 67 aa, Setaria italica
  Transcript Sequence Number=SeqID_58868
  Subcellular localization annotation: CTP_CleavageSite=40; ConfidenceScore=5.07e-01
GSCHGAGLSTTVYTSRPLALPDHGRAFGCSTATILYTTSSAAMPSTKWARAAWCRIGDDAAGAFANG

SEQ ID NO: 124843 - protein, 134 aa, Setaria italica
  misc_feature (83)..(83): Xaa can be any naturally occurring amino acid
  Transcript Sequence Number=SeqID_58869
  Gene Ontology: Mol. function=kinase activity
  Homolog annotation: Hit_ID=B9SBM9; Match level="QueryCoverage=44%, HitCoverage=9%, E-value=6e-12, Identity=58%"; Hit description =Glucosidase II beta subunit, putative
NEVSKEDKGHEDEPEIPEPAEESLEDESEIPEPAEENYVGYHSEIEDDRHKYDDEEFDHESEDEYVDDHDEHVESYKSDDDRXDLTASEHSSWMNKIQQTVQNVLQKFNFFKTPVDLSEASRVRKEYDDASSKL

SEQ ID NO: 124844 - protein, 72 aa, Setaria italica
  misc_feature (23)..(23): Xaa can be any naturally occurring amino acid
  misc_feature (61)..(61): Xaa can be any naturally occurring amino acid
  Transcript Sequence Number=SeqID_58870
  Gene Ontology: Mol. function=kinase activity
  Homolog annotation: Hit_ID=B9SBM9; Match level="QueryCoverage=98%, HitCoverage=9%, E-value=1e-16, Identity=69%"; Hit description =Glucosidase II beta subunit, putative
KESYRVMQFSNGEPNRLGNGPKXERPRKVKDLRCGLSNELNDVDEPSRCEYVAVLSTPALXCVEEKLKELQN

SEQ ID NO: 124845 - protein, 76 aa, Setaria italica
  Transcript Sequence Number=SeqID_58871
VQDCGARLLQIHMAVYNTYIYNYQIYSNTSFLRFLLYIKLAARHVDSPVGTISMNLSPFNSRCMQVECHSISFQPL

SEQ ID NO: 124846 - protein, 101 aa, Setaria italica
  misc_feature (79)..(79): Xaa can be any naturally occurring amino acid
  Transcript Sequence Number=SeqID_58872
  Gene Ontology: Mol. function=protein dimerization activity; Cellular component=nucleus; Biological process=regulation of transcription, DNA-dependent
  Homolog annotation: Hit_ID=Q5Z749; Match level="QueryCoverage=63%, HitCoverage=30%, E-value=4e-23, Identity=72%"; Hit description=Auxin- responsive protein IAA21
  Pfam annotation: Domain name=AUX_IAA; Domain location=1-101; Score =31.8; E_value=1.2e-11; Accession=PF02309.8; Description=AUXIAA family
SYSGSRRQGARRRRRDDEEDKKKAQAPAAKAQVVGWPPIRSYRKNTMAMNQGCLYVKVSMDGAPYLRKVDLKMYNNYKXELSLALEKMFSSFTVGEFLCWL

SEQ ID NO: 124847 - protein, 55 aa, Setaria italica
  Transcript Sequence Number=SeqID_58873
  Gene Ontology: Biological process=response to biotic stimulus
  Homolog annotation: Hit_ID=B6TQA1; Match level="QueryCoverage=72%, HitCoverage=17%, E-value=4e-14, Identity=95%"; Hit description =Pathogen-related protein
SLEEKVQRLLKTWEMELVHKVRPEDQKTVNSEKYSASNNGENVRFMRSITLPLPA

SEQ ID NO: 124848 - protein, 51 aa, Setaria italica
  Transcript Sequence Number=SeqID_58874
PHGVLLATGFGAITGAVLGAEVAEHWYQLYKEAKTMNSTEEASLFCQAGML

SEQ ID NO: 124849 - protein, 60 aa, Setaria italica
  Transcript Sequence Number=SeqID_58875
  Homolog annotation: Hit_ID=B6TQP7; Match level="QueryCoverage=86%, HitCoverage=28%, E-value=5e-19, Identity=86%"; Hit description=Lipid transfer protein
NGRNEVQSLGLKFDRLMALPAACKLANANVTLCINLLNLKPGSPDYALFANASHSECSQL

SEQ ID NO: 124850 - protein, 68 aa, Setaria italica
  Transcript Sequence Number=SeqID_58876
  Subcellular localization annotation: CTP_CleavageSite=56; ConfidenceScore=5.49e-01
SRTSPSRHLASLYHSVHNDRRRSSHAVTPSAGGTPASDSTAGSGFSLQTGIRGSIAAAVVSAVLSSVF

SEQ ID NO: 124851 - protein, 47 aa, Setaria italica
  Transcript Sequence Number=SeqID_58877
  Homolog annotation: Hit_ID=B6SJ67; Match level="QueryCoverage=95%, HitCoverage=24%, E-value=2e-15, Identity=82%"; Hit description=Lipid transfer protein
CLCYIIQQVHNGRNEVQSLGLKFDRLMALPAACKLANANVTLCISEY

SEQ ID NO: 124852 - protein, 144 aa, Setaria italica
  misc_feature (43)..(43): Xaa can be any naturally occurring amino acid
  Transcript Sequence Number=SeqID_58878
  Gene Ontology: Mol. function=catalytic activity; Biological process =cellular metabolic process
  Homolog annotation: Hit_ID=B6T555; Match level="QueryCoverage=69%, HitCoverage=28%, E-value=3e-34, Identity=63%"; Hit description =Dihydroflavonol-4-reductase
VKLLKLTFLNYYFKVTFSTSQGRVLLTQDQKLVVVSSNAAVDXNPTWPQDTLKDESCWSDKEFCKENGDWYSVAKIMAEQAALEYADKNGLNVVTLCPPLVFGPLLQPVVNTSSKFLIYVIKGGPDVMNNKLWHIVDVRDVADA

SEQ ID NO: 124853 - protein, 106 aa, Setaria italica
  misc_feature (44)..(44): Xaa can be any naturally occurring amino acid
  misc_feature (60)..(60): Xaa can be any naturally occurring amino acid
  Transcript Sequence Number=SeqID_58879
  Homolog annotation: Hit_ID=B6TR31; Match level="QueryCoverage=92%, HitCoverage=29%, E-value=1e-17, Identity=43%"; Hit description =Dihydroflavonol-4-reductase
LPSLVKFLIYVIKGGPDVMNNKLWHIVDVRDVADALLLLYEKKXSSGRYICSPNHIRTKXLVALLKKLYPQYNCVNNILDVDQKASLTCQKLMDLGWEPRTRGGDA

SEQ ID NO: 124854 - protein, 66 aa, Setaria italica
  Transcript Sequence Number=SeqID_58880
YLHTTMSNLFHCSKQGASRNAAELKLERHRKCSGECWGRDQRPARRTPSPRMCAGAPSPSSASRRR

SEQ ID NO: 124855 - protein, 57 aa, Setaria italica
  Transcript Sequence Number=SeqID_58881
  Gene Ontology: Mol. function=transferase activity
  Homolog annotation: Hit_ID=Q9C5S7; Match level="QueryCoverage=84%, HitCoverage=17%, E-value=2e-14, Identity=68%"; Hit description =Transcription factor APFI
ELPRAFDEIELEKMLRKKYAHKDEEYDSMLGVVREIPPELILPDNILPHNAQKAVAR

SEQ ID NO: 124856 - protein, 96 aa, Setaria italica
  Transcript Sequence Number=SeqID_58882
  Gene Ontology: Mol. function=transferase activity; Biological process= oxidation reduction
  Homolog annotation: Hit_ID=Q9C5S7; Match level="QueryCoverage=72%, HitCoverage=25%, E-value=9e-29, Identity=87%"; Hit description =Transcription factor APFI
  Pfam annotation: Domain name=Hexapep; Domain location=32-49; Score =13.0; E_value=1.3; Accession=PF00132.16; Description=Bacterial transferase hexapeptide (th
  Pfam annotation: Domain name=Hexapep; Domain location=55-72; Score =9.0; E_value=14; Accession=PF00132.16; Description=Bacterial transferase hexapeptide (th
  Pfam annotation: Domain name=Hexapep; Domain location=73-90; Score =4.3; E_value=50; Accession=PF00132.16; Description=Bacterial transferase hexapeptide (th
  Pfam module annotation: Pfam domain module=Hexapep::Hexapep::Hexapep; Domain location=32-49::55-72::73-90
MLDLETCTRELSCIFVPDPIMNAVDISRKVLPTIIGSNVTVGHSAVLHACTIEDEAFVGMGATLLDGVVVEKHSMVGAGSLVKQNTRIPSGEVWGL

SEQ ID NO: 124857 - protein, 57 aa, Setaria italica
  Transcript Sequence Number=SeqID_58883
NSTMTYCDVASNYGWRTFLLMSTAFIIGSGTNIQDNSLVHVSRSNISRKVLPIMVGR

SEQ ID NO: 124858 - protein, 72 aa, Setaria italica
  misc_feature (55)..(55): Xaa can be any naturally occurring amino acid
  Transcript Sequence Number=SeqID_58884
  Gene Ontology: Mol. function=histone-lysine N-methyltransferase activity; Cellular component=nucleus; Biological process=chromatin modification
  Homolog annotation: Hit_ID=Q9T0G7; Match level="QueryCoverage=91%, HitCoverage=10%, E-value=6e-15, Identity=54%"; Hit description =Probable histone-lysine N-methyltransferase, H3 lysine-9 specific SUVH9
CVSKCRCERKNAGGPVYNEDGTLVLGRPVVYECGALCGCPMTCVNRVTQRGMKHXRLEVFRSPETGLRHARG

SEQ ID NO: 124859 - protein, 71 aa, Setaria italica
  Transcript Sequence Number=SeqID_58885
  Gene Ontology: Mol. function=diacylglycerol kinase activity; Biological process=activation of protein kinase C activity
  Homolog annotation: Hit_ID=B6TYH8; Match level="QueryCoverage=74%, HitCoverage=10%, E-value=1e-11, Identity=66%"; Hit description=D -erythro-sphingosine kinase/ diacylglycerol kinase
MCNKTSFQFLLRVMNLRRYNGRVLFVPAPGYEEVGEPVEQTATSCKQNGVSTGSQEDKADDRNGETSGYPG

SEQ ID NO: 124860 - protein, 86 aa, Setaria italica
  misc_feature (47)..(47): Xaa can be any naturally occurring amino acid
  Transcript Sequence Number=SeqID_58886
  Gene Ontology: Mol. function=diacylglycerol kinase activity; Cellular component=vacuole; Biological process=activation of protein kinase C activity
  Homolog annotation: Hit_ID=B6TYH8; Match level="QueryCoverage=91%, HitCoverage=15%, E-value=4e-37, Identity=94%"; Hit description=D -erythro-sphingosine kinase/ diacylglycerol kinase
ATGTGNGMAQSLLHAAGEPFSIPNAVFAIIRGHKRALDVTSVVQGKXRFFSVLMLTWGLVADVDIESEKYRWMGSARLEFYVCLLP

SEQ ID NO: 124861 - protein, 81 aa, Setaria italica
  misc_feature (57)..(57): Xaa can be any naturally occurring amino acid
  Transcript Sequence Number=SeqID_58887
  Gene Ontology: Mol. function=metal ion binding
IDWVGDGLKSIDNKTYYNSCNIDGVIYNLHDHMLIASEGGKFGPCKLQARLLISFLXSLWEEHDSGSRLAMVNPYIFGSDI

SEQ ID NO: 124862 - protein, 55 aa, Setaria italica
  Transcript Sequence Number=SeqID_58888
  Gene Ontology: Cellular component=cytoplasm; Biological process =multicellular organismal development
  Homolog annotation: Hit_ID=A8WER8; Match level="QueryCoverage=100%, HitCoverage=31%, E-value=2e-24, Identity=96%"; Hit description=ZCN6
SNKLVFNGHEIYPSAVVSKPRVEVQGGDLRSFFTLVMTDPDVPGPSDPYQREHLH

SEQ ID NO: 124863 - protein, 73 aa, Setaria italica
  misc_feature (60)..(60): Xaa can be any naturally occurring amino acid
  Transcript Sequence Number=SeqID_58889
  Gene Ontology: Mol. function=iron-sulfur cluster binding; Biological process=oxidation reduction
  Homolog annotation: Hit_ID=Q6Z351; Match level="QueryCoverage=95%, HitCoverage=5%, E-value=2e-23, Identity=78%"; Hit description =Putative aldehyde oxidase-like protein
LQQQSEDVSWDTLISQQASKENVNLSASAYWVPGQDSNKYLNYGAGISEVEIDLLTGAIXTYVRGDLVYDWWK

SEQ ID NO: 124864 - protein, 71 aa, Setaria italica
  Transcript Sequence Number=SeqID_58890
  Gene Ontology: Mol. function=iron-sulfur cluster binding; Cellular component=peroxisome; Biological process=oxidation reduction
  Homolog annotation: Hit_ID=Q6Z351; Match level="QueryCoverage=100%, HitCoverage=5%, E-value=1e-31, Identity=88%"; Hit description =Putative aldehyde oxidase-like protein
VATAAALCAYKLRRPVRMYLNRNTDMVMIGGRHPVKARYSVGFKSDGKITALHLDLLINAGISEDASPSIP

SEQ ID NO: 124865 - protein, 122 aa, Setaria italica
  misc_feature (11)..(11): Xaa can be any naturally occurring amino acid
  Transcript Sequence Number=SeqID_58891
  Gene Ontology: Mol. function=transporter activity; Cellular component= integral to membrane; Biological process=transport
  Homolog annotation: Hit_ID=Q41760; Match level="QueryCoverage=95%, HitCoverage=22%, E-value=4e-53, Identity=89%"; Hit description =Nucleobase-ascorbate transporter LPE1
WQDCLAMLAAXFASLIESTGTLIVVSRFAGATFCPPSVFSRGVGWEGISIILDGMCGTLTGTAASVENAGLLPLTRVGSRRVIKISALFMIFFSLFGKFGAVLASIPLSLFAALYCVTTLRT

SEQ ID NO: 124866 - protein, 58 aa, Setaria italica
  Transcript Sequence Number=SeqID_58892
SPIKQMGYHIGSKGSSPSRTNVIIPLSSRWEELECFDSAYKSFWMNNFNFRETRRFCK

SEQ ID NO: 124867 - protein, 60 aa, Setaria italica
  misc_feature (45)..(45): Xaa can be any naturally occurring amino acid
  Transcript Sequence Number=SeqID_58893
  Gene Ontology: Mol. function=transporter activity; Cellular component= integral to membrane; Biological process=transport
  Homolog annotation: Hit_ID=Q41760; Match level="QueryCoverage=78%, HitCoverage=8%, E-value=3e-16, Identity=87%"; Hit description =Nucleobase-ascorbate transporter LPE1
CLAMLAASFASLIESTGTLIVVSRFAGATFCPPSVFSRGVGWEGXSIHYLVLGIVVRLLL

SEQ ID NO: 124868 - protein, 61 aa, Setaria italica
  Transcript Sequence Number=SeqID_58894
  Gene Ontology: Mol. function=hydrolase activity, hydrolyzing O -glycosyl compounds; Cellular component=chloroplast; Biological process=carbohydrate metabolic process
  Homolog annotation: Hit_ID=Q9SXI9; Match level="QueryCoverage=93%, HitCoverage=6%, E-value=2e-26, Identity=100%"; Hit description =H0321H01.10 protein
YKFDGFRFDGVTSMMYTHHGLQVAFTGNYGEYFGFATDVDAVVYLMLVNDLIHGLYPGTAI

SEQ ID NO: 124869 - protein, 81 aa, Setaria italica
  Transcript Sequence Number=SeqID_58895
  Gene Ontology: Mol. function=hydrolase activity, hydrolyzing O -glycosyl compounds; Cellular component=chloroplast; Biological process=carbohydrate metabolic process
  Homolog annotation: Hit_ID=O24421; Match level="QueryCoverage=83%, HitCoverage=8%, E-value=2e-33, Identity=98%"; Hit description=Starch branching enzyme IIa (Fragment)
  Pfam annotation: Domain name=Alpha-amylase_C; Domain location=1-68; Score=24.8; E_value=0.00035; Accession=PF02806.10; Description=Alpha amylase, C-terminal all-beta do
NSYFDYRVGCFKPGKYKIVLDSDDGLFGGFSRLDHDAEYFTADWPHDNRPCSFSVYAPSRTAVVYALARRNEIRVDKRTVN

SEQ ID NO: 124870 - protein, 75 aa, Setaria italica
  Transcript Sequence Number=SeqID_58896
  Gene Ontology: Mol. function=hydrolase activity, hydrolyzing O -glycosyl compounds; Cellular component=chloroplast; Biological process=carbohydrate metabolic process
  Homolog annotation: Hit_ID=Q9SXI9; Match level="QueryCoverage=82%, HitCoverage=7%, E-value=4e-31, Identity=98%"; Hit description =H0321H01.10 protein
LKQSDEYWKMGDIVHTLTNRRWLEKCVTYAESHDQALVGDKTIAFWLMDKDMYDFMALDRPSNVLRYSYSLGYLV

SEQ ID NO: 124871 - protein, 63 aa, Setaria italica
  Transcript Sequence Number=SeqID_58897
SENVPCSLYIMASAGIASPESICSKYVVICTVLLSCTNKAVKEAWYFCYKMVLHAVHLPVLVG

SEQ ID NO: 124872 - protein, 48 aa, Setaria italica
  Transcript Sequence Number=SeqID_58898
  Gene Ontology: Mol. function=catalytic activity; Cellular component =intracellular; Biological process=regulation of transcription
  Homolog annotation: Hit_ID=B9RQI1; Match level="QueryCoverage=77%, HitCoverage=8%, E-value=4e-10, Identity=78%"; Hit description =Nucleic acid binding protein, putative
FNSYLSPVDFGIDKTIFIKPKTFHLTVVMLKLWNKDRIAKASEVLQVL

SEQ ID NO: 124873 - protein, 81 aa, Setaria italica
  Transcript Sequence Number=SeqID_58899
  Gene Ontology: Mol. function=catalytic activity; Cellular component =intracellular; Biological process=regulation of transcription
  Pfam annotation: Domain name=KH_1; Domain location=1-46; Score=24.5; E_value=0.00045; Accession=PF00013.21; Description=KH domain
GKGGSMQKKIEEDTGVKIIFPSSREETSVVLEGTSSESIRKASQMIANVLEEAVQSRMLGTNYPIYNNTTYQLGLIPTRNT

SEQ ID NO: 124874 - protein, 77 aa, Setaria italica
  Transcript Sequence Number=SeqID_58900
LLLGQRWVAKDSMPGRYVNGSLYLVEPECVSSLQIILVATADSSEGMQQSIRRCFRHEIDMKTMNEEHRNKLISETL

SEQ ID NO: 124875 - protein, 46 aa, Setaria italica
  Transcript Sequence Number=SeqID_58901
YYVVACLGEKSVTVTAQVLGDISPSLSLEELQNYELLRQKIEGPSR

SEQ ID NO: 124876 - protein, 127 aa, Setaria italica
  misc_feature (30)..(30): Xaa can be any naturally occurring amino acid
  Transcript Sequence Number=SeqID_58902
  Gene Ontology: Mol. function=3-methyl-2-oxobutanoate hydroxymethyltran sferase activity; Cellular component=cytoplasm; Biological process =pantothenate biosynthetic process
  Homolog annotation: Hit_ID=B6TL59; Match level="QueryCoverage=98%, HitCoverage=35%, E-value=1e-55, Identity=88%"; Hit description=3 -methyl-2-oxobutanoate hydroxymethyltransferase
  Pfam annotation: Domain name=Pantoate_transf; Domain location=2-126; Score=-22.2; E_value=6.1e-14; Accession=PF02548.7; Description =Ketopantoate hydroxymethyltransferase
CYESSAAQAVDSAVRLLKEGGMDAIKLEGXAPSRISAAKAIVEAGIAVMGHVGLTPQAISVLGGFRPQGKTVDSAVKVVETALALQEAGCFSVVLECVPAPVAAAATSALQIPTIGIGAGPFCSGTR

SEQ ID NO: 124877 - protein, 105 aa, Setaria italica
  Transcript Sequence Number=SeqID_58903
  Gene Ontology: Mol. function=nucleic acid binding; Cellular component= nucleus
MTRVLKCNWCCSEEHQLLQDVQERLAVHPLTAPVLGNDHAEFLQRSIPSGVPPILDGDMLVLFLELTGEQQQAILSHALPGKGPRSPVSVFQVLRTLERVHYALN

SEQ ID NO: 124878 - protein, 62 aa, Setaria italica
  misc_feature (3)..(3): Xaa can be any naturally occurring amino acid
  Transcript Sequence Number=SeqID_58904
  Gene Ontology: Cellular component=chromosome, centromeric region; Biological process=mitosis
  Homolog annotation: Hit_ID=B6TKR2; Match level="QueryCoverage=100%, HitCoverage=13%, E-value=1e-12, Identity=56%"; Hit description=Nuf2 family protein
VGXNPPDEQLGFDELLVLENPEHHLQAMALRRIYRKARDFLDSIYFGGLTLRDFLRPHPRRI

SEQ ID NO: 124879 - protein, 47 aa, Setaria italica
  Transcript Sequence Number=SeqID_58905
WFPTCNHQLPPFRILQAKKLLESQTGLWQGDIVQKANMRDLVAFVEK

SEQ ID NO: 124880 - protein, 72 aa, Setaria italica
  Transcript Sequence Number=SeqID_58906
  Gene Ontology: Cellular component=integral to peroxisomal membrane; Biological process=peroxisome organization and biogenesis
  Homolog annotation: Hit_ID=B6TW18; Match level="QueryCoverage=56%, HitCoverage=10%, E-value=1e-09, Identity=75%"; Hit description =Lysine and histidine specific transporter
EESDTFSENGHKSFLTTADYLPTGKINAYIMQMQHAATEVLKRVNISCPVLMIVITGMFATQQIKENASKFF

SEQ ID NO: 124881 - protein, 62 aa, Setaria italica
  Transcript Sequence Number=SeqID_58907
  Pfam annotation: Domain name=PIG-H; Domain location=3-60; Score=12.6; E_value=0.00078; Accession=PF10181.1; Description=GPI-GlcNAc transferase complex, PIG-H compon
AQKIEVFYFLLLNMKLIFYSGRVHRKFVPTGKILRPVLNECVTPVTCYWSLALLLRDDYGLM

SEQ ID NO: 124882 - protein, 81 aa, Setaria italica
  Transcript Sequence Number=SeqID_58908
LESHPPAPETWEEIADCCCSLWPEIISALDLVQWALNEILVTHVNGSCHHVKLLYHVNGRCHHVKLLYHVYAGGTTCLEHC

SEQ ID NO: 124883 - protein, 107 aa, Setaria italica
  misc_feature (88)..(88): Xaa can be any naturally occurring amino acid
  Transcript Sequence Number=SeqID_58909
  Gene Ontology: Mol. function=DNA binding; Cellular component =chromosome; Biological process=regulation of transcription, DNA -dependent
  Homolog annotation: Hit_ID=Q9LGR0; Match level="QueryCoverage=96%, HitCoverage=15%, E-value=3e-50, Identity=96%"; Hit description=FACT complex subunit SSRP1-A
  Pfam annotation: Domain name=SSrecog; Domain location=1-107; Score =60.0; E_value=8.9e-15; Accession=PF03531.6; Description=Structure -specific recognition protein
YGRLVVERDLALSKEVLADKYKDRLEESYKGLIHEVFTKVLRGLSGAKVTRPGSFRSCQDGYAVKSSLKAEDGLLYPLEKGFFFLPKXPPTLILHEEIEFVEFERHG

SEQ ID NO: 124884 - protein, 67 aa, Setaria italica
  Transcript Sequence Number=SeqID_58910
  Gene Ontology: Mol. function=DNA binding; Cellular component =chromosome; Biological process=regulation of transcription, DNA -dependent
  Homolog annotation: Hit_ID=Q9LGR0; Match level="QueryCoverage=97%, HitCoverage=10%, E-value=1e-30, Identity=96%"; Hit description=FACT complex subunit SSRP1-A
  Pfam annotation: Domain name=SSrecog; Domain location=1-67; Score= -64.3; E_value=9.2e-06; Accession=PF03531.6; Description=Structure -specific recognition protein
MKTYKGLIHEVFTKVLRGLSGAKVTRPGSFRSCQDGYAVKSSLKAEDGLLYPLEKGFFFLPKPPTLN

SEQ ID NO: 124885 - protein, 56 aa, Setaria italica
  Transcript Sequence Number=SeqID_58911
  Gene Ontology: Mol. function=iron ion binding; Cellular component =integral to membrane; Biological process=iron ion transport
  Homolog annotation: Hit_ID=Q7XUJ2; Match level="QueryCoverage=89%, HitCoverage=7%, E-value=7e-12, Identity=74%"; Hit description =Probable metal-nicotianamine transporter YSL9
VYYCIRISKLKSILFNWLPAVASGLICGDGLWILPESLLALAKISPPLCMAFRPTH

SEQ ID NO: 124886 - protein, 115 aa, Setaria italica
  Transcript Sequence Number=SeqID_58912
  Gene Ontology: Mol. function=iron ion binding; Cellular component =integral to membrane; Biological process=iron ion transport
  Homolog annotation: Hit_ID=Q7XUJ2; Match level="QueryCoverage=90%, HitCoverage=15%, E-value=6e-42, Identity=80%"; Hit description =Probable metal-nicotianamine transporter YSL9
EMKWYYVIIAYLFSSCIGFCNAYGAGLTDINMAYNYGKVALFILAAWAGKDSGVVAGLVGCGLVKSLVSISADLMHDFKTGHLTLTSPRSMIIAQAIGTAMGCVNWNRPNNTKGP

SEQ ID NO: 124887 - protein, 69 aa, Setaria italica
  Transcript Sequence Number=SeqID_58913
  Gene Ontology: Mol. function=iron ion binding; Cellular component =integral to membrane; Biological process=iron ion transport
  Homolog annotation: Hit_ID=Q7XUJ2; Match level="QueryCoverage=71%, HitCoverage=7%, E-value=3e-12, Identity=67%"; Hit description =Probable metal-nicotianamine transporter YSL9
SHQLGREPPLPWVEEPICHTLVARDPSSDWMPAVASGLICGDGLWILPESLLALAKISPPLCMAFRPTH

SEQ ID NO: 124888 - protein, 81 aa, Setaria italica
  misc_feature (36)..(36): Xaa can be any naturally occurring amino acid
  Transcript Sequence Number=SeqID_58914
  Gene Ontology: Mol. function=iron ion binding; Cellular component =integral to membrane; Biological process=iron ion transport
  Homolog annotation: Hit_ID=Q7XUJ2; Match level="QueryCoverage=100%, HitCoverage=14%, E-value=1e-21, Identity=57%"; Hit description =Probable metal-nicotianamine transporter YSL9
  Subcellular localization annotation: CTP_CleavageSite=51; ConfidenceScore=5.13e-01
FHTTHGDATAKQQVNGFTKYFAISFFWSFFQWFYSXFFFDFSLTYVGAGMICSHLVNLSLLLGAILSWGIMWPLISDLKGD

SEQ ID NO: 124889 - protein, 48 aa, Setaria italica
  Transcript Sequence Number=SeqID_58915
YVTVPILSVLAAIGYVYYTTVFLAIAASTESIGTVTYPGRPIRAAAAA

SEQ ID NO: 124890 - protein, 80 aa, Setaria italica
  Transcript Sequence Number=SeqID_58916
  Gene Ontology: Mol. function=nucleic acid binding
  Homolog annotation: Hit_ID=Q00ZM4; Match level="QueryCoverage=80%, HitCoverage=7%, E-value=1e-10, Identity=53%"; Hit description=Rna -binding protein 28 (Rna-binding motif protein 28) (IC) (Fragment)
  Pfam annotation: Domain name=RRM_1; Domain location=7-76; Score=37.7; E_value=4.6e-08; Accession=PF00076.14; Description=RNA recognition motif. (a.k.a. RRM, RBD, o
KIRKWRVIVRNLPFKITEKEIMDMFSSAGFVWDVSIPHKSDEGLSKGFAFVSFTRKQDAENVWSVPYSVRVQNAFKISNH

SEQ ID NO: 124891 - protein, 66 aa, Setaria italica
  misc_feature (23)..(23): Xaa can be any naturally occurring amino acid
  Transcript Sequence Number=SeqID_58917
  Gene Ontology: Mol. function=sequence-specific DNA binding; Cellular component=cytoplasm; Biological process=regulation of transcription, DNA-dependent
  Homolog annotation: Hit_ID=B4FZ71; Match level="QueryCoverage=100%, HitCoverage=15%, E-value=2e-29, Identity=86%"; Hit description=Heat shock transcription factor like protein
  Pfam annotation: Domain name=HSF_DNA-bind; Domain location=1-66; Score=-77.2; E_value=0.0022; Accession=PF00447.9; Description=HSF -type DNA-binding
RMLPTYFKHSNFSSFIRQLNTYXRWEFANEYFVKGQKQLLKNIHRRKPIHSHSHQPGALPDNERAL

SEQ ID NO: 124892 - protein, 75 aa, Setaria italica
  Transcript Sequence Number=SeqID_58918
TVLCQCFLRLLIFGAQAAIQHWKPHKPWQILPPVPSTNILEAYPFQLLTGPLSLRIVSKCEYVSTSHMANLKPGA

SEQ ID NO: 124893 - protein, 78 aa, Setaria italica
  Transcript Sequence Number=SeqID_58919
RHEARAVLLHWLRLLILTSKDILHIAVLDYGAVKLQASSFLPSHHAARIGVLVVEHVAVSRPAAAKKGRLPTRRTDDD

SEQ ID NO: 124894 - protein, 66 aa, Setaria italica
  Transcript Sequence Number=SeqID_58920
CFHIEEFALNMKFRMEAAIRLLFDSQLTKRNMEIQPPNLIFLANSTNTPFLTNKHHCLDYKLKNLK

SEQ ID NO: 124895 - protein, 39 aa, Setaria italica
  Transcript Sequence Number=SeqID_58921
MSCLGRAAVPVKRVWRGLSARLRLRRATGLGRLRKEVRT

SEQ ID NO: 124896 - protein, 91 aa, Setaria italica
  misc_feature (49)..(50): Xaa can be any naturally occurring amino acid
  Transcript Sequence Number=SeqID_58922
  Gene Ontology: Mol. function=RNA binding
  Homolog annotation: Hit_ID=B6T7D6; Match level="QueryCoverage=97%, HitCoverage=37%, E-value=3e-38, Identity=87%"; Hit description =Exosome complex exonuclease RRP40
YCSYFEATGKAAEFGQLKDGYTFDTSTGMSRMLLSSPTCPVLEALGKKXXFEIAVGLNGRVWVNAPAPNTVILVSNAIMRSESLSGIQQRA

SEQ ID NO: 124897 - protein, 50 aa, Setaria italica
  Transcript Sequence Number=SeqID_58923
ITMTRDCAGISQKRTTSILSECTLLYFVLAQLMSSFRDLPYSKKKWDYIS

SEQ ID NO: 124898 - protein, 57 aa, Setaria italica
  Transcript Sequence Number=SeqID_58924
LLVDTTSSLRWQWFFWDKRCSFSNISRFMLRILHEKLVTKFWYYCSTTSSIWQWLVG

SEQ ID NO: 124899 - protein, 45 aa, Setaria italica
  Transcript Sequence Number=SeqID_58925
QIGKTSDAYMIKNAGSSANADMSCFSPSIICRLFSWHGSICARSC

SEQ ID NO: 124900 - protein, 87 aa, Setaria italica
  Transcript Sequence Number=SeqID_58926
  Gene Ontology: Mol. function=hydrolase activity, acting on acid anhydrides, catalyzing transmembrane movement of substances; Cellular component=integral to membrane; Biological process =metabolic process
  Homolog annotation: Hit_ID=B9RD09; Match level="QueryCoverage=78%, HitCoverage=7%, E-value=8e-23, Identity=69%"; Hit description=H(\\+)- transporting atpase plant/fungi plasma membrane type, putative
GAFVVAQLIASVLAAMVSWEVAGIKGIGWGWTGAIWVYNIAVYLLLDPIKFAVRYGLSGKAWGLVLEQTRWPYNEDRQRNFRERKDP

SEQ ID NO: 124901 - protein, 132 aa, Setaria italica
  misc_feature (84)..(84): Xaa can be any naturally occurring amino acid
  Transcript Sequence Number=SeqID_58927
  Gene Ontology: Mol. function=fructose-bisphosphate aldolase activity; Cellular component=chloroplast; Biological process=metabolic process
  Homolog annotation: Hit_ID=Q94JJ0; Match level="QueryCoverage=100%, HitCoverage=35%, E-value=3e-58, Identity=81%"; Hit description =Fructose-bisphosphate aldolase
  Pfam annotation: Domain name=Glycolytic; Domain location=1-132; Score= -4.8; E_value=5.6e-13; Accession=PF00274.11; Description=Fructose -bisphosphate aldolase class-I
LRGILLKPSMVTPGAEHKEKASPEAIAKNTLTMLRRRVPPAVPGIMSEVEATLNLNAMNQSPNPWHVSFSYARALQNSVLKTWXGRPENVEAAQKALLARAKANSQAQLGRYTGEGESDEAKKGMFQKGYTY

SEQ ID NO: 124902 - protein, 38 aa, Setaria italica
  Transcript Sequence Number=SeqID_58928
GIAQDNGLVPIVEPEILLDGDHGIERTLEVEEYLRPHF

SEQ ID NO: 124903 - protein, 56 aa, Setaria italica
  Transcript Sequence Number=SeqID_58929
IGESADPIRPSSAARAAILDLVSPSPMEDGVSTYTVDEALVFMGFGKFHAFVLAYS

SEQ ID NO: 124904 - protein, 169 aa, Setaria italica
  misc_feature (119)..(119): Xaa can be any naturally occurring amino acid
  misc_feature (124)..(124): Xaa can be any naturally occurring amino acid
  misc_feature (141)..(141): Xaa can be any naturally occurring amino acid
  misc_feature (149)..(149): Xaa can be any naturally occurring amino acid
  misc_feature (157)..(157): Xaa can be any naturally occurring amino acid
  Transcript Sequence Number=SeqID_58930
  Gene Ontology: Biological process=protein localization
  Homolog annotation: Hit_ID=Q6K796; Match level="QueryCoverage=100%, HitCoverage=4%, E-value=3e-56, Identity=67%"; Hit description =Vacuolar protein sorting 13C protein-like
VNGSVIETKLSIYGKLDRKSKDSQELLMLELLGNGGKVNVVQSSRGLSVKTKLHSLKIKDELQGRLSMSSKYLACSVIDESVEATCSGTPDKEGDISTFSVDEDSFMDALTDFTSDQKXNLQDXKIPNLVSDANDYTETSXKDGIWFDXDQQKVKPXVKLFYEAQDNNV

SEQ ID NO: 124905 - protein, 105 aa, Setaria italica
  Transcript Sequence Number=SeqID_58931
  Gene Ontology: Mol. function=phosphoinositide binding; Biological process=cell communication
  Homolog annotation: Hit_ID=Q9XI44; Match level="QueryCoverage=79%, HitCoverage=8%, E-value=3e-17, Identity=46%"; Hit description =F9L1.19 protein
FLVCILYYCLISFGNFYSIFLFKPSIGKEKFVNLPSEHRDAELKMALLAENKLHPALFSANAEYRVLQSLADGLISITVKPQDLQCTFFRCTARELLACAVLRPV

SEQ ID NO: 124906 - protein, 79 aa, Setaria italica
  misc_feature (51)..(51): Xaa can be any naturally occurring amino acid
  Transcript Sequence Number=SeqID_58932
  Gene Ontology: Mol. function=phosphoinositide binding; Biological process=cell communication
  Homolog annotation: Hit_ID=Q9XI44; Match level="QueryCoverage=98%, HitCoverage=9%, E-value=2e-15, Identity=43%"; Hit description =F9L1.19 protein
SLELYHFCQAKIGKEKFVNLPSEHRDAELKMALLAENKLHPALFSANAEYXVKPQDLQCTFFRCTARELLACAVLRPVM

SEQ ID NO: 124907 - protein, 57 aa, Setaria italica
  Transcript Sequence Number=SeqID_58933
LMYFFNVMDYELCHAKIRLFVVACSLLFIQATTVVSGVTFTEFVVLVPKCQNVMLTM

SEQ ID NO: 124908 - protein, 146 aa, Setaria italica
  Transcript Sequence Number=SeqID_58934
  Gene Ontology: Mol. function=actin binding; Cellular component =cytoskeleton; Biological process=cytoskeleton organization and biogenesis
  Homolog annotation: Hit_ID=Q7Y0V3; Match level="QueryCoverage=88%, HitCoverage=13%, E-value=7e-50, Identity=69%"; Hit description=Actin filament bundling protein P-115-ABP
EGNRPKSHIIRLMEGFETVIFRSKFDKWPKKADAVVSDESRGKVAALLKRQGFNFKSPVKAAPVKQEPQPQIDCTGNLQVWRVNGSEKTFLSFSEQCKFYSGDCYIFQYTYPGDNGDECLIGTWFGKKSVQVTVLCIFHLFLCLFH

SEQ ID NO: 124909 - protein, 124 aa, Setaria italica
  Transcript Sequence Number=SeqID_58935
  Gene Ontology: Mol. function=actin binding; Cellular component =cytoskeleton; Biological process=cytoskeleton organization and biogenesis
  Homolog annotation: Hit_ID=B9T554; Match level="QueryCoverage=91%, HitCoverage=58%, E-value=3e-24, Identity=47%"; Hit description =Villin 1-4, putative
DLSGTLDLPRTASIAAISSSFERPKATLIPKSIKASPDASKPQTEASKPNPETNAKESNPTKDSQIATPAVQEDVKESQAEGEEGLPVYPYDRLRTSSTNPATDIDVTKREAYLSSSEFREGLE

SEQ ID NO: 124910 - protein, 82 aa, Setaria italica
  Transcript Sequence Number=SeqID_58936
  Gene Ontology: Mol. function=actin binding; Cellular component =cytoskeleton; Biological process=cytoskeleton organization and biogenesis
  Homolog annotation: Hit_ID=A2Q391; Match level="QueryCoverage=93%, HitCoverage=7%, E-value=9e-17, Identity=58%"; Hit description=Villin headpiece; Gelsolin region
AIWKLLGVKSEYSSQKIVRDQESDPHLFACTFSKGVLKVRESDPHLFACTFSKGVLKVREIFNFTQDDLMTEDIFVLDCQPI

SEQ ID NO: 124911 - protein, 89 aa, Setaria italica
  misc_feature (27)..(27): Xaa can be any naturally occurring amino acid
  Transcript Sequence Number=SeqID_58937
  Gene Ontology: Mol. function=actin binding; Cellular component =cytoskeleton; Biological process=cytoskeleton organization and biogenesis
  Homolog annotation: Hit_ID=O65570; Match level="QueryCoverage=96%, HitCoverage=8%, E-value=4e-30, Identity=75%"; Hit description=Villin- 4
  Pfam annotation: Domain name=Gelsolin; Domain location=1-86; Score =41.8; E_value=2.6e-09; Accession=PF00626.14; Description=Gelsolin repeat
VPQRKHMGNFSTGDSYIILKLFDSLNXTTALKNGSFRQDIHYWLGKDTSQDEAGTAAIKTVELDAALGGRAVQYREVQGNETEKFLSLF

SEQ ID NO: 124912 - protein, 58 aa, Setaria italica
  Transcript Sequence Number=SeqID_58938
DLSGTLDLPRTASIAAISSSFERPKATLIPKSIKASPDASKPQTEASKPNPETNAKGK

SEQ ID NO: 124913 - protein, 67 aa, Setaria italica
  misc_feature (32)..(32): Xaa can be any naturally occurring amino acid
  Transcript Sequence Number=SeqID_58939
LALVVVLRAVAGADELVLGAVPPAPQYNNQGXVVRGPAPLSLALVHADVDDGKVLKSVSTHGTKRTL

SEQ ID NO: 124914 - protein, 60 aa, Setaria italica
  Transcript Sequence Number=SeqID_58940
INSLTPCLQTVSYSVLCTYVIVWRHGVSETRTPLFLISAYTTFLIEDSKICWNGMMTIFC

SEQ ID NO: 124915 - protein, 88 aa, Setaria italica
  misc_feature (1)..(53): Xaa can be any naturally occurring amino acid
  Transcript Sequence Number=SeqID_58941
XXXXXXXXXXXXXXXXXXXXXXXXXXXXXXXXXXXXXXXXXXXXXXXXXXXXXVRNRGVLVSYSVLCTYVIVWRHGVSSRMGNSSISS

SEQ ID NO: 124916 - protein, 74 aa, Setaria italica
  Transcript Sequence Number=SeqID_58942
SITLAAVIQQMSELLFKKRDPCSMVSANKPVPTPIPTPTPMDKHQIKPPPTPALMDKQTIKPIPTPTLTDRQQK

SEQ ID NO: 124917 - protein, 65 aa, Setaria italica
  Transcript Sequence Number=SeqID_58943
  Gene Ontology: Biological process=cell division
  Homolog annotation: Hit_ID=Q0E474; Match level="QueryCoverage=84%, HitCoverage=12%, E-value=5e-19, Identity=83%"; Hit description =Cyclin-T1-1
AGSTHTCRLPTTLVVQFKPHFIAAGSLFHAAKFHNFVLPSQNGKVWWNEFDVAPKQLQAVIQQMS

SEQ ID NO: 124918 - protein, 34 aa, Setaria italica
  Transcript Sequence Number=SeqID_58944
SFFLNVVFTTTISFDFNTISSRIRELAFLNPEVL

SEQ ID NO: 124919 - protein, 89 aa, Setaria italica
  misc_feature (9)..(9): Xaa can be any naturally occurring amino acid
  Transcript Sequence Number=SeqID_58945
SLAVTPEVXPGAMEARRADHESLRLTDAMSSSSSRTRTVMPNFRGESPCHLLHLLYEYFRPADRRRRSRSGQPNCSRTAAVAHVAVPVV

SEQ ID NO: 124920 - protein, 82 aa, Setaria italica
  misc_feature (23)..(23): Xaa can be any naturally occurring amino acid
  Transcript Sequence Number=SeqID_58946
AAADGYFVLSCFELAGSNTGGDXGGHGSQESRPREFEAYRRDVIFLLENQVPLFVLEDIHRLVVTYGENNNSSVVVQGIASH

SEQ ID NO: 124921 - protein, 103 aa, Setaria italica
  misc_feature (23)..(23): Xaa can be any naturally occurring amino acid
  misc_feature (81)..(81): Xaa can be any naturally occurring amino acid
  Transcript Sequence Number=SeqID_58947
  Homolog annotation: Hit_ID=B4FW40; Match level="QueryCoverage=92%, HitCoverage=20%, E-value=1e-25, Identity=69%"; Hit description =Membrane related protein-like
  Subcellular localization annotation: CTP_CleavageSite=63; ConfidenceScore=5.51e-01
MNASLPASQTTAATVVPSTRTSXPGSLHGDVRVEGTTPCKLPGKKSSRQMIASGLLLVGSIVCLSRGRSNLGAQLAMALFXKKAFKQERESGSSTSRGKTNVD

SEQ ID NO: 124922 - protein, 74 aa, Setaria italica
  Transcript Sequence Number=SeqID_58948
  Gene Ontology: Mol. function=protein transporter activity; Cellular component=nuclear pore; Biological process=protein import into nucleus, docking
MCNRAVGSFIEYVNDGGDIVKMFRDFVPSILNVSRQCLANGEEDVASIAFEIFDELIESPAPLLGDSVRSIVQF

SEQ ID NO: 124923 - protein, 53 aa, Setaria italica
  Transcript Sequence Number=SeqID_58949
LSPVCLAYPLLRVSVAVAVMQLPCYVVFRLVIKLKHHLLAKWFPGSFVRLRGY

SEQ ID NO: 124924 - protein, 85 aa, Setaria italica
  misc_feature (19)..(19): Xaa can be any naturally occurring amino acid
  Transcript Sequence Number=SeqID_58950
  Subcellular localization annotation: CTP_CleavageSite=54; ConfidenceScore=5.37e-01
PRLLDVASMLINSRGAKAXPFSGFASHTPAHLNKAADLAAAARSNPTTPQSPTAASPVKGRRLSFLLHSVSSFDRTGEPVACSAN

SEQ ID NO: 124925 - protein, 75 aa, Setaria italica
  Transcript Sequence Number=SeqID_58951
  Gene Ontology: Mol. function=ATP-dependent DNA helicase activity; Cellular component=DNA-dependent protein kinase complex; Biological process=double-strand break repair via nonhomologous end joining
  Homolog annotation: Hit_ID=Q7F1L9; Match level="QueryCoverage=100%, HitCoverage=22%, E-value=3e-31, Identity=85%"; Hit description =Putative DNA-dependent protein kinase 70 kDa DNA-binding subunit Ku70
PATTQADEKQETHFHTIVNCITQSLKTQIIGRSYDEVAICFFNTKEKKNLQDLAGVYVYNVGDRDPLDRPTAKLI

SEQ ID NO: 124926 - protein, 43 aa, Setaria italica
  Transcript Sequence Number=SeqID_58952
  Gene Ontology: Mol. function=peptidyl-prolyl cis-trans isomerase activity; Cellular component=endoplasmic reticulum lumen; Biological process=protein folding
  Homolog annotation: Hit_ID=B6SYF5; Match level="QueryCoverage=95%, HitCoverage=27%, E-value=1e-12, Identity=90%"; Hit description=FK506- binding protein 2-1
GKLKIPSKLGYGPQGSPPTIPGGATLIFDTELVAVNGGASQQI

SEQ ID NO: 124927 - protein, 65 aa, Setaria italica
  misc_feature (17)..(17): Xaa can be any naturally occurring amino acid
  Transcript Sequence Number=SeqID_58953
  Gene Ontology: Mol. function=sequence-specific DNA binding; Cellular component=nucleus
  Homolog annotation: Hit_ID=Q2QYJ4; Match level="QueryCoverage=92%, HitCoverage=12%, E-value=1e-19, Identity=83%"; Hit description =Retrotransposon protein, putative, Ty1-copia subclass
NQLMLSQENRFAFTMEXVAEEANAYLEKNRHEYGLKKPILHVLSDRMNEAEFSEHFLTEYIAENS

SEQ ID NO: 124928 - protein, 116 aa, Setaria italica
  misc_feature (66)..(66): Xaa can be any naturally occurring amino acid
  Transcript Sequence Number=SeqID_58954
  Gene Ontology: Mol. function=binding; Cellular component=integral to membrane; Biological process=transport
MDIGDDNYSSQTRSTPAELCTSSNEEAKTAHDCESSLRDTESNLEIFHDDPNRSASSVHQIEIAKXGRIMLGNQISTNADQYAYGDDMSLQHSVDKWSHEHQPTFEHRCDGAVTIN

SEQ ID NO: 124929 - protein, 79 aa, Setaria italica
  Transcript Sequence Number=SeqID_58955
KDKQIKLLQGTDFLIDAAVSEVVGFELTGGSPGTSCFYLPRPELVQYQEQNAVVVHEMMAGAGANFPSDYLLEVQGKLA

SEQ ID NO: 124930 - protein, 126 aa, Setaria italica
  Transcript Sequence Number=SeqID_58956
  Gene Ontology: Mol. function=nucleic acid binding
LSIHLGQLSGRPRVDEGQAVQPALAGFPTNQTAAAQVQPSVKPDIMATLAKLMPSVQSSPLIANLQQPGQQFSRQVSAAHLTNYGSMVGAQEHSTQHTAYNPEVALNLPPPPPIPTPTHSSTTTLP

SEQ ID NO: 124931 - protein, 71 aa, Setaria italica
  misc_feature (61)..(61): Xaa can be any naturally occurring amino acid
  Transcript Sequence Number=SeqID_58957
  Gene Ontology: Mol. function=nucleic acid binding
  Subcellular localization annotation: CTP_CleavageSite=48; ConfidenceScore=5.10e-01
TDRPSQMHGLSMLSKVWNPENQSTTSNLSFGQIANLQQPGQQFSMQVSAAHLTNYGSMVGXQEHSTQHTAY

SEQ ID NO: 124932 - protein, 117 aa, Setaria italica
  misc_feature (8)..(8): Xaa can be any naturally occurring amino acid
  Transcript Sequence Number=SeqID_58958
  Gene Ontology: Mol. function=nucleic acid binding
  Homolog annotation: Hit_ID=Q52ZH7; Match level="QueryCoverage=55%, HitCoverage=11%, E-value=3e-11, Identity=50%"; Hit description=FPA (Fragment)
ESFDPREXKRMRLDAGADPYEVRAGSTSLYSAGIRHRDSSVHAEGSSSPAIRVRGTVHRTSYLEHFWRGSISKGGSPVCHARCLPITKGSDIPLPDVINCSARNGNWNNRLGQKTTK

SEQ ID NO: 124933 - protein, 67 aa, Setaria italica
  Transcript Sequence Number=SeqID_58959
  Gene Ontology: Biological process=protein localization
  Homolog annotation: Hit_ID=Q6K796; Match level="QueryCoverage=98%, HitCoverage=1%, E-value=2e-29, Identity=85%"; Hit description =Vacuolar protein sorting 13C protein-like
FGDCITEGFEPPTLGILFKCDTVVSERPVQFTRVAQIDRKGLDEIFFWYPVPPPGYASLGCIVTKTD

SEQ ID NO: 124934 - protein, 74 aa, Setaria italica
  misc_feature (18)..(18): Xaa can be any naturally occurring amino acid
  Transcript Sequence Number=SeqID_58960
  Gene Ontology: Cellular component=extracellular region
  Homolog annotation: Hit_ID=B6UAK6; Match level="QueryCoverage=67%, HitCoverage=17%, E-value=1e-11, Identity=80%"; Hit description =Expansin-like 3
TDRARTNRTDLVLSSPAXFAAMARPGMAARLAKRRTVDVEYKRWVGKVKHNPGDEINRLFFLSFFLSFTNRCTM

SEQ ID NO: 124935 - protein, 79 aa, Setaria italica
  Transcript Sequence Number=SeqID_58961
  Gene Ontology: Mol. function=RNA binding; Cellular component =ribonucleoprotein complex; Biological process=mRNA processing
  Homolog annotation: Hit_ID=Q0J7J7; Match level="QueryCoverage=91%, HitCoverage=19%, E-value=5e-36, Identity=95%"; Hit description=CRS2 -associated factor 2, mitochondrial
  Pfam annotation: Domain name=CRS1_YhbY; Domain location=6-78; Score =54.5; E_value=4.2e-13; Accession=PF01985.13; Description=CRS1  YhbY domain
VLGEPLSEEEVAELVERYRHSDCSRQINLGKGGVTHNMLDDIHNHWKRAEAVRIKCLGVPTLDMDNICFHLEVAKSYTA

SEQ ID NO: 124936 - protein, 46 aa, Setaria italica
  Transcript Sequence Number=SeqID_58962
  Pfam annotation: Domain name=SPOUT_MTase; Domain location=1-45; Score= -63.0; E_value=0.0037; Accession=PF02590.9; Description=Predicted SPOUT methyltransferase
GLQVRKRADATIRLSSLVLNHQVALVVLMEQLYRAWTIIKGQKYHH

SEQ ID NO: 124937 - protein, 74 aa, Setaria italica
  Transcript Sequence Number=SeqID_58963
KYHDSWCIFLKTQHKYLDVTIYEFFSQSNAMMHKPKRNPYRAQVKENENHVSQSIAPAVRLSVDTIMCDVNFLD

SEQ ID NO: 124938 - protein, 58 aa, Setaria italica
  Transcript Sequence Number=SeqID_58964
  Gene Ontology: Mol. function=acid phosphatase activity
  Homolog annotation: Hit_ID=B6TV54; Match level="QueryCoverage=81%, HitCoverage=15%, E-value=2e-15, Identity=85%"; Hit description=Acid phosphatase 1
RWVERGEALAIPSSLKLYNEVRELGFKTFLLTGRSEGHLDITAENLKKPDPPRNEMIR

SEQ ID NO: 124939 - protein, 68 aa, Setaria italica
  misc_feature (24)..(24): Xaa can be any naturally occurring amino acid
  Transcript Sequence Number=SeqID_58965
  Gene Ontology: Cellular component=chromosome, centromeric region; Biological process=mitosis
  Homolog annotation: Hit_ID=Q7XAE6; Match level="QueryCoverage=47%, HitCoverage=4%, E-value=3e-10, Identity=93%"; Hit description=S3 self-incompatibility locus-linked pollen 3.15 protein
TTRSYKIWSVRTSISMQFFPRFFXLLYFLVFHIYFFSYTYGFSYLAFSATAAFMQHLILYFWNRFEVP

SEQ ID NO: 124940 - protein, 56 aa, Setaria italica
  Transcript Sequence Number=SeqID_58966
  Gene Ontology: Cellular component=chromosome, centromeric region; Biological process=mitosis
  Homolog annotation: Hit_ID=B9SU78; Match level="QueryCoverage=85%, HitCoverage=7%, E-value=1e-17, Identity=89%"; Hit description =Membralin, putative
NHAVSFTLRETQSRMLRFTVQLQHHARHQLPTFQLIFVHVIESLVFVPVMGKFFGV

SEQ ID NO: 124941 - protein, 57 aa, Setaria italica
  Transcript Sequence Number=SeqID_58967
ITAGQAPTVSTIRLHPTFIFMILCHMIIFISRWISVNLCSYCILRYYSSCNIEKKET

SEQ ID NO: 124942 - protein, 123 aa, Setaria italica
  Transcript Sequence Number=SeqID_58968
TGVQITSSTIYTSTLHIARVNVRDPGTINDGLGAVREADALLVQDESTRNQQEGQQNGIAEPAANNALQYQEQNPQQAGNTPAGSGSLNPFGSLLLLVCLGRSVVFLVLVLFSFSFSFLSYCF

SEQ ID NO: 124943 - protein, 54 aa, Setaria italica
  Transcript Sequence Number=SeqID_58969
  Gene Ontology: Mol. function=hydrolase activity
  Homolog annotation: Hit_ID=B6TJ32; Match level="QueryCoverage=72%, HitCoverage=11%, E-value=5e-12, Identity=84%"; Hit description =Catalytic/ hydrolase
FAPCRQLGEKTMLQSIRKAGHLVHLERPCIYNRCLKEFLASVMAAAAPRCLPPA

SEQ ID NO: 124944 - protein, 37 aa, Setaria italica
  Transcript Sequence Number=SeqID_58970
ETRNARRTEMRNNAARGVQKSNNRNPIVRLRRRQVPK

SEQ ID NO: 124945 - protein, 100 aa, Setaria italica
  Transcript Sequence Number=SeqID_58971
  Gene Ontology: Mol. function=substrate-specific transmembrane transporter activity; Cellular component=integral to membrane; Biological process=transmembrane transport
  Homolog annotation: Hit_ID=B3GS76; Match level="QueryCoverage=93%, HitCoverage=17%, E-value=8e-34, Identity=80%"; Hit description =Hexose transporter
TSCTLQISPTEIRGTLGSVNQLFICIGILAALLAGLPLAGNPAWWRTMFGIAVVPSILLAVGMAFSPESPRWLFQQGKVIQAESAVKRLYGKEKVTEVYC

SEQ ID NO: 124946 - protein, 65 aa, Setaria italica
  Transcript Sequence Number=SeqID_58972
ISEISPTEIRGTLGSVNQLFICIGILAALLAGLPLAGNPAWFLFANSLTVLSTLGLPRCGTKLKI

SEQ ID NO: 124947 - protein, 43 aa, Setaria italica
  misc_feature (17)..(17): Xaa can be any naturally occurring amino acid
  Transcript Sequence Number=SeqID_58973
VITVHICTYENPIMKDXRLYQLHFVYYCYILFSSGNCHSVYIT

SEQ ID NO: 124948 - protein, 41 aa, Setaria italica
  Transcript Sequence Number=SeqID_58974
SLWNSFLISQDGQQALPTYISESLPSVFLCRYPTSLSACTS

SEQ ID NO: 124949 - protein, 90 aa, Setaria italica
  misc_feature (70)..(70): Xaa can be any naturally occurring amino acid
  misc_feature (82)..(82): Xaa can be any naturally occurring amino acid
  Transcript Sequence Number=SeqID_58975
  Pfam annotation: Domain name=DUF594; Domain location=49-90; Score =0.4; E_value=0.0021; Accession=PF04578.5; Description=Protein of unknown function, DUF594
RTPIPEILLSALILSNHPPQSQGTVRAPNPHGDSIRDSANMYAILLANELLSIELRWQEQRDPLELILGXVWVELLLYAANXCSQESHAR

SEQ ID NO: 124950 - protein, 78 aa, Setaria italica
  Transcript Sequence Number=SeqID_58976
  Pfam annotation: Domain name=DUF594; Domain location=45-78; Score= -6.4; E_value=0.012; Accession=PF04578.5; Description=Protein of unknown function, DUF594
PRREKLAEMAWSFSQFALGTVRAPNPHGDSIRDSANMYAILLANELLSIELRWQEQRDPLELILGVWVELLLYAANHC

SEQ ID NO: 124951 - protein, 113 aa, Setaria italica
  Transcript Sequence Number=SeqID_58977
QDFNTRIILAVKSDDHGCRSQSMSVCATKCLPTSFSFQGLKDKNDTDDDNKESPTPSRLQKLLHSISFNDRMQQLTGGSPAKKKSTVIRLSYKTTACDGCEDSSELGKSSVCS

SEQ ID NO: 124952 - protein, 108 aa, Setaria italica
  Transcript Sequence Number=SeqID_58978
  Subcellular localization annotation: CTP_CleavageSite=30; ConfidenceScore=5.32e-01
EVPTATRIHSSDGILGAQATRRPGSTQPPSSTAVQGPPVRWNQVLLALTNQSPWWRSRLDDLEFCTHDVAGRWCHLQELGTCFFLKTFLLIPRYPSKQLHCKGNHCMC

SEQ ID NO: 124953 - protein, 84 aa, Setaria italica
  Transcript Sequence Number=SeqID_58979
STMATDSSMLAAPDSSEPVVPGRRCSMEAGWIPAAASPERRGSRRYCGSWSPWTPRRGSRPSWTPRRGSRGCRGSRRPHPGTGD

SEQ ID NO: 124954 - protein, 55 aa, Setaria italica
  Transcript Sequence Number=SeqID_58980
  Homolog annotation: Hit_ID=B9SAK9; Match level="QueryCoverage=100%, HitCoverage=15%, E-value=9e-11, Identity=58%"; Hit description=Zinc finger protein, putative
PERVHPFSKGICRNLYDFCCSSQKGYILEALPPAEDLEARAARYTCRDVICCRCC

SEQ ID NO: 124955 - protein, 39 aa, Setaria italica
  Transcript Sequence Number=SeqID_58981
KKGHRELQMNSEQLDLRAYIFTQKMCALRSSCSEHTFSE

SEQ ID NO: 124956 - protein, 61 aa, Setaria italica
  misc_feature (25)..(25): Xaa can be any naturally occurring amino acid
  misc_feature (37)..(37): Xaa can be any naturally occurring amino acid
  Transcript Sequence Number=SeqID_58982
  Gene Ontology: Mol. function=metal ion binding
  Homolog annotation: Hit_ID=B9SAK9; Match level="QueryCoverage=100%, HitCoverage=17%, E-value=4e-11, Identity=55%"; Hit description=Zinc finger protein, putative
YLRGVPERVHPFSKGICRNLYDFCXSQGQKGYILEAXPPAEDLEARAARYTCRDVICCRCC

SEQ ID NO: 124957 - protein, 72 aa, Setaria italica
  Transcript Sequence Number=SeqID_58983
PIARSFSIPSRRTSGISDGKETDERQDKGAARMSLSSLPSAQTFLEDREPLSAAAESVSKNIGEFSLPVYVL

SEQ ID NO: 124958 - protein, 81 aa, Setaria italica
  Transcript Sequence Number=SeqID_58984
RAENVLEKKIGVDEHCTHLPLQVDLKFRSRFCFSVGSIYKAPPLFIDTTLTSEESRGAIRSGTGERMDDKGRCKLGWGGRR

SEQ ID NO: 124959 - protein, 57 aa, Setaria italica
  misc_feature (7)..(7): Xaa can be any naturally occurring amino acid
  Transcript Sequence Number=SeqID_58985
  Gene Ontology: Mol. function=mannosyl-oligosaccharide 1,2-alpha -mannosidase activity; Cellular component=membrane
  Homolog annotation: Hit_ID=B9RB79; Match level="QueryCoverage=70%, HitCoverage=6%, E-value=9e-12, Identity=85%"; Hit description =Mannosyl-oligosaccharide 1,2-alpha-mannosidase IA, putative
GVLPERXYLLDYGVLHPTEKYYPLRPEFAESTFYLYQATKGVPDRPQIDIYISFAYV

SEQ ID NO: 124960 - protein, 39 aa, Setaria italica
  Transcript Sequence Number=SeqID_58986
  Gene Ontology: Mol. function=mannosyl-oligosaccharide 1,2-alpha -mannosidase activity; Cellular component=membrane
  Homolog annotation: Hit_ID=B9RB79; Match level="QueryCoverage=92%, HitCoverage=6%, E-value=4e-09, Identity=58%"; Hit description =Mannosyl-oligosaccharide 1,2-alpha-mannosidase IA, putative
YVYASHRCRTDDDCGTEAVTCKKRTCSMAGYCGLWLVIY

SEQ ID NO: 124961 - protein, 115 aa, Setaria italica
  Transcript Sequence Number=SeqID_58987
  Gene Ontology: Mol. function=mannosyl-oligosaccharide 1,2-alpha -mannosidase activity; Cellular component=membrane
  Homolog annotation: Hit_ID=B9RB79; Match level="QueryCoverage=75%, HitCoverage=15%, E-value=6e-34, Identity=77%"; Hit description =Mannosyl-oligosaccharide 1,2-alpha-mannosidase IA, putative
TEFERGILWLSENLTFDVDVRINLFECNIRLLGGLISAHLLAKDYSSQLKDEPYQDQLLHLAESLGNRFLPAFETPTGLPYAWINLKVHLRNFGFSQNSKKIAVCMIGSYTISAK

SEQ ID NO: 124962 - protein, 76 aa, Setaria italica
  Transcript Sequence Number=SeqID_58988
  Gene Ontology: Mol. function=mannosyl-oligosaccharide 1,2-alpha -mannosidase activity; Cellular component=membrane; Biological process=ER-associated protein catabolic process
  Homolog annotation: Hit_ID=B9RB79; Match level="QueryCoverage=92%, HitCoverage=12%, E-value=6e-30, Identity=84%"; Hit description =Mannosyl-oligosaccharide 1,2-alpha-mannosidase IA, putative
FLVTFAGVDSFYEYLIKAYILFGSDEYWDMFHSAYLAVQKYFRHGPWYHEADMRTGEATHWQLTSLQAFWPGLQVC

SEQ ID NO: 124963 - protein, 47 aa, Setaria italica
  misc_feature (37)..(37): Xaa can be any naturally occurring amino acid
  misc_feature (46)..(46): Xaa can be any naturally occurring amino acid
  Transcript Sequence Number=SeqID_58989
  Gene Ontology: Mol. function=mannosyl-oligosaccharide 1,2-alpha -mannosidase activity; Cellular component=membrane
  Homolog annotation: Hit_ID=B9RB79; Match level="QueryCoverage=91%, HitCoverage=7%, E-value=6e-12, Identity=60%"; Hit description =Mannosyl-oligosaccharide 1,2-alpha-mannosidase IA, putative
APQWESACHVPDVYASHRCRTDDDCGTEAVTCKKRTXSMAGYCGLXL

SEQ ID NO: 124964 - protein, 73 aa, Setaria italica
  Transcript Sequence Number=SeqID_58990
EVNNKATVMISTLVGDGVHERIILPEFPYLTDENGDIYFEVDNEDALLESIMGEDKIAVTTLFIPLLPVSLSV

SEQ ID NO: 124965 - protein, 56 aa, Setaria italica
  Transcript Sequence Number=SeqID_58991
FDVIIHLVGNQLSHRITSRLMSSLWRLPFLMCIPRKQKLMYYHIELHQDLCRACGD

SEQ ID NO: 124966 - protein, 50 aa, Setaria italica
  Transcript Sequence Number=SeqID_58992
SGRRLRSTWDGVHMTEAMYKVVAGMFFHAGDAYCRPAFSDLLARKAQGKP

SEQ ID NO: 124967 - protein, 95 aa, Setaria italica
  Transcript Sequence Number=SeqID_58993
  Gene Ontology: Mol. function=hydrolase activity, acting on ester bonds; Biological process=lipid metabolic process
RLLRRPPRRHAQLVECRQEAAVVRVALPVDGGDAADVVAVVGDALFWVGEIGANDYAYTVIARDTIPTKLVRTMAVQRITTFVEGLLERGAKYVM

SEQ ID NO: 124968 - protein, 55 aa, Setaria italica
  Transcript Sequence Number=SeqID_58994
HLDLFSSLFSFFFFLLLSRVKPSSYVYNSWLSPTISITWRCNPKAMGIPKIETDD

SEQ ID NO: 124969 - protein, 59 aa, Setaria italica
  Transcript Sequence Number=SeqID_58995
  Gene Ontology: Mol. function=hydrolase activity, acting on ester bonds; Cellular component=cellular_component; Biological process =lipid metabolic process
RRYYPSGNVRTVGVLYSFGYVSSPPYGATFFHRSTNRYSDGRLVVDFLAEALNLPSFLP

SEQ ID NO: 124970 - protein, 48 aa, Setaria italica
  Transcript Sequence Number=SeqID_58996
CCSPAVVAPHVKNAPRIHAKIPSDSINRETVITCKLGLFPFYCHLCKL

SEQ ID NO: 124971 - protein, 52 aa, Setaria italica
  Transcript Sequence Number=SeqID_58997
  Gene Ontology: Mol. function=unfolded protein binding; Cellular component=cytoplasm; Biological process=cellular protein metabolic process
  Homolog annotation: Hit_ID=A2Q201; Match level="QueryCoverage=94%, HitCoverage=12%, E-value=9e-17, Identity=87%"; Hit description=GroEL- like chaperone, ATPase (Fragment)
SMIELSRTQDEEVGDGTTSVIVLGISGEMLHVAQAFIDKNYHPTVICRGKIH

SEQ ID NO: 124972 - protein, 127 aa, Setaria italica
  misc_feature (60)..(60): Xaa can be any naturally occurring amino acid
  Transcript Sequence Number=SeqID_58998
  Gene Ontology: Mol. function=unfolded protein binding; Cellular component=chaperonin-containing T-complex; Biological process =cellular protein metabolic process
  Homolog annotation: Hit_ID=O81503; Match level="QueryCoverage=96%, HitCoverage=20%, E-value=2e-47, Identity=79%"; Hit description =F9D12.18 protein
APLVQKFTGQFGDLIAFMDFLTLCCFAQDLAIDATTTAGVDLGQGMREVDIKKYIKVEKXVPGGQLEDSRVLKGVMINKDVVAPGKMRRKIVNPRIILLDSPIEYKKGENQTNAELMKEEDWQVLLE

SEQ ID NO: 124973 - protein, 86 aa, Setaria italica
  Transcript Sequence Number=SeqID_58999
  Gene Ontology: Mol. function=unfolded protein binding; Cellular component=cytoplasm; Biological process=cellular protein metabolic process
  Homolog annotation: Hit_ID=O81503; Match level="QueryCoverage=87%, HitCoverage=13%, E-value=4e-26, Identity=80%"; Hit description =F9D12.18 protein
QLKGVEKWPYEAAALAFEAIPRTLAQNCGLNIIRTMTQLQGKHANGENAWVGLDGRSGEIVDMKERKIWDSYSVKATRTLQRTRLI

SEQ ID NO: 124974 - protein, 67 aa, Setaria italica
  misc_feature (2)..(2): Xaa can be any naturally occurring amino acid
  Transcript Sequence Number=SeqID_59000
  Gene Ontology: Mol. function=unfolded protein binding; Cellular component=cytoplasm; Biological process=cellular protein metabolic process
  Homolog annotation: Hit_ID=B2BGS7; Match level="QueryCoverage=89%, HitCoverage=61%, E-value=7e-25, Identity=88%"; Hit description =Putative ATP binding chaperonin (Fragment)
VXGASKDVLNEVERNLQDAMSVARNILKNPKLLPGGGATELTVSAALKQKSSSVEGVEKWPYEAARL

SEQ ID NO: 124975 - protein, 72 aa, Setaria italica
  misc_feature (46)..(46): Xaa can be any naturally occurring amino acid
  Transcript Sequence Number=SeqID_59001
  Gene Ontology: Mol. function=unfolded protein binding; Cellular component=plasma membrane; Biological process=cellular protein metabolic process
  Homolog annotation: Hit_ID=A2Q201; Match level="QueryCoverage=79%, HitCoverage=15%, E-value=2e-24, Identity=92%"; Hit description=GroEL- like chaperone, ATPase (Fragment)
LRKTDNNRIAKACGAVIVNRPEELQESDVGTGAGLFEVKKIGDEFXAFIVDCKDPKASCRFLSTSFKTSLLA

SEQ ID NO: 124976 - protein, 91 aa, Setaria italica
  Transcript Sequence Number=SeqID_59002
  Gene Ontology: Mol. function=hydrolase activity
  Homolog annotation: Hit_ID=B6TRY3; Match level="QueryCoverage=93%, HitCoverage=23%, E-value=3e-35, Identity=85%"; Hit description =Hydrolase
APFLRLQLMCVDQRKERAELLQELLKNGAGFDPLPVLTQETLIIWGDKDRVFPVDLGHRLHWHLGERSRLEIVKDAGHALQLEGAEHVNKF

SEQ ID NO: 124977 - protein, 83 aa, Setaria italica
  misc_feature (8)..(8): Xaa can be any naturally occurring amino acid
  misc_feature (52)..(52): Xaa can be any naturally occurring amino acid
  Transcript Sequence Number=SeqID_59003
  Gene Ontology: Cellular component=plasma membrane
KTAEQAPXTPSFVDQMLEADNGLGEVMKPPEKSFWAKYWMYIIPLGLIVMNXVTAAANIPEEQAAGQGQPGAQRAPAAAARRR

SEQ ID NO: 124978 - protein, 66 aa, Setaria italica
  Transcript Sequence Number=SeqID_59004
TTHRIQNGQIKSLYISKYRLHWLKLLPTNECSTAASKATMLMGNFSVQNGIRSPCYCTSCLLFILH

SEQ ID NO: 124979 - protein, 88 aa, Setaria italica
  misc_feature (44)..(44): Xaa can be any naturally occurring amino acid
  Transcript Sequence Number=SeqID_59005
LTAAAFQSDELVLNDDEEFEGVGARSSSPSQPAAPAVSSSRCRXASNALQFTLEHDLGVGKGFTPAGTFSARLKTSAHGTQTLTKLRF

SEQ ID NO: 124980 - protein, 43 aa, Setaria italica
  Transcript Sequence Number=SeqID_59006
TTHRIQNGQIKSLYISKYRLHWLKLLPTNECSTAASKATMLMG

SEQ ID NO: 124981 - protein, 78 aa, Setaria italica
  Transcript Sequence Number=SeqID_59007
SDHEYDNGDTMQLKDAASAARAAAESAERAASAANAPADFANKNNHPFDEVEDCKDSAHEYTHPRKRQSMSNSSRPSR

SEQ ID NO: 124982 - protein, 68 aa, Setaria italica
  Transcript Sequence Number=SeqID_59008
  Gene Ontology: Mol. function=protein binding; Cellular component =chromosome; Biological process=chromosome organization and biogenesis
  Homolog annotation: Hit_ID=Q6Z6I3; Match level="QueryCoverage=86%, HitCoverage=4%, E-value=8e-16, Identity=72%"; Hit description =Putative SMC3 protein
KLEAIISSADSRTLPLEAESKEQELKSSKRNLDELTSLLKANVDAINNFTRKMDDLKRKGMILVSTSL

SEQ ID NO: 124983 - protein, 80 aa, Setaria italica
  Transcript Sequence Number=SeqID_59009
  Gene Ontology: Mol. function=protein binding; Cellular component =chromosome; Biological process=chromosome organization and biogenesis
  Homolog annotation: Hit_ID=Q6Z6I3; Match level="QueryCoverage=93%, HitCoverage=6%, E-value=4e-25, Identity=80%"; Hit description =Putative SMC3 protein
LPIHIDKKITDLVTRQQQMDAERDHAKSELEQIKVDITSAMKQKGSLEKALGKKEKSLENIRNQIEQIQSSIAMKNDEMG

SEQ ID NO: 124984 - protein, 54 aa, Setaria italica
  Transcript Sequence Number=SeqID_59010
  Gene Ontology: Mol. function=protein binding; Cellular component =chromosome; Biological process=chromosome organization and biogenesis
  Homolog annotation: Hit_ID=Q6Z6I3; Match level="QueryCoverage=98%, HitCoverage=4%, E-value=2e-21, Identity=92%"; Hit description =Putative SMC3 protein
ADTQFIATTFRPEIAKVADKIYGVTHKNRVSYINVVSKEQALDFIEHDQTHNAS

SEQ ID NO: 124985 - protein, 44 aa, Setaria italica
  Transcript Sequence Number=SeqID_59011
DETDDSYSTLSTSASALSVEASAGIVSLIMLNEVLLFPPFPSPP

SEQ ID NO: 124986 - protein, 56 aa, Setaria italica
  Transcript Sequence Number=SeqID_59012
  Gene Ontology: Mol. function=protein binding; Cellular component =chromosome; Biological process=chromosome organization and biogenesis
  Homolog annotation: Hit_ID=A9U123; Match level="QueryCoverage=85%, HitCoverage=4%, E-value=3e-21, Identity=95%"; Hit description =Condensin complex component SMC3
QLSGGQKTVVALTLIFAIQRCDPAPFYLFDEIDAALDPQYRTAVGNVVAMNWVSAT

SEQ ID NO: 124987 - protein, 81 aa, Setaria italica
  Transcript Sequence Number=SeqID_59013
  Gene Ontology: Mol. function=ATPase activity, coupled to transmembrane movement of ions, phosphorylative mechanism; Cellular component=integral to membrane; Biological process=phospholipid transport
  Homolog annotation: Hit_ID=B9HU80; Match level="QueryCoverage=86%, HitCoverage=5%, E-value=1e-24, Identity=74%"; Hit description =Aminophospholipid ATPase (Fragment)
VLPEGEETPEKISYQAASPDEAALVAAAKNFGFFFYRRTPTTVMVRESHVERMGSIQDVPYPSQQTSSFSGRTMLYTSRKV

SEQ ID NO: 124988 - protein, 83 aa, Setaria italica
  Transcript Sequence Number=SeqID_59014
  Gene Ontology: Mol. function=ATPase activity, coupled to transmembrane movement of ions, phosphorylative mechanism; Cellular component=integral to membrane; Biological process=phospholipid transport
  Homolog annotation: Hit_ID=Q9XIE6; Match level="QueryCoverage=85%, HitCoverage=5%, E-value=2e-23, Identity=77%"; Hit description =Phospholipid-transporting ATPase 3
PSPCLFVNFFFLSSLGLLKIWVLTGDKMETAINIAYACSLVNNDTKQFTISSETNAIREAEDRGDPVEIARVIKDSVKTSLKS

SEQ ID NO: 124989 - protein, 84 aa, Setaria italica
  Transcript Sequence Number=SeqID_59015
KMSSSSVQAQSEETCSYRALCSGWCRTSWSIIRHSALCAADFLPQGLFLYWEDVYIMSFFCGCITVLLTLVQESCSNRTNGPWM

SEQ ID NO: 124990 - protein, 54 aa, Setaria italica
  Transcript Sequence Number=SeqID_59016
GCLYNELLLWMHYRAAHSCAGVLFKQNQWPLDVSSTVMPSTKKLFYYWEDVYIM

SEQ ID NO: 124991 - protein, 87 aa, Setaria italica
  Transcript Sequence Number=SeqID_59017
  Homolog annotation: Hit_ID=Q01JT0; Match level="QueryCoverage=73%, HitCoverage=14%, E-value=3e-14, Identity=66%"; Hit description =OSIGBa0152L12.4 protein
TRVLTSPNCFTKEQVQEMINQALQGLNEAWEKKFLSLEQKMPSMSSSHIVPNGVKEPSLAVGRSKCCKLARQVITEFASCPAYICRP

SEQ ID NO: 124992 - protein, 84 aa, Setaria italica
  Transcript Sequence Number=SeqID_59018
  Subcellular localization annotation: CTP_CleavageSite=69; ConfidenceScore=5.46e-01
VMKVRPKDFQGDTTKKDTTSKTPLSPIQQAGLRFSPRRPLILQRASQQTPQRRDRSGGRTANPTPPTPRGGGDRGEIPLPTPPF

SEQ ID NO: 124993 - protein, 80 aa, Setaria italica
  Transcript Sequence Number=SeqID_59019
FVRNKPRLLCKLQCATPHMNKCKLQNGRIFFFIFHTLHECSNSTTNCTTSRDATADCYKTVRDSEMQKSVQRQAARTNRQ

SEQ ID NO: 124994 - protein, 80 aa, Setaria italica
  Transcript Sequence Number=SeqID_59020
  Homolog annotation: Hit_ID=B6TU29; Match level="QueryCoverage=97%, HitCoverage=20%, E-value=8e-27, Identity=78%"; Hit description =UBA/UBX 33.3 kDa protein
RIIDQLPLVSREINIECGDTATEVRNDVQGMRDSMQEQKPEERTETGRQNDTSQLEPELNADEQEEGDRKRILALYKTKK

SEQ ID NO: 124995 - protein, 66 aa, Setaria italica
  Transcript Sequence Number=SeqID_59021
  Homolog annotation: Hit_ID=B6TU29; Match level="QueryCoverage=81%, HitCoverage=12%, E-value=7e-10, Identity=68%"; Hit description =UBA/UBX 33.3 kDa protein
GRIRNQIQEDQRERIRAAKDLMEAKRTLEENQRKRMMESRIACRSRNRKNGLKLEDRMTHPSWNQN

SEQ ID NO: 124996 - protein, 79 aa, Setaria italica
  Transcript Sequence Number=SeqID_59022
  Gene Ontology: Mol. function=sodium:hydrogen antiporter activity; Cellular component=integral to membrane; Biological process=sodium ion transport
  Homolog annotation: Hit_ID=A7X9Z1; Match level="QueryCoverage=98%, HitCoverage=14%, E-value=9e-35, Identity=89%"; Hit description =Sodium/hydrogen exchanger
LMAYLSYMMAELLELSGILTVFFCGIVMSHYAWHNVTASSRITTKHIFATSSFIAETFIFLYVGMDALDIDKWKTSKAR

SEQ ID NO: 124997 - protein, 77 aa, Setaria italica
  Transcript Sequence Number=SeqID_59023
  Gene Ontology: Mol. function=substrate-specific transmembrane transporter activity; Cellular component=integral to membrane; Biological process=transmembrane transport
  Homolog annotation: Hit_ID=Q2R0P9; Match level="QueryCoverage=72%, HitCoverage=11%, E-value=4e-11, Identity=55%"; Hit description=Sugar transporter family protein
MATKPQAAITFLPSKYLGGDDFVQIFINVGTLLSYVSNYAFSGLPVHIGWRLMYGIGVVPPVFVAAAVFFMPESPRW

SEQ ID NO: 124998 - protein, 71 aa, Setaria italica
  Transcript Sequence Number=SeqID_59024
  Gene Ontology: Mol. function=substrate-specific transmembrane transporter activity; Cellular component=integral to membrane; Biological process=transmembrane transport
  Homolog annotation: Hit_ID=Q2R0P9; Match level="QueryCoverage=80%, HitCoverage=11%, E-value=1e-17, Identity=77%"; Hit description=Sugar transporter family protein
MAAMDMMLSVNVLVDLTLMSGAQLFIREDVGLTDAQIEVLAGSMNVFMLVSILGAGWVADRLGRRCVLVLA

SEQ ID NO: 124999 - protein, 78 aa, Setaria italica
  Transcript Sequence Number=SeqID_59025
  Gene Ontology: Mol. function=substrate-specific transmembrane transporter activity; Cellular component=integral to membrane; Biological process=transmembrane transport
  Homolog annotation: Hit_ID=Q2R0P9; Match level="QueryCoverage=96%, HitCoverage=15%, E-value=3e-22, Identity=75%"; Hit description=Sugar transporter family protein
  Subcellular localization annotation: CTP_CleavageSite=35; ConfidenceScore=5.16e-01
MAHADDTAAVPLLPSPTTTTKAGDEPPRRNMYAFGCATLASMTTILMGYNLALMSGAQLFIREDLGLSDAQIEVLAGS

SEQ ID NO: 125000 - protein, 78 aa, Setaria italica
  misc_feature (63)..(63): Xaa can be any naturally occurring amino acid
  Transcript Sequence Number=SeqID_59026
VEHFHRILVEHFTYVPLNASGTTNASYNHVDLFGQSLMDDLVDTTASTSSTVPNVGAASLPEXDLFANTDFQSANAPL

SEQ ID NO: 125001 - protein, 121 aa, Setaria italica
  Transcript Sequence Number=SeqID_59027
  Gene Ontology: Mol. function=nucleoside-triphosphatase activity; Cellular component=chloroplast; Biological process=transport
  Homolog annotation: Hit_ID=B4FT76; Match level="QueryCoverage=80%, HitCoverage=32%, E-value=5e-48, Identity=96%"; Hit description=ATP -dependent transporter ycf16
WFVLLVVLVGISILLCLGPFFIVVFQAPIEIPGVSNFDFLLMAVNARREKSGLPALGPLEFYSVVSPKIDALNMDPKFLDRNVNEGFSGGERKRNEILQLSVIGADLALLDEIDSGLDVDA

SEQ ID NO: 125002 - protein, 144 aa, Setaria italica
  misc_feature (13)..(13): Xaa can be any naturally occurring amino acid
  misc_feature (29)..(29): Xaa can be any naturally occurring amino acid
  Transcript Sequence Number=SeqID_59028
  Gene Ontology: Mol. function=protein serine/threonine kinase activity; Cellular component=cytoplasm; Biological process=protein amino acid phosphorylation
  Homolog annotation: Hit_ID=B6U0R4; Match level="QueryCoverage=99%, HitCoverage=33%, E-value=4e-74, Identity=90%"; Hit description =Casein kinase I isoform delta-like
KANQVYIIDFGLXKRYRDSTTNRHIPYRXNKNLTGTARYASCNTHLGIEQSRRDDLESLGYVLLYFIRGSLPWQGLKAATKTQKYDKICEKKISTPIEVLCKSCPVEFASYFHYCHSLTFDQRPDYAFVKRLFRDLFTREGYEV

SEQ ID NO: 125003 - protein, 55 aa, Setaria italica
  Transcript Sequence Number=SeqID_59029
QTSPQATSQYVLSHSIKHKLTFHGENTEGHNQEIPNHPCGFCFNPKVGVRQTLVL

SEQ ID NO: 125004 - protein, 120 aa, Setaria italica
  Transcript Sequence Number=SeqID_59030
  Gene Ontology: Mol. function=ARF guanyl-nucleotide exchange factor activity; Cellular component=intracellular; Biological process =regulation of ARF protein signal transduction
  Homolog annotation: Hit_ID=B9RDE3; Match level="QueryCoverage=99%, HitCoverage=6%, E-value=7e-55, Identity=89%"; Hit description =Cytohesin 1, 2, 3, putative
  Pfam annotation: Domain name=DUF1981; Domain location=4-89; Score =168.2; E_value=2.3e-47; Accession=PF09324.2; Description=Domain of unknown function (DUF1981)
QLSMKFLEREELANYNFQNEFMKPFVVVMRKSRAVEIRELIIRCVSQMVLARVNHVKSGWKSMFMVFATASYDDHKNIVLLAFEIIEKILREYFPYITETESTTFNDCVNCLIAFTNSKV

SEQ ID NO: 125005 - protein, 67 aa, Setaria italica
  Transcript Sequence Number=SeqID_59031
FYYLVLLSFYLFLPRTIISLDSAPDHGSTEVVESHLVGLCKEVLEVYLTTARPAQLSSGRQPLGHWL

SEQ ID NO: 125006 - protein, 60 aa, Setaria italica
  Transcript Sequence Number=SeqID_59032
  Gene Ontology: Mol. function=nucleic acid binding
  Homolog annotation: Hit_ID=Q7XNH0; Match level="QueryCoverage=81%, HitCoverage=5%, E-value=2e-09, Identity=61%"; Hit description =OSJNBa0096F01.3 protein
RILRGNHNNGAESTSELGQTFLEQGPDEQAISEAALNKLVGTAETFDLEVTIEARGIVCF

SEQ ID NO: 125007 - protein, 85 aa, Setaria italica
  misc_feature (11)..(11): Xaa can be any naturally occurring amino acid
  Transcript Sequence Number=SeqID_59033
  Gene Ontology: Mol. function=nucleic acid binding; Cellular component= chloroplast envelope; Biological process=response to DNA damage stimulus
  Homolog annotation: Hit_ID=Q7XNH0; Match level="QueryCoverage=100%, HitCoverage=7%, E-value=4e-37, Identity=83%"; Hit description =OSJNBa0096F01.3 protein
QAISEAALNKXVGTAETFDLEEAEPPSTLVSVLKPYQKQALFWMSKLEKGMDANEATKTLHPCWSAYNIADKRAPQVYVNIFTGQ

SEQ ID NO: 125008 - protein, 36 aa, Setaria italica
  Transcript Sequence Number=SeqID_59034
  Gene Ontology: Cellular component=plasma membrane
  Homolog annotation: Hit_ID=Q9SA62; Match level="QueryCoverage=75%, HitCoverage=1%, E-value=9e-10, Identity=88%"; Hit description =F10O3.10 protein
MAMSPSNPMRKYSWWWDSHISPKNSKWLLENLTDMD

SEQ ID NO: 125009 - protein, 82 aa, Setaria italica
  Transcript Sequence Number=SeqID_59035
  Gene Ontology: Mol. function=oxidoreductase activity; Biological process=oxidation reduction
  Homolog annotation: Hit_ID=B6TAU0; Match level="QueryCoverage=93%, HitCoverage=24%, E-value=3e-36, Identity=89%"; Hit description=NADP -dependent D-sorbitol-6-phosphate dehydrogenase
GKLRQTNEQYFLTRDCLAYAKIKPAVNQIETHPYFQRDSLVKFCQKHGICVTAHTPLGGSTANTEWFGSVSCLDDPVIKSFG

SEQ ID NO: 125010 - protein, 112 aa, Setaria italica
  Transcript Sequence Number=SeqID_59036
  Gene Ontology: Mol. function=nucleoside-triphosphatase activity; Cellular component=plasma membrane; Biological process=transport
  Homolog annotation: Hit_ID=B9N856; Match level="QueryCoverage=86%, HitCoverage=16%, E-value=8e-43, Identity=83%"; Hit description=ABC transporter family protein
GRTNNGLDLGLNGCGKSTLLTAIGCRELPIPEHMDIYHLSHEIEASDMSALQAVVSCDEERVQLEKEAEILAAQDDGGGEALDRVYERLDAMDAATAEKRAAEILFGLGFPN

SEQ ID NO: 125011 - protein, 119 aa, Setaria italica
  misc_feature (86)..(86): Xaa can be any naturally occurring amino acid
  Transcript Sequence Number=SeqID_59037
  Gene Ontology: Mol. function=nucleoside-triphosphatase activity; Cellular component=plasma membrane; Biological process=transport
  Homolog annotation: Hit_ID=B9N856; Match level="QueryCoverage=96%, HitCoverage=19%, E-value=3e-59, Identity=93%"; Hit description=ABC transporter family protein
VVLLKNFDRILVVISHSQDFLNGVCTNIIHMQNKKLKLYTGNYDQYVQTRSELEENQMKQYKWEQEQIASMKEYIARFGHGSAKLXRQAQSKEKTLAKMERGGLTEKVVRDKVLVFRFT

SEQ ID NO: 125012 - protein, 103 aa, Setaria italica
  misc_feature (44)..(44): Xaa can be any naturally occurring amino acid
  Transcript Sequence Number=SeqID_59038
  Gene Ontology: Mol. function=nucleoside-triphosphatase activity; Cellular component=plasma membrane; Biological process=transport
  Homolog annotation: Hit_ID=B9N856; Match level="QueryCoverage=95%, HitCoverage=16%, E-value=1e-41, Identity=79%"; Hit description=ABC transporter family protein
IGCRELPIPEHMDIYHLSHEIEASDMSALQAVVSCDEERVQLEXEAEILAAQDDGGGEALDRVYERLDAMDAATAEKRAAEILFGLGFSKQMQAKKTKGLLDS

SEQ ID NO: 125013 - protein, 83 aa, Setaria italica
  Transcript Sequence Number=SeqID_59039
  Gene Ontology: Mol. function=P-P-bond-hydrolysis-driven protein transmembrane transporter activity; Cellular component=integral to membrane; Biological process=intracellular protein transmembrane transport
  Homolog annotation: Hit_ID=O63066; Match level="QueryCoverage=68%, HitCoverage=10%, E-value=2e-25, Identity=100%"; Hit description =Preprotein translocase subunit secY, chloroplastic
GICSLGIVPFINAQIVFQLLAQLYPKLQDLQRKEGEAGRKKVLQYTRYASVGFAIVQGDLSIDAYCIRMKEKADELRDVGQPV

SEQ ID NO: 125014 - protein, 71 aa, Setaria italica
  misc_feature (11)..(11): Xaa can be any naturally occurring amino acid
  Transcript Sequence Number=SeqID_59040
  Homolog annotation: Hit_ID=Q8L4S1; Match level="QueryCoverage=92%, HitCoverage=7%, E-value=2e-16, Identity=60%"; Hit description=Crp1 -like protein
DCAELVQEMVXANIPPDASTFGMIFSLLQNGHVSSEEVFKLESAYSDGKSSAKQAIIAFLFSIAGIDNRLD

SEQ ID NO: 125015 - protein, 92 aa, Setaria italica
  misc_feature (9)..(9): Xaa can be any naturally occurring amino acid
  misc_feature (28)..(28): Xaa can be any naturally occurring amino acid
  misc_feature (44)..(44): Xaa can be any naturally occurring amino acid
  Transcript Sequence Number=SeqID_59041
LIIFCSGGXELDPAKSEGELLSALVTCXEGLGVKYTILYASQPXGLLENPSREPLGRHLAEKTNTTTKAGLSKCDGECLVKSTLLEGTFVGN

SEQ ID NO: 125016 - protein, 104 aa, Setaria italica
  misc_feature (21)..(21): Xaa can be any naturally occurring amino acid
  Transcript Sequence Number=SeqID_59042
LQSSDISKDKQVDPALADTLXDDEKLENSLLSGFAENCNNGFERNHITYTDTCTVGGQDLEKYTNMDAINDLVRYRKISTDGQTDLIIFCSGGFQNLTPKSFSM

SEQ ID NO: 125017 - protein, 35 aa, Setaria italica
  Transcript Sequence Number=SeqID_59043
LGTFVGIVLLIILISGLMCMMGIDTPSRFEAPQES

SEQ ID NO: 125018 - protein, 129 aa, Setaria italica
  misc_feature (113)..(113): Xaa can be any naturally occurring amino acid
  Transcript Sequence Number=SeqID_59044
WAPKNYGFRSDDAKQVVHYQTVSPKSLAKSVLEEGGWSNLMEDAQKNVNVAIVFLGSELQSSDISKDKQVDPALADTLKLSFTSSEFSMAFPYVSTTDDEKLENSLLSGFAEXCNGGLKNRVTYTDTCT

SEQ ID NO: 125019 - protein, 76 aa, Setaria italica
  Transcript Sequence Number=SeqID_59045
YYTKKFEHIVNNIWLIYTRPLQKRKLTISTSADQQTLVVHTPCASSSSHILRQSEIKIPGELQNTTNGSSTNYPIQ

SEQ ID NO: 125020 - protein, 62 aa, Setaria italica
  Transcript Sequence Number=SeqID_59046
  Subcellular localization annotation: CTP_CleavageSite=40; ConfidenceScore=5.03e-01
KTNNRITESQRTKRTNLRRNRNPTEPGSTNPQSLIPARPKMAAAWAVLAVLLVAAQVSSAAP

SEQ ID NO: 125021 - protein, 36 aa, Setaria italica
  Transcript Sequence Number=SeqID_59047
HRKHWRQCYVGYDTSLTHVLVMPTEDLAELFATIHV

SEQ ID NO: 125022 - protein, 35 aa, Setaria italica
  Transcript Sequence Number=SeqID_59048
ENYIGVSKHRTGIRAPSYTALLVVEFFVLLHCHVV

SEQ ID NO: 125023 - protein, 112 aa, Setaria italica
  Transcript Sequence Number=SeqID_59049
  Gene Ontology: Mol. function=DNA binding; Cellular component=nucleus; Biological process=negative regulation of cell cycle
  Homolog annotation: Hit_ID=Q10G93; Match level="QueryCoverage=99%, HitCoverage=8%, E-value=3e-58, Identity=93%"; Hit description=DIRP family protein, expressed
  Pfam annotation: Domain name=DIRP; Domain location=5-106; Score =209.2; E_value=1.1e-59; Accession=PF06584.5; Description=DIRP
MFEWFYSAIDYPWFAKSEFVEYLNHVKLGHVPRLTRVEWGVIRSSLGKPRRLSKQFLCEEREKLSQYRDSVRQHYAELRSGIREGLPTDLARPLAVGQRVIACHPRTRELHD

SEQ ID NO: 125024 - protein, 50 aa, Setaria italica
  Transcript Sequence Number=SeqID_59050
VSAEEGKASSNKETTARGATPPQADLTSKVKSRRKGGIQKSLTQECKPTE

SEQ ID NO: 125025 - protein, 76 aa, Setaria italica
  Transcript Sequence Number=SeqID_59051
  Gene Ontology: Mol. function=methyltransferase activity
YVNLVYLTFSSDEQTEAAILHGDDYAGSLENSSAKLQSVVKGISFRITVFEQIPGTLVIKGSLLNKALSGTPMVSR

SEQ ID NO: 125026 - protein, 53 aa, Setaria italica
  Transcript Sequence Number=SeqID_59052
SLQRSNQSATVQSCRVSYQPNVPRALMIVVEIHGCYLLFARKSATQNDRNEPT

SEQ ID NO: 125027 - protein, 54 aa, Setaria italica
  Transcript Sequence Number=SeqID_59053
VNLIGYCARGAEDKLLVYEYVPNESLDKILFAPASGHCECSPFRSVDCSLNLLF

SEQ ID NO: 125028 - protein, 78 aa, Setaria italica
  Transcript Sequence Number=SeqID_59054
  Gene Ontology: Cellular component=nucleus; Biological process=cell division
  Homolog annotation: Hit_ID=Q2QMW1; Match level="QueryCoverage=66%, HitCoverage=14%, E-value=8e-10, Identity=75%"; Hit description =Cyclin-D5-2
PKAAALIFSTAEAASVLDYRPSTVAVAAILAATHGAMTKEALESKISSLSPSCLLDKDDEFELELSSIRLWHAYTSSL

SEQ ID NO: 125029 - protein, 112 aa, Setaria italica
  misc_feature (19)..(19): Xaa can be any naturally occurring amino acid
  Transcript Sequence Number=SeqID_59055
  Gene Ontology: Mol. function=sequence-specific DNA binding; Cellular component=nucleus; Biological process=regulation of transcription, DNA-dependent
  Homolog annotation: Hit_ID=Q0E3C3; Match level="QueryCoverage=100%, HitCoverage=36%, E-value=3e-51, Identity=87%"; Hit description =Homeobox protein knotted-1-like 2
  Pfam annotation: Domain name=ELK; Domain location=7-28; Score=29.4; E_ value=1.5e-05; Accession=PF03789.5; Description=ELK domain
VERVRQELKNELKQGYKEXLVDIREEILRKRRAGKLPGDTASILKAWWQAHSKWPYPTEDDKARLVQETGLQLKQINNWFINQRKRNWHSNPTSSGEKDQEEKVMTTGPEQS

SEQ ID NO: 125030 - protein, 82 aa, Setaria italica
  Transcript Sequence Number=SeqID_59056
  Gene Ontology: Mol. function=sequence-specific DNA binding; Cellular component=nucleus; Biological process=regulation of transcription, DNA-dependent
  Homolog annotation: Hit_ID=Q0E3C3; Match level="QueryCoverage=84%, HitCoverage=22%, E-value=6e-33, Identity=95%"; Hit description =Homeobox protein knotted-1-like 2
VNFFRLSRLVVLVKLPWDTASILKAWWQAHSKWPYPTEDDKARLVQETGLQLKQINNWFINQRKRNWHSNPTSSGEKAKKKR

SEQ ID NO: 125031 - protein, 84 aa, Setaria italica
  misc_feature (19)..(19): Xaa can be any naturally occurring amino acid
  Transcript Sequence Number=SeqID_59057
  Gene Ontology: Mol. function=sequence-specific DNA binding; Cellular component=nucleus; Biological process=regulation of transcription, DNA-dependent
  Homolog annotation: Hit_ID=Q0E3C3; Match level="QueryCoverage=58%, HitCoverage=15%, E-value=4e-22, Identity=100%"; Hit description =Homeobox protein knotted-1-like 2
  Pfam annotation: Domain name=KNOX2; Domain location=28-83; Score =83.5; E_value=7.5e-22; Accession=PF03791.5; Description=KNOX2 domain
PSTSSPAIDAQIAARPPPXLAAAAGAAAAGGPSGGEELDLFMTHYVLLLCSFKEQLQQHVRVHAMEAVMGCWELEQSLQSLTGA

SEQ ID NO: 125032 - protein, 35 aa, Setaria italica
  misc_feature (9)..(9): Xaa can be any naturally occurring amino acid
  misc_feature (21)..(21): Xaa can be any naturally occurring amino acid
  Transcript Sequence Number=SeqID_59058
NQRKRNWHXNPASSSSDKSKXKRSTAGDGNAEQSW

SEQ ID NO: 125033 - protein, 42 aa, Setaria italica
  Transcript Sequence Number=SeqID_59059
  Pfam annotation: Domain name=ELK; Domain location=3-24; Score=30.4; E_ value=7.1e-06; Accession=PF03789.5; Description=ELK domain
RQELKHELKQGYREKLVDIREEIMRDQIPFHLTPHFHQTCCS

SEQ ID NO: 125034 - protein, 75 aa, Setaria italica
  Transcript Sequence Number=SeqID_59060
GPLGDPLRSPGDAYLHYFIKFPPNRSVSILVGYRVGGRMYLAIRYSVRLASSRLLRAGRHHLQCFHFHMLKSEQQ

SEQ ID NO: 125035 - protein, 70 aa, Setaria italica
  misc_feature (28)..(28): Xaa can be any naturally occurring amino acid
  Transcript Sequence Number=SeqID_59061
  Homolog annotation: Hit_ID=B9SXD1; Match level="QueryCoverage=81%, HitCoverage=9%, E-value=1e-16, Identity=63%"; Hit description =Electron transporter, putative
  Pfam annotation: Domain name=DUF547; Domain location=4-70; Score= -18.9; E_value=3.5e-05; Accession=PF04784.6; Description=Protein of unknown function, DUF547
FYCLINLFVIHLQAYLAYGIPNSSLKRXALFHKAAYNIGGHAVTANSIEHALLCFKSPRIGRVCRFAVSC

SEQ ID NO: 125036 - protein, 96 aa, Setaria italica
  misc_feature (25)..(25): Xaa can be any naturally occurring amino acid
  misc_feature (41)..(41): Xaa can be any naturally occurring amino acid
  Transcript Sequence Number=SeqID_59062
  Homolog annotation: Hit_ID=B9SXD1; Match level="QueryCoverage=77%, HitCoverage=12%, E-value=2e-19, Identity=60%"; Hit description =Electron transporter, putative
  Pfam annotation: Domain name=DUF547; Domain location=42-86; Score= -27.4; E_value=0.00023; Accession=PF04784.6; Description=Protein of unknown function, DUF547
KIVQSNNKCTVEIASISVDKNQMPXVSYAITHYRLLVEQLXRVDLSMSDYSIKLAFWINVYNSLIMHAYLAYGIPNSSLKRNRRLIYNKGLDLTNN

SEQ ID NO: 125037 - protein, 79 aa, Setaria italica
  Transcript Sequence Number=SeqID_59063
  Homolog annotation: Hit_ID=B9SXD1; Match level="QueryCoverage=75%, HitCoverage=10%, E-value=3e-16, Identity=66%"; Hit description =Electron transporter, putative
  Pfam annotation: Domain name=DUF547; Domain location=1-79; Score= -9.9; E_value=4.6e-06; Accession=PF04784.6; Description=Protein of unknown function, DUF547
LYFTDIYTPAKLRIQRMYLQWFESILSTAMRKKCADEKQLVQLKFGLPDCQPLALFALCTGASSDPMLRVYTAKNVMEE

SEQ ID NO: 125038 - protein, 61 aa, Setaria italica
  Transcript Sequence Number=SeqID_59064
LNMDAFNYQNDNKTDYIVQNDKYKYQNDNKTDYIVQNDKYKYLSVTLFFHGVHYCHRTVNA

SEQ ID NO: 125039 - protein, 77 aa, Setaria italica
  Transcript Sequence Number=SeqID_59065
MMVCCAYRYKLAYSSNFSSILAPIIENNYQLFMVERLIMQGAKTFVKTMKEFDKDLALCDDPKKNTKDWQEPVYTDD

SEQ ID NO: 125040 - protein, 77 aa, Setaria italica; identical to SEQ ID NO: 125039
  Transcript Sequence Number=SeqID_59066

SEQ ID NO: 125041 - protein, 113 aa, Setaria italica
  Transcript Sequence Number=SeqID_59067
  Gene Ontology: Mol. function=binding; Biological process=protein folding
  Homolog annotation: Hit_ID=O04843; Match level="QueryCoverage=78%, HitCoverage=15%, E-value=3e-25, Identity=64%"; Hit description =Peptidylprolyl isomerase
  Pfam annotation: Domain name=TPR_1; Domain location=9-42; Score=31.0; E_value=5e-06; Accession=PF00515.20; Description=Tetratricopeptide repeat
  Pfam annotation: Domain name=TPR_2; Domain location=9-42; Score=24.4; E_value=0.00048; Accession=PF07719.9; Description=Tetratricopeptide repeat
  Pfam module annotation: Pfam domain module=TPR_1::TPR_2; Domain location=9-42::9-42
VLELESTNVKALYRRAQAYIELVDLELAELDVKKALEFDPDNRDVKLVYKTLKEKMREYNRRDAKFYGNMFAKWRKLEHMDTKVSTRSLFIQQFLPSVPLRLPCIGSYTFFLL

SEQ ID NO: 125042 - protein, 93 aa, Setaria italica
  Transcript Sequence Number=SeqID_59068
  Gene Ontology: Mol. function=hydrogen ion transporting ATP synthase activity, rotational mechanism; Cellular component=proton -transporting two-sector ATPase complex; Biological process=ATP synthesis coupled proton transport
  Homolog annotation: Hit_ID=B3TLP5; Match level="QueryCoverage=90%, HitCoverage=47%, E-value=4e-22, Identity=63%"; Hit description =Mitochondrial F0 ATP synthase D chain
VFIVKSICSIPQVIVCTPFTSLSYKPKFDALVVELKEAEKASLKESERIEKEIAELREMKKKISTMTADEYFEKHPEVKQKFDDEIRNDYWGY

SEQ ID NO: 125043 - protein, 69 aa, Setaria italica
  Transcript Sequence Number=SeqID_59069
  Gene Ontology: Mol. function=hydrogen ion transporting ATP synthase activity, rotational mechanism; Cellular component=proton -transporting two-sector ATPase complex; Biological process=ATP synthesis coupled proton transport
  Homolog annotation: Hit_ID=B4FS99; Match level="QueryCoverage=82%, HitCoverage=33%, E-value=2e-24, Identity=91%"; Hit description=ATP synthase D chain, mitochondrial
MCSLSCVCFLLLQEPQPIDWEYYRKGIGSKVVDMYKEAYESIEIPKYVDTVTPEYKPKFDALVVELKEA

SEQ ID NO: 125044 - protein, 86 aa, Setaria italica
  Transcript Sequence Number=SeqID_59070
  Gene Ontology: Mol. function=hydrogen ion transporting ATP synthase activity, rotational mechanism; Cellular component=proton -transporting two-sector ATPase complex; Biological process=ATP synthesis coupled proton transport
  Homolog annotation: Hit_ID=B4FS99; Match level="QueryCoverage=74%, HitCoverage=37%, E-value=3e-29, Identity=92%"; Hit description=ATP synthase D chain, mitochondrial
CEESGRGGGRDEHLRQAVPVDRLASLRRTFEDVNHQLQTKFSQEPQPIDWEYYRKGIGSKVVDMYKEAYESIEIPKYVDTVTPQYK

SEQ ID NO: 125045 - protein, 99 aa, Setaria italica
  misc_feature (6)..(6): Xaa can be any naturally occurring amino acid
  Transcript Sequence Number=SeqID_59071
  Gene Ontology: Mol. function=hydrogen ion transporting ATP synthase activity, rotational mechanism; Cellular component=proton -transporting two-sector ATPase complex; Biological process=ATP synthesis coupled proton transport
  Homolog annotation: Hit_ID=B3TLP5; Match level="QueryCoverage=89%, HitCoverage=52%, E-value=4e-31, Identity=74%"; Hit description =Mitochondrial F0 ATP synthase D chain
FSQEPXPIDWEYYRKGIGSKVVDMYKEAYESIEIPKYVDTVTPEYKPKFDALVVELKEAEKASLKESERIEKEIAELREMKKKISTMTSGCFSKYSFRC

SEQ ID NO: 125046 - protein, 120 aa, Setaria italica
  misc_feature (91)..(91): Xaa can be any naturally occurring amino acid
  Transcript Sequence Number=SeqID_59072
  Gene Ontology: Mol. function=hydrogen ion transporting ATP synthase activity, rotational mechanism; Cellular component=proton -transporting two-sector ATPase complex; Biological process=ATP synthesis coupled proton transport
  Homolog annotation: Hit_ID=B3TLP5; Match level="QueryCoverage=99%, HitCoverage=70%, E-value=5e-41, Identity=68%"; Hit description =Mitochondrial F0 ATP synthase D chain
VNHQLQTKFSQEPQPIDWEYYRKGIGSKVVDMYKEAYESIEIPKYVDTVTPEYKPKFDALVVELKEAEKASLKESERIEKEIAELREMKKXISTMTADEYFEKHPVIVTDFIIKLLLDFR

SEQ ID NO: 125047 - protein, 76 aa, Setaria italica
  Transcript Sequence Number=SeqID_59073
  Gene Ontology: Mol. function=hydrogen ion transporting ATP synthase activity, rotational mechanism; Cellular component=proton -transporting two-sector ATPase complex; Biological process=ATP synthesis coupled proton transport
  Homolog annotation: Hit_ID=B3TLP5; Match level="QueryCoverage=98%, HitCoverage=44%, E-value=3e-20, Identity=65%"; Hit description =Mitochondrial F0 ATP synthase D chain
IQFLFCSTPEYKPKFDALVVELKEAEKASLKESERIEKEIAELREMKKKISTMTADEYFEKHPEVKQKFDDEIRND

SEQ ID NO: 125048 - protein, 61 aa, Setaria italica
  Transcript Sequence Number=SeqID_59074
  Gene Ontology: Mol. function=hydrogen ion transporting ATP synthase activity, rotational mechanism; Cellular component=proton -transporting two-sector ATPase complex
  Homolog annotation: Hit_ID=B4FS99; Match level="QueryCoverage=47%, HitCoverage=17%, E-value=2e-09, Identity=96%"; Hit description=ATP synthase D chain, mitochondrial
FLLLQEPQPIDWEYYRKGIGSKVVDMYKEAYESKYPCNTELISFLEILKECFLGNIEDVLK

SEQ ID NO: 125049 - protein, 85 aa, Setaria italica
  Transcript Sequence Number=SeqID_59075
ASKGYQCTCVWHIFLLMYNAFMACILVIGEAVLYCWPKLVPIGYAMRSFSCKAADRFLSSSHPQDLWPTLSNPYLLLPAHAHHYS

SEQ ID NO: 125050 - protein, 102 aa, Setaria italica
  misc_feature (63)..(63): Xaa can be any naturally occurring amino acid
  Transcript Sequence Number=SeqID_59076
  Gene Ontology: Mol. function=1,3-beta-glucan synthase activity; Cellular component=1,3-beta-glucan synthase complex; Biological process=1,3-beta-glucan biosynthetic process
  Homolog annotation: Hit_ID=B9RVZ6; Match level="QueryCoverage=100%, HitCoverage=7%, E-value=1e-23, Identity=44%"; Hit description =Transferase, transferring glycosyl groups, putative
DQTKIVNTLQTLYVFAIHDFPKKKKGMEQLRQERLAPSSPQESSLLFEDVIKCPSNDDISFYXSNSLFMNMPRAPTVEKMMAFSVLTPYYNEDVMYNRDQLR

SEQ ID NO: 125051 - protein, 67 aa, Setaria italica
  Transcript Sequence Number=SeqID_59077
  Gene Ontology: Mol. function=1,3-beta-glucan synthase activity; Cellular component=1,3-beta-glucan synthase complex
PMNGGLQRRPQRRLDRGTSTVSQLFKGQEDGAALMKYIIPLTVRAKVWPLYEAQSILLLLRTTYVPY

SEQ ID NO: 125052 - protein, 100 aa, Setaria italica
  misc_feature (56)..(56): Xaa can be any naturally occurring amino acid
  Transcript Sequence Number=SeqID_59078
  Gene Ontology: Mol. function=1,3-beta-glucan synthase activity; Cellular component=1,3-beta-glucan synthase complex; Biological process=1,3-beta-glucan biosynthetic process
  Homolog annotation: Hit_ID=Q8W0J2; Match level="QueryCoverage=86%, HitCoverage=5%, E-value=1e-25, Identity=64%"; Hit description=1,3 -beta-glucan synthase component-like
SAKKHIRYRLVQAIIVGGTVAAIVVLLKFTKFQFVDTFTSLLAFLPTGWGIISIAXDIVWKTVVTVARLYDILFGVIVIAPVAVLSPQFSTLSQTSSDMA

SEQ ID NO: 125053 - protein, 62 aa, Setaria italica
  Transcript Sequence Number=SeqID_59079
  Gene Ontology: Mol. function=1,3-beta-glucan synthase activity; Cellular component=1,3-beta-glucan synthase complex; Biological process=1,3-beta-glucan biosynthetic process
  Homolog annotation: Hit_ID=Q8W0J2; Match level="QueryCoverage=85%, HitCoverage=2%, E-value=4e-22, Identity=92%"; Hit description=1,3 -beta-glucan synthase component-like
QTCYSHHSLYDILFGVIVIAPVAVLSWLPGLQEMQTRILFNEAFSRGLHISQIITGKKAHAF

SEQ ID NO: 125054 - protein, 87 aa, Setaria italica
  misc_feature (29)..(29): Xaa can be any naturally occurring amino acid
  Transcript Sequence Number=SeqID_59080
  Gene Ontology: Mol. function=1,3-beta-glucan synthase activity; Cellular component=1,3-beta-glucan synthase complex; Biological process=1,3-beta-glucan biosynthetic process
  Homolog annotation: Hit_ID=Q8W0J2; Match level="QueryCoverage=91%, HitCoverage=4%, E-value=1e-26, Identity=75%"; Hit description=1,3 -beta-glucan synthase component-like
SDSVTYVACILLAFVALVTVAYFRDRYSXKKHIRYRLVQAIIVGGTVAAIVVLLKFTKFQFVDTFTSLLAFLPTGWGIISIALVFKP

SEQ ID NO: 125055 - protein, 102 aa, Setaria italica
  Transcript Sequence Number=SeqID_59081
  Gene Ontology: Mol. function=1,3-beta-glucan synthase activity; Cellular component=1,3-beta-glucan synthase complex; Biological process=1,3-beta-glucan biosynthetic process
  Homolog annotation: Hit_ID=Q8W0J2; Match level="QueryCoverage=100%, HitCoverage=5%, E-value=3e-47, Identity=90%"; Hit description=1,3 -beta-glucan synthase component-like
GSEYGTVLMKYTYVVACQIYGQQKAKNDPRAFEILELMKNYEALRVAYVDERQNNGGETEYFSVLVKYDQLLQREVEIYRVKLPGELKLGRRKTGNQNHALI

SEQ ID NO: 125056 - protein, 90 aa, Setaria italica
  misc_feature (43)..(43): Xaa can be any naturally occurring amino acid
  misc_feature (79)..(79): Xaa can be any naturally occurring amino acid
  Transcript Sequence Number=SeqID_59082
  Gene Ontology: Mol. function=mRNA (guanine-N7-)-methyltransferase activity; Cellular component=nucleus; Biological process=mRNA processing
  Homolog annotation: Hit_ID=Q6Z9U7; Match level="QueryCoverage=77%, HitCoverage=18%, E-value=8e-21, Identity=72%"; Hit description=mRNA cap guanine-N7 methyltransferase 1
TKRTEPEERLTVRDGRTIEQRRPRDDPSSSFASAPKRQYGGGXGYGAQQGYSEDRGSARRVADHYSARSNQTLEERENXPIIHLKKLNNW

SEQ ID NO: 125057 - protein, 64 aa, Setaria italica
  Transcript Sequence Number=SeqID_59083
  Gene Ontology: Mol. function=mRNA (guanine-N7-)-methyltransferase activity; Cellular component=nucleus; Biological process=mRNA processing
  Homolog annotation: Hit_ID=Q6Z9U7; Match level="QueryCoverage=78%, HitCoverage=13%, E-value=5e-21, Identity=94%"; Hit description=mRNA cap guanine-N7 methyltransferase 1
AEGSIKDCMTRYNGDTDQQRRKKFSFPARLICTDCYEARLDEYLSEDAPFLRHATGDTRHTGDR

SEQ ID NO: 125058 - protein, 61 aa, Setaria italica
  Transcript Sequence Number=SeqID_59084
MASNYVDTAAEEGRFHGHYHHHSTTPTGAAAASPKHMRRSWSSASSAHGHGHAPKCVCAPA

SEQ ID NO: 125059 - protein, 75 aa, Setaria italica
  Transcript Sequence Number=SeqID_59085
LMESISYIRFRFISWPQNLACLVHFLMFWIFAPAFHQLFWIFSSRTCHADYSQLLQVQGCDKRILQRGTGSSSSL

SEQ ID NO: 125060 - protein, 84 aa, Setaria italica
  Transcript Sequence Number=SeqID_59086
  Gene Ontology: Mol. function=nucleotide binding; Cellular component =plasma membrane; Biological process=small GTPase mediated signal transduction
  Homolog annotation: Hit_ID=Q38923; Match level="QueryCoverage=86%, HitCoverage=33%, E-value=2e-26, Identity=74%"; Hit description=ATGB3
  Pfam annotation: Domain name=Ras; Domain location=6-81; Score=-12.1; E_value=2e-08; Accession=PF00071.14; Description=Ras family
IDYVFKVVVVGDSAVGKTQLLARFTRDEFALDSKSTIGVEFQTRTLTLHRKRVKAQIWDTAGQERYVTSRLVRRPHHMLLRSAP

SEQ ID NO: 125061 - protein, 76 aa, Setaria italica
  Transcript Sequence Number=SeqID_59087
CANVLPSCHNCDKNIKYNSVSTSPNLSISTGIYNKNNIAGIYSAHITPNTEASHGTTTLAPRSGRRKSLRASVVVP

SEQ ID NO: 125062 - protein, 96 aa, Setaria italica
  Transcript Sequence Number=SeqID_59088
  Gene Ontology: Mol. function=metal ion binding
  Homolog annotation: Hit_ID=B6TVD0; Match level="QueryCoverage=91%, HitCoverage=22%, E-value=3e-33, Identity=75%"; Hit description =Protein binding protein
MLLLLCPRDVDLPASFIQKYLVQKLNLSSEAEVEILCGGKPVSPGMTLHDLADCWLNKGQKGRVRSYVGTPAAGFIAKVFYGRSGASIPETENNQG

SEQ ID NO: 125063 - protein, 83 aa, Setaria italica
  misc_feature (18)..(18): Xaa can be any naturally occurring amino acid
  misc_feature (30)..(30): Xaa can be any naturally occurring amino acid
  Transcript Sequence Number=SeqID_59089
LTSIIATYVILYEVPTLXRNHFSLGVDAPXKLKASFKKPNWINDLQKQPSFLDLDSIILALNCSNAARLPVTQECSTSSSGAL

SEQ ID NO: 125064 - protein, 42 aa, Setaria italica
  Transcript Sequence Number=SeqID_59090
RLHNESQHLATHCSYPPVCKQRSKQQNYIHLKCDQSVRRALP

SEQ ID NO: 125065 - protein, 137 aa, Setaria italica
  misc_feature (130)..(130): Xaa can be any naturally occurring amino acid
  Transcript Sequence Number=SeqID_59091
  Gene Ontology: Mol. function=protein serine/threonine kinase activity; Cellular component=integral to membrane; Biological process=protein amino acid phosphorylation
  Homolog annotation: Hit_ID=Q208N4; Match level="QueryCoverage=100%, HitCoverage=24%, E-value=3e-63, Identity=89%"; Hit description =Calcium and calcium/calmodulin-dependent serine/threonine -proteinkinase
  Pfam annotation: Domain name=efhand; Domain location=87-115; Score =19.5; E_value=0.014; Accession=PF00036.24; Description=EF hand
LQRFNARRKLRAAAIASVLSSKVALRTKRLRNLLGTHDLSSEELDNLRVHFARIERSWRRCADGENATLEEFEQVLKAMKMDALVPLAPRVFDLFDNNRDGTVDMREILCGLSSLRNSRGDDALRLCFQXYDADRSG

SEQ ID NO: 125066 - protein, 34 aa, Setaria italica
  Transcript Sequence Number=SeqID_59092
  Pfam annotation: Domain name=RAMP4; Domain location=1-33; Score=-5.0; E_value=0.026; Accession=PF06624.4; Description=Ribosome associated membrane protein RAMP4
SVPETTIKKGNDYPVGPVVLGFFIFVVFLSARRP

SEQ ID NO: 125067 - protein, 39 aa, Setaria italica
  Transcript Sequence Number=SeqID_59093
WLMFFWNFAVFLSARRLEVVCPHKSQHSAYMKTRSQSDS

SEQ ID NO: 125068 - protein, 107 aa, Setaria italica
  misc_feature (78)..(78): Xaa can be any naturally occurring amino acid
  misc_feature (87)..(87): Xaa can be any naturally occurring amino acid
  misc_feature (89)..(89): Xaa can be any naturally occurring amino acid
  Transcript Sequence Number=SeqID_59094
  Gene Ontology: Mol. function=methyltransferase activity; Cellular component=plasma membrane; Biological process=metabolic process
  Homolog annotation: Hit_ID=Q00TN0; Match level="QueryCoverage=100%, HitCoverage=11%, E-value=9e-22, Identity=41%"; Hit description =UbiE/COQ5 methyltransferase (ISS)
RKFFPEEKGPVSKIDPIGNSPVIIKKAQLEKIAPTWMNVSLKMKEDQETDKAFGWVLEMYAYAVASALHGVHHSLRKXFMIQPPWDXKXDNTFIIHYTYGCDYTMKG

SEQ ID NO: 125069 - protein, 84 aa, Setaria italica
  misc_feature (37)..(37): Xaa can be any naturally occurring amino acid
  Transcript Sequence Number=SeqID_59095
  Gene Ontology: Mol. function=oxidoreductase activity, acting on the CH-OH group of donors, NAD or NADP as acceptor; Biological process =metabolic process
  Homolog annotation: Hit_ID=B6U1W6; Match level="QueryCoverage=80%, HitCoverage=10%, E-value=1e-29, Identity=91%"; Hit description =Angustifolia
QPPPPTTLCLATWYPELSLALNATNRDPAAQFLVTFXNKDTMGLRSFVAGGKLLQINRKTEFVFASHSFDVWESWMLDGSLLEG

SEQ ID NO: 125070 - protein, 34 aa, Setaria italica
  Transcript Sequence Number=SeqID_59096
EMLLSVHGSPLGVYKEENLAAIQESGNGNEDAPC

SEQ ID NO: 125071 - protein, 81 aa, Setaria italica
  misc_feature (8)..(8): Xaa can be any naturally occurring amino acid
  Transcript Sequence Number=SeqID_59097
  Gene Ontology: Mol. function=protein serine/threonine kinase activity; Cellular component=cytoplasm; Biological process=protein amino acid phosphorylation
  Homolog annotation: Hit_ID=B6UC79; Match level="QueryCoverage=100%, HitCoverage=14%, E-value=1e-15, Identity=57%"; Hit description=MPK17- 1-putative MAPK
DQERSADXVARTTVSPPRSEDVGQDGVKSPSLSSRSYLKSASISASKCLFETTTHPEDDEIPEEMEGVVDGLSEKVSRMHS

SEQ ID NO: 125072 - protein, 74 aa, Setaria italica
  Transcript Sequence Number=SeqID_59098
QNLVMRLLLPRSLEPRSAFWRLFQTIHRQRLPFPQGFHHPNRETKHQWWRHYLISKVNKRKVQLACNKSIEHVL

SEQ ID NO: 125073 - protein, 45 aa, Setaria italica
  Transcript Sequence Number=SeqID_59099
PFPQGFHHPLGVYLRRDRGQFSSCLYQHGPCMDPCDVTLVSPWRK

SEQ ID NO: 125074 - protein, 100 aa, Setaria italica
  misc_feature (56)..(56): Xaa can be any naturally occurring amino acid
  misc_feature (73)..(73): Xaa can be any naturally occurring amino acid
  Transcript Sequence Number=SeqID_59100
  Gene Ontology: Mol. function=transferase activity; Cellular component= endoplasmic reticulum membrane; Biological process=determination of left/right symmetry
  Homolog annotation: Hit_ID=Q84TA6; Match level="QueryCoverage=69%, HitCoverage=27%, E-value=2e-24, Identity=82%"; Hit description =Putative dolichyl-phosphate beta-glucosyltransferase
HLQILSSLVPNILFIETCIINLNNVGVQSILSKVLIVDDGSTDRTSKVGFKFCKRXHKIDNVRVLLLGRNHGXGEAVRKGMLHSRGELLLMLDADGQQSD

SEQ ID NO: 125075 - protein, 83 aa, Setaria italica
  Transcript Sequence Number=SeqID_59101
  Gene Ontology: Mol. function=transferase activity
  Homolog annotation: Hit_ID=B9SXX8; Match level="QueryCoverage=83%, HitCoverage=20%, E-value=2e-21, Identity=68%"; Hit description =Dolichyl-phosphate beta-glucosyltransferase, putative
AQKVNSSPGTSTGSPQKVSDVEIAVFGSRAHLEKQALATRKWYRNFLMKGFHLVVLLTAGPGIRDTQVCFICLISSNKRVQLI

SEQ ID NO: 125076 - protein, 46 aa, Setaria italica
  Transcript Sequence Number=SeqID_59102
LEIVCVSPLTRRTGVKGTGSMSAPYAQDHIIAERKRREKINQRFIE

SEQ ID NO: 125077 - protein, 82 aa, Setaria italica
  Transcript Sequence Number=SeqID_59103
  Gene Ontology: Mol. function=single-stranded DNA binding; Cellular component=nucleus; Biological process=nucleotide-excision repair
  Homolog annotation: Hit_ID=B9RUC5; Match level="QueryCoverage=57%, HitCoverage=2%, E-value=1e-14, Identity=70%"; Hit description=DNA -repair protein UVH3, putative
METSSKSKKRKPGGNYSDGKGKGLEPECDQGSDDLSANETERIKKIFMSKHRNVSKNWHIPAAFPSESVISAYITPQVDNST

SEQ ID NO: 125078 - protein, 41 aa, Setaria italica
  Transcript Sequence Number=SeqID_59104
CQLLIYHFLILVQVAAFRATLEEISESSVIVHLVDIRYIFN

SEQ ID NO: 125079 - protein, 56 aa, Setaria italica
  Transcript Sequence Number=SeqID_59105
STAVIDANGTHIISPFCTARAFFCESTRWTNYVSAIGINDCCAGGHRSYSSHHLLP

SEQ ID NO: 125080 - protein, 93 aa, Setaria italica
  Transcript Sequence Number=SeqID_59106
  Gene Ontology: Mol. function=hydrolase activity, acting on ester bonds; Biological process=lipid metabolic process
  Homolog annotation: Hit_ID=B6TRC2; Match level="QueryCoverage=61%, HitCoverage=14%, E-value=3e-23, Identity=87%"; Hit description =Anther-specific proline-rich protein APG
FEKISAILMFGDSIVDPGNNNHRLTEARANFPPYGQDFPGGVATGRFSNGLVPGDLLGMLSQDILFVFSLWYKIVGRSCCMEGIKITKLLKCI

SEQ ID NO: 125081 - protein, 60 aa, Setaria italica
  Transcript Sequence Number=SeqID_59107
  Gene Ontology: Mol. function=hydrolase activity, acting on ester bonds; Biological process=lipid metabolic process
  Homolog annotation: Hit_ID=B6TRC2; Match level="QueryCoverage=85%, HitCoverage=13%, E-value=2e-17, Identity=76%"; Hit description =Anther-specific proline-rich protein APG
RVISQAVFFTIMGANDIVNNYFAVPLRRHDYDLPSYMDFLVSSAINFTTVIVMIVTAQIL

SEQ ID NO: 125082 - protein, 72 aa, Setaria italica
  Transcript Sequence Number=SeqID_59108
STLPQICWKSEPAYPNTLQRIDLSARRIKYQLLPKGKSNRKNVAHRFTFYSIQVQCQPNYVKNDRAVAYVHW

SEQ ID NO: 125083 - protein, 49 aa, Setaria italica
  Transcript Sequence Number=SeqID_59109
SVWSRMEVLLVLKDLEADRQVPYFCLEEPMNCFADQPPDPLRQQNLPTP

SEQ ID NO: 125084 - protein, 74 aa, Setaria italica
  Transcript Sequence Number=SeqID_59110
  Gene Ontology: Mol. function=ATP-dependent helicase activity
MLLGLLKKIQRRRPELRLIISSATIEARSMSTFFNIRSIPIKKFHFFLAVCCCYFAYNLASEMTTIPIQGIDIL

SEQ ID NO: 125085 - protein, 78 aa, Setaria italica
  Transcript Sequence Number=SeqID_59111
  Gene Ontology: Mol. function=ATP-dependent helicase activity
  Homolog annotation: Hit_ID=UPI0000162AB8; Match level="QueryCoverage =94%, HitCoverage=10%, E-value=7e-18, Identity=60%"; Hit description =RNA helicase, putative
IISSATIEARSMSTFFNIRRKNSLLGSSDDLPNPEPAILSVEGKGYTVEIHYVEEPVSDYLQAAVNTVLLIHEKGTTR

SEQ ID NO: 125086 - protein, 49 aa, Setaria italica
  Transcript Sequence Number=SeqID_59112
DGLRLFREDIIALGDGRGNVTIVRLTNGSIEPKVNLSFTWPAEKDRQLL

SEQ ID NO: 125087 - protein, 57 aa, Setaria italica
  Transcript Sequence Number=SeqID_59113
CLQKIMSSRLPPVLMGIYSTGEVPLCIMYSVQIIWVTVSDTPLVFHALPKPQKKKKK

SEQ ID NO: 125088 - protein, 50 aa, Setaria italica
  Transcript Sequence Number=SeqID_59114
  Gene Ontology: Mol. function=ATPase activity, coupled to transmembrane movement of ions, phosphorylative mechanism; Cellular component=membrane; Biological process=calcium ion transport
  Homolog annotation: Hit_ID=Q94IM8; Match level="QueryCoverage=100%, HitCoverage=7%, E-value=3e-21, Identity=94%"; Hit description=P-type ATPase (Fragment)
KSTAESLCRQIGAFEHLDDFAGYSYTASEFEGLPPLERTNALQRMVLFSR

SEQ ID NO: 125089 - protein, 82 aa, Setaria italica
  Transcript Sequence Number=SeqID_59115
  Gene Ontology: Mol. function=ATPase activity, coupled to transmembrane movement of ions, phosphorylative mechanism; Cellular component=membrane; Biological process=calcium ion transport
  Homolog annotation: Hit_ID=Q10DF1; Match level="QueryCoverage=93%, HitCoverage=7%, E-value=5e-25, Identity=75%"; Hit description =Calcium-transporting ATPase 3, endoplasmic reticulum-type, putative, expressed
LWLVGSIILTMLLHVAVLYIEPLAALFSVSPLSWAEWKVVLYLSFPVILIDEVLKLFSRSPRGRRFPLRLWRREIIPASVIV

SEQ ID NO: 125090 - protein, 43 aa, Setaria italica
  Transcript Sequence Number=SeqID_59116
  Gene Ontology: Mol. function=ATPase activity, coupled to transmembrane movement of ions, phosphorylative mechanism; Cellular component=membrane
  Homolog annotation: Hit_ID=Q10DF1; Match level="QueryCoverage=81%, HitCoverage=3%, E-value=3e-11, Identity=91%"; Hit description =Calcium-transporting ATPase 3, endoplasmic reticulum-type, putative, expressed
LHVAVLYIEPLAALFSVSPLSWAEWKVVLYLSFPVSTYSTLEG

SEQ ID NO: 125091 - protein, 141 aa, Setaria italica
  Transcript Sequence Number=SeqID_59117
  Gene Ontology: Mol. function=protein serine/threonine kinase activity; Cellular component=plasma membrane; Biological process =protein amino acid phosphorylation
  Homolog annotation: Hit_ID=B6TE08; Match level="QueryCoverage=68%, HitCoverage=25%, E-value=2e-46, Identity=89%"; Hit description=ATP binding protein
  Pfam annotation: Domain name=Pkinase_Tyr; Domain location=4-141; Score=-102.8; E_value=6.9e-07; Accession=PF07714.9; Description =Protein tyrosine kinase
MWLRGTAVCISCSESRNCKILSPLFSSLLFLLETSLNHYFKPVYHMYGSRLTLAYTLMQVLNGHPYNRKCDVYSFGICLWEIYCCDMPYPDLSFSEVTSAVVRQNLRPEIPRCCPSSLANVMKRCWDANPDKRPEMAEVVS

SEQ ID NO: 125092 - protein, 55 aa, Setaria italica
  Transcript Sequence Number=SeqID_59118
NCYSEATTVQGLNTYLMCWHLFLSFDAFTYVPAVHFGICSSRPHIVSINLKRLKY

SEQ ID NO: 125093 - protein, 58 aa, Setaria italica
  Transcript Sequence Number=SeqID_59119
  Subcellular localization annotation: CTP_CleavageSite=24; ConfidenceScore=5.17e-01
TNQLLFVLVNMGYNISLLHLIKISSAVVSSLASTFSGFYSFLCAASHLLAPVNSTSKF

SEQ ID NO: 125094 - protein, 48 aa, Setaria italica
  misc_feature (4)..(4): Xaa can be any naturally occurring amino acid
  Transcript Sequence Number=SeqID_59120
NVGXGGAPLLPLLFVLVNMGYNISLLHLIKISSAVVSSLASTFSGNNE

SEQ ID NO: 125095 - protein, 53 aa, Setaria italica
  Transcript Sequence Number=SeqID_59121
  Subcellular localization annotation: CTP_CleavageSite=38; ConfidenceScore=5.21e-01
PPPPPPYPPPYPPPPPYLPPPPPPPRRPRRRGGGGAAPGARPWPGGDEERAEV

SEQ ID NO: 125096 - protein, 77 aa, Setaria italica
  Transcript Sequence Number=SeqID_59122
  Pfam annotation: Domain name=GRP; Domain location=1-73; Score=52.2; E_ value=2e-12; Accession=PF07172.3; Description=Glycine rich protein family
MASKSLLLIGVVLASLLLVTKDVVAARNQFVEANESEGKNTKLTGGGGYGGGYGGGGGGYGGGYPGAEYYGGGGGWH

SEQ ID NO: 125097 - protein, 84 aa, Setaria italica
  misc_feature (20)..(20): Xaa can be any naturally occurring amino acid
  misc_feature (36)..(36): Xaa can be any naturally occurring amino acid
  misc_feature (48)..(48): Xaa can be any naturally occurring amino acid
  Transcript Sequence Number=SeqID_59123
  Subcellular localization annotation: CTP_CleavageSite=29; ConfidenceScore=5.12e-01
PYLPPPPPPPPPYPPPKSGXPYPPPYQPRPGTYPPXPPPYPPPYPPPXAATIISVTPNPFPPPPPSPNLRRPLAPPPPPPPLQS

SEQ ID NO: 125098 - protein, 80 aa, Setaria italica
  Transcript Sequence Number=SeqID_59124
  Gene Ontology: Mol. function=serine-type peptidase activity; Cellular component=thylakoid lumen; Biological process=proteolysis
  Homolog annotation: Hit_ID=Q8S3I9; Match level="QueryCoverage=98%, HitCoverage=20%, E-value=2e-29, Identity=78%"; Hit description=D1 protease (Fragment)
KMLSTLDDPFTRFLEPEKLKSLRSGTQGALTGVGLSISYPMAVNGSPTGVAVMTATPGGPAEKAGILPGDIILAIDNRST

SEQ ID NO: 125099 - protein, 94 aa, Setaria italica
  Transcript Sequence Number=SeqID_59125
MPYCSQYGSFFFNVIDMVAEAMEKVAGEVTHTFPSNENLKEATSKIKTVNDATEEDAEKAEAPIQKCEGAGPADGDIDDGKWQHRRLQEVAARY

SEQ ID NO: 125100 - protein, 45 aa, Setaria italica
  Transcript Sequence Number=SeqID_59126
SIGSVRVLVLLMETLTMGSGSTGGYRRLPLGTSSMLARSSAREVG

SEQ ID NO: 125101 - protein, 50 aa, Setaria italica
  Transcript Sequence Number=SeqID_59127
  Gene Ontology: Mol. function=hydrolase activity, hydrolyzing O -glycosyl compounds; Cellular component=cell wall; Biological process= carbohydrate metabolic process
  Homolog annotation: Hit_ID=B9SNH8; Match level="QueryCoverage=78%, HitCoverage=11%, E-value=2e-12, Identity=76%"; Hit description =Xyloglucan endotransglucosylase/hydrolase protein 2, putative
IYTMQLSNGDVFEKNHDELDFEFLGNRRRHEWRLQTNVYGNGSTDGPRGA

SEQ ID NO: 125102 - protein, 90 aa, Setaria italica
  Transcript Sequence Number=SeqID_59128
  Gene Ontology: Mol. function=hydrolase activity, hydrolyzing O -glycosyl compounds; Cellular component=cell wall; Biological process= carbohydrate metabolic process
  Homolog annotation: Hit_ID=A6MZP8; Match level="QueryCoverage=94%, HitCoverage=55%, E-value=7e-29, Identity=72%"; Hit description =Xyloglucan endotransglucosylase/hydrolasev protein 30 (Fragment)
  Pfam annotation: Domain name=Glyco_hydro_16; Domain location=1-86; Score=-25.1; E_value=3.9e-05; Accession=PF00722.13; Description =Glycosyl hydrolases family 16
LNRYSGSGFISSHYYHHGFFSAAIRLPKDHTAGVVVAFYLSNGDVFEKNHDELDFEFLGNRRRHEWRLQTNVYGNGQDNRTGDRRRKTVT

SEQ ID NO: 125103 - protein, 40 aa, Setaria italica
  Transcript Sequence Number=SeqID_59129
VTISFSWSIHTASLLLLVYPNFMFRILVSLLELAHSHNHI

SEQ ID NO: 125104 - protein, 47 aa, Setaria italica
  Transcript Sequence Number=SeqID_59130
VELATVEQDTLRKVSILQSYIHYFDHEEHSKLVVSVPSLILMAEIDN

SEQ ID NO: 125105 - protein, 74 aa, Setaria italica
  Transcript Sequence Number=SeqID_59131
  Gene Ontology: Cellular component=integral to membrane
  Homolog annotation: Hit_ID=B6TCL4; Match level="QueryCoverage=100%, HitCoverage=25%, E-value=8e-31, Identity=86%"; Hit description =Tobamovirus multiplication 3
  Pfam annotation: Domain name=DUF1084; Domain location=1-72; Score= -143.9; E_value=0.067; Accession=PF06454.3; Description=Protein of unknown function (DUF1084)
RVASICFCCFLARCIMMCFTAFNKEADLDVLYHPVLNFFYYLLVEILPSSLVLYILRRIPAKLQLSQYHPISGS

SEQ ID NO: 125106 - protein, 122 aa, Setaria italica
  misc_feature (12)..(12): Xaa can be any naturally occurring amino acid
  misc_feature (47)..(47): Xaa can be any naturally occurring amino acid
  Transcript Sequence Number=SeqID_59132
  Homolog annotation: Hit_ID=Q10KZ9; Match level="QueryCoverage=88%, HitCoverage=31%, E-value=2e-44, Identity=75%"; Hit description =Nodulation protein, putative, expressed
KLHSMDWLTSAXAKNECTSAFGLKWMLNQGLMEHHEDIIDYLNRKGXMVILLFRRNTLRRLISVLANNHDRRTKQLNGIHKSHVHSKEEAEILARFKPKMDVSTLSPSKFLLLECSAFLMLG

SEQ ID NO: 125107 - protein, 73 aa, Setaria italica
  Transcript Sequence Number=SeqID_59133
MDRIRIIESHLACFLRHPRHGQGMVDWWREHRRTTIRRPHLSRTSLPRQHLYHGMEGYRRRLQSSSHGGERSR

SEQ ID NO: 125108 - protein, 36 aa, Setaria italica
  Transcript Sequence Number=SeqID_59134
FSLVIMHVRTLYSPACEVAFYDSDSIHLGVVSNPDD

SEQ ID NO: 125109 - protein, 98 aa, Setaria italica
  misc_feature (36)..(36): Xaa can be any naturally occurring amino acid
  misc_feature (47)..(47): Xaa can be any naturally occurring amino acid
  misc_feature (67)..(67): Xaa can be any naturally occurring amino acid
  misc_feature (73)..(73): Xaa can be any naturally occurring amino acid
  misc_feature (92)..(92): Xaa can be any naturally occurring amino acid
  Transcript Sequence Number=SeqID_59135
  Gene Ontology: Mol. function=DNA binding
  Homolog annotation: Hit_ID=UPI000034EF88; Match level="QueryCoverage =71%, HitCoverage=3%, E-value=2e-12, Identity=60%"; Hit description =DNA binding
ASLSVQSTSVTDQIADQNVISEAKGSFAFATSPHGXDSVESSGKPGXSLCREGNTADNLMLLDGDTXSNTGGXKIVKRGTKGLLQLKPKQFXHCDGQI

SEQ ID NO: 125110 - protein, 78 aa, Setaria italica
  Transcript Sequence Number=SeqID_59136
  Gene Ontology: Mol. function=DNA binding
  Homolog annotation: Hit_ID=B9S516; Match level="QueryCoverage=100%, HitCoverage=3%, E-value=2e-19, Identity=61%"; Hit description=DNA binding protein, putative
RAAIEKAQEELRQEYDIREERRRELEFLEKGGNPLDFKLGHVASLSVQSTSVTDQIADQNVISEAKGSFAFATSPHGD

SEQ ID NO: 125111 - protein, 39 aa, Setaria italica
  Transcript Sequence Number=SeqID_59137
TFCCAVSGAPVTAWDGYDTFTPRSSSIIPWMSSSFPLGS

SEQ ID NO: 125112 - protein, 104 aa, Setaria italica
  Transcript Sequence Number=SeqID_59138
SHSSELLKYRQYQHDMYALCHSDTVYMFHSDCRCTAQNKTLSAKPASEWNHVHSVRWQYQHDMYALCHSDTVYMFHSDAGARHRTRHCAKPATPWSCRLQMTCY

SEQ ID NO: 125113 - protein, 42 aa, Setaria italica
  Transcript Sequence Number=SeqID_59139
QLFLSFIPDFHDMAWLSVVAAVMSFSYASFDSPVRDGGGHAE

SEQ ID NO: 125114 - protein, 79 aa, Setaria italica
  misc_feature (66)..(66): Xaa can be any naturally occurring amino acid
  Transcript Sequence Number=SeqID_59140
CFFSLSLDSEKKHKKHKDKDRDKDKEHKKHKHRHKDRSKDKDKDKDKDKKKDKSVHHDSAGDHSKXHHDKKRKHEGMRI

SEQ ID NO: 125115 - protein, 59 aa, Setaria italica
  Transcript Sequence Number=SeqID_59141
YMRDKPAFIQPFDMEILGQAFQLRETAPVDLPSAEKGIPTISGKPKSESKDKEKKHKKH

SEQ ID NO: 125116 - protein, 86 aa, Setaria italica
  Transcript Sequence Number=SeqID_59142
LSEKLVFPTAEHTTGINTKMLGISSTNSRAEHAVGVIVNKMLEEYVRVGYINKLNSRKKVWLKFSSATQNDQVQSQICLMKVHTSN

SEQ ID NO: 125117 - protein, 161 aa, Setaria italica
  misc_feature (146)..(146): Xaa can be any naturally occurring amino acid
  Transcript Sequence Number=SeqID_59143
  Gene Ontology: Mol. function=protein serine/threonine kinase activity; Biological process=protein amino acid phosphorylation
  Homolog annotation: Hit_ID=B6U0Y9; Match level="QueryCoverage=98%, HitCoverage=24%, E-value=2e-80, Identity=89%"; Hit description=ATP binding protein
  Pfam annotation: Domain name=Pkinase; Domain location=1-156; Score =25.5; E_value=5.2e-10; Accession=PF00069.17; Description=Protein kinase domain
  Pfam annotation: Domain name=Pkinase_Tyr; Domain location=1-156; Score=6.5; E_value=3.7e-14; Accession=PF07714.9; Description=Protein tyrosine kinase
  Pfam module annotation: Pfam domain module=Pkinase::Pkinase_Tyr; Domain location=1-156::1-156
QTSCLVGVAMDVSKGMSYLHQNNIIHRDLKTANLLMDENGTVKVADFGVARVKAQSGVMTAETGTYRWMAPEVIEHKPYDHKADVFSFGILLWELLTGKIPYEYLTPLQAAVGVVQKGLRPTIPKHTHAKLCELLQKCWQQDPAHXPTSSDILWRVSNISE

SEQ ID NO: 125118 - protein, 56 aa, Setaria italica
  Transcript Sequence Number=SeqID_59144
AANTLCNLHHLYDKNHPIECLPGTLFFYVFLLSMFLDFRKVRHKNVVQFIGACTKP

SEQ ID NO: 125119 - protein, 127 aa, Setaria italica
  Transcript Sequence Number=SeqID_59145
  Gene Ontology: Mol. function=protein serine/threonine kinase activity; Biological process=protein amino acid phosphorylation
  Homolog annotation: Hit_ID=B6U0Y9; Match level="QueryCoverage=99%, HitCoverage=22%, E-value=5e-47, Identity=71%"; Hit description=ATP binding protein
  Pfam annotation: Domain name=ACT; Domain location=32-98; Score=44.0; E_value=5.8e-10; Accession=PF01842.17; Description=ACT domain
FFEALALEVSKSQGQDHDSTSDNGRSLYRPMHEITFSTIDKPKLLSELTSLLGELGLNIQEAHAFSTNDGYSLDVFVVVGWHDEETEDLVEAVQKEIGRIEEIAENPAADRVEIPTDGSSEWEIDVK

SEQ ID NO: 125120 - protein, 62 aa, Setaria italica
  Transcript Sequence Number=SeqID_59146
  Gene Ontology: Mol. function=protein serine/threonine kinase activity; Biological process=protein amino acid phosphorylation
  Homolog annotation: Hit_ID=B6U0Y9; Match level="QueryCoverage=95%, HitCoverage=9%, E-value=1e-25, Identity=93%"; Hit description=ATP binding protein
LTPLQAAVGVVQKGLRPTIPKHTHAKLCELLQKCWQQDPAQRPDFSEILETLQRISEEVCAV

SEQ ID NO: 125121 - protein, 69 aa, Setaria italica
  Transcript Sequence Number=SeqID_59147
  Gene Ontology: Mol. function=protein serine/threonine kinase activity; Biological process=protein amino acid phosphorylation
  Homolog annotation: Hit_ID=B6U0Y9; Match level="QueryCoverage=53%, HitCoverage=5%, E-value=9e-15, Identity=100%"; Hit description=ATP binding protein
IYSVTIHRLGFSASTNKLHNILVTDLPHNIYFLLKFGNKVASGSYGDLYRGTYCSQDVAIKVLKPERIN

SEQ ID NO: 125122 - protein, 90 aa, Setaria italica
  Transcript Sequence Number=SeqID_59148
  Gene Ontology: Mol. function=protein serine/threonine kinase activity; Biological process=protein amino acid phosphorylation
  Homolog annotation: Hit_ID=B6U0Y9; Match level="QueryCoverage=45%, HitCoverage=6%, E-value=6e-17, Identity=92%"; Hit description=ATP binding protein
  Subcellular localization annotation: CTP_CleavageSite=38; ConfidenceScore=5.10e-01
TFQFPFSSSSKNQARLFISLAPLRFPNPRAGGEIETVAAQARKQQQQQRHKLEVYTEVLRRLHESGLPEARAPGFDDELWNHFNRLPARY

SEQ ID NO: 125123 - protein, 38 aa, Setaria italica
  Transcript Sequence Number=SeqID_59149
AHILQPSQCESVFKNTGFIWSANTNSNEFYSSQIKSLL

SEQ ID NO: 125124 - protein, 104 aa, Setaria italica
  Transcript Sequence Number=SeqID_59150
ELLGENVSEKQVSPEKQIRAALLRSRFADTILKAHEKALDQVTKKDPEKLRREREELERLQREERARLQAEAKAAEDARKKAEAAAAAEAAAEAKRQRSLREKQ

SEQ ID NO: 125125 - protein, 36 aa, Setaria italica
  Transcript Sequence Number=SeqID_59151
LLASASAFSTATQDSPLISSANKKRDESYKIEAHST

SEQ ID NO: 125126 - protein, 81 aa, Setaria italica
  misc_feature (43)..(43): Xaa can be any naturally occurring amino acid
  Transcript Sequence Number=SeqID_59152
  Gene Ontology: Mol. function=calcium ion binding
  Homolog annotation: Hit_ID=B9RST1; Match level="QueryCoverage=100%, HitCoverage=14%, E-value=5e-31, Identity=59%"; Hit description =Catalytic, putative
WFQRKDLEVKNDLGKKLQCSHYMPVVIPEGKALPCVIYCHGNXSGLSEGEHVTLGWNEKEDLKAVVNYLRTDGNVSCIALW

SEQ ID NO: 125127 - protein, 54 aa, Setaria italica
  Transcript Sequence Number=SeqID_59153
YKQATPPNGRNGRLLTPTSDDGEYVEYSFDSLSDMPYTMEDEDRMLMRAIMESL

SEQ ID NO: 125128 - protein, 73 aa, Setaria italica
  Transcript Sequence Number=SeqID_59154
  Gene Ontology: Mol. function=translation initiation factor activity
  Homolog annotation: Hit_ID=B6SYA1; Match level="QueryCoverage=54%, HitCoverage=7%, E-value=2e-13, Identity=87%"; Hit description =Eukaryotic translation initiation factor 3 subunit 6-interacting protein
MVITFCRFGLHNMNNILNNVEIKVCTGYYLSITVEDIIHVVESKPTKSHGDYFLRQILKFEEMMGELEKVQLD

SEQ ID NO: 125129 - protein, 58 aa, Setaria italica
  Transcript Sequence Number=SeqID_59155
  Gene Ontology: Mol. function=translation initiation factor activity
  Homolog annotation: Hit_ID=B6SYA1; Match level="QueryCoverage=74%, HitCoverage=8%, E-value=3e-14, Identity=93%"; Hit description =Eukaryotic translation initiation factor 3 subunit 6-interacting protein
ATREFNKILLYILKYKQYHQKSPQYDQILKKNEQMYALFGLICPCSFVVPLLSLTLSL

SEQ ID NO: 125130 - protein, 81 aa, Setaria italica
  misc_feature (13)..(13): Xaa can be any naturally occurring amino acid
  Transcript Sequence Number=SeqID_59156
  Gene Ontology: Mol. function=hydrolase activity, hydrolyzing O -glycosyl compounds; Cellular component=extracellular region; Biological process=carbohydrate metabolic process
  Homolog annotation: Hit_ID=Q8RVZ1; Match level="QueryCoverage=81%, HitCoverage=21%, E-value=9e-26, Identity=87%"; Hit description =Putative xylanase inhibitor protein
LTATPRCGFPEPXRLGAALRTGLFERIHVRFYGNDTCSLGKGGTYGVVGQWEKWTAAFPRTQVVPGTYDDRTEEDGRRPEG

SEQ ID NO: 125131 - protein, 46 aa, Setaria italica
  Transcript Sequence Number=SeqID_59157
TTGRVDSSLPFLIIVSAIYKSTTDEYYIFHMPCGDVVQSLTIIDRS

SEQ ID NO: 125132 - protein, 98 aa, Setaria italica
  misc_feature (10)..(10): Xaa can be any naturally occurring amino acid
  misc_feature (45)..(45): Xaa can be any naturally occurring amino acid
  Transcript Sequence Number=SeqID_59158
  Gene Ontology: Mol. function=metal ion binding; Biological process =metabolic process
  Homolog annotation: Hit_ID=Q5VMF2; Match level="QueryCoverage=91%, HitCoverage=8%, E-value=4e-40, Identity=84%"; Hit description=PHD zinc finger protein-like
MAGQDYSGMXCALLTVGSTVVSAALLRVMGGDVAELPLVATSRDXQGLGYFQALFSCIERVLISLKIKHFVLPAAHEAEGIWMNKFGFSRNTLPKKED

SEQ ID NO: 125133 - protein, 103 aa, Setaria italica
  Transcript Sequence Number=SeqID_59159
  Gene Ontology: Mol. function=metal ion binding
  Homolog annotation: Hit_ID=Q5VMF2; Match level="QueryCoverage=97%, HitCoverage=9%, E-value=5e-41, Identity=77%"; Hit description=PHD zinc finger protein-like
CEKEYHVGCLQSQWQVELKELPEGEWFCCGSCSETRSSLEKIISDGAQLLAEPDIEIIRKKHETRDLCMDTSTDLKWQLLCGKRATEDGRILLSAAVPIFINP

SEQ ID NO: 125134 - protein, 70 aa, Setaria italica
  misc_feature (8)..(8): Xaa can be any naturally occurring amino acid
  Transcript Sequence Number=SeqID_59160
  Homolog annotation: Hit_ID=B6T6X8; Match level="QueryCoverage=97%, HitCoverage=60%, E-value=1e-27, Identity=81%"; Hit description =Mitochondrial ribosomal protein L43
  Pfam annotation: Domain name=L51_S25_CI-B8; Domain location=23-69; Score=21.6; E_value=0.0006; Accession=PF05047.8; Description =Mitochondrial ribosomal protein L51  S25  CI-B8 domain
GGVWQLQXLVVNYCDWGGSSRGIRAFMEAHLPAFKEKNPHLEVVTELVRGQHPNLKGIYSKIFCSVHSPL

SEQ ID NO: 125135 - protein, 118 aa, Setaria italica
  misc_feature (21)..(21): Xaa can be any naturally occurring amino acid
  Transcript Sequence Number=SeqID_59161
  Gene Ontology: Mol. function=hydrolase activity; Cellular component =cytoplasm
  Homolog annotation: Hit_ID=B6T2Y2; Match level="QueryCoverage=93%, HitCoverage=42%, E-value=5e-56, Identity=94%"; Hit description =Hydroxyacylglutathione hydrolase
KEGEDPVVFTGDTLFIAGCGXFFEGTAEQMYQSLIVTLGSLPKSTQVYCGHEYTVKSLKFMLTLEPENEKMKQKLEWAEKQREANQPTVPSTIGDEFEINTFMRVDLPEITGPKFRLS

SEQ ID NO: 125136 - protein, 50 aa, Setaria italica
  Transcript Sequence Number=SeqID_59162
  Gene Ontology: Mol. function=hydrolase activity; Cellular component =cytoplasm
  Homolog annotation: Hit_ID=B6T2Y2; Match level="QueryCoverage=100%, HitCoverage=19%, E-value=3e-18, Identity=86%"; Hit description =Hydroxyacylglutathione hydrolase
QPTVPSTIGDEFEINTFMRVDLPEIQAKFGAKSPVEALREVRKIKDNWKG

SEQ ID NO: 125137 - protein, 65 aa, Setaria italica
  Transcript Sequence Number=SeqID_59163
  Gene Ontology: Mol. function=hydrolase activity, acting on acid anhydrides, catalyzing transmembrane movement of substances; Cellular component=integral to membrane; Biological process=metal ion transport
HASLTPHTFALQARNSENELSEASIGSVDYISSLYRSNGESEQIKQAVKGSAYGPEFVQAALSVE

SEQ ID NO: 125138 - protein, 102 aa, Setaria italica
  Transcript Sequence Number=SeqID_59164
  Gene Ontology: Mol. function=hydrolase activity, acting on acid anhydrides, catalyzing transmembrane movement of substances; Cellular component=integral to membrane; Biological process=metal ion transport
  Homolog annotation: Hit_ID=B9SG08; Match level="QueryCoverage=82%, HitCoverage=10%, E-value=1e-19, Identity=54%"; Hit description=Heavy metal cation transport atpase, putative
QLNKPKLQRWLDEFGEYYSRVVVALSLAVALLGPLLFKWPFFGNSVCRGSIYRGLGLMVAASPCALAVAPLAYATAISSLASKGCFRSLCWKGASSCCCRKF

SEQ ID NO: 125139 - protein, 104 aa, Setaria italica
  Transcript Sequence Number=SeqID_59165
  Gene Ontology: Mol. function=hydrolase activity, acting on acid anhydrides, catalyzing transmembrane movement of substances; Cellular component=integral to membrane; Biological process=metal ion transport
  Homolog annotation: Hit_ID=B9SG08; Match level="QueryCoverage=98%, HitCoverage=12%, E-value=8e-31, Identity=62%"; Hit description=Heavy metal cation transport atpase, putative
GNLKENHPEFALLLETSGEESVQFSNLSYTRVPVHDLEVGSHILVRAGEAVPVDGEVYQGSSTVTIEHLTGETKPLERTVGDAIPGGARNLEGMMIVKVTKSWE

SEQ ID NO: 125140 - protein, 83 aa, Setaria italica
  Transcript Sequence Number=SeqID_59166
  Gene Ontology: Mol. function=hydrolase activity, acting on acid anhydrides, catalyzing transmembrane movement of substances; Cellular component=integral to membrane; Biological process=metal ion transport
VICFCLVVFPFLFFGYFLSFFWLTVLLHEGGTLLVCLNSIRALNTPTWSLVDDIRQLFDGLRNYFSSKFNNSSSNYFANTVPL

SEQ ID NO: 125141 - protein, 67 aa, Setaria italica
  misc_feature (1)..(17): Xaa can be any naturally occurring amino acid
  Transcript Sequence Number=SeqID_59167
XXXXXXXXXXXXXXXXXPNQNMYCYTSIIRQHTHHCNAAKQSKFPHICFRLQGNRFKNGSLNCSLIL

SEQ ID NO: 125142 - protein, 50 aa, Setaria italica
  Transcript Sequence Number=SeqID_59168
  Gene Ontology: Mol. function=protoporphyrinogen oxidase activity; Biological process=porphyrin biosynthetic process
  Homolog annotation: Hit_ID=Q9FYV8; Match level="QueryCoverage=74%, HitCoverage=6%, E-value=9e-12, Identity=83%"; Hit description =Protoporphyrinogen IX oxidase
KHIYLRNAFPLYGRDYGSVLDAIEKMEKNLPGFFYAGKPLVFCSKQLLDK

SEQ ID NO: 125143 - protein, 36 aa, Setaria italica
  misc_feature (23)..(23): Xaa can be any naturally occurring amino acid
  Transcript Sequence Number=SeqID_59169
  Gene Ontology: Mol. function=protoporphyrinogen oxidase activity; Biological process=porphyrin biosynthetic process
  Homolog annotation: Hit_ID=Q9FYV8; Match level="QueryCoverage=97%, HitCoverage=8%, E-value=6e-10, Identity=70%"; Hit description =Protoporphyrinogen IX oxidase
DQYLYTTFVGGSHNRDLAGAPTXLGVEGQPTFVKHS

SEQ ID NO: 125144 - protein, 79 aa, Setaria italica
  misc_feature (13)..(13): Xaa can be any naturally occurring amino acid
  Transcript Sequence Number=SeqID_59170
  Gene Ontology: Mol. function=DNA-directed RNA polymerase activity; Biological process=transcription
  Homolog annotation: Hit_ID=Q5QM90; Match level="QueryCoverage=83%, HitCoverage=17%, E-value=1e-10, Identity=56%"; Hit description=RNA polymerase III subunit-like protein
KLVYAHYVERCPXPEPFFDPLLDEQPTSTRKRAPKTVEAVLSLEQKIIRTAALSDACKVFSCSIPYYFLIWLRVFFIFF

SEQ ID NO: 125145 - protein, 61 aa, Setaria italica
  Transcript Sequence Number=SeqID_59171
PYSMEGSSNASDDHHHAVAGGKRKHEALEVDEEESIIAENEVLWSMGSQKIFQHQIELQYG

SEQ ID NO: 125146 - protein, 84 aa, Setaria italica
  Transcript Sequence Number=SeqID_59172
  Gene Ontology: Cellular component=plasma membrane
  Homolog annotation: Hit_ID=UPI0001A827B6; Match level="QueryCoverage =100%, HitCoverage=16%, E-value=4e-25, Identity=67%"; Hit description= integral membrane single C2 domain protein
TFELIVEDKETQSVIFEVYDEDKLQQDKRLGVAKLAVNDLEPEVAREISLKLLHSVDPLKNRDTKDRGTLYVKVMYHSFTKEEQ

SEQ ID NO: 125147 - protein, 74 aa, Setaria italica
  Transcript Sequence Number=SeqID_59173
SVDLFFSSGQIAASRSRDKLFQDHIHCGLRYLILERLKEIHAARPPCGDRWVGVERRTAHQSGHGTLESQAAIL

SEQ ID NO: 125148 - protein, 60 aa, Setaria italica
  Transcript Sequence Number=SeqID_59174
LRLKPSLQGCETLPDSCYSHHRSVIDSFVRSMDMLMRANLPSVLPWLSSSYSCQLHWGSR

SEQ ID NO: 125149 - protein, 73 aa, Setaria italica
  misc_feature (14)..(14): Xaa can be any naturally occurring amino acid
  Transcript Sequence Number=SeqID_59175
  Gene Ontology: Mol. function=threonine-type endopeptidase activity; Cellular component=proteasome core complex; Biological process =ubiquitin-dependent protein catabolic process
  Homolog annotation: Hit_ID=A7P6B1; Match level="QueryCoverage=100%, HitCoverage=22%, E-value=3e-32, Identity=93%"; Hit description =Proteasome subunit alpha type
AKAIGSGSEGADSXLQEQYNKDLTLQEAETIALSILKQVMEEKVTPNNVDIAKVAPKYHLYTPAEVEAVIARL

SEQ ID NO: 125150 - protein, 106 aa, Setaria italica
  Transcript Sequence Number=SeqID_59176
  Gene Ontology: Mol. function=threonine-type endopeptidase activity; Cellular component=proteasome core complex; Biological process =ubiquitin-dependent protein catabolic process
  Homolog annotation: Hit_ID=A7P6B1; Match level="QueryCoverage=95%, HitCoverage=31%, E-value=1e-46, Identity=91%"; Hit description =Proteasome subunit alpha type
  Pfam annotation: Domain name=Proteasome; Domain location=10-106; Score=3.7; E_value=0.00011; Accession=PF00227.18; Description =Proteasome A-type and B-type
FQVEYAIEAIKLGSTAIGLKTKDGVVLAVEKRVTSPLLEPSSVEKIMEIDEHIGCAMSGLIADARTLVEHARVETQNHRFSYGEPMTVESSTTKLILVELRTTRRL

SEQ ID NO: 125151 - protein, 68 aa, Setaria italica
  misc_feature (2)..(2): Xaa can be any naturally occurring amino acid
  Transcript Sequence Number=SeqID_59177
QXFFLTMDSKASCQETQFSELNGSILTSSVHSHHVQQLEETLQMVVTAPIDKYIRTPLHKMTTFAHLF

SEQ ID NO: 125152 - protein, 51 aa, Setaria italica
  misc_feature (5)..(5): Xaa can be any naturally occurring amino acid
  Transcript Sequence Number=SeqID_59178
  Gene Ontology: Mol. function=threonine-type endopeptidase activity; Cellular component=proteasome core complex; Biological process =ubiquitin-dependent protein catabolic process
  Homolog annotation: Hit_ID=B8AN22; Match level="QueryCoverage=100%, HitCoverage=78%, E-value=8e-21, Identity=98%"; Hit description =Proteasome subunit alpha type
  Pfam annotation: Domain name=Proteasome_A_N; Domain location=8-30; Score=42.1; E_value=2.2e-09; Accession=PF10584.1; Description =Proteasome subunit A N-terminal signa
MFLTXTEYDRGVNTFSPEGRLFQVEYAIEAIKLGSTAIGLKTKDGVVLAVE

SEQ ID NO: 125153 - protein, 47 aa, Setaria italica
  Transcript Sequence Number=SeqID_59179
  Gene Ontology: Mol. function=threonine-type endopeptidase activity; Cellular component=proteasome core complex; Biological process =ubiquitin-dependent protein catabolic process
  Homolog annotation: Hit_ID=A7P6B1; Match level="QueryCoverage=76%, HitCoverage=11%, E-value=1e-12, Identity=97%"; Hit description =Proteasome subunit alpha type
TFCFLTFRSLLVLEPSSVEKIMEIDEHIGCAMSGLIADARTLVEHAR

SEQ ID NO: 125154 - protein, 90 aa, Setaria italica
  Transcript Sequence Number=SeqID_59180
  Gene Ontology: Mol. function=2 iron, 2 sulfur cluster binding; Cellular component=peroxisome; Biological process=regulation of epithelial cell differentiation
  Homolog annotation: Hit_ID=B9HNV5; Match level="QueryCoverage=100%, HitCoverage=6%, E-value=6e-33, Identity=75%"; Hit description =Xanthine dehydrogenase
PLNFKVSLLKGVPNPKAIHSSKAVGEPPFFLRSSVFFAIKDAILAARAEEGHIGWFPLDNPATPERIRMACVDSITKKFASAYYRPKLSV

SEQ ID NO: 125155 - protein, 62 aa, Setaria italica
  misc_feature (35)..(35): Xaa can be any naturally occurring amino acid
  Transcript Sequence Number=SeqID_59181
EEVLTETSSLGAPSPSGSSIGENSSSEAGGEDGEXEEEVESKLKEGDALGCLDALEDSLPIK

SEQ ID NO: 125156 - protein, 64 aa, Setaria italica
  misc_feature (26)..(26): Xaa can be any naturally occurring amino acid
  misc_feature (34)..(34): Xaa can be any naturally occurring amino acid
  Transcript Sequence Number=SeqID_59182
YVQLSCYTLTPWLTSKVAPGSLANEXSNKDKLKXDRKELAAALENPNLRQLVDECLCSNDPYSH

SEQ ID NO: 125157 - protein, 67 aa, Setaria italica
  misc_feature (34)..(34): Xaa can be any naturally occurring amino acid
  Transcript Sequence Number=SeqID_59183
  Gene Ontology: Mol. function=zinc ion binding; Cellular component =intracellular
ELGSSKHLPRKFSMGSGNLLMKKVVKPSSFDLDXKFDQRWMEDVTCPICLDIPHNAVLLRCTSYEKG

SEQ ID NO: 125158 - protein, 59 aa, Setaria italica
  Transcript Sequence Number=SeqID_59184
GRELNIYIQEPTTVTNHETRCKSTVRKRLTAVFSVQEIYPCRRCSGSPNFLYRKFGLPE

SEQ ID NO: 125159 - protein, 72 aa, Setaria italica
  Transcript Sequence Number=SeqID_59185
  Gene Ontology: Mol. function=nucleic acid binding
  Homolog annotation: Hit_ID=B6T3W5; Match level="QueryCoverage=83%, HitCoverage=23%, E-value=1e-23, Identity=88%"; Hit description =Cellular nucleic acid-binding protein
  Pfam annotation: Domain name=zf-CCHC; Domain location=22-39; Score =30.7; E_value=4.1e-06; Accession=PF00098.15; Description=Zinc knuckle
  Pfam annotation: Domain name=zf-CCHC; Domain location=41-58; Score =30.9; E_value=3.8e-06; Accession=PF00098.15; Description=Zinc knuckle
  Pfam module annotation: Pfam domain module=zf-CCHC::zf-CCHC; Domain location=22-39::41-58
TVTVPPFFCFNSHFAAECTSATVCWNCKESGHIATECKNEALCHTCNKTGHLARDCPTSGSNVKLCNNCFKP

SEQ ID NO: 125160 - protein, 54 aa, Setaria italica
  Transcript Sequence Number=SeqID_59186
LCASNVNGAFCSLSTRAPGSNLFTIVCFAQIMRDVNAFRIGEKIYTFLLARSGC

SEQ ID NO: 125161 - protein, 91 aa, Setaria italica
  misc_feature (45)..(45): Xaa can be any naturally occurring amino acid
  Transcript Sequence Number=SeqID_59187
RSVAALAERRGRGREMAPASGFGRVVGNARSFVGLAYYLWVKPAXRQLQKEQEERAALAAASDPYRYVEKRKPIPDPQDTGLIYGKEKAYK

SEQ ID NO: 125162 - protein, 52 aa, Setaria italica
  Transcript Sequence Number=SeqID_59188
RFKKLGCNLISSIASLDELRGLEWHIRFQIIKGICQGLHHLHKEKSIIHMDL

SEQ ID NO: 125163 - protein, 84 aa, Setaria italica
  Transcript Sequence Number=SeqID_59189
  Gene Ontology: Mol. function=protein serine/threonine kinase activity; Biological process=protein amino acid phosphorylation
  Homolog annotation: Hit_ID=Q53P17; Match level="QueryCoverage=89%, HitCoverage=26%, E-value=1e-22, Identity=63%"; Hit description =Protein kinase domain
IGKGLLCFEYISKGSLEDHVTDELRGLEWHIRFQIIKGICQGLHHLHKEKSIIHMDLKPANILLNDDLVPKITDFGISRSGETS

SEQ ID NO: 125164 - protein, 62 aa, Setaria italica
  misc_feature (19)..(19): Xaa can be any naturally occurring amino acid
  Transcript Sequence Number=SeqID_59190
  Gene Ontology: Mol. function=serine-type endopeptidase activity; Cellular component=chloroplast; Biological process=proteolysis
  Homolog annotation: Hit_ID=P0C314; Match level="QueryCoverage=88%, HitCoverage=25%, E-value=5e-17, Identity=83%"; Hit description=ATP -dependent Clp protease proteolytic subunit
GGWLISEMAIFDTMQTVTXSDIYTICLGIAASIAFFIILGEEPTKRIAFPHPRIVWCSEKYI

SEQ ID NO: 125165 - protein, 94 aa, Setaria italica
  Transcript Sequence Number=SeqID_59191
  Gene Ontology: Mol. function=transferase activity, transferring glycosyl groups; Cellular component=chloroplast
  Homolog annotation: Hit_ID=B6SRV6; Match level="QueryCoverage=70%, HitCoverage=8%, E-value=2e-27, Identity=87%"; Hit description =Stachyose synthase
MAGYWDGDDDAAGGDGSEPVYLVVLPLLEGQFRAALQGNDRDELQFCIESGDKAVRTDQGAHAVYLHAGDDPFDTVAAAVKAVEKHLNTFHHRE

SEQ ID NO: 125166 - protein, 130 aa, Setaria italica
  Transcript Sequence Number=SeqID_59192
  Gene Ontology: Mol. function=transferase activity, transferring glycosyl groups; Cellular component=chloroplast
  Homolog annotation: Hit_ID=B6SRV6; Match level="QueryCoverage=88%, HitCoverage=14%, E-value=2e-36, Identity=69%"; Hit description =Stachyose synthase
PLPLRFKLWWMTQRMGTSGRDVPLETQFMLVEVPPASGDGDDDAAGGDGSEPVYLVVLPLLEGQFRAALQGNDRDELQFCIESGDKAVRTDQGAHAVYLHAGDDPFDTVAAAVKAVEKLPCNYVSYLPGS

SEQ ID NO: 125167 - protein, 45 aa, Setaria italica
  Transcript Sequence Number=SeqID_59193
RCALACVCLTCSDKPGNHNFELLKKLVLPDGSVLRAQLPRPAPTR

SEQ ID NO: 125168 - protein, 82 aa, Setaria italica
  Transcript Sequence Number=SeqID_59194
  Homolog annotation: Hit_ID=B6SYF6; Match level="QueryCoverage=92%, HitCoverage=20%, E-value=9e-26, Identity=72%"; Hit description =Catalytic/ hydrolase
VTFYEFQVNNALMDLIKATKSAMKPEEWSAQPENVSGTLKKAKRLRFILKDNCLGAHILCCIFIRNRGTCFRKTHYRHDANR

SEQ ID NO: 125169 - protein, 64 aa, Setaria italica
  Transcript Sequence Number=SeqID_59195
  Homolog annotation: Hit_ID=B6TBY5; Match level="QueryCoverage=87%, HitCoverage=25%, E-value=3e-13, Identity=64%"; Hit description =Proline-rich protein
MGSTPQRLLGVCAVLMAIAVANAASGEVASVVIGLAKCADCTRKNMKAEAAFKGLKVAIKCKDG

SEQ ID NO: 125170 - protein, 79 aa, Setaria italica
  Transcript Sequence Number=SeqID_59196
MKLKKKSMHMTPVSHLFLGKKKGLTSHTCNITIILLQIMSSAATSRKITICMQLRGKHNGFNAWPEGGRSESVTQTVLC

SEQ ID NO: 125171 - protein, 83 aa, Setaria italica
  Transcript Sequence Number=SeqID_59197
  Homolog annotation: Hit_ID=B6SS76; Match level="QueryCoverage=92%, HitCoverage=12%, E-value=8e-11, Identity=50%"; Hit description =Microtubule-associated protein TORTIFOLIA1
VSASTALRPLTDALLHEQDQCAQLAAALATAAAVEASALTADLVSYLQKLQPRLLKLLRSNAFKAKPALITLIGASAAMGGDA

SEQ ID NO: 125172 - protein, 51 aa, Setaria italica
  Transcript Sequence Number=SeqID_59198
SVNCWSFLWSRWRLQFSFTRQPFFEGKKKGNLATSKFYGKTFTRSRKEIGS

SEQ ID NO: 125173 - protein, 65 aa, Setaria italica
  Transcript Sequence Number=SeqID_59199
  Gene Ontology: Mol. function=DNA binding; Cellular component=nucleus; Biological process=regulation of transcription
  Homolog annotation: Hit_ID=B9SLX2; Match level="QueryCoverage=63%, HitCoverage=13%, E-value=2e-16, Identity=97%"; Hit description=R2r3 -myb transcription factor, putative
APPIRAQIKVLIGLWANRERDQSNRTGKSCRLRWLNYLKPDIKRGNLTPEEQLLILELHSKWGNR

SEQ ID NO: 125174 - protein, 99 aa, Setaria italica
  Transcript Sequence Number=SeqID_59200
  Gene Ontology: Mol. function=nucleoside-triphosphatase activity; Cellular component=endoplasmic reticulum; Biological process=cell division
  Homolog annotation: Hit_ID=Q01G65; Match level="QueryCoverage=84%, HitCoverage=28%, E-value=2e-45, Identity=74%"; Hit description =Putative transitional endoplasmic reticulum ATPase (ISS) (Fragment)
  Pfam annotation: Domain name=AAA; Domain location=12-98; Score=39.1; E_value=8.7e-09; Accession=PF00004.21; Description=ATPase family associated with various cellular activities (AAA)
KFEKFGMSPSKGVLFYGPPGCGKTLLAKAIANECQANFISVKGPELLTMWFGESEANVREIFDKARQSAPCVLFFDELDSIATQRGSSVGDAGGAADRV

SEQ ID NO: 125175 - protein, 75 aa, Setaria italica
  misc_feature (59)..(59): Xaa can be any naturally occurring amino acid
  Transcript Sequence Number=SeqID_59201
  Gene Ontology: Mol. function=nucleoside-triphosphatase activity; Cellular component=endoplasmic reticulum; Biological process=cell division
  Homolog annotation: Hit_ID=Q9SCN8; Match level="QueryCoverage=89%, HitCoverage=8%, E-value=1e-26, Identity=88%"; Hit description=Cell division control protein 48 homolog D
KLLKSVLEDVDLEHIAKDTHGYVGADLAALCTEAALQCIREKMDIIDLDDETIDAEILXNSMSVSNDHFKTALGT

SEQ ID NO: 125176 - protein, 70 aa, Setaria italica
  misc_feature (6)..(6): Xaa can be any naturally occurring amino acid
  misc_feature (19)..(19): Xaa can be any naturally occurring amino acid
  Transcript Sequence Number=SeqID_59202
  Gene Ontology: Mol. function=nucleoside-triphosphatase activity; Cellular component=endoplasmic reticulum; Biological process=cell division
  Homolog annotation: Hit_ID=Q01G65; Match level="QueryCoverage=57%, HitCoverage=3%, E-value=9e-14, Identity=95%"; Hit description =Putative transitional endoplasmic reticulum ATPase (ISS) (Fragment)
ELLTMXFGESEANVREIFXKARQSAPCVLFFDELDSIATQRGSSVGDAGGAADRVLNQTPWPQQSRVNDV

SEQ ID NO: 125177 - protein, 150 aa, Setaria italica
  misc_feature (14)..(14): Xaa can be any naturally occurring amino acid
  Transcript Sequence Number=SeqID_59203
  Gene Ontology: Mol. function=nucleoside-triphosphatase activity; Cellular component=microsome; Biological process=cell division
  Homolog annotation: Hit_ID=Q9SCN8; Match level="QueryCoverage=100%, HitCoverage=51%, E-value=3e-71, Identity=66%"; Hit description=Cell division control protein 48 homolog D
  Pfam annotation: Domain name=AAA; Domain location=9-149; Score=191.9; E_value=1.8e-54; Accession=PF00004.21; Description=ATPase family associated with various cellular activities (AAA)
  Pfam annotation: Domain name=AAA_2; Domain location=5-138; Score= -40.5; E_value=0.015; Accession=PF07724.6; Description=ATPase family associated with various
  Pfam annotation: Domain name=AAA_5; Domain location=9-144; Score= -23.6; E_value=0.085; Accession=PF07728.6; Description=ATPase family associated with various
  Pfam module annotation: Pfam domain module=AAA::AAA_2::AAA_5; Domain location=9-149::5-138::9-144
KFGMSPSKGVLFYXPPGCGKTLLAKVIANECQANFISVKGPELLTMWFGESEANVREIFDKARQSAPCVLFFDELDSIATQRGSSVGDAGGAADRVLNQLLTEMDGMNAKKTVFIIGATNRPDIIDPALLRPGRLDQLIYIPLPDEQSRL

SEQ ID NO: 125178 - protein, 94 aa, Setaria italica
  misc_feature (83)..(83): Xaa can be any naturally occurring amino acid
  Transcript Sequence Number=SeqID_59204
  Gene Ontology: Mol. function=nucleoside-triphosphatase activity; Cellular component=microsome; Biological process=cell division
  Homolog annotation: Hit_ID=Q01G65; Match level="QueryCoverage=97%, HitCoverage=29%, E-value=9e-49, Identity=71%"; Hit description =Putative transitional endoplasmic reticulum ATPase (ISS) (Fragment)
LFKRELQETVQYPVEHPEKFEKFGMSPSKGVLFYGPPGCGKTLLAKAIANECQANFISVKGPELLTMWFGESEANVREIFDKXARQSAPCVLFF

SEQ ID NO: 125179 - protein, 142 aa, Setaria italica
  Transcript Sequence Number=SeqID_59205
  Gene Ontology: Mol. function=nucleoside-triphosphatase activity; Biological process=cell division
  Homolog annotation: Hit_ID=Q9SCN8; Match level="QueryCoverage=100%, HitCoverage=50%, E-value=5e-64, Identity=63%"; Hit description=Cell division control protein 48 homolog D
  Pfam annotation: Domain name=AAA; Domain location=1-130; Score=127.2; E_value=5.5e-35; Accession=PF00004.21; Description=ATPase family associated with various cellular activities (AAA)
PCVLFFDELDSIATQRGSSVGDAGGAADRVLNQLLTEMDGMNAKKTVFIIGATNRPDIIDPALLRPGRLDQLIYIPLPDEQSRLQIFKACLRKSPVAKDVDLNALAKYTQGFSGADITEICQRACKYAIRENIEKDIEMERR

SEQ ID NO: 125180 - protein, 146 aa, Setaria italica
  Transcript Sequence Number=SeqID_59206
  Gene Ontology: Mol. function=nucleoside-triphosphatase activity; Cellular component=endoplasmic reticulum; Biological process=cell division
  Homolog annotation: Hit_ID=Q9SCN8; Match level="QueryCoverage=99%, HitCoverage=51%, E-value=1e-67, Identity=65%"; Hit description=Cell division control protein 48 homolog D
  Pfam annotation: Domain name=AAA; Domain location=3-146; Score=189.6; E_value=8.7e-54; Accession=PF00004.21; Description=ATPase family associated with various cellular activities (AAA)
LWKTLLAKAIANECQANFISVKGPELLTMWFGESEANVREIFDKARQSAPCVLFFDELDSIATQRGSSVGDAGGAADRVLNQLLTEMDGMNAKKTVFIIGATNRPDIIDPALLRPGRLDQLIYIPLPDEQSRLQIFKACLRKSPVA

SEQ ID NO: 125181 - protein, 141 aa, Setaria italica
  Transcript Sequence Number=SeqID_59207
  Gene Ontology: Mol. function=nucleoside-triphosphatase activity; Cellular component=endoplasmic reticulum; Biological process=cell division
  Homolog annotation: Hit_ID=Q9SCN8; Match level="QueryCoverage=100%, HitCoverage=50%, E-value=9e-66, Identity=65%"; Hit description=Cell division control protein 48 homolog D
  Pfam annotation: Domain name=AAA; Domain location=1-141; Score=182.3; E_value=1.4e-51; Accession=PF00004.21; Description=ATPase family associated with various cellular activities (AAA)
KTLLAKAIANECQANFISVKGPELLTMWFGESEANVREIFDKARQSAPCVLFFDELDSIATQRGSSVGDAGGAADRVLNQLLTEMDGMNAKKTVFIIGATNRPDIIDPALLRPGRLDQLIYIPLPDEQSRLQIFKACLRKS

SEQ ID NO: 125182 - protein, 143 aa, Setaria italica
  Transcript Sequence Number=SeqID_59208
  Gene Ontology: Mol. function=nucleoside-triphosphatase activity; Biological process=cell division
  Homolog annotation: Hit_ID=Q9SCN8; Match level="QueryCoverage=100%, HitCoverage=51%, E-value=1e-64, Identity=63%"; Hit description=Cell division control protein 48 homolog D
  Pfam annotation: Domain name=AAA; Domain location=1-131; Score=133.1; E_value=8.8e-37; Accession=PF00004.21; Description=ATPase family associated with various cellular activities (AAA)
APCVLFFDELDSIATQRGSSVGDAGGAADRVLNQLLTEMDGMNAKKTVFIIGATNRPDIIDPALLRPGRLDQLIYIPLPDEQSRLQIFKACLRKSPVAKDVDLNALAKYTQGFSGADITEICQRACKYAIRENIEKDIEMERR

SEQ ID NO: 125183 - protein, 139 aa, Setaria italica
  Transcript Sequence Number=SeqID_59209
  Gene Ontology: Mol. function=nucleoside-triphosphatase activity; Cellular component=endoplasmic reticulum; Biological process=cell division
  Homolog annotation: Hit_ID=Q9SCN8; Match level="QueryCoverage=100%, HitCoverage=50%, E-value=1e-64, Identity=65%"; Hit description=Cell division control protein 48 homolog D
  Pfam annotation: Domain name=AAA; Domain location=1-139; Score=171.5; E_value=2.4e-48; Accession=PF00004.21; Description=ATPase family associated with various cellular activities (AAA)
LLAKAIANECQANFISVKGPELLTMWFGESEANVREIFDKARQSAPCVLFFDELDSIATQRGSSVGDAGGAADRVLNQLLTEMDGMNAKKTVFIIGATNRPDIIDPALLRPGRLDQLIYIPLPDEQSRLQIFKACLRKS

SEQ ID NO: 125184 - protein, 149 aa, Setaria italica
  misc_feature (6)..(6): Xaa can be any naturally occurring amino acid
  misc_feature (17)..(17): Xaa can be any naturally occurring amino acid
  misc_feature (21)..(21): Xaa can be any naturally occurring amino acid
  misc_feature (50)..(50): Xaa can be any naturally occurring amino acid
  Transcript Sequence Number=SeqID_59210
  Gene Ontology: Mol. function=nucleoside-triphosphatase activity; Cellular component=endoplasmic reticulum; Biological process=cell division
  Homolog annotation: Hit_ID=Q9SCN8; Match level="QueryCoverage=99%, HitCoverage=51%, E-value=5e-67, Identity=61%"; Hit description=Cell division control protein 48 homolog D
  Pfam annotation: Domain name=AAA; Domain location=2-149; Score=176.0; E_value=1.1e-49; Accession=PF00004.21; Description=ATPase family associated with various cellular activities (AAA)
RNECQXNFISVKGPELXTMWXGESEANVREIFDKARQSAPCVLFFDELDXIATQRGSSVGDAGGAADRVLNQLLTEMDGMNAKKTVFIIGATNRPDIIDPALLRPGRLDQLIYIPLPDEQSRLQIFKACLRKSPVAKDVDLNALAKYTQ

SEQ ID NO: 125185 - protein, 97 aa, Setaria italica
  misc_feature (72)..(72): Xaa can be any naturally occurring amino acid
  misc_feature (81)..(81): Xaa can be any naturally occurring amino acid
  Transcript Sequence Number=SeqID_59211
  Gene Ontology: Mol. function=nucleoside-triphosphatase activity; Cellular component=endoplasmic reticulum; Biological process=cell division
  Homolog annotation: Hit_ID=P54774; Match level="QueryCoverage=73%, HitCoverage=8%, E-value=4e-26, Identity=81%"; Hit description=Cell division cycle protein 48 homolog
EKDIEMERRRKDDPEAMEEDEVDEIAEIRAVHFEESMKYARRSVSDADIRKYQAFAQTLQQSRGFGSEFRFXDQPTAAAAXPFAAPAAAADDDDLYS

SEQ ID NO: 125186 - protein, 138 aa, Setaria italica
  misc_feature (10)..(10): Xaa can be any naturally occurring amino acid
  misc_feature (12)..(12): Xaa can be any naturally occurring amino acid
  Transcript Sequence Number=SeqID_59212
  Gene Ontology: Mol. function=nucleoside-triphosphatase activity; Cellular component=microsome; Biological process=cell division
  Homolog annotation: Hit_ID=Q9SCN8; Match level="QueryCoverage=100%, HitCoverage=50%, E-value=9e-61, Identity=64%"; Hit description=Cell division control protein 48 homolog D
  Pfam annotation: Domain name=AAA; Domain location=1-137; Score=147.1; E_value=5.5e-41; Accession=PF00004.21; Description=ATPase family associated with various cellular activities (AAA)
GESEANVREXFXKARQSAPCVLFFDELDSIATQRGSSVGDAGGAADRVLNQLLTEMDGMNAKKTVFIIGATNRPDIIDPALLRPGRLDQLIYIPLPDEQSRLQIFKACLRKSPVAKDVDLNALAKYTQGFSGADITEI

SEQ ID NO: 125187 - protein, 135 aa, Setaria italica
  misc_feature (31)..(31): Xaa can be any naturally occurring amino acid
  misc_feature (46)..(46): Xaa can be any naturally occurring amino acid
  Transcript Sequence Number=SeqID_59213
  Gene Ontology: Mol. function=nucleoside-triphosphatase activity; Cellular component=microsome; Biological process=cell division
  Homolog annotation: Hit_ID=Q9SCN8; Match level="QueryCoverage=100%, HitCoverage=49%, E-value=8e-59, Identity=63%"; Hit description=Cell division control protein 48 homolog D
  Pfam annotation: Domain name=AAA; Domain location=1-135; Score=122.3; E_value=1.5e-33; Accession=PF00004.21; Description=ATPase family associated with various cellular activities (AAA)
NECQANFISVKGPELLTMWFGESEANVREIXFDKARQSAPCVLFFXDELDSIATQRGSSVGDAGGAADRVLNQLLTEMDGMNAKKTVFIIGATNRPDIIDPALLRPGRLDQLIYIPLPDEQSRLQIFKACLRKSP

SEQ ID NO: 125188 - protein, 132 aa, Setaria italica
  misc_feature (33)..(33): Xaa can be any naturally occurring amino acid
  Transcript Sequence Number=SeqID_59214
  Gene Ontology: Mol. function=nucleoside-triphosphatase activity; Cellular component=endoplasmic reticulum; Biological process=cell division
  Homolog annotation: Hit_ID=Q9SCN8; Match level="QueryCoverage=100%, HitCoverage=49%, E-value=6e-60, Identity=64%"; Hit description=Cell division control protein 48 homolog D
  Pfam annotation: Domain name=AAA; Domain location=1-132; Score=144.3; E_value=3.9e-40; Accession=PF00004.21; Description=ATPase family associated with various cellular activities (AAA)
AIANECQANFISVKGPELLTMWFGESEANVREXFDKARQSAPCVLFFDELDSIATQRGSSVGDAGGAADRVLNQLLTEMDGMNAKKTVFIIGATNRPDIIDPALLRPGRLDQLIYIPLPDEQSRLQIFKACL

SEQ ID NO: 125189 - protein, 131 aa, Setaria italica
  misc_feature (14)..(14): Xaa can be any naturally occurring amino acid
  Transcript Sequence Number=SeqID_59215
  Gene Ontology: Mol. function=nucleoside-triphosphatase activity; Cellular component=endoplasmic reticulum; Biological process=cell division
  Homolog annotation: Hit_ID=Q9SCN8; Match level="QueryCoverage=100%, HitCoverage=49%, E-value=3e-59, Identity=63%"; Hit description=Cell division control protein 48 homolog D
  Pfam annotation: Domain name=AAA; Domain location=1-131; Score=142.5; E_value=1.3e-39; Accession=PF00004.21; Description=ATPase family associated with various cellular activities (AAA)
ANECQANFISVKGXELLTMWFGESEANVREIFDKARQSAPCVLFFDELDSIATQRGSSVGDAGGAADRVLNQLLTEMDGMNAKKTVFIIGATNRPDIIDPALLRPGRLDQLIYIPLPDEQSRLQIFKACLR

SEQ ID NO: 125190 - protein, 149 aa, Setaria italica
  misc_feature (7)..(7): Xaa can be any naturally occurring amino acid
  Transcript Sequence Number=SeqID_59216
  Gene Ontology: Mol. function=ATP binding; Cellular component =microsome; Biological process=cell division
  Homolog annotation: Hit_ID=P54774; Match level="QueryCoverage=91%, HitCoverage=51%, E-value=3e-61, Identity=69%"; Hit description=Cell division cycle protein 48 homolog
  Pfam annotation: Domain name=AAA; Domain location=1-83; Score=-16.1; E_value=0.00063; Accession=PF00004.21; Description=ATPase family associated with various cellular activities (AAA)
IIGATNXRPDIIDPALLRPGRLDQLIYIPLPDEQSRLQIFKACLRKSPVAKDVDLNALAKYTQGFSGADITEICQRACKYAIRENIEKDIEMERRRKDDPEAMEEDEVDEIAEIRAVHFEESMKYARRSVSDADIRKVTKRTLTNPKKQ

SEQ ID NO: 125191 - protein, 155 aa, Setaria italica
  Transcript Sequence Number=SeqID_59217
  Gene Ontology: Mol. function=ATP binding; Cellular component =microsome; Biological process=cell division
  Homolog annotation: Hit_ID=P54774; Match level="QueryCoverage=100%, HitCoverage=53%, E-value=5e-75, Identity=72%"; Hit description=Cell division cycle protein 48 homolog
  Pfam annotation: Domain name=AAA; Domain location=1-80; Score=-13.4; E_value=0.00037; Accession=PF00004.21; Description=ATPase family associated with various cellular activities (AAA)
GATNRPDIIDPALLRPGRLDQLIYIPLPDEQSRLQIFKACLRKSPVAKDVDLNALAKYTQGFSGADITEICQRACKYAIRENIEKDIEMERRRKDDPEAMEEDEVDEIAEIRAVHFEESMKYARRSVSDADIRKYQAFAQTLQQSRGFGSEFRFP

SEQ ID NO: 125192 - protein, 70 aa, Setaria italica
  Transcript Sequence Number=SeqID_59218
  Gene Ontology: Mol. function=nucleoside-triphosphatase activity; Cellular component=endoplasmic reticulum; Biological process=cell division
  Homolog annotation: Hit_ID=Q9SCN8; Match level="QueryCoverage=57%, HitCoverage=4%, E-value=2e-16, Identity=100%"; Hit description=Cell division control protein 48 homolog D
KGLVHFEESMKYARRSVSDADIRKYQAFAQTLQQSRGFGSEFRFPDQPTAAAADPFAAPAAAADDDDLYS

SEQ ID NO: 125193 - protein, 72 aa, Setaria italica
  Transcript Sequence Number=SeqID_59219
  Gene Ontology: Mol. function=nucleoside-triphosphatase activity; Cellular component=endoplasmic reticulum; Biological process=cell division
  Homolog annotation: Hit_ID=Q9SCN8; Match level="QueryCoverage=59%, HitCoverage=5%, E-value=2e-16, Identity=95%"; Hit description=Cell division control protein 48 homolog D
KNTRAVHFEESMKYARRSVSDADIRKYQAFAQTLQQSRGFGSEFRFPDQPTAAAADPFAAPAAAADDDDLYS

SEQ ID NO: 125194 - protein, 150 aa, Setaria italica
  misc_feature (14)..(14): Xaa can be any naturally occurring amino acid
  Transcript Sequence Number=SeqID_59220
  Gene Ontology: Mol. function=ATP binding; Cellular component =microsome; Biological process=cell division
  Homolog annotation: Hit_ID=P54774; Match level="QueryCoverage=100%, HitCoverage=52%, E-value=8e-71, Identity=70%"; Hit description=Cell division cycle protein 48 homolog
  Pfam annotation: Domain name=AAA; Domain location=1-76; Score=-37.5; E_value=0.049; Accession=PF00004.21; Description=ATPase family associated with various cellular activities (AAA)
RPDIIDPALLRPGXLDQLIYIPLPDEQSRLQIFKACLRKSPVAKDVDLNALAKYTQGFSGADITEICQRACKYAIRENIEKDIEMERRRKDDPEAMEEDEVDEIAEIRAVHFEESMKYARRSVSDADIRKYQAFAQTLQQSRGFGSEFRF

SEQ ID NO: 125195 - protein, 143 aa, Setaria italica
  Transcript Sequence Number=SeqID_59221
  Gene Ontology: Mol. function=ATP binding; Cellular component =microsome; Biological process=cell division
  Homolog annotation: Hit_ID=P54774; Match level="QueryCoverage=95%, HitCoverage=51%, E-value=2e-62, Identity=69%"; Hit description=Cell division cycle protein 48 homolog
  Pfam annotation: Domain name=AAA; Domain location=1-78; Score=-21.1; E_value=0.0018; Accession=PF00004.21; Description=ATPase family associated with various cellular activities (AAA)
TNRPDIIDPALLRPGRLDQLIYIPLPDEQSRLQIFKACLRKSPVAKDVDLNALAKYTQGFSGADITEICQRACKYAIRENIEKDIEMERRRKDDPEAMEEDEVDEIAEIRAVHFEESMKYARRSVSDADIRKYQALPRPSAVS

SEQ ID NO: 125196 - protein, 116 aa, Setaria italica
  misc_feature (19)..(19): Xaa can be any naturally occurring amino acid
  Transcript Sequence Number=SeqID_59222
  Gene Ontology: Mol. function=nucleoside-triphosphatase activity; Cellular component=endoplasmic reticulum; Biological process=cell division
  Homolog annotation: Hit_ID=P54774; Match level="QueryCoverage=77%, HitCoverage=11%, E-value=4e-35, Identity=82%"; Hit description=Cell division cycle protein 48 homolog
DITEICQRACKYAIREEHXEKDIEMERRRKDDPEAMEEDEVDEIAEIRAVHFEESMKYARRSVSDADIRKYQAFAQTLQQSRGFGSEFRFPDQPTAAAADPFAAPAAAADDDDLYS

SEQ ID NO: 125197 - protein, 104 aa, Setaria italica
  misc_feature (6)..(6): Xaa can be any naturally occurring amino acid
  Transcript Sequence Number=SeqID_59223
  Gene Ontology: Mol. function=nucleoside-triphosphatase activity; Cellular component=endoplasmic reticulum; Biological process=cell division
  Homolog annotation: Hit_ID=Q9SCN8; Match level="QueryCoverage=96%, HitCoverage=45%, E-value=2e-41, Identity=61%"; Hit description=Cell division control protein 48 homolog D
  Pfam annotation: Domain name=AAA; Domain location=1-104; Score=45.5; E_value=2.1e-10; Accession=PF00004.21; Description=ATPase family associated with various cellular activities (AAA)
GCGKTXLAKAIANECQANFISVKGPELLTMWFGESEANVREIFDKARQSAPCVLFFDELDSIATQRGSSVGDAGGAADRVLNQLLTEMDGMNAKKTVFIIRCPT

SEQ ID NO: 125198 - protein, 135 aa, Setaria italica
  Transcript Sequence Number=SeqID_59224
  Gene Ontology: Mol. function=nucleoside-triphosphatase activity; Cellular component=endoplasmic reticulum; Biological process=cell division
  Homolog annotation: Hit_ID=Q9SCN8; Match level="QueryCoverage=100%, HitCoverage=50%, E-value=2e-61, Identity=63%"; Hit description=Cell division control protein 48 homolog D
  Pfam annotation: Domain name=AAA; Domain location=1-134; Score=134.3; E_value=3.9e-37; Accession=PF00004.21; Description=ATPase family associated with various cellular activities (AAA)
LLTMWFGESEANVREIFDKARQSAPCVLFFDELDSIATQRGSSVGDAGGAADRVLNQLLTEMDGMNAKKTVFIIGATNRPDIIDPALLRPGRLDQLIYIPLPDEQSRLQIFKACLRKSPVAKDVDLNALAKYTQG

SEQ ID NO: 125199 - protein, 118 aa, Setaria italica
  misc_feature (11)..(11): Xaa can be any naturally occurring amino acid
  misc_feature (17)..(17): Xaa can be any naturally occurring amino acid
  Transcript Sequence Number=SeqID_59225
  Gene Ontology: Mol. function=nucleoside-triphosphatase activity; Cellular component=microsome; Biological process=cell division
  Homolog annotation: Hit_ID=Q9SCN8; Match level="QueryCoverage=94%, HitCoverage=47%, E-value=1e-44, Identity=61%"; Hit description=Cell division control protein 48 homolog D
  Pfam annotation: Domain name=AAA; Domain location=1-116; Score=79.3; E_value=1.4e-20; Accession=PF00004.21; Description=ATPase family associated with various cellular activities (AAA)
ESEANVREIFXKARQSXPCVLFFDELDSIATQRGSSVGDAGGAADRVLNQLLTEMDGMNAKKTVFIIGATNRPDIIDPALLRPGRLDQLIYIPLPDEQSRLQIFKACLKESLLWLKEC

SEQ ID NO: 125200 - protein, 121 aa, Setaria italica
  misc_feature (41)..(41): Xaa can be any naturally occurring amino acid
  misc_feature (62)..(62): Xaa can be any naturally occurring amino acid
  Transcript Sequence Number=SeqID_59226
  Gene Ontology: Mol. function=nucleoside-triphosphatase activity; Cellular component=microsome; Biological process=cell division
  Homolog annotation: Hit_ID=Q9SCN8; Match level="QueryCoverage=100%, HitCoverage=48%, E-value=3e-60, Identity=69%"; Hit description=Cell division control protein 48 homolog D
  Pfam annotation: Domain name=AAA; Domain location=1-120; Score=102.6; E_value=1.3e-27; Accession=PF00004.21; Description=ATPase family associated with various cellular activities (AAA)
SEANVREIFDKARQSAPCVLFFDELDSIATQRGSSVGDAGXAADRVLNQLLTEMDGMNAKKXVFIIGATNRPDIIDPALLRPGRLDQLIYIPLPDEQSRLQIFKACLRKSPVAKDVDLNAL

SEQ ID NO: 125201 - protein, 127 aa, Setaria italica
  Transcript Sequence Number=SeqID_59227
  Gene Ontology: Mol. function=nucleoside-triphosphatase activity; Cellular component=microsome; Biological process=cell division
  Homolog annotation: Hit_ID=Q9SCN8; Match level="QueryCoverage=100%, HitCoverage=49%, E-value=1e-55, Identity=63%"; Hit description=Cell division control protein 48 homolog D
  Pfam annotation: Domain name=AAA; Domain location=1-126; Score=118.0; E_value=3.2e-32; Accession=PF00004.21; Description=ATPase family associated with various cellular activities (AAA)
DKARQSAPCVLFFDELDSIATQRGSSVGDAGGAADRVLNQLLTEMDGMNAKKTVFIIGATNRPDIIDPALLRPGRLDQLIYIPLPDEQSRLQIFKACLRKSPVAKDVDLNALAKYTQGFSGADITEI

SEQ ID NO: 125202 - protein, 123 aa, Setaria italica
  misc_feature (27)..(27): Xaa can be any naturally occurring amino acid
  Transcript Sequence Number=SeqID_59228
  Gene Ontology: Mol. function=nucleoside-triphosphatase activity; Cellular component=endoplasmic reticulum; Biological process=cell division
  Homolog annotation: Hit_ID=Q9SCN8; Match level="QueryCoverage=100%, HitCoverage=48%, E-value=7e-54, Identity=64%"; Hit description=Cell division control protein 48 homolog D
  Pfam annotation: Domain name=AAA; Domain location=1-123; Score=100.8; E_value=4.6e-27; Accession=PF00004.21; Description=ATPase family associated with various cellular activities (AAA)
IANECQANFISVKGPELLTMWFGESEXANVREIFDKARQSAPCVLFFDELDSIATQRGSSVGDAGGAADRVLNQLLTEMDGMNAKKTVFIIGATNRPDIIDPALLRPGRLDQLIYIPLPDEQS

SEQ ID NO: 125203 - protein, 132 aa, Setaria italica
  misc_feature (59)..(59): Xaa can be any naturally occurring amino acid
  misc_feature (114)..(114): Xaa can be any naturally occurring amino acid
  Transcript Sequence Number=SeqID_59229
  Gene Ontology: Mol. function=nucleoside-triphosphatase activity; Cellular component=microsome; Biological process=cell division
  Homolog annotation: Hit_ID=Q9SCN8; Match level="QueryCoverage=100%, HitCoverage=49%, E-value=2e-57, Identity=62%"; Hit description=Cell division control protein 48 homolog D
  Pfam annotation: Domain name=AAA; Domain location=1-132; Score=126.3; E_value=9.6e-35; Accession=PF00004.21; Description=ATPase family associated with various cellular activities (AAA)
ANVREIFDKARQSAPCVLFFDELDSIATQRGSSVGDAGGAADRVLNQLLTEMDGMNAKXTVFIIGATNRPDIIDPALLRPGRLDQLIYIPLPDEQSRLQIFKACLRKSPVAKDXDLNALAKYTQGFSGADIT

SEQ ID NO: 125204 - protein, 97 aa, Setaria italica
  Transcript Sequence Number=SeqID_59230
  Gene Ontology: Mol. function=nucleoside-triphosphatase activity; Cellular component=endoplasmic reticulum; Biological process=cell division
  Homolog annotation: Hit_ID=P54774; Match level="QueryCoverage=100%, HitCoverage=45%, E-value=4e-40, Identity=62%"; Hit description=Cell division cycle protein 48 homolog
  Pfam annotation: Domain name=AAA; Domain location=1-97; Score=26.9; E_ value=1e-07; Accession=PF00004.21; Description=ATPase family associated with various cellular activities (AAA)
IANECQANFISVKGPELLTMWFGESEANVREIFDKARQSAPCVLFFDELDSIATQRGSSVGDAGGAADRVLNQLLTEMDGMNAKKTVFIIGATNRPD

SEQ ID NO: 125205 - protein, 128 aa, Setaria italica
  Transcript Sequence Number=SeqID_59231
  Gene Ontology: Mol. function=ATP binding; Biological process=cell division
  Homolog annotation: Hit_ID=Q9SCN8; Match level="QueryCoverage=99%, HitCoverage=48%, E-value=8e-64, Identity=69%"; Hit description=Cell division control protein 48 homolog D
  Pfam annotation: Domain name=AAA; Domain location=1-112; Score=74.1; E_value=5.2e-19; Accession=PF00004.21; Description=ATPase family associated with various cellular activities (AAA)
SVGDAGGAADRVLNQLLTEMDGMNAKKTVFIIGATNRPDIIDPALLRPGRLDQLIYIPLPDEQSRLQIFKACLRKSPVAKDVDLNALAKYTQGFSGADITEICQRACKYAIRENIEKDIEMERRRKDD

SEQ ID NO: 125206 - protein, 96 aa, Setaria italica
  misc_feature (82)..(82): Xaa can be any naturally occurring amino acid
  Transcript Sequence Number=SeqID_59232
  Gene Ontology: Mol. function=nucleoside-triphosphatase activity; Cellular component=endoplasmic reticulum; Biological process=cell division
  Homolog annotation: Hit_ID=Q9SCN8; Match level="QueryCoverage=100%, HitCoverage=45%, E-value=7e-39, Identity=61%"; Hit description=Cell division control protein 48 homolog D
  Pfam annotation: Domain name=AAA; Domain location=1-96; Score=13.8; E_ value=1.5e-06; Accession=PF00004.21; Description=ATPase family associated with various cellular activities (AAA)
QANFISVKGPELLTMWFGESEANVREIFDKARQSAPCVLFFDELDSIATQRGSSVGDAGGAADRVLNQLLTEMDGMNAKKTXFIIGATNRPDIIDP

SEQ ID NO: 125207 - protein, 128 aa, Setaria italica
  Transcript Sequence Number=SeqID_59233
  Gene Ontology: Mol. function=nucleoside-triphosphatase activity; Cellular component=microsome; Biological process=cell division
  Homolog annotation: Hit_ID=Q9SCN8; Match level="QueryCoverage=100%, HitCoverage=49%, E-value=1e-56, Identity=63%"; Hit description=Cell division control protein 48 homolog D
  Pfam annotation: Domain name=AAA; Domain location=1-126; Score=108.2; E_value=2.7e-29; Accession=PF00004.21; Description=ATPase family associated with various cellular activities (AAA)
FFDELDSIATQRGSSVGDAGGAADRVLNQLLTEMDGMNAKKTVFIIGATNRPDIIDPALLRPGRLDQLIYIPLPDEQSRLQIFKACLRKSPVAKDVDLNALAKYTQGFSGADITEICQRACKYAIREN

SEQ ID NO: 125208 - protein, 114 aa, Setaria italica
  misc_feature (12)..(12): Xaa can be any naturally occurring amino acid
  misc_feature (27)..(27): Xaa can be any naturally occurring amino acid
  misc_feature (39)..(39): Xaa can be any naturally occurring amino acid
  Transcript Sequence Number=SeqID_59234
  Gene Ontology: Mol. function=nucleoside-triphosphatase activity; Cellular component=endoplasmic reticulum; Biological process=cell division
  Homolog annotation: Hit_ID=P54774; Match level="QueryCoverage=75%, HitCoverage=10%, E-value=1e-31, Identity=79%"; Hit description=Cell division cycle protein 48 homolog
CQRACKYAIREXNIEKDIEMERRRKDXPEAMEEDEVDEXILRSGAVHFEESMKYARRSVSDADIRKYQAFAQTLQQSRGFGSEFRFPDQPTAAAADPFAAPAAAADDDDLYSLT

SEQ ID NO: 125209 - protein, 134 aa, Setaria italica
  misc_feature (19)..(19): Xaa can be any naturally occurring amino acid
  Transcript Sequence Number=SeqID_59235
  Gene Ontology: Mol. function=ATP binding; Biological process=cell division
  Homolog annotation: Hit_ID=Q84L45; Match level="QueryCoverage=100%, HitCoverage=61%, E-value=3e-64, Identity=90%"; Hit description=CDC48- like protein (Fragment)
  Pfam annotation: Domain name=AAA; Domain location=1-114; Score=64.8; E_value=3.3e-16; Accession=PF00004.21; Description=ATPase family associated with various cellular activities (AAA)
SSVGDAGGAADRVLNQLLXTEMDGMNAKKTVFIIGATNRPDIIDPALLRPGRLDQLIYIPLPDEQSRLQIFKACLRKSPVAKDVDLNALAKYTQGFSGADITEICQRACKYAIRENIEKDIEMERRRKDDPEAM

SEQ ID NO: 125210 - protein, 111 aa, Setaria italica
  misc_feature (27)..(27): Xaa can be any naturally occurring amino acid
  misc_feature (54)..(54): Xaa can be any naturally occurring amino acid
  Transcript Sequence Number=SeqID_59236
  Gene Ontology: Mol. function=nucleoside-triphosphatase activity; Cellular component=microsome; Biological process=embryonic development ending in birth or egg hatching
  Homolog annotation: Hit_ID=Q9SCN8; Match level="QueryCoverage=99%, HitCoverage=46%, E-value=3e-49, Identity=65%"; Hit description=Cell division control protein 48 homolog D
  Pfam annotation: Domain name=AAA; Domain location=1-111; Score=69.8; E_value=1e-17; Accession=PF00004.21; Description=ATPase family associated with various cellular activities (AAA)
FDKARQSAPCVLFFDELDSIATQRGSXVGDAGGAADRVLNQLLTEMDGMNAKKXVFIIGATNRPDIIDPALLRPGRLDQLIYIPLPDEQSRLQIFKACLRKSPVAKDVDLN

SEQ ID NO: 125211 - protein, 90 aa, Setaria italica
  misc_feature (36)..(36): Xaa can be any naturally occurring amino acid
  Transcript Sequence Number=SeqID_59237
  Gene Ontology: Mol. function=nucleoside-triphosphatase activity; Cellular component=microsome; Biological process=cell division
  Homolog annotation: Hit_ID=Q9SCN8; Match level="QueryCoverage=98%, HitCoverage=44%, E-value=1e-38, Identity=68%"; Hit description=Cell division control protein 48 homolog D
  Pfam annotation: Domain name=AAA; Domain location=1-90; Score=8.0; E _value=4.7e-06; Accession=PF00004.21; Description=ATPase family associated with various cellular activities (AAA)
GESEANVREIFDKARQSAPCVLFFDELDSIATQRGXSVGDAGGAADRVLNQLLTEMDGMNAKKTVFIIGATNRPDIIDPALLRPGRLDQA

SEQ ID NO: 125212 - protein, 98 aa, Setaria italica
  misc_feature (82)..(82): Xaa can be any naturally occurring amino acid
  Transcript Sequence Number=SeqID_59238
  Gene Ontology: Mol. function=nucleoside-triphosphatase activity; Cellular component=endoplasmic reticulum; Biological process=cell division
  Homolog annotation: Hit_ID=P54774; Match level="QueryCoverage=73%, HitCoverage=9%, E-value=9e-27, Identity=82%"; Hit description=Cell division cycle protein 48 homolog
IEKDIEMERRRKDDPEAMEEDEVDEIAEIRAVHFEESMKYARRSVSDADIRKYQAFAQTLQQSRGFGSEFRFPDQPTAAAAXPFAAPAAAADDDDLYS

SEQ ID NO: 125213 - protein, 98 aa, Setaria italica
  Transcript Sequence Number=SeqID_59239
  Gene Ontology: Mol. function=nucleoside-triphosphatase activity; Cellular component=microsome; Biological process=cell division
  Homolog annotation: Hit_ID=P54774; Match level="QueryCoverage=92%, HitCoverage=11%, E-value=1e-38, Identity=84%"; Hit description=Cell division cycle protein 48 homolog
DITEICQRACKYAIRENIEKDIEMERRRKDDPEAMEEDEVDEIAEIRAVHFEESMKYARRSVSDADIRKYQAFAQTLQQSRGFGSEFRFPDQPTAAAA

SEQ ID NO: 125214 - protein, 132 aa, Setaria italica
  misc_feature (51)..(51): Xaa can be any naturally occurring amino acid
  Transcript Sequence Number=SeqID_59240
  Gene Ontology: Mol. function=nucleoside-triphosphatase activity; Cellular component=microsome; Biological process=cell division
  Homolog annotation: Hit_ID=P54774; Match level="QueryCoverage=82%, HitCoverage=13%, E-value=2e-47, Identity=83%"; Hit description=Cell division cycle protein 48 homolog
VAKDVDLNALAKYTQGFSGADITEICQRACKYAIRENIEKDIEMERRRKDXPEAMEEDEVDEIAEIRAVHFEESMKYARRSVSDADIRKYQAFAQTLQQSRGFGSEFRFPDQPTAAAADPFAAPAAAADDDD

SEQ ID NO: 125215 - protein, 92 aa, Setaria italica
  Transcript Sequence Number=SeqID_59241
  Gene Ontology: Mol. function=nucleoside-triphosphatase activity; Cellular component=endoplasmic reticulum; Biological process=cell division
  Homolog annotation: Hit_ID=P54774; Match level="QueryCoverage=70%, HitCoverage=8%, E-value=1e-23, Identity=81%"; Hit description=Cell division cycle protein 48 homolog
MERRRKDDPEAMEEDEVDEIAEIRAVHFEESMKYARRSVSDADIRKYQAFAQTLQQSRGFGSEFRFPDQPTAAAADPFAAPAAAADDDDLYS

SEQ ID NO: 125216 - protein, 103 aa, Setaria italica
  Transcript Sequence Number=SeqID_59242
  Gene Ontology: Mol. function=ATP binding; Cellular component =microsome; Biological process=embryonic development ending in birth or egg hatching
  Homolog annotation: Hit_ID=Q9SCN8; Match level="QueryCoverage=97%, HitCoverage=45%, E-value=2e-44, Identity=65%"; Hit description=Cell division control protein 48 homolog D
  Pfam annotation: Domain name=AAA; Domain location=1-102; Score=25.0; E_value=1.5e-07; Accession=PF00004.21; Description=ATPase family associated with various cellular activities (AAA)
SSSFDELDPLLLREESSVGDAGGAADRVLNQLLTEMDGMNAKKTVFIIGATNRPDIIDPALLRPGRLDQLIYIPLPDEQSRLQIFKACLRKSPVAKDVDLNAL

SEQ ID NO: 125217 - protein, 128 aa, Setaria italica
  Transcript Sequence Number=SeqID_59243
  Gene Ontology: Mol. function=ATP binding; Cellular component =microsome; Biological process=cell division
  Homolog annotation: Hit_ID=P54774; Match level="QueryCoverage=100%, HitCoverage=50%, E-value=5e-58, Identity=68%"; Hit description=Cell division cycle protein 48 homolog
  Pfam annotation: Domain name=AAA; Domain location=1-78; Score=-21.1; E_value=0.0018; Accession=PF00004.21; Description=ATPase family associated with various cellular activities (AAA)
TNRPDIIDPALLRPGRLDQLIYIPLPDEQSRLQIFKACLRKSPVAKDVDLNALAKYTQGFSGADITEICQRACKYAIRENIEKDIEMERRRKDDPEAMEEDEVDEIAEIRAVHFEESMKYARRSVSDA

SEQ ID NO: 125218 - protein, 73 aa, Setaria italica
  Transcript Sequence Number=SeqID_59244
  Gene Ontology: Mol. function=nucleoside-triphosphatase activity; Cellular component=endoplasmic reticulum; Biological process=cell division
  Homolog annotation: Hit_ID=Q9SCN8; Match level="QueryCoverage=100%, HitCoverage=8%, E-value=2e-25, Identity=79%"; Hit description=Cell division control protein 48 homolog D
MWFGESEANVREIFDKARQSAPCVLFFDELDSIATQRGSSVGDAGGAADRVLNQLLTEMDGMNAKKTVFIIGA

SEQ ID NO: 125219 - protein, 121 aa, Setaria italica
  misc_feature (80)..(80): Xaa can be any naturally occurring amino acid
  Transcript Sequence Number=SeqID_59245
  Gene Ontology: Mol. function=ATP binding; Cellular component =microsome; Biological process=cell division
  Homolog annotation: Hit_ID=P54774; Match level="QueryCoverage=100%, HitCoverage=15%, E-value=2e-52, Identity=82%"; Hit description=Cell division cycle protein 48 homolog
GGLDQLIYIPLPDEQSRLQIFKACLRKSPVAKDVDLNALAKYTQGFSGADITEICQRACKYAIRENIEKDIEMERRRKDXPEAMEEDEVDEIAEIRAVHFEESMKYARRSVSDADIRKYQA

SEQ ID NO: 125220 - protein, 122 aa, Setaria italica
  Transcript Sequence Number=SeqID_59246
  Gene Ontology: Mol. function=ATP binding; Cellular component =microsome; Biological process=cell division
  Homolog annotation: Hit_ID=P54774; Match level="QueryCoverage=100%, HitCoverage=15%, E-value=7e-54, Identity=83%"; Hit description=Cell division cycle protein 48 homolog
LLRPGRLDQLIYIPLPDEQSRLQIFKACLRKSPVAKDVDLNALAKYTQGFSGADITEICQRACKYAIRENIEKDIEMERRRKDDPEAMEEDEVDEIAEIRAVHFEESMKYARRSVSDADIRK

SEQ ID NO: 125221 - protein, 120 aa, Setaria italica
  misc_feature (7)..(7): Xaa can be any naturally occurring amino acid
  misc_feature (37)..(37): Xaa can be any naturally occurring amino acid
  Transcript Sequence Number=SeqID_59247
  Gene Ontology: Mol. function=ATP binding; Cellular component =microsome; Biological process=cell division
  Homolog annotation: Hit_ID=Q9SCN8; Match level="QueryCoverage=93%, HitCoverage=47%, E-value=7e-55, Identity=68%"; Hit description=Cell division control protein 48 homolog D
  Pfam annotation: Domain name=AAA; Domain location=1-107; Score=55.1; E_value=2.8e-13; Accession=PF00004.21; Description=ATPase family associated with various cellular activities (AAA)
GAADRVXLNQLLTEMDGMNAKKTVFIIGATNRPDIIXPALLRPGRLDQLIYIPLPDEQSRLQIFKACLRKSPVAKDVDLNALAKYTQGFSGADITEICQRACKYAIRENIEKVLFVVLVS

SEQ ID NO: 125222 - protein, 90 aa, Setaria italica
  misc_feature (64)..(64): Xaa can be any naturally occurring amino acid
  misc_feature (77)..(77): Xaa can be any naturally occurring amino acid
  Transcript Sequence Number=SeqID_59248
  Gene Ontology: Mol. function=nucleoside-triphosphatase activity; Cellular component=microsome; Biological process=cell division
  Homolog annotation: Hit_ID=Q9SCN8; Match level="QueryCoverage=98%, HitCoverage=44%, E-value=2e-32, Identity=60%"; Hit description=Cell division control protein 48 homolog D
  Pfam annotation: Domain name=AAA; Domain location=1-90; Score=-10.4; E_value=0.0002; Accession=PF00004.21; Description=ATPase family associated with various cellular activities (AAA)
FSKANVREIFDKARQSAPCVLFFDELDSIATQRGSSVGDAGGAADRVLNQLLTEMDGMNAKKTXFIIGATNRPDIIXPALLRPGRLDQLI

SEQ ID NO: 125223 - protein, 93 aa, Setaria italica
  misc_feature (9)..(9): Xaa can be any naturally occurring amino acid
  misc_feature (60)..(60): Xaa can be any naturally occurring amino acid
  misc_feature (77)..(77): Xaa can be any naturally occurring amino acid
  Transcript Sequence Number=SeqID_59249
  Gene Ontology: Mol. function=nucleoside-triphosphatase activity; Cellular component=endoplasmic reticulum; Biological process=cell division
  Homolog annotation: Hit_ID=P54774; Match level="QueryCoverage=72%, HitCoverage=8%, E-value=7e-23, Identity=79%"; Hit description=Cell division cycle protein 48 homolog
EMERRRKDXPEAMEEDEVDEIAEIRAVHFEESMKYARRSVSDADIRKYQAFAQTLQQSRXFGSEFRFPDQPTAAAAXPFAAPAAAADDDDLYS

SEQ ID NO: 125224 - protein, 36 aa, Setaria italica
  Transcript Sequence Number=SeqID_59250
VSSKIHYLKSKYILSRALHTMSLAYHISIYISYVTA

SEQ ID NO: 125225 - protein, 58 aa, Setaria italica
  misc_feature (30)..(30): Xaa can be any naturally occurring amino acid
  Transcript Sequence Number=SeqID_59251
  Homolog annotation: Hit_ID=Q9SCN8; Match level="QueryCoverage=55%, HitCoverage=3%, E-value=1e-09, Identity=96%"; Hit description=Cell division control protein 48 homolog D
ARRSVSDADIRKYQAFAQTLQQSRGFGSEXRFPDQPTAAAADPFAAPAAAADDDDLYS

SEQ ID NO: 125226 - protein, 43 aa, Setaria italica
  Transcript Sequence Number=SeqID_59252
LIYMLIWYAKLIVCKARERMYLLLSNVFARYLNRVVYLNDTAR

SEQ ID NO: 125227 - protein, 39 aa, Setaria italica
  Transcript Sequence Number=SeqID_59253
LLVNCIDHHRQLQLQGLRRVGRRCRRLVGEPELAAEPAR

SEQ ID NO: 125228 - protein, 78 aa, Setaria italica
  misc_feature (62)..(62): Xaa can be any naturally occurring amino acid
  Transcript Sequence Number=SeqID_59254
  Gene Ontology: Mol. function=nucleoside-triphosphatase activity; Cellular component=endoplasmic reticulum; Biological process=cell division
  Homolog annotation: Hit_ID=P54774; Match level="QueryCoverage=62%, HitCoverage=6%, E-value=3e-19, Identity=91%"; Hit description=Cell division cycle protein 48 homolog
DEVDEIAEIRAVHFEESMKYARRSVSDADIRKYQAFAQTLQQSRGFGSEFRFPDQPTAAAAXPFAAPAAAADDDDLYS

SEQ ID NO: 125229 - protein, 42 aa, Setaria italica
  Transcript Sequence Number=SeqID_59255
PRPSQQSRGFGSEFRFPDQPTAAAADPFAAPAAAADDDDLYS

SEQ ID NO: 125230 - protein, 97 aa, Setaria italica
  misc_feature (3)..(3): Xaa can be any naturally occurring amino acid
  misc_feature (30)..(30): Xaa can be any naturally occurring amino acid
  Transcript Sequence Number=SeqID_59256
  Gene Ontology: Mol. function=ATP binding; Cellular component =microsome; Biological process=embryonic development ending in birth or egg hatching
  Homolog annotation: Hit_ID=Q9SCN8; Match level="QueryCoverage=96%, HitCoverage=43%, E-value=3e-38, Identity=66%"; Hit description=Cell division control protein 48 homolog D
  Pfam annotation: Domain name=AAA; Domain location=1-96; Score=2.1; E _value=1.6e-05; Accession=PF00004.21; Description=ATPase family associated with various cellular activities (AAA)
GSXVGDAGVLLIECLNQLLTEMDGMNAKKXVFIIGATNRPDIIDPALLRPGRLYQLIYIPLPDEQSRLQIFKACLRKSPVAKDVDLNALAKYTRIQR

SEQ ID NO: 125231 - protein, 94 aa, Setaria italica
  misc_feature (9)..(9): Xaa can be any naturally occurring amino acid
  misc_feature (11)..(11): Xaa can be any naturally occurring amino acid
  Transcript Sequence Number=SeqID_59257
  Gene Ontology: Mol. function=ATP binding; Cellular component =microsome; Biological process=embryonic development ending in birth or egg hatching
  Homolog annotation: Hit_ID=Q9SCN8; Match level="QueryCoverage=98%, HitCoverage=45%, E-value=7e-42, Identity=67%"; Hit description=Cell division control protein 48 homolog D
  Pfam annotation: Domain name=AAA; Domain location=1-94; Score=1.3; E _value=1.9e-05; Accession=PF00004.21; Description=ATPase family associated with various cellular activities (AAA)
MDGMNAKKXVXFIIGATNRPDIIDPALLRPGRLDQLIYIPLPDEQSRLQIFKACLRKSPVAKDVDLNALAKYTQGFSGADITEICQRACKLIVL

SEQ ID NO: 125232 - protein, 99 aa, Setaria italica
  misc_feature (45)..(45): Xaa can be any naturally occurring amino acid
  misc_feature (61)..(61): Xaa can be any naturally occurring amino acid
  misc_feature (73)..(73): Xaa can be any naturally occurring amino acid
  misc_feature (84)..(84): Xaa can be any naturally occurring amino acid
  Transcript Sequence Number=SeqID_59258
  Gene Ontology: Mol. function=nucleoside-triphosphatase activity; Cellular component=endoplasmic reticulum; Biological process=cell division
  Homolog annotation: Hit_ID=P54774; Match level="QueryCoverage=81%, HitCoverage=10%, E-value=1e-24, Identity=73%"; Hit description=Cell division cycle protein 48 homolog
LHARWQNIEKDIEMERRRKDDPEAMEEDEVDEIAEIRAVHFEESXSKYARRSVSDADIRKXQAFAQTLQQSRXFGSEFRFPDQXTAAAADPFAAPAAAA

SEQ ID NO: 125233 - protein, 82 aa, Setaria italica
  Transcript Sequence Number=SeqID_59259
  Gene Ontology: Mol. function=nucleoside-triphosphatase activity; Cellular component=endoplasmic reticulum; Biological process=cell division
  Homolog annotation: Hit_ID=P54774; Match level="QueryCoverage=100%, HitCoverage=10%, E-value=4e-33, Identity=84%"; Hit description=Cell division cycle protein 48 homolog
RACKYAIRENIEKDIEMERRRKDDPEAMEEDEVDEIAEIRAVHFEESMKYARRSVSDADIRKYQAFAQTLQQSRGFGSEFRF

SEQ ID NO: 125234 - protein, 77 aa, Setaria italica
  misc_feature (71)..(71): Xaa can be any naturally occurring amino acid
  Transcript Sequence Number=SeqID_59260
  Gene Ontology: Mol. function=nucleoside-triphosphatase activity; Cellular component=microsome; Biological process=cell division
  Homolog annotation: Hit_ID=P54774; Match level="QueryCoverage=100%, HitCoverage=9%, E-value=2e-29, Identity=82%"; Hit description=Cell division cycle protein 48 homolog
ICQRACKYAIRENIEKDIEMERRRKDDPEAMEEDEVDEIAEIRAVHFEESMKYARRSVSDADIRKYQAFAXTLQQSR

SEQ ID NO: 125235 - protein, 83 aa, Setaria italica
  Transcript Sequence Number=SeqID_59261
  Gene Ontology: Mol. function=nucleoside-triphosphatase activity; Cellular component=endoplasmic reticulum; Biological process=cell division
  Homolog annotation: Hit_ID=P54774; Match level="QueryCoverage=59%, HitCoverage=6%, E-value=3e-19, Identity=91%"; Hit description=Cell division cycle protein 48 homolog
YEVDEIAEIRAVHFEESMKYARRSVSDADIRKYQAFAQTLQQSRGFGSEFRFPDQPTAAAADPFAAPAAAADDDDLYRLTSSY

SEQ ID NO: 125236 - protein, 93 aa, Setaria italica
  misc_feature (21)..(21): Xaa can be any naturally occurring amino acid
  Transcript Sequence Number=SeqID_59262
  Gene Ontology: Mol. function=ATP binding; Cellular component =microsome; Biological process=embryonic development ending in birth or egg hatching
  Homolog annotation: Hit_ID=Q9SCN8; Match level="QueryCoverage=98%, HitCoverage=44%, E-value=2e-38, Identity=68%"; Hit description=Cell division control protein 48 homolog D
  Pfam annotation: Domain name=AAA; Domain location=1-92; Score=-0.2; E_ value=2.5e-05; Accession=PF00004.21; Description=ATPase family associated with various cellular activities (AAA)
AADRVLNQLLTEMDGMNAKKXVFIIGATNRPDIIDPALLRPGRLDQLIYIPLPDEQSRLQIFKACLRKSPVAKDVDLNALAKITTQGNYKTDD

SEQ ID NO: 125237 - protein, 60 aa, Setaria italica
  Transcript Sequence Number=SeqID_59263
TTTGRRRSDADIRKYQAFAQTLQQSRGFGSEFRFPDQPTAAAADPFAAPAAAADDDDLYS

SEQ ID NO: 125238 - protein, 43 aa, Setaria italica
  Transcript Sequence Number=SeqID_59264
FAQTLQQSRGFGSEFRFPDQPTAAAADPFAAPAAAADDDDLYS

SEQ ID NO: 125239 - protein, 37 aa, Setaria italica
  Transcript Sequence Number=SeqID_59265
LLVNCIDHHRQLQLQGLRRGRPPLPSVGRGTGTRCRT

SEQ ID NO: 125240 - protein, 33 aa, Setaria italica
  Transcript Sequence Number=SeqID_59266
LLVNCIDHHRQLQLQGLRRGRPPLPSVGRGTGT

SEQ ID NO: 125241 - protein, 49 aa, Setaria italica
  Transcript Sequence Number=SeqID_59267
IRKYQAFAHTLQQSRGFGSEFRFPDQPTAAAADPFAAPAAAADDDDLYS

SEQ ID NO: 125242 - protein, 79 aa, Setaria italica
  Transcript Sequence Number=SeqID_59268
  Gene Ontology: Mol. function=nucleoside-triphosphatase activity; Cellular component=endoplasmic reticulum; Biological process=cell division
  Homolog annotation: Hit_ID=P54774; Match level="QueryCoverage=69%, HitCoverage=6%, E-value=2e-20, Identity=87%"; Hit description=Cell division cycle protein 48 homolog
MEEDEVDEIAEIRAVHFEESMKYARRSVSDADIRKYQAFAQTLQQSRGFGSEFRFPDQPTAAAADPFAAPAAAADDDDL

SEQ ID NO: 125243 - protein, 83 aa, Setaria italica
  Transcript Sequence Number=SeqID_59269
  Gene Ontology: Mol. function=nucleoside-triphosphatase activity; Cellular component=endoplasmic reticulum; Biological process=cell division
  Homolog annotation: Hit_ID=P54774; Match level="QueryCoverage=96%, HitCoverage=10%, E-value=8e-32, Identity=83%"; Hit description=Cell division cycle protein 48 homolog
RACKYAIRENIEKDIEMERRRKDDPEAMEEDEVDEIAEIRAVHFEESMKYARRSVSDADIRKYQAFAQTLQQSRGFGSEFPVT

SEQ ID NO: 125244 - protein, 101 aa, Setaria italica
  misc_feature (9)..(9): Xaa can be any naturally occurring amino acid
  Transcript Sequence Number=SeqID_59270
  Gene Ontology: Mol. function=ATP binding; Cellular component =microsome; Biological process=cell division
  Homolog annotation: Hit_ID=P54774; Match level="QueryCoverage=100%, HitCoverage=12%, E-value=3e-40, Identity=79%"; Hit description=Cell division cycle protein 48 homolog
LPDEQSRLXIFKACLRKSPVAKDVDLNALAKYTQGFSGADITEICQRACKYAIRENIEKDIEMERRRKDDPEAMEEDEVDEIAEIRAVHFEESMKYARRSV

SEQ ID NO: 125245 - protein, 71 aa, Setaria italica
  Transcript Sequence Number=SeqID_59271
  Gene Ontology: Mol. function=nucleoside-triphosphatase activity; Cellular component=endoplasmic reticulum; Biological process=cell division
  Homolog annotation: Hit_ID=P54774; Match level="QueryCoverage=91%, HitCoverage=8%, E-value=2e-23, Identity=80%"; Hit description=Cell division cycle protein 48 homolog
RRKDDPEAMEEDEVDEIAEIRAVHFEESMKYARRSVSDADIRKYQAFAQTLQQSRGFGSEFRFPDQPTAAA

SEQ ID NO: 125246 - protein, 65 aa, Setaria italica
  Transcript Sequence Number=SeqID_59272
  Gene Ontology: Mol. function=nucleoside-triphosphatase activity; Cellular component=endoplasmic reticulum; Biological process=cell division
  Homolog annotation: Hit_ID=P54774; Match level="QueryCoverage=100%, HitCoverage=8%, E-value=7e-24, Identity=81%"; Hit description=Cell division cycle protein 48 homolog
RRRKDDPEAMEEDEVDEIAEIRAVHFEESMKYARRSVSDADIRKYQAFAQTLQQSRGFGSEFRFP

SEQ ID NO: 125247 - protein, 83 aa, Setaria italica
  misc_feature (62)..(62): Xaa can be any naturally occurring amino acid
  Transcript Sequence Number=SeqID_59273
  Gene Ontology: Mol. function=nucleoside-triphosphatase activity; Cellular component=endoplasmic reticulum; Biological process=cell division
  Homolog annotation: Hit_ID=P54774; Match level="QueryCoverage=91%, HitCoverage=9%, E-value=7e-22, Identity=70%"; Hit description=Cell division cycle protein 48 homolog
LCTHAGRTIRRKDIEMERRRKDDPEAMEEDEVDEIAEIRAVHFEESMKYARRSVSDADIRKXQAFAQTLQQSRGFAASSGPRP

SEQ ID NO: 125248 - protein, 77 aa, Setaria italica
  Transcript Sequence Number=SeqID_59274
  Gene Ontology: Mol. function=ATP binding; Cellular component =microsome; Biological process=cell division
  Homolog annotation: Hit_ID=P54774; Match level="QueryCoverage=98%, HitCoverage=9%, E-value=1e-28, Identity=80%"; Hit description=Cell division cycle protein 48 homolog
TLAKYTQGFSGADITEICQRACKYAIRENIEKDIEMERRRKDDPEAMEEDEVDEIAEIRAVHFEESMKYARRSVSDA

SEQ ID NO: 125249 - protein, 64 aa, Setaria italica
  Transcript Sequence Number=SeqID_59275
  Gene Ontology: Mol. function=nucleoside-triphosphatase activity; Cellular component=endoplasmic reticulum; Biological process=cell division
  Homolog annotation: Hit_ID=P54774; Match level="QueryCoverage=93%, HitCoverage=7%, E-value=5e-19, Identity=78%"; Hit description=Cell division cycle protein 48 homolog
PSGRNIEKDIEMERRRKDDPEAMEEDEVDEIAEIRAVHFEESMKYARRSVSDADIRKYQAFAQT

SEQ ID NO: 125250 - protein, 76 aa, Setaria italica
  Transcript Sequence Number=SeqID_59276
  Gene Ontology: Mol. function=ATP binding; Cellular component =microsome; Biological process=cell division
  Homolog annotation: Hit_ID=P54774; Match level="QueryCoverage=97%, HitCoverage=9%, E-value=2e-27, Identity=80%"; Hit description=Cell division cycle protein 48 homolog
TPLAKYTQGFSGADITEICQRACKYAIRENIEKDIEMERRRKDDPEAMEEDEVDEIAEIRAVHFEESMKYARRSVS

SEQ ID NO: 125251 - protein, 78 aa, Setaria italica
  Transcript Sequence Number=SeqID_59277
  Gene Ontology: Mol. function=ATP binding; Cellular component =microsome; Biological process=cell division
  Homolog annotation: Hit_ID=P54774; Match level="QueryCoverage=93%, HitCoverage=9%, E-value=4e-27, Identity=79%"; Hit description=Cell division cycle protein 48 homolog
TLAKYTQGFSGADITEICQRACKYAIRENIEKDIEMERRRKDDPEAMEEDEVDEIAEIRAVHFEESMKYARRSVRRTT

SEQ ID NO: 125252 - protein, 81 aa, Setaria italica
  misc_feature (16)..(16): Xaa can be any naturally occurring amino acid
  Transcript Sequence Number=SeqID_59278
  Gene Ontology: Mol. function=ATP binding; Cellular component =microsome; Biological process=embryonic development ending in birth or egg hatching
  Homolog annotation: Hit_ID=Q9SCN8; Match level="QueryCoverage=92%, HitCoverage=43%, E-value=5e-33, Identity=70%"; Hit description=Cell division control protein 48 homolog D
  Pfam annotation: Domain name=AAA; Domain location=1-80; Score=-30.6; E_value=0.012; Accession=PF00004.21; Description=ATPase family associated with various cellular activities (AAA)
LNQLLTEMDGMNAKKXVFIIGATNRPDIIDPALLRPGRLYQLIYIPLPDEQSRLQIFKACLRKSPVAKDVDLNALCPKLLP

SEQ ID NO: 125253 - protein, 73 aa, Setaria italica
  misc_feature (1)..(1): Xaa can be any naturally occurring amino acid
  Transcript Sequence Number=SeqID_59279
  Gene Ontology: Mol. function=nucleoside-triphosphatase activity; Cellular component=endoplasmic reticulum; Biological process=cell division
  Homolog annotation: Hit_ID=Q9SCN8; Match level="QueryCoverage=98%, HitCoverage=8%, E-value=5e-24, Identity=79%"; Hit description=Cell division control protein 48 homolog D
XFGESEANVREIFDKARQSAPCVLFFDELDSIATQRGSSVGDAGGAADRVLNQLLTEMDGMNAKKTVFIIGAT

SEQ ID NO: 125254 - protein, 70 aa, Setaria italica
  Transcript Sequence Number=SeqID_59280
  Gene Ontology: Mol. function=nucleoside-triphosphatase activity; Cellular component=endoplasmic reticulum; Biological process=cell division
  Homolog annotation: Hit_ID=Q9SCN8; Match level="QueryCoverage=100%, HitCoverage=8%, E-value=3e-23, Identity=78%"; Hit description=Cell division control protein 48 homolog D
RQSAPCVLFFDELDSIATQRGSSVGDAGGAADRVLNQLLTEMDGMNAKKTVFIIGATNRPDIIDPALLRP

SEQ ID NO: 125255 - protein, 54 aa, Setaria italica
  misc_feature (22)..(22): Xaa can be any naturally occurring amino acid
  Transcript Sequence Number=SeqID_59281
SEANVREIFDKARQSAPCVLFXERRLDSIATQRGSSVGDAGGAADRVLNQLLTE

SEQ ID NO: 125256 - protein, 70 aa, Setaria italica
  Transcript Sequence Number=SeqID_59282
  Gene Ontology: Mol. function=ATP binding; Cellular component=Cdc48p -Npl4p-Ufd1p AAA ATPase complex; Biological process=embryonic development ending in birth or egg hatching
  Homolog annotation: Hit_ID=Q9SCN8; Match level="QueryCoverage=78%, HitCoverage=6%, E-value=1e-23, Identity=96%"; Hit description=Cell division control protein 48 homolog D
RGSSVGDAGGAADRVLNQLLTEMDGMNAKKTVFIIGATNRPDIIDPALLRPGRLDQLIYIPLPDEQSRLQ

SEQ ID NO: 125257 - protein, 85 aa, Setaria italica
  Transcript Sequence Number=SeqID_59283
  Gene Ontology: Mol. function=ATP binding; Cellular component =microsome; Biological process=cell division
  Homolog annotation: Hit_ID=Q9SCN8; Match level="QueryCoverage=92%, HitCoverage=43%, E-value=5e-37, Identity=68%"; Hit description=Cell division control protein 48 homolog D
  Pfam annotation: Domain name=AAA; Domain location=1-73; Score=-37.8; E_value=0.052; Accession=PF00004.21; Description=ATPase family associated with various cellular activities (AAA)
IIDPALLRPGRLDQLIYIPLPDEQSRLQIFKACLRKSPVAKDVDLNALAKYTQGFSGADITEICQRACKYAIRENIEKDYCRLVS

SEQ ID NO: 125258 - protein, 76 aa, Setaria italica
  Transcript Sequence Number=SeqID_59284
  Gene Ontology: Mol. function=ATP binding; Cellular component =endoplasmic reticulum; Biological process=cell division
  Homolog annotation: Hit_ID=Q9SCN8; Match level="QueryCoverage=82%, HitCoverage=7%, E-value=3e-27, Identity=87%"; Hit description=Cell division control protein 48 homolog D
LLRPGRLDQLIYIPLPDEQSRLQIFKACLRKSPVAKDVDLNALAKYTQGFSGADLSDICQRACYASGSSFLRLSIS

SEQ ID NO: 125259 - protein, 57 aa, Setaria italica
  Transcript Sequence Number=SeqID_59285
  Gene Ontology: Mol. function=nucleoside-triphosphatase activity; Biological process=cell division
  Homolog annotation: Hit_ID=P54774; Match level="QueryCoverage=98%, HitCoverage=7%, E-value=6e-15, Identity=73%"; Hit description=Cell division cycle protein 48 homolog
HPREFSGADITEIFQRACKYAIRENIEKDIEMERRRKDDPEAMEEDEVDEIAEIRAV

SEQ ID NO: 125260 - protein, 27 aa, Setaria italica
  Transcript Sequence Number=SeqID_59286
RRRKDDPRPWEEDEVDEIAEIRAVHFE

SEQ ID NO: 125261 - protein, 70 aa, Setaria italica
  Transcript Sequence Number=SeqID_59287
  Gene Ontology: Mol. function=ATP binding; Cellular component =microsome; Biological process=cell division
  Homolog annotation: Hit_ID=Q9SCN8; Match level="QueryCoverage=100%, HitCoverage=8%, E-value=6e-32, Identity=92%"; Hit description=Cell division control protein 48 homolog D
PGRLDQLIYIPLPDEQSRLQIFKACLRKSPVAKDVDLNALAKYTQGFSGADITEICQRACKYAIRENIEK

SEQ ID NO: 125262 - protein, 95 aa, Setaria italica
  Transcript Sequence Number=SeqID_59288
  Gene Ontology: Mol. function=ATP binding; Cellular component =microsome; Biological process=cell division
  Homolog annotation: Hit_ID=Q9SCN8; Match level="QueryCoverage=100%, HitCoverage=45%, E-value=3e-47, Identity=71%"; Hit description=Cell division control protein 48 homolog D
  Pfam annotation: Domain name=AAA; Domain location=1-95; Score=25.3; E_ value=1.4e-07; Accession=PF00004.21; Description=ATPase family associated with various cellular activities (AAA)
RVLNQLLTEMDGMNAKKTVFIIGATNRPDIIDPALLRPGRLDQLIYIPLPDEQSRLQIFKACLRKSPVAKDVDLNALAKYTQGFSGADITEICQR

SEQ ID NO: 125263 - protein, 71 aa, Setaria italica
  Transcript Sequence Number=SeqID_59289
  Gene Ontology: Mol. function=ATP binding; Cellular component=Cdc48p -Npl4p-Ufd1p AAA ATPase complex; Biological process=embryonic development ending in birth or egg hatching
  Homolog annotation: Hit_ID=Q9SCN8; Match level="QueryCoverage=100%, HitCoverage=42%, E-value=4e-33, Identity=73%"; Hit description=Cell division control protein 48 homolog D
  Pfam annotation: Domain name=AAA; Domain location=1-71; Score=-38.7; E_value=0.063; Accession=PF00004.21; Description=ATPase family associated with various cellular activities (AAA)
AGGAADRVLNQLLTEMDGMNAKKTVFIIGATNRPDIIDPALLRPGRLDQLIYIPLPDEQSRLQIFKACLRK

SEQ ID NO: 125264 - protein, 70 aa, Setaria italica
  Transcript Sequence Number=SeqID_59290
  Gene Ontology: Mol. function=ATP binding; Cellular component=Cdc48p -Npl4p-Ufd1p AAA ATPase complex; Biological process=embryonic development ending in birth or egg hatching
  Homolog annotation: Hit_ID=Q9SCN8; Match level="QueryCoverage=100%, HitCoverage=42%, E-value=2e-32, Identity=73%"; Hit description=Cell division control protein 48 homolog D
DAGGAADRVLNQLLTEMDGMNAKKTVFIIGATNRPDIIDPALLRPGRLDQLIYIPLPDEQSRLQIFKACL

SEQ ID NO: 125265 - protein, 68 aa, Setaria italica
  misc_feature (4)..(4): Xaa can be any naturally occurring amino acid
  Transcript Sequence Number=SeqID_59291
  Gene Ontology: Mol. function=ATP binding; Cellular component=Cdc48p -Npl4p-Ufd1p AAA ATPase complex; Biological process=embryonic development ending in birth or egg hatching
  Homolog annotation: Hit_ID=Q9SCN8; Match level="QueryCoverage=100%, HitCoverage=8%, E-value=5e-25, Identity=83%"; Hit description=Cell division control protein 48 homolog D
RGSXVGDAGGAADRVLNQLLTEMDGMNAKKTVFIIGATNRPDIIDPALLRPGRLDQLIYIPLPDEQSR

SEQ ID NO: 125266 - protein, 73 aa, Setaria italica
  Transcript Sequence Number=SeqID_59292
  Gene Ontology: Mol. function=ATP binding; Cellular component =microsome; Biological process=cell division
  Homolog annotation: Hit_ID=Q9SCN8; Match level="QueryCoverage=100%, HitCoverage=8%, E-value=1e-33, Identity=93%"; Hit description=Cell division control protein 48 homolog D
PDIIDPALLRPGRLDQLIYIPLPDEQSRLQIFKACLRKSPVAKDVDLNALAKYTQGFSGADITEICQRACKYA

SEQ ID NO: 125267 - protein, 68 aa, Setaria italica
  Transcript Sequence Number=SeqID_59293
  Gene Ontology: Mol. function=ATP binding; Cellular component =microsome; Biological process=cell division
  Homolog annotation: Hit_ID=Q9SCN8; Match level="QueryCoverage=98%, HitCoverage=8%, E-value=6e-30, Identity=92%"; Hit description=Cell division control protein 48 homolog D
RRLDQLIYIPLPDEQSRLQIFKACLRKSPVAKDVDLNALAKYTQGFSGADITEICQRACKYAIRENIE

SEQ ID NO: 125268 - protein, 76 aa, Setaria italica
  Transcript Sequence Number=SeqID_59294
  Gene Ontology: Mol. function=ATP binding; Cellular component =microsome; Biological process=cell division
  Homolog annotation: Hit_ID=Q9SCN8; Match level="QueryCoverage=100%, HitCoverage=43%, E-value=2e-35, Identity=69%"; Hit description=Cell division control protein 48 homolog D
  Pfam annotation: Domain name=AAA; Domain location=1-76; Score=-30.0; E_value=0.011; Accession=PF00004.21; Description=ATPase family associated with various cellular activities (AAA)
MNAKKTVFIIGATNRPDIIDPALLRPGRLDQLIYIPLPDEQSRLQIFKACLRKSPVAKDVDLNALAKYTQGFSGAD

SEQ ID NO: 125269 - protein, 74 aa, Setaria italica
  Transcript Sequence Number=SeqID_59295
  Gene Ontology: Mol. function=ATP binding; Cellular component =microsome; Biological process=cell division
  Homolog annotation: Hit_ID=Q9SCN8; Match level="QueryCoverage=100%, HitCoverage=42%, E-value=2e-34, Identity=70%"; Hit description=Cell division control protein 48 homolog D
MDGMNAKKTVFIIGATNRPDIIDPALLRPGRLDQLIYIPLPDEQSRLQIFKACLRKSPVAKDVDLNALAKYTQG

SEQ ID NO: 125270 - protein, 72 aa, Setaria italica
  Transcript Sequence Number=SeqID_59296
  Gene Ontology: Mol. function=ATP binding; Cellular component =microsome; Biological process=cell division
  Homolog annotation: Hit_ID=Q9SCN8; Match level="QueryCoverage=100%, HitCoverage=8%, E-value=5e-33, Identity=93%"; Hit description=Cell division control protein 48 homolog D
DPALLRPGRLDQLIYIPLPDEQSRLQIFKACLRKSPVAKDVDLNALAKYTQGFSGADITEICQRACKYAIRE

SEQ ID NO: 125271 - protein, 76 aa, Setaria italica
  Transcript Sequence Number=SeqID_59297
  Gene Ontology: Mol. function=ATP binding; Cellular component =microsome; Biological process=cell division
  Homolog annotation: Hit_ID=Q9SCN8; Match level="QueryCoverage=100%, HitCoverage=43%, E-value=3e-35, Identity=70%"; Hit description=Cell division control protein 48 homolog D
  Pfam annotation: Domain name=AAA; Domain location=1-76; Score=-27.7; E_value=0.0067; Accession=PF00004.21; Description=ATPase family associated with various cellular activities (AAA)
KKTVFIIGATNRPDIIDPALLRPGRLDQLIYIPLPDEQSRLQIFKACLRKSPVAKDVDLNALAKYTQGFSGADITE

SEQ ID NO: 125272 - protein, 63 aa, Setaria italica
  misc_feature (24)..(24): Xaa can be any naturally occurring amino acid
  Transcript Sequence Number=SeqID_59298
  Gene Ontology: Mol. function=ATP binding; Cellular component=Cdc48p -Npl4p-Ufd1p AAA ATPase complex; Biological process=embryonic development ending in birth or egg hatching
  Homolog annotation: Hit_ID=Q9SCN8; Match level="QueryCoverage=100%, HitCoverage=41%, E-value=1e-27, Identity=73%"; Hit description=Cell division control protein 48 homolog D
AGGAADRVLNQLLTEMDGMNAKKXVFIIGATNRPDIIDPALLRPGRLDQLIYIPLPDEQSRLQ

SEQ ID NO: 125273 - protein, 54 aa, Setaria italica
  misc_feature (40)..(40): Xaa can be any naturally occurring amino acid
  misc_feature (53)..(54): Xaa can be any naturally occurring amino acid
  Transcript Sequence Number=SeqID_59299
  Gene Ontology: Mol. function=ATP binding; Cellular component=Cdc48p -Npl4p-Ufd1p AAA ATPase complex; Biological process=embryonic development ending in birth or egg hatching
  Homolog annotation: Hit_ID=Q9SCN8; Match level="QueryCoverage=96%, HitCoverage=6%, E-value=1e-21, Identity=98%"; Hit description=Cell division control protein 48 homolog D
GDAGGAADRVLNQLLTEMDGMNAKKTVFIIGATNRPDIIXPALLRPGRLDQLXX

SEQ ID NO: 125274 - protein, 65 aa, Setaria italica
  misc_feature (52)..(52): Xaa can be any naturally occurring amino acid
  Transcript Sequence Number=SeqID_59300
  Gene Ontology: Mol. function=ATP binding; Cellular component =microsome; Biological process=caspase activation
  Homolog annotation: Hit_ID=Q9SCN8; Match level="QueryCoverage=100%, HitCoverage=7%, E-value=9e-27, Identity=92%"; Hit description=Cell division control protein 48 homolog D
TNRPDIIDPALLRPGRLDQLIYIPLPDEQSRLQIFKACLRKSPVAKDVDLNXALAKYTQGFSGAD

SEQ ID NO: 125275 - protein, 70 aa, Setaria italica
  misc_feature (47)..(47): Xaa can be any naturally occurring amino acid
  misc_feature (56)..(56): Xaa can be any naturally occurring amino acid
  Transcript Sequence Number=SeqID_59301
  Gene Ontology: Mol. function=ATP binding; Cellular component =endoplasmic reticulum; Biological process=cell division
  Homolog annotation: Hit_ID=Q9SCN8; Match level="QueryCoverage=100%, HitCoverage=8%, E-value=1e-30, Identity=90%"; Hit description=Cell division control protein 48 homolog D
DPALLRPGRLDQLIYIPLPDEQSRLQIFKACLRKSPVAKDVDLNALXKYTQGFSGXDITEICQRACKYAI

SEQ ID NO: 125276 - protein, 49 aa, Setaria italica
  Transcript Sequence Number=SeqID_59302
  Gene Ontology: Mol. function=ATP binding; Cellular component =microsome; Biological process=cell division
  Homolog annotation: Hit_ID=Q9SCN8; Match level="QueryCoverage=91%, HitCoverage=5%, E-value=1e-17, Identity=93%"; Hit description=Cell division control protein 48 homolog D
KACLRKSPVAKDVDLNALAKYTQGFSGADITEICQRACKYAIRENHREG

SEQ ID NO: 125277 - protein, 43 aa, Setaria italica
  Transcript Sequence Number=SeqID_59303
  Gene Ontology: Mol. function=ATP binding; Cellular component =microsome; Biological process=cell division
  Homolog annotation: Hit_ID=Q9SCN8; Match level="QueryCoverage=95%, HitCoverage=5%, E-value=6e-14, Identity=90%"; Hit description=Cell division control protein 48 homolog D
RLQIFKACLRKSPVAKDVDLNALAKYTQGFSGADITEICDRLE

SEQ ID NO: 125278 - protein, 59 aa, Setaria italica
  misc_feature (14)..(14): Xaa can be any naturally occurring amino acid
  Transcript Sequence Number=SeqID_59304
  Gene Ontology: Mol. function=ATP binding; Cellular component =microsome; Biological process=cell division
  Homolog annotation: Hit_ID=Q9SCN8; Match level="QueryCoverage=100%, HitCoverage=7%, E-value=5e-25, Identity=91%"; Hit description=Cell division control protein 48 homolog D
PLPDEQSRLQIFKXCLRKSPVAKDVDLNALAKYTQGFSGADITEICQRACKYAIRENIE

SEQ ID NO: 125279 - protein, 59 aa, Setaria italica
  misc_feature (22)..(22): Xaa can be any naturally occurring amino acid
  misc_feature (43)..(43): Xaa can be any naturally occurring amino acid
  Transcript Sequence Number=SeqID_59305
  Gene Ontology: Mol. function=ATP binding; Cellular component =microsome; Biological process=embryonic development ending in birth or egg hatching
  Homolog annotation: Hit_ID=Q9SCN8; Match level="QueryCoverage=96%, HitCoverage=6%, E-value=7e-24, Identity=94%"; Hit description=Cell division control protein 48 homolog D
AADRVLNQLLTEMDGMNAKKTXFIIGATNRPDIIDPALLRPGXLDQLIYIPLPDEQSGS

SEQ ID NO: 125280 - protein, 58 aa, Setaria italica
  Transcript Sequence Number=SeqID_59306
  Gene Ontology: Mol. function=ATP binding; Cellular component =microsome; Biological process=embryonic development ending in birth or egg hatching
  Homolog annotation: Hit_ID=Q9SCN8; Match level="QueryCoverage=79%, HitCoverage=5%, E-value=4e-19, Identity=93%"; Hit description=Cell division control protein 48 homolog D
LSYLFFYLFGCPTNRPDIIDPALLRPGRLDQLIYIPLPDEQSRLQIFKACLRKSPVAK

SEQ ID NO: 125281 - protein, 40 aa, Setaria italica
  Transcript Sequence Number=SeqID_59307
  Gene Ontology: Mol. function=ATP binding; Cellular component=Cdc48p -Npl4p-Ufd1p AAA ATPase complex; Biological process=cell division
  Homolog annotation: Hit_ID=Q9SCN8; Match level="QueryCoverage=100%, HitCoverage=4%, E-value=5e-16, Identity=100%"; Hit description=Cell division control protein 48 homolog D
MDGMNAKKTVFIIGATNRPDIIDPALLRPGRLDQLIYIPL

SEQ ID NO: 125282 - protein, 48 aa, Setaria italica
  Transcript Sequence Number=SeqID_59308
  Gene Ontology: Mol. function=ATP binding; Cellular component =microsome; Biological process=embryonic development ending in birth or egg hatching
  Homolog annotation: Hit_ID=Q9SCN8; Match level="QueryCoverage=97%, HitCoverage=5%, E-value=2e-18, Identity=93%"; Hit description=Cell division control protein 48 homolog D
VATNRPDIIDPALLRPGRLDQLIYIPLPDEQSRLQIFKACLRKSPVAK

SEQ ID NO: 125283 - protein, 56 aa, Setaria italica
  Transcript Sequence Number=SeqID_59309
  Gene Ontology: Mol. function=nucleoside-triphosphatase activity; Cellular component=microsome; Biological process=embryonic development ending in birth or egg hatching
  Homolog annotation: Hit_ID=Q9SCN8; Match level="QueryCoverage=82%, HitCoverage=5%, E-value=1e-18, Identity=93%"; Hit description=Cell division control protein 48 homolog D
IIGATNRPDIIDPALLRPGRLDQLIYIPLPDEQSRLQIFKACLRKSLWLRIVVLER

SEQ ID NO: 125284 - protein, 36 aa, Setaria italica
  Transcript Sequence Number=SeqID_59310
  Gene Ontology: Mol. function=nucleoside-triphosphatase activity; Cellular component=microsome; Biological process=embryonic development ending in birth or egg hatching
  Homolog annotation: Hit_ID=Q9SCN8; Match level="QueryCoverage=94%, HitCoverage=4%, E-value=9e-12, Identity=97%"; Hit description=Cell division control protein 48 homolog D
IGATNRPDIIDPALLRPGRLDQLIYIPLPDEQSRLL

SEQ ID NO: 125285 - protein, 90 aa, Setaria italica
  misc_feature (14)..(14): Xaa can be any naturally occurring amino acid
  misc_feature (72)..(72): Xaa can be any naturally occurring amino acid
  Transcript Sequence Number=SeqID_59311
  Gene Ontology: Mol. function=metal ion binding; Cellular component =mitochondrial intermembrane space protein transporter complex; Biological process=protein import into mitochondrial inner membrane
  Homolog annotation: Hit_ID=Q9XGY5; Match level="QueryCoverage=70%, HitCoverage=75%, E-value=1e-17, Identity=74%"; Hit description =Mitochondrial import inner membrane translocase subunit Tim13
  Pfam annotation: Domain name=zf-Tim10_DDP; Domain location=23-87; Score=97.9; E_value=3.6e-26; Accession=PF02953.7; Description =Tim10DDP family zinc finger
MDSFSSPSLSSSGXPAPNPEAVMEQIKAQLAQAYAQEFLETVGNKCFEKCVTKPGSSLSGSESSCISRCVDXYIEATGIVSRPCSAPKLG

SEQ ID NO: 125286 - protein, 78 aa, Setaria italica
  Transcript Sequence Number=SeqID_59312
LNLNAGFYRDLNITLNLTCTLTDETQGKRIIYSCPCFPSSIILNPFLSANCFASSTVFLHFFILLLPEGENKPYKYTD

SEQ ID NO: 125287 - protein, 118 aa, Setaria italica
  Transcript Sequence Number=SeqID_59313
  Gene Ontology: Mol. function=RNA binding; Cellular component=voltage -gated potassium channel complex
  Homolog annotation: Hit_ID=B2BXX5; Match level="QueryCoverage=93%, HitCoverage=11%, E-value=2e-44, Identity=75%"; Hit description=PMpt5- 1
  Pfam annotation: Domain name=PUF; Domain location=22-56; Score=36.5; E_value=1.1e-07; Accession=PF00806.11; Description=Pumilio-family RNA binding repeat
  Pfam annotation: Domain name=PUF; Domain location=58-92; Score=29.6; E_value=1.2e-05; Accession=PF00806.11; Description=Pumilio-family RNA binding repeat
  Pfam module annotation: Pfam domain module=PUF::PUF; Domain location =22-56::58-92
LQEGYLGSNCNDESTQSGMMEEIMQSVVTLTEDQYGNYVIQHVLQHGKPEERSTIITQLAGQIVRMSQQKFASNVVEKCLTFGNPEQRQILINEMLGTTDENVPLQAMMKDQFGNYVV

SEQ ID NO: 125288 - protein, 57 aa, Setaria italica
  Transcript Sequence Number=SeqID_59314
  Gene Ontology: Mol. function=RNA binding
  Homolog annotation: Hit_ID=B9SY71; Match level="QueryCoverage=92%, HitCoverage=5%, E-value=3e-17, Identity=83%"; Hit description =Pumilio, putative
  Pfam annotation: Domain name=PUF; Domain location=16-50; Score=39.2; E_value=1.7e-08; Accession=PF00806.11; Description=Pumilio-family RNA binding repeat
LEEFKTNKTRSFELLDIVGHVVEFSSDQYGSRFIQQKLETASIEEKNLIFPEIPSPG

SEQ ID NO: 125289 - protein, 38 aa, Setaria italica
  Transcript Sequence Number=SeqID_59315
SCRFTRPAHCGTIPHCKMPRSYCPYTCRPDVLAGSAWL

SEQ ID NO: 125290 - protein, 73 aa, Setaria italica
  Transcript Sequence Number=SeqID_59316
  Gene Ontology: Mol. function=metal ion binding
RAVGRTRWVAMRTLKAAISHPIGSPQLVDYCLKTLAARTVDGLTVAVRCNDETNTLEYRLTDETVLLPNVSIA

SEQ ID NO: 125291 - protein, 82 aa, Setaria italica
  Transcript Sequence Number=SeqID_59317
  Gene Ontology: Mol. function=RNA binding; Cellular component =mitochondrion
  Homolog annotation: Hit_ID=Q8LNU1; Match level="QueryCoverage=98%, HitCoverage=41%, E-value=1e-16, Identity=39%"; Hit description =Putative chloroplast RNA processing protein
  Pfam annotation: Domain name=PPR; Domain location=12-46; Score=35.6; E_value=2e-07; Accession=PF01535.12; Description=PPR repeat
  Pfam annotation: Domain name=PPR; Domain location=47-81; Score=44.1; E_value=5.6e-10; Accession=PF01535.12; Description=PPR repeat
  Pfam module annotation: Pfam domain module=PPR::PPR; Domain location =12-46::47-81
QMINEGVTPNIVVFTSLVYGLCTVDKWRKAEELLDVMVSAGLEPDVVAYNTLLHGYCRAGRIYDAFRLFRQMLSNAVMPGVA

SEQ ID NO: 125292 - protein, 96 aa, Setaria italica
  misc_feature (69)..(69): Xaa can be any naturally occurring amino acid
  misc_feature (90)..(90): Xaa can be any naturally occurring amino acid
  Transcript Sequence Number=SeqID_59318
YASDDSQERDSTPQSSPPSEGLMTCGNQNPAVEPCPKEGTSSSGQADKSTTIVSDHALQPKLVFSLKGXELDRSVTLYQSVLQDQINAGXDIILDM

SEQ ID NO: 125293 - protein, 112 aa, Setaria italica
  Transcript Sequence Number=SeqID_59319
  Gene Ontology: Mol. function=hydrolase activity
  Homolog annotation: Hit_ID=Q8W3F5; Match level="QueryCoverage=75%, HitCoverage=29%, E-value=3e-33, Identity=78%"; Hit description =Putative epoxide hydrolase
QEITDLADLSTPLPEWFSEKDLAVYASLYEKSGFRYPLKMPYRSLHKRHTIEDPKFQVPVFVVMGEKDYVYKLPGFASVLKDGIMGHCASRWPAEHLPTQPLEQDGPPRSQR

SEQ ID NO: 125294 - protein, 76 aa, Setaria italica
  misc_feature (69)..(69): Xaa can be any naturally occurring amino acid
  Transcript Sequence Number=SeqID_59320
  Gene Ontology: Mol. function=hydrolase activity; Cellular component =peroxisome
  Homolog annotation: Hit_ID=B6TU84; Match level="QueryCoverage=96%, HitCoverage=25%, E-value=4e-22, Identity=67%"; Hit description =Epoxide hydrolase 2
MDMEQQIEHSHLPIRGLNLHVAQAGKGDKGAVVFLHGFPEIWYSWRHQMLAVAAAGYRAVAPDWRGYGXSDQPPEE

SEQ ID NO: 125295 - protein, 52 aa, Setaria italica
  Transcript Sequence Number=SeqID_59321
KKRILTAMQTSQLTNSFIENLYKKRGTVLVGGQQNIYLRSHWNRMVLQEANE

SEQ ID NO: 125296 - protein, 35 aa, Setaria italica
  Transcript Sequence Number=SeqID_59322
  Gene Ontology: Mol. function=hydrolase activity
  Homolog annotation: Hit_ID=Q8W3F5; Match level="QueryCoverage=100%, HitCoverage=12%, E-value=7e-11, Identity=88%"; Hit description =Putative epoxide hydrolase
LSTPLPEWFSEKDLAVYASLYEKSGFRYPLKMPYR

SEQ ID NO: 125297 - protein, 120 aa, Setaria italica
  misc_feature (18)..(18): Xaa can be any naturally occurring amino acid
  misc_feature (54)..(54): Xaa can be any naturally occurring amino acid
  Transcript Sequence Number=SeqID_59323
MPPRSAVLEPPGNLEAVXLLPHHHEHRHLELGVQPVRYLVYSPAPPWKQSNEHXLGCMTDDYMCYYLHSCSSVSFHFAGKRTSVLAVLLLPVWHLKRVAEAGLLVQLGVGIEVLLGEPTF

SEQ ID NO: 125298 - protein, 157 aa, Setaria italica
  Transcript Sequence Number=SeqID_59324
LTLSFAFLSDVSFHTMHHFNKLREWSFLLIRLERALDEASAEKIWFSSFSTWSTTNGPQPMWQIHRILGLFFSSRLRSYLYPLRCKMMASCRRCRDRTPGTRLRGADPAAPHRNLVNHRTDLDAHHAELAAKHEVRRSKQNEREKGRGRRKERRRKG

SEQ ID NO: 125299 - protein, 47 aa, Setaria italica
  Transcript Sequence Number=SeqID_59325
PDPCGGSPDSCGEPPDLHPVGVFPASCHGSACGASPWSHLQALARVP

SEQ ID NO: 125300 - protein, 57 aa, Setaria italica
  Transcript Sequence Number=SeqID_59326
  Gene Ontology: Mol. function=transporter activity; Cellular component= membrane; Biological process=oligopeptide transport
EEFYVCVCHGAVAMMGLGVATSGALNNLVVYLIKEYNVPSVDAAQISNIVAGCLSLA

SEQ ID NO: 125301 - protein, 71 aa, Setaria italica
  Transcript Sequence Number=SeqID_59327
  Subcellular localization annotation: CTP_CleavageSite=25; ConfidenceScore=5.36e-01
VFVVKLTQASDMGAPPFFGQAPQVQQQVGGVPTSLGGTQPQTPGPFPPPPPPLPSILPPLLQQFAQNLEEW

SEQ ID NO: 125302 - protein, 87 aa, Setaria italica
  Transcript Sequence Number=SeqID_59328
DVEKTSSYDRKLTTSHGDYGWTGSDVHPTNDAIICNPVEGTEQIKKNGDVSYSNDVKLQLNVSTENNNGLQSDDGNFNKQSFCKEDR

SEQ ID NO: 125303 - protein, 114 aa, Setaria italica
  misc_feature (60)..(60): Xaa can be any naturally occurring amino acid
  misc_feature (104)..(104): Xaa can be any naturally occurring amino acid
  Transcript Sequence Number=SeqID_59329
  Gene Ontology: Mol. function=methyltransferase activity; Biological process=metabolic process
  Homolog annotation: Hit_ID=B6U1V3; Match level="QueryCoverage=90%, HitCoverage=51%, E-value=4e-20, Identity=39%"; Hit description =Methylase
ITLRMDVRDMSMFPDESFDCAIDKGTLDSLMCGVDAPLSAAQMVSEVDRLLRPGGVFILXRPGFTGKIRRQVLDPVPLTERGRLPDGFVPEDPDSHYVYVCEKXQGLTGAGSPT

SEQ ID NO: 125304 - protein, 45 aa, Setaria italica
  Transcript Sequence Number=SeqID_59330
SITLQSHLHQDISLISTFLQPYQLYFACRLLRPGGVFILITYGDP

SEQ ID NO: 125305 - protein, 51 aa, Setaria italica
  Transcript Sequence Number=SeqID_59331
  Gene Ontology: Mol. function=methyltransferase activity
  Homolog annotation: Hit_ID=B9SPN8; Match level="QueryCoverage=92%, HitCoverage=24%, E-value=2e-12, Identity=74%"; Hit description=S -adenosylmethionine-dependent methyltransferase, putative
VLMIGCGSALMSEDMVSDGYLEIVNIDISSVVIEMMRKKYFNIPQLQCILA

SEQ ID NO: 125306 - protein, 86 aa, Setaria italica
  Transcript Sequence Number=SeqID_59332
  Homolog annotation: Hit_ID=B6T791; Match level="QueryCoverage=56%, HitCoverage=12%, E-value=4e-20, Identity=93%"; Hit description =Hydrolase
CAFSSFSDTNAKQDNSKRGDPNDPRVRLKRDCVGLLAAFKLSDPYDHILIVANTHIYWQVKQSEFLTIFGRCFHISLYLFVLFDLI

SEQ ID NO: 125307 - protein, 88 aa, Setaria italica
  misc_feature (65)..(65): Xaa can be any naturally occurring amino acid
  Transcript Sequence Number=SeqID_59333
EEGGSGRKRKQSHIGSALEGYVEYKKSQTNKTLQAFEERKRSEKEFSVEKCVDQVVSMVELTDKXKLYALNVFESDTHRKIFITTKNF

SEQ ID NO: 125308 - protein, 74 aa, Setaria italica
  misc_feature (12)..(12): Xaa can be any naturally occurring amino acid
  misc_feature (22)..(22): Xaa can be any naturally occurring amino acid
  Transcript Sequence Number=SeqID_59334
  Gene Ontology: Mol. function=transition metal ion binding
  Homolog annotation: Hit_ID=B6T667; Match level="QueryCoverage=78%, HitCoverage=49%, E-value=3e-20, Identity=81%"; Hit description =Cytochrome b5
IMLVVILLALGXLVFVIPRSQXKGKSKGPDSGAGVTSKSYTKEEISKHNTRKDCWIIIKDKVYDVTPYVEEHPG

SEQ ID NO: 125309 - protein, 44 aa, Setaria italica
  Transcript Sequence Number=SeqID_59335
FTCNTKVVQMQLGQVTTISNNKRCSLYLYFGTLGSQRELLVLKE

SEQ ID NO: 125310 - protein, 87 aa, Setaria italica
  misc_feature (1)..(38): Xaa can be any naturally occurring amino acid
  Transcript Sequence Number=SeqID_59336
XXXXXXXXXXXXXXXXXXXXXXXXXXXXXXXXXXXXXXSQQNYSGFNNQQSNTYVPSYTSEFISTHISHQNNATAATMQKRLEERSA

SEQ ID NO: 125311 - protein, 88 aa, Setaria italica
  Transcript Sequence Number=SeqID_59337
GRTTQRHACMQGSKARLALAIYVAVEDYSGWWRGRPRRRRTVVYLPVRSGSFVRRLGVQGVDGQPRDGKGLGEYYERPGLRTTQGSTY

SEQ ID NO: 125312 - protein, 64 aa, Setaria italica
  Transcript Sequence Number=SeqID_59338
  Gene Ontology: Mol. function=protein serine/threonine kinase activity; Biological process=protein amino acid phosphorylation
  Homolog annotation: Hit_ID=Q2EZ09; Match level="QueryCoverage=68%, HitCoverage=3%, E-value=8e-10, Identity=65%"; Hit description =Receptor kinase TRKc
LLQGKVPQGGIFSNISLQSLVGNIGLCGIPRLRFSPCMEKPHSISLSSSYAEPCEVCYTQHQSF

SEQ ID NO: 125313 - protein, 96 aa, Setaria italica
  Transcript Sequence Number=SeqID_59339
LPLQHHHRQGTFWIKKICFCRWYSYDNVYSMLLYGASMIGSKLETDSITTMPPYVCCAVMCVLLGIYMVCFILQLLVWKHTIYIPSSTHITAQQTY

SEQ ID NO: 125314 - protein, 41 aa, Setaria italica
  Transcript Sequence Number=SeqID_59340
  Homolog annotation: Hit_ID=A6MZ99; Match level="QueryCoverage=100%, HitCoverage=56%, E-value=1e-08, Identity=75%"; Hit description=Ap2 domain containing protein (Fragment)
YVESSPDTSMDSLLQNDAPQDGASTGDLWSLDEMLMAAGAF

SEQ ID NO: 125315 - protein, 42 aa, Setaria italica
  Transcript Sequence Number=SeqID_59341
IAVPAYADPACLQGEVSKRMRNTYGLAVPQGNGAPNLAQDMS

SEQ ID NO: 125316 - protein, 130 aa, Setaria italica
  misc_feature (112)..(112): Xaa can be any naturally occurring amino acid
  Transcript Sequence Number=SeqID_59342
  Gene Ontology: Mol. function=DNA binding; Cellular component=nucleus; Biological process=regulation of transcription, DNA-dependent
  Homolog annotation: Hit_ID=Q8LJT8; Match level="QueryCoverage=74%, HitCoverage=12%, E-value=3e-20, Identity=49%"; Hit description=TSL -kinase interacting protein 1
SYTESKIALTTGGLMESPSSDSKKFSARPPNHSGKIKLQLFPIDENIQKIMQQEKHNPLSGIDFGFLEKKISSVVQHLNTKWGNSQCAKGELMLFPNGTRVDIIASSAKWTXKDSCTAADVHVAVGSPST

SEQ ID NO: 125317 - protein, 137 aa, Setaria italica
  misc_feature (116)..(116): Xaa can be any naturally occurring amino acid
  Transcript Sequence Number=SeqID_59343
  Gene Ontology: Mol. function=transporter activity; Cellular component= integral to membrane; Biological process=transport
  Homolog annotation: Hit_ID=Q6EPQ3; Match level="QueryCoverage=98%, HitCoverage=19%, E-value=1e-65, Identity=86%"; Hit description=SPX (SYG1/Pho81/XPR1) domain-containing protein-like
YDLVKLLRFLDMNATGIRKILKKFDKRFGYKFTDYYVSTRANHPYSQLQQIFKQVGVVAVVGALSRNLAYLQDHRGSFSSIYDHPSITFKDPVIEQINHSVQKLTHSTNFLQFLGXHALIVPDDMHSGSDLVDRQAT

SEQ ID NO: 125318 - protein, 134 aa, Setaria italica
  misc_feature (97)..(97): Xaa can be any naturally occurring amino acid
  misc_feature (114)..(114): Xaa can be any naturally occurring amino acid
  Transcript Sequence Number=SeqID_59344
  Gene Ontology: Mol. function=transporter activity; Cellular component= integral to membrane; Biological process=transport
  Homolog annotation: Hit_ID=Q6EPQ3; Match level="QueryCoverage=99%, HitCoverage=19%, E-value=4e-65, Identity=86%"; Hit description=SPX (SYG1/Pho81/XPR1) domain-containing protein-like
YDLVKLLRFLDMNATGIRKILKKFDKRFGYKFTDYYVSTRANHPYSQLQQIFKQVGVVAVVGALSRNLAYLQDHRGSFSSIYDHPSITFKDPVIEQXNHSVQKLTHSTNFLQFXGQHALIVPDDMHSGSDLVDE

SEQ ID NO: 125319 - protein, 89 aa, Setaria italica
  Transcript Sequence Number=SeqID_59345
  Gene Ontology: Mol. function=transporter activity; Cellular component= integral to membrane; Biological process=transport
  Homolog annotation: Hit_ID=Q6EPQ3; Match level="QueryCoverage=88%, HitCoverage=11%, E-value=2e-36, Identity=91%"; Hit description=SPX (SYG1/Pho81/XPR1) domain-containing protein-like
YREVGYDLVKLLRFLDMNATGIRKILKKFDKRFGYKFTDYYVSTRANHPYSQLQQIFKQVGVVAVVGALSRNLAYLQDQSKERLFNTNT

SEQ ID NO: 125320 - protein, 81 aa, Setaria italica
  Transcript Sequence Number=SeqID_59346
  Subcellular localization annotation: CTP_CleavageSite=44; ConfidenceScore=5.14e-01
QTAHAPPPPPPPLPPPVMSVPSPLQTDRITRETIYACIWKPTTNAMQDSKVRGGSRLHVISRLLTARVRTTTYTNYYFQVG

SEQ ID NO: 125321 - protein, 63 aa, Setaria italica
  Transcript Sequence Number=SeqID_59347
  Gene Ontology: Mol. function=transferase activity; Cellular component= nuclear pore; Biological process=transport
  Homolog annotation: Hit_ID=Q2HVW5; Match level="QueryCoverage=76%, HitCoverage=5%, E-value=2e-11, Identity=58%"; Hit description =Nucleoporin interacting component; Protein prenyltransferase
KRKLKEQINQEYYLERLALNCIDNVRDTDGTLRAVKSKIANLVANNMSRNWPQDLYQKVAQCI

SEQ ID NO: 125322 - protein, 99 aa, Setaria italica
  Transcript Sequence Number=SeqID_59348
  Gene Ontology: Mol. function=transferase activity; Cellular component= nuclear pore; Biological process=transport
  Homolog annotation: Hit_ID=Q2HVW5; Match level="QueryCoverage=87%, HitCoverage=10%, E-value=2e-23, Identity=58%"; Hit description =Nucleoporin interacting component; Protein prenyltransferase
DNLRRINKTKCLSDAVCAMARNMLDGESRATALIHSGNEIMETARYSSETSVQDKDLISEQQTVLRQLEAILHIYRLARAGQTVDALRETIRLPFLHFG

SEQ ID NO: 125323 - protein, 76 aa, Setaria italica
  Transcript Sequence Number=SeqID_59349
  Gene Ontology: Mol. function=transferase activity; Cellular component= nuclear pore; Biological process=transport
  Homolog annotation: Hit_ID=Q2HVW5; Match level="QueryCoverage=73%, HitCoverage=6%, E-value=1e-21, Identity=91%"; Hit description =Nucleoporin interacting component; Protein prenyltransferase
NRYDLVIAKSSFKDNILPLLLEALSTKLKAKTIRAEAPSQSLSATRLLAREGINAEQLARDLKSFELKTTFEDVFP

SEQ ID NO: 125324 - protein, 161 aa, Setaria italica
  misc_feature (99)..(99): Xaa can be any naturally occurring amino acid
  Transcript Sequence Number=SeqID_59350
  Gene Ontology: Mol. function=calcium-dependent cysteine-type endopeptidase activity; Cellular component=intracellular; Biological process=proteolysis
  Homolog annotation: Hit_ID=B9SBQ0; Match level="QueryCoverage=91%, HitCoverage=6%, E-value=2e-69, Identity=78%"; Hit description =Calpain, putative
  Pfam annotation: Domain name=Peptidase_C2; Domain location=2-121; Score=-142.9; E_value=3e-05; Accession=PF00648.13; Description =Calpain family cysteine protease
VGRISRYDKLVSNFKQEGFLLGAGSPSGSDVHVSSSGIVQGHAYSILQVREVDGHKLIQIRNPWANEVEWNGPWSDSSPEWTERMKHKLMHVPQAKNGXVFWMSWQDFQIHFRSIYVCRVYPPEMRYSVHGQWRGYSAGGCQDFDSWHQNPQYRLRVTGRD

SEQ ID NO: 125325 - protein, 138 aa, Setaria italica
  misc_feature (23)..(23): Xaa can be any naturally occurring amino acid
  misc_feature (65)..(65): Xaa can be any naturally occurring amino acid
  Transcript Sequence Number=SeqID_59351
  Gene Ontology: Mol. function=calcium-dependent cysteine-type endopeptidase activity; Cellular component=plasma membrane; Biological process=proteolysis
  Homolog annotation: Hit_ID=Q8RVL2; Match level="QueryCoverage=96%, HitCoverage=6%, E-value=6e-56, Identity=78%"; Hit description =Calpain-like protein
  Pfam annotation: Domain name=Peptidase_C2; Domain location=3-131; Score=-140.2; E_value=2e-05; Accession=PF00648.13; Description =Calpain family cysteine protease
LTGGAGEEIDMRSPQAQIDLASXRLWSQLLYFKQEGFLLGAGSPSGSDVHVSSSGIVQGHAYSIXLQVREVDGHKLIQIRNPWANEVEWNGPWSDSSPEWTERMKHKLMHVPQAKNGVFWMSWQDFQIHFRSIIMFST

SEQ ID NO: 125326 - protein, 53 aa, Setaria italica
  Transcript Sequence Number=SeqID_59352
SWCLIRKSWPSIGVAFFDIDSFVLCLKPWFSWSPSEGVNVNSYSIMYRQYSSG

SEQ ID NO: 125327 - protein, 133 aa, Setaria italica
  Transcript Sequence Number=SeqID_59353
  Gene Ontology: Mol. function=calcium-dependent cysteine-type endopeptidase activity; Cellular component=plasma membrane; Biological process=proteolysis
  Homolog annotation: Hit_ID=B9SBQ0; Match level="QueryCoverage=93%, HitCoverage=5%, E-value=8e-31, Identity=60%"; Hit description =Calpain, putative
EALEGGLVQDALVDLTGGAGEEIDMRSPQAQIDLASGRLWSQLLYFKQEGFLLGAGSPSGSDVHVSSSGIVQGHAYSILQVREVDGHKHIQNTPFFACGTCMSLCFIRSVHSGEESDHGPFHSTSFAHGFLIW

SEQ ID NO: 125328 - protein, 50 aa, Setaria italica
  misc_feature (28)..(28): Xaa can be any naturally occurring amino acid
  Transcript Sequence Number=SeqID_59354
  Gene Ontology: Mol. function=calcium-dependent cysteine-type endopeptidase activity; Cellular component=intracellular; Biological process=proteolysis
  Homolog annotation: Hit_ID=B9SBQ0; Match level="QueryCoverage=82%, HitCoverage=1%, E-value=9e-16, Identity=81%"; Hit description =Calpain, putative
VNLGLFLGIVLWSKYFQIHFRSIYVCRXYPPEMRYSVHGQWRGYSAGGCQ

SEQ ID NO: 125329 - protein, 61 aa, Setaria italica
  Transcript Sequence Number=SeqID_59355
  Gene Ontology: Mol. function=protein serine/threonine kinase activity; Cellular component=myosin complex; Biological process =protein amino acid phosphorylation
  Homolog annotation: Hit_ID=Q7XYY6; Match level="QueryCoverage=60%, HitCoverage=3%, E-value=1e-13, Identity=94%"; Hit description=EDR1
FFVFYFLFYFYFDKVRIMRRLRHPNIVLFMGAVTRPPNLSIVSEYLPRYSTIFYYAKVFIF

SEQ ID NO: 125330 - protein, 51 aa, Setaria italica
  Transcript Sequence Number=SeqID_59356
  Gene Ontology: Mol. function=protein serine/threonine kinase activity; Biological process=protein amino acid phosphorylation
  Homolog annotation: Hit_ID=Q7XYY6; Match level="QueryCoverage=86%, HitCoverage=4%, E-value=7e-14, Identity=86%"; Hit description=EDR1
CGFLIARDPNLRPSFSQLTSALKTVQRLVTPSHQETQSPPVHQEISVNSTP

SEQ ID NO: 125331 - protein, 52 aa, Setaria italica
  Transcript Sequence Number=SeqID_59357
  Gene Ontology: Mol. function=protein serine/threonine kinase activity; Cellular component=plasma membrane; Biological process =protein amino acid phosphorylation
  Homolog annotation: Hit_ID=Q7XYY6; Match level="QueryCoverage=88%, HitCoverage=4%, E-value=6e-21, Identity=97%"; Hit description=EDR1
LNCFLPIGSYGEVYRADWNGTEVAVKKFLDQDFYGDALDEFRSEVRIMRRLR

SEQ ID NO: 125332 - protein, 73 aa, Setaria italica
  Transcript Sequence Number=SeqID_59358
  Gene Ontology: Mol. function=nucleotide binding; Cellular component =plasma membrane; Biological process=small GTPase mediated signal transduction
  Homolog annotation: Hit_ID=A9SI73; Match level="QueryCoverage=79%, HitCoverage=26%, E-value=9e-27, Identity=98%"; Hit description =Rab8/RabE-family small GTPase
  Pfam annotation: Domain name=Ras; Domain location=1-72; Score=-7.0; E_ value=8.4e-09; Accession=PF00071.14; Description=Ras family
IDFKIRTVELDGKRIKLQIWDTAGQERFRTITTAYYRGAMGILLVYDVTDESSFNNIRILFTLSEACCSMFLI

SEQ ID NO: 125333 - protein, 115 aa, Setaria italica
  misc_feature (56)..(56): Xaa can be any naturally occurring amino acid
  misc_feature (97)..(97): Xaa can be any naturally occurring amino acid
  Transcript Sequence Number=SeqID_59359
  Gene Ontology: Mol. function=drug transporter activity; Cellular component=membrane; Biological process=multidrug transport
  Homolog annotation: Hit_ID=B9RID7; Match level="QueryCoverage=94%, HitCoverage=20%, E-value=3e-30, Identity=66%"; Hit description=DNA -damage-inducible protein f, putative
LRIGSGLFTRDQGVLHHIYIGIPFVCLTQPINALAFVFDGINYGASDFGYAAYSMXVLVGIVSIICILTLASYSGFTGIWVALVIYMSLRMFAGFLXRIGTAQGPWTFLAAEHQC

SEQ ID NO: 125334 - protein, 74 aa, Setaria italica
  Transcript Sequence Number=SeqID_59360
SRYFFILLMAYYSILKQQSYLPYFVFVDFVHRCHSSGCPSMLKARLICSDASCPVDLLGTLSELPLSWSPSPDE

SEQ ID NO: 125335 - protein, 70 aa, Setaria italica; identical to SEQ ID NO: 95445
  Transcript Sequence Number=SeqID_59361

SEQ ID NO: 125336 - protein, 79 aa, Setaria italica
  Transcript Sequence Number=SeqID_59362
NLNGRYQSSRECSTSDAETNCRLSSRLKQRSEHDQFKVEQDNSFEQLDSGKACTSNSDQLDQDLSLRSITFRSALMSRS

SEQ ID NO: 125337 - protein, 56 aa, Setaria italica
  Transcript Sequence Number=SeqID_59363
ELGKQLIVVCSSTLYASHCHPCDFYSISEVLALHISCTYLTSKRVLYISMYVYVSS

SEQ ID NO: 125338 - protein, 50 aa, Setaria italica
  Transcript Sequence Number=SeqID_59364
LKEKAVIVHYLVIIHQERPYDQLIVVCSSTLYASHCHPCDFYSISEVLAL

SEQ ID NO: 125339 - protein, 60 aa, Setaria italica
  misc_feature (23)..(23): Xaa can be any naturally occurring amino acid
  Transcript Sequence Number=SeqID_59365
  Gene Ontology: Mol. function=structural constituent of ribosome; Cellular component=intracellular; Biological process=translation
  Homolog annotation: Hit_ID=B6UG52; Match level="QueryCoverage=91%, HitCoverage=28%, E-value=8e-23, Identity=92%"; Hit description =Ribosomal protein rpS20
IIEIEKMIAEAYKAIDKTVQVGXMHRNTGNHRKSRLARRKKAIEILRGWYVPNAEPVAAT

SEQ ID NO: 125340 - protein, 99 aa, Setaria italica
  Transcript Sequence Number=SeqID_59366
TKEADVKDGSNVSCSKRRLVKEKAKGKSKKTTEKRQASNRKNKSKGGNDNDQGTALEVEGQSGKTDEHADIDASKVSTDASVSSSTAGDACNYSSDFRG

SEQ ID NO: 125341 - protein, 78 aa, Setaria italica
  misc_feature (55)..(55): Xaa can be any naturally occurring amino acid
  Transcript Sequence Number=SeqID_59367
  Gene Ontology: Mol. function=nuclease activity; Cellular component =nucleus; Biological process=DNA metabolic process
  Homolog annotation: Hit_ID=Q9LKI5-3; Match level="QueryCoverage=71%, HitCoverage=7%, E-value=5e-13, Identity=64%"; Hit description =Isoform 3 of DNA repair endonuclease UVH1
LVTCKDERTCFQLQECISKGPHKDGRCIGPTLANEPDPLLSQNSITRKAGGKRHXEKEMQVIVDMREFMSSLPNVLHQ

SEQ ID NO: 125342 - protein, 62 aa, Setaria italica
  misc_feature (19)..(19): Xaa can be any naturally occurring amino acid
  Transcript Sequence Number=SeqID_59368
  Gene Ontology: Cellular component=integral to membrane
  Homolog annotation: Hit_ID=Q10MX8; Match level="QueryCoverage=96%, HitCoverage=9%, E-value=1e-22, Identity=91%"; Hit description =Transmembrane protein G5p, putative, expressed
CLQDALDLISGYYTVSQGXSTSPFQTGGFESASYLPVASAIIVGGITATTFTLSQVGRNAQH

SEQ ID NO: 125343 - protein, 80 aa, Setaria italica
  Transcript Sequence Number=SeqID_59369
  Gene Ontology: Mol. function=hydrolase activity; Cellular component =integral to membrane; Biological process=dorsal closure, amnioserosa morphology change
  Homolog annotation: Hit_ID=Q10MX8; Match level="QueryCoverage=70%, HitCoverage=9%, E-value=6e-26, Identity=98%"; Hit description =Transmembrane protein G5p, putative, expressed
NNDIFKKLWVEHGDELSLEYAGSYALKGDLVRYGRQTLPGLIKDGMSALSRYYLNNFHDGVRQVTGSITSHFLYCAQIFV

SEQ ID NO: 125344 - protein, 47 aa, Setaria italica
  Transcript Sequence Number=SeqID_59370
  Homolog annotation: Hit_ID=B6SV40; Match level="QueryCoverage=97%, HitCoverage=7%, E-value=1e-14, Identity=86%"; Hit description=Growth regulator
VQFRNAAISRNFRGLQELKQNIVRREKPDQIMHGRLLQMATSAVTKV

SEQ ID NO: 125345 - protein, 141 aa, Setaria italica
  Transcript Sequence Number=SeqID_59371
AACVCGYIIYARIRYCRVSFRLFLKKRVSFRCSIHTNPKNLVCCAWIIIGGFPPNFLLCLLPHTVSLHAGLLAGFGRSHSPTPTDFTLLALALPFLSGDEKPQRQPASHPSNVPQPYHFGRINPTKKTTKQKTRKPFKNLT

SEQ ID NO: 125346 - protein, 71 aa, Setaria italica
  Transcript Sequence Number=SeqID_59372
  Subcellular localization annotation: CTP_CleavageSite=16; ConfidenceScore=5.24e-01
LVLVPSSSPLLQLQGRAAAARARLPTRGLLAGFGRSHSPTPTDFTLLALALPFLSGDEKPQRQPASHPSNV

SEQ ID NO: 125347 - protein, 94 aa, Setaria italica
  misc_feature (7)..(7): Xaa can be any naturally occurring amino acid
  Transcript Sequence Number=SeqID_59373
  Gene Ontology: Mol. function=binding; Cellular component=nucleus; Biological process=embryonic development ending in birth or egg hatching
  Homolog annotation: Hit_ID=B6TRX0; Match level="QueryCoverage=94%, HitCoverage=32%, E-value=5e-33, Identity=76%"; Hit description=Cell differentiation protein rcd1
  Pfam annotation: Domain name=Rcd1; Domain location=1-94; Score=-57.4; E_value=0.0026; Accession=PF04078.5; Description=Cell differentiation family, Rcd1-like
MHCTLQXVASHPDTRIPFITAEIPVYLYPFLNTTYRTRQYEYLRLTSLGVIGALVKVDDHEVIAYLLSTEIIPLCLRTMDLGSEISKTVFTYLA

SEQ ID NO: 125348 - protein, 42 aa, Setaria italica
  Transcript Sequence Number=SeqID_59374
PSETQAQRRVEIRRRRKQIKHTRSAFMLCIKSSALLAVLCHC

SEQ ID NO: 125349 - protein, 79 aa, Setaria italica
  Transcript Sequence Number=SeqID_59375
SFPCLLSLTFRLPSPSSLGSFFLGRSVRRLLCRKCGGRIGDAYEDEDRDSGLSDGDAFSDDLRASSGSGGSSASSQRNY

SEQ ID NO: 125350 - protein, 71 aa, Setaria italica
  Transcript Sequence Number=SeqID_59376
  Gene Ontology: Mol. function=hydrolase activity, acting on glycosyl bonds; Cellular component=beta-galactosidase complex; Biological process=carbohydrate metabolic process
  Homolog annotation: Hit_ID=Q75HQ3; Match level="QueryCoverage=73%, HitCoverage=6%, E-value=1e-15, Identity=73%"; Hit description=Beta -galactosidase 7
NTGKFHQFLSSFVWFFLLSQVNAQHGSRTAEEVQSFSDINTWKAFKEPIPQDVSKAMYTGNQLFDHLSTTK

SEQ ID NO: 125351 - protein, 54 aa, Setaria italica
  Transcript Sequence Number=SeqID_59377
NSPSEPLLFGTYSNFSLGQEQEVKITQKENSMLYFNRFHQDKDIMYDALQAHIF

SEQ ID NO: 125352 - protein, 73 aa, Setaria italica
  Transcript Sequence Number=SeqID_59378
  Gene Ontology: Mol. function=hydrogen-translocating pyrophosphatase activity; Cellular component=membrane; Biological process=proton transport
  Homolog annotation: Hit_ID=B6UEE8; Match level="QueryCoverage=94%, HitCoverage=9%, E-value=3e-30, Identity=92%"; Hit description =Pyrophosphate-energized vacuolar membrane proton pump
VTIRRSGVSEEARSLGPKGSEAHKAAVIGDTIGDPLKDTSGPSLNILIKLMAVESLVFAPFFAAHGGIVFDRL

SEQ ID NO: 125353 - protein, 152 aa, Setaria italica
  misc_feature (107)..(107): Xaa can be any naturally occurring amino acid
  Transcript Sequence Number=SeqID_59379
  Gene Ontology: Mol. function=hydrogen-translocating pyrophosphatase activity; Cellular component=membrane; Biological process=proton transport
  Homolog annotation: Hit_ID=B6UEE8; Match level="QueryCoverage=84%, HitCoverage=16%, E-value=2e-49, Identity=78%"; Hit description =Pyrophosphate-energized vacuolar membrane proton pump
  Pfam annotation: Domain name=H_PPase; Domain location=1-138; Score= -531.1; E_value=0.00065; Accession=PF03030.8; Description=Inorganic H+ pyrophosphatase
CRSSGTYVLPCCSRYSSYRIVLRFRKMMAPGALVMLSPLVVGTLFGVETLAGLLAGALVSGVQVAISASNSGGAWDNAKKYIEAGVSEEARSLGPKGSEAHKAAVIXGDTIGDPLKDTSGPSLNILIKLMAVESLVFAPFFAAHGGIVFDRL

SEQ ID NO: 125354 - protein, 104 aa, Setaria italica
  misc_feature (77)..(77): Xaa can be any naturally occurring amino acid
  misc_feature (87)..(87): Xaa can be any naturally occurring amino acid
  Transcript Sequence Number=SeqID_59380
  Gene Ontology: Mol. function=hydrogen-translocating pyrophosphatase activity; Cellular component=membrane; Biological process=proton transport
  Homolog annotation: Hit_ID=B6UEE8; Match level="QueryCoverage=66%, HitCoverage=8%, E-value=2e-29, Identity=95%"; Hit description =Pyrophosphate-energized vacuolar membrane proton pump
TKETRTNVGTGTTSYGVETLAGLLAGALVSGVQVAISASNSGGAWDNAKKYIEAGVSEEARSLGPKGSEAHKAAVIXGDTIGDPLKXTSGPSLNILIKLMAVES

SEQ ID NO: 125355 - protein, 128 aa, Setaria italica
  misc_feature (62)..(62): Xaa can be any naturally occurring amino acid
  misc_feature (69)..(69): Xaa can be any naturally occurring amino acid
  Transcript Sequence Number=SeqID_59381
  Pfam annotation: Domain name=Kelch_2; Domain location=35-89; Score =17.5; E_value=0.058; Accession=PF07646.7; Description=Kelch motif
YGGWMEKNGFSDVYIMDTMSLEWTELAVTGSVPPPRCGHSATMIEKRLLIFGGRGGAGLIMXGDLWGFXKGVTEEDNETPGWTQLKLPGQSPSPRCGHSVTSGGPYVCNLISSYIHTSFLSFPSFWVH

SEQ ID NO: 125356 - protein, 115 aa, Setaria italica
  misc_feature (107)..(107): Xaa can be any naturally occurring amino acid
  Transcript Sequence Number=SeqID_59382
  Homolog annotation: Hit_ID=Q01AT2; Match level="QueryCoverage=98%, HitCoverage=26%, E-value=3e-11, Identity=36%"; Hit description =Putative transcription factor (ISS)
  Pfam annotation: Domain name=Kelch_1; Domain location=36-88; Score =26.9; E_value=8e-05; Accession=PF01344.17; Description=Kelch motif
AGLIMGDLWALKGVTEEDNETPGWTQLKLPGQSPSPRCGHSVTSGGPYLLLFGGHGTGGWLSRYDVYYNECIILDRVSVQWKRLPTSNEPPPPRAYHSMTSIGSQFXLFGGFDGK

SEQ ID NO: 125357 - protein, 38 aa, Setaria italica
  Transcript Sequence Number=SeqID_59383
  Gene Ontology: Mol. function=transferase activity, transferring glycosyl groups; Biological process=metabolic process
CSVEAEYMASAWRAKTIGPTVPASYLGDDRLPSDTKYG

SEQ ID NO: 125358 - protein, 110 aa, Setaria italica
  misc_feature (12)..(12): Xaa can be any naturally occurring amino acid
  misc_feature (37)..(37): Xaa can be any naturally occurring amino acid
  misc_feature (47)..(47): Xaa can be any naturally occurring amino acid
  misc_feature (58)..(58): Xaa can be any naturally occurring amino acid
  misc_feature (80)..(80): Xaa can be any naturally occurring amino acid
  misc_feature (101)..(101): Xaa can be any naturally occurring amino acid
  Transcript Sequence Number=SeqID_59384
  Gene Ontology: Mol. function=calcium ion binding
  Homolog annotation: Hit_ID=B9S7L4; Match level="QueryCoverage=100%, HitCoverage=22%, E-value=3e-31, Identity=61%"; Hit description =Calcium ion binding protein, putative
VPRKFTSKAEGXMGYEDFVHFILSEEDKSTGPSQEYXLFEEQLHRMXECMAQEPVLFXEDILCQLIDMIGPENESYLTLXKDFRKVQNCLGHFFNILFKSXTKFMAFEAR

SEQ ID NO: 125359 - protein, 52 aa, Setaria italica
  Transcript Sequence Number=SeqID_59385
LAPQFLLSRVFIRYLSKIQSILSLLNKVTKKTILLVYSVSFCLVCSHMNNEL

SEQ ID NO: 125360 - protein, 55 aa, Setaria italica
  Transcript Sequence Number=SeqID_59386
KDKKSSPYHVCYIDLHSCAVTSSCIPWIRYAVLLVNIQIYSFSFSVTLFVLPLCS

SEQ ID NO: 125361 - protein, 92 aa, Setaria italica
  misc_feature (32)..(32): Xaa can be any naturally occurring amino acid
  Transcript Sequence Number=SeqID_59387
  Subcellular localization annotation: CTP_CleavageSite=75; ConfidenceScore=5.14e-01
CSGAACWSYISRGSGIPAAPSLWANNSQEYTXKSPGFLTQSSCWQGRRYHSERAVKDTRSSTSLEGVLGMVATIVAMEVSFCLFPVLAPDTF

SEQ ID NO: 125362 - protein, 53 aa, Setaria italica
  Transcript Sequence Number=SeqID_59388
READQKVSGAGFRDKNKAREADQKVSGAGRNNKGDFHRHNGGNHAKDPFKRGA

SEQ ID NO: 125363 - protein, 80 aa, Setaria italica
  Transcript Sequence Number=SeqID_59389
  Subcellular localization annotation: CTP_CleavageSite=56; ConfidenceScore=5.04e-01
TAAFAWFMNKAPDDASIQQTKQQFSSHWPGTLACHGNGSHVSRRLFCLYEEASICRSQKKKKLPSEKPFPFVQLLFYGYS

SEQ ID NO: 125364 - protein, 58 aa, Setaria italica
  Transcript Sequence Number=SeqID_59390
  Homolog annotation: Hit_ID=B9S3L3; Match level="QueryCoverage=100%, HitCoverage=10%, E-value=6e-09, Identity=48%"; Hit description =Cytosolic purine 5-nucleotidase, putative
SMLGHLQDEIEIQNSENYRFQQAKLSIIHDLLGKVHATVVSTEKGQVYRALLDELNAE

SEQ ID NO: 125365 - protein, 151 aa, Setaria italica
  misc_feature (73)..(73): Xaa can be any naturally occurring amino acid
  Transcript Sequence Number=SeqID_59391
  Homolog annotation: Hit_ID=Q9ZVF7; Match level="QueryCoverage=100%, HitCoverage=26%, E-value=2e-69, Identity=77%"; Hit description =Similar to axi 1 protein
  Pfam annotation: Domain name=DUF246; Domain location=16-151; Score= -67.0; E_value=1.1e-10; Accession=PF03138.6; Description=Plant protein family
ISNNTDGLPESNGYIYVEANGGLNQQRTSICNAVAVAGFLNATLVIPNFHYHSIWMDPSKFGDIYDEDHFIQXLKNDVRVVNKVPEFIMERFGHNLSNAFNFKIKAWSPIQFYEDAVLPKLIEERLIRISPFANRLSFDAPPAVQRLRCLA

SEQ ID NO: 125366 - protein, 42 aa, Setaria italica
  Transcript Sequence Number=SeqID_59392
FITFLVNFLAYLRHPWEESDGESMDTSSEGSSETDVDRLRGS

SEQ ID NO: 125367 - protein, 67 aa, Setaria italica
  Transcript Sequence Number=SeqID_59393
IDILYSFLFDLCFECHFQVSILASKFPDLKTFRSCDLLPTSWISVAWYVCNNPDSLIFFTDVLMSFV

SEQ ID NO: 125368 - protein, 55 aa, Setaria italica
  Transcript Sequence Number=SeqID_59394
MLFADTDRAAPACPSFGGLNHCVNAAGKLTLPVFGLASYKLRSSIWSSNRPEEQH

SEQ ID NO: 125369 - protein, 57 aa, Setaria italica
  Transcript Sequence Number=SeqID_59395
  Gene Ontology: Mol. function=microtubule motor activity; Cellular component=microtubule associated complex; Biological process =microtubule-based movement
  Subcellular localization annotation: CTP_CleavageSite=48; ConfidenceScore=5.78e-01
NTKSKKLTVPKVGPASMRPKPRDPSAPRSSVATGVRRSTTTQATPPARASSTSKRVP

SEQ ID NO: 125370 - protein, 82 aa, Setaria italica
  Transcript Sequence Number=SeqID_59396
YHSRNSSPIFCVWFNFSKCTLSHMHMLLCYYYVLFCMIPSGNRCAKKYHHSSQLPQQELAALQNEYHRSRVKTLMIRTNRLF

SEQ ID NO: 125371 - protein, 102 aa, Setaria italica
  Transcript Sequence Number=SeqID_59397
  Gene Ontology: Mol. function=cysteine-type peptidase activity; Cellular component=nucleus; Biological process=ubiquitin-dependent protein catabolic process
  Homolog annotation: Hit_ID=Q8H7M6; Match level="QueryCoverage=61%, HitCoverage=17%, E-value=2e-16, Identity=69%"; Hit description =Ubiquitin carboxyl-terminal hydrolase
TQHCCNLQDAHEFLNFLLNELVDILEKEHNAARESLQNLSLQKNSNGPINGLPNGCHKESAATWVHKCFQVRFHSFFTACFCVHTYGMCINSRLCFCYNSWR

SEQ ID NO: 125372 - protein, 40 aa, Setaria italica
  Transcript Sequence Number=SeqID_59398
  Gene Ontology: Mol. function=protein serine/threonine kinase activity; Biological process=protein amino acid phosphorylation
  Homolog annotation: Hit_ID=Q5N8C4; Match level="QueryCoverage=85%, HitCoverage=3%, E-value=2e-10, Identity=88%"; Hit description =Putative receptor-like protein kinase 2
FDNNNFTGPIPTSLGQVTSLQIIRLDHNQFSGPVGLFEVM

SEQ ID NO: 125373 - protein, 126 aa, Setaria italica
  misc_feature (92)..(92): Xaa can be any naturally occurring amino acid
  Transcript Sequence Number=SeqID_59399
  Gene Ontology: Mol. function=protein phosphatase type 2A regulator activity; Cellular component=protein phosphatase type 2A complex; Biological process=signal transduction
  Homolog annotation: Hit_ID=Q5ZAG2; Match level="QueryCoverage=94%, HitCoverage=29%, E-value=1e-56, Identity=86%"; Hit description=Type 2A protein serine/threonine phosphatase 55kDa B regulatory subunit -like
LICGSQHFVTLIRKYIKFSKDGRHILSRDYMTLKLWDVKMNSGPVATFQVHEYLRPKLCDLYENDSIFDKFECCQSGDGLQVATGSYSNIFXVFGVGTGSNEASTLEATRNPTRRQLQNPTRLPDP

SEQ ID NO: 125374 - protein, 46 aa, Setaria italica
  Transcript Sequence Number=SeqID_59400
  Gene Ontology: Mol. function=protein phosphatase type 2A regulator activity; Cellular component=protein phosphatase type 2A complex; Biological process=signal transduction
  Homolog annotation: Hit_ID=Q39247; Match level="QueryCoverage=71%, HitCoverage=6%, E-value=1e-09, Identity=87%"; Hit description =Serine/threonine protein phosphatase 2A 55 kDa regulatory subunit B beta isoform
  Pfam annotation: Domain name=PP2A_B_subs_rcg; Domain location=18-46; Score=6.0; E_value=0.016; Accession=PF10594.1; Description=Serine -threonine phosphatase 2A subun
MVCYICPIYTAKQVTSQETSLAASCRRVYAHAHDYHINSISNNSDG

SEQ ID NO: 125375 - protein, 107 aa, Setaria italica
  misc_feature (93)..(93): Xaa can be any naturally occurring amino acid
  Transcript Sequence Number=SeqID_59401
  Gene Ontology: Mol. function=protein serine/threonine kinase activity
  Homolog annotation: Hit_ID=C4P7S7; Match level="QueryCoverage=89%, HitCoverage=21%, E-value=2e-30, Identity=72%"; Hit description=CBL -interacting protein kinase 25
  Pfam annotation: Domain name=NAF; Domain location=65-107; Score=-7.7; E_value=0.033; Accession=PF03822.6; Description=NAF domain
TPSNEGILQIGKKSMENPWFRKGLNAKLLRYNLQTKDAPPLDMNADFDSVSTIANTESKQQEAKKPINMNAFDIISLSTGLTCRYVEESDKKXESKFTSTNTSSTII

SEQ ID NO: 125376 - protein, 73 aa, Setaria italica
  misc_feature (24)..(24): Xaa can be any naturally occurring amino acid
  misc_feature (35)..(35): Xaa can be any naturally occurring amino acid
  misc_feature (42)..(42): Xaa can be any naturally occurring amino acid
  Transcript Sequence Number=SeqID_59402
  Gene Ontology: Mol. function=protein serine/threonine kinase activity; Biological process=protein amino acid phosphorylation
  Homolog annotation: Hit_ID=C4P7S7; Match level="QueryCoverage=84%, HitCoverage=13%, E-value=2e-23, Identity=87%"; Hit description=CBL -interacting protein kinase 25
EQLRLENRQKDKDGLLHTTCGTPXAYVAPEVINRXGYDGAKXADIWSVGSSSFVLLAGYLPFHDKNLMDMYKK

SEQ ID NO: 125377 - protein, 30 aa, Setaria italica
  Transcript Sequence Number=SeqID_59403
TIVVLISSKINDERVKQNYMNVDRGSFQHS

SEQ ID NO: 125378 - protein, 35 aa, Setaria italica
  Transcript Sequence Number=SeqID_59404
VLMQKYEMGKCLDKEPLPKSTLIATLSEVFVLRAR

SEQ ID NO: 125379 - protein, 66 aa, Setaria italica
  Transcript Sequence Number=SeqID_59405
RVVPFASLSGTIGAHDRLPHESLRKLRDDHSHLHCCSSPGANGNSLATDSARTTAGFTLLAEEDEG

SEQ ID NO: 125380 - protein, 53 aa, Setaria italica
  Transcript Sequence Number=SeqID_59406
  Homolog annotation: Hit_ID=A3AF13; Match level="QueryCoverage=96%, HitCoverage=4%, E-value=6e-20, Identity=78%"; Hit description =Ubiquitin carboxyl-terminal hydrolase 26
SDGNISKSDIRQLYMVWKPLCQGCHGNTKDSPNCFCGLIPTANGVRKTGPWMD

SEQ ID NO: 125381 - protein, 74 aa, Setaria italica
  misc_feature (21)..(21): Xaa can be any naturally occurring amino acid
  Transcript Sequence Number=SeqID_59407
  Gene Ontology: Mol. function=peptidase activity
  Homolog annotation: Hit_ID=B6U3L1; Match level="QueryCoverage=100%, HitCoverage=80%, E-value=1e-32, Identity=94%"; Hit description=UBP26
SVEIEDDFATLADKSIFPGDXLWVRDSEIYENRDIADEISDQKADMLQAEEGFRGTLLTSSVSAQLCQDIAFSE

SEQ ID NO: 125382 - protein, 68 aa, Setaria italica
  Transcript Sequence Number=SeqID_59408
  Homolog annotation: Hit_ID=A3AF13; Match level="QueryCoverage=95%, HitCoverage=5%, E-value=4e-26, Identity=86%"; Hit description =Ubiquitin carboxyl-terminal hydrolase 26
RLTVHETSIDNGPIQCEHGKVPASKVTSMKRLSSVAWQKLFSKYGGGPTLSNDDYCMECLKDGAKNAV

SEQ ID NO: 125383 - protein, 55 aa, Setaria italica
  Transcript Sequence Number=SeqID_59409
  Homolog annotation: Hit_ID=B6U3S0; Match level="QueryCoverage=72%, HitCoverage=18%, E-value=2e-13, Identity=92%"; Hit description=SLD5
IPSVGRSAAEAATTDVELLKRAWRNEKAVPEILRFDSPLVSRVREQIQLLEETLD

SEQ ID NO: 125384 - protein, 63 aa, Setaria italica
  Transcript Sequence Number=SeqID_59410
  Homolog annotation: Hit_ID=B6U3S0; Match level="QueryCoverage=76%, HitCoverage=21%, E-value=4e-18, Identity=91%"; Hit description=SLD5
VTRQSLSSTEDDMVPEPQLDTFVFCKTKSDVGAFQLDDIGEEVVDLATLDQALDGLVTERNNN

SEQ ID NO: 125385 - protein, 45 aa, Setaria italica
  Transcript Sequence Number=SeqID_59411
  Homolog annotation: Hit_ID=B6U3S0; Match level="QueryCoverage=91%, HitCoverage=18%, E-value=6e-13, Identity=87%"; Hit description=SLD5
RRRTLGAFQLDDIGEEVVDLVANDLYVLRYKSIKGLVEGGQIDLI

SEQ ID NO: 125386 - protein, 84 aa, Setaria italica
  Transcript Sequence Number=SeqID_59412
  Gene Ontology: Mol. function=translation initiation factor activity; Biological process=cellular metabolic process
  Homolog annotation: Hit_ID=Q2QQD9; Match level="QueryCoverage=91%, HitCoverage=20%, E-value=9e-34, Identity=88%"; Hit description =Initiation factor 2 subunit family protein, expressed
IINMMGTYQIALVAHSMNKPVYVAAESYKFARLYPLDQKDMTPAHRPIDFGVPVPTGVEVETSARDYTLAQLFSEFLKHHISNQ

SEQ ID NO: 125387 - protein, 67 aa, Setaria italica
  Transcript Sequence Number=SeqID_59413
PMCLFSPISCDCRSCCCSPLQPQINRCGHKKWGKNLTHDTLEPKKRHIADLTQSGSCDEAAAAAAAR

SEQ ID NO: 125388 - protein, 78 aa, Setaria italica
  Transcript Sequence Number=SeqID_59414
  Homolog annotation: Hit_ID=Q6ZCP9; Match level="QueryCoverage=98%, HitCoverage=11%, E-value=3e-15, Identity=51%"; Hit description =Pentatricopeptide (PPR) repeat-containing protein-like
AADMWNGMCRATRLSKVPRLDAAIREVNAHRSRRAAARAQKLLKRYVFRSWRILTLLVAVVLLLMTAMQTFCSVYPCK

SEQ ID NO: 125389 - protein, 43 aa, Setaria italica
  Transcript Sequence Number=SeqID_59415
LSCLSYFRYRSQNQEEDQGRRRSRRAHRLGFSPCLPLGFEIYI

SEQ ID NO: 125390 - protein, 31 aa, Setaria italica
  Transcript Sequence Number=SeqID_59416
LRQESTTSSDIDLKTKRRSRRAHRLGFSPCL

SEQ ID NO: 125391 - protein, 45 aa, Setaria italica
  Transcript Sequence Number=SeqID_59417
LCYWDSNWVLLLQAMVANIIWQIIKSNIRNYEGISDFITAKGRTC

SEQ ID NO: 125392 - protein, 54 aa, Setaria italica
  Transcript Sequence Number=SeqID_59418
MFGACSTEGCCQEGVMLEHLAAVLNQFQQQQQALLSPINTGVYSPKAVDNQQLP

SEQ ID NO: 125393 - protein, 53 aa, Setaria italica
  Transcript Sequence Number=SeqID_59419
TNLDESISSFNYSLFALINLQPFPTAIRTYQENMLMYIFHSRTKHCCFNIVER

SEQ ID NO: 125394 - protein, 46 aa, Setaria italica
  Transcript Sequence Number=SeqID_59420
ISREYADVYLPFEDQTLLLQHRGKSWEVGCRINILLICPDCSGKGL

SEQ ID NO: 125395 - protein, 109 aa, Setaria italica
  misc_feature (16)..(16): Xaa can be any naturally occurring amino acid
  Transcript Sequence Number=SeqID_59421
EGNEKQKGTMNSKHKXASKVKKQEVESDDDDFMPTSQKKNSNAKASKVKKLKDEDLEDLKEDKKRKKRAGVKEGARMIVVKGEKAKRERKVYDLPGQKHDPPTERDPLR

SEQ ID NO: 125396 - protein, 35 aa, Setaria italica
  Transcript Sequence Number=SeqID_59422
PRATKRNRRQLGDNCFLHGIRKAGHLLHVERPCAY

SEQ ID NO: 125397 - protein, 108 aa, Setaria italica
  misc_feature (61)..(61): Xaa can be any naturally occurring amino acid
  misc_feature (81)..(81): Xaa can be any naturally occurring amino acid
  misc_feature (97)..(97): Xaa can be any naturally occurring amino acid
  Transcript Sequence Number=SeqID_59423
  Gene Ontology: Mol. function=metal ion binding; Cellular component =nucleus; Biological process=regulation of transcription, DNA -dependent
  Homolog annotation: Hit_ID=Q6I576; Match level="QueryCoverage=75%, HitCoverage=9%, E-value=2e-25, Identity=67%"; Hit description =Squamosa promoter-binding-like protein 9
VLSSFLGFFLVLVSLYFGSSLPGCLPCDPCERRKLQMAAMSGFLTDIGWLIRKPAPDEFKXVLSSTNIQRWVCILKFLIRXFMNVLEIIVKSMDNIXGSEVLSNFGKG

SEQ ID NO: 125398 - protein, 39 aa, Setaria italica
  Transcript Sequence Number=SeqID_59424
KQENAKLTTNSPIHDTKSAYSSSCSTGMLANHSNILVPS

SEQ ID NO: 125399 - protein, 116 aa, Setaria italica
  misc_feature (20)..(20): Xaa can be any naturally occurring amino acid
  Transcript Sequence Number=SeqID_59425
  Gene Ontology: Cellular component=integral to membrane
  Homolog annotation: Hit_ID=B9SC23; Match level="QueryCoverage=82%, HitCoverage=14%, E-value=7e-42, Identity=85%"; Hit description =Endosomal P24A protein, putative
RFYYVFGFLFIVLFLLVIVXCGEVSLVLTYMHLCVEDWKWWWKAFFASGSVAFYVFLYSINYLVFDLRSLSGPVSATLYLGYSLIMALAIMLSTGAIGFLLSFYFVHYLFSSVKID

SEQ ID NO: 125400 - protein, 77 aa, Setaria italica
  Transcript Sequence Number=SeqID_59426
  Gene Ontology: Mol. function=translation release factor activity, codon specific; Cellular component=cytoplasm; Biological process =translational termination
  Homolog annotation: Hit_ID=Q39097; Match level="QueryCoverage=61%, HitCoverage=10%, E-value=1e-19, Identity=95%"; Hit description =Eukaryotic peptide chain release factor subunit 1-1
KSSFRASVWNLLSQRYSDTLIGLKGSKSIVTFFGTLSGNTREVLHKFSVDLPKKHGRGGQSALRFARLRMEERHNYV

SEQ ID NO: 125401 - protein, 74 aa, Setaria italica
  Transcript Sequence Number=SeqID_59427
  Gene Ontology: Mol. function=translation release factor activity, codon specific; Cellular component=cytoplasm; Biological process =translational termination
  Homolog annotation: Hit_ID=Q2VCK6; Match level="QueryCoverage=68%, HitCoverage=11%, E-value=2e-19, Identity=94%"; Hit description =Eukaryotic peptide chain release factor subunit 1-3-like
LSQSDMFDQRLQAKILNVVDVSYGGENGFNQAIELSAEILANVKFIQESELTLAEIASSGGVGVHEGARIGRRG

SEQ ID NO: 125402 - protein, 51 aa, Setaria italica
  Transcript Sequence Number=SeqID_59428
QSANLTPVLAHAHQALDSCFSSVATPTQEHLKSSYPELDGHGPAASSSRGA

SEQ ID NO: 125403 - protein, 51 aa, Setaria italica
  Transcript Sequence Number=SeqID_59429
KAAIQSLMGMGQQPPLLEELKNRMMCHEYLKCLFNFGSTVMVVLCQEVIAL

SEQ ID NO: 125404 - protein, 111 aa, Setaria italica
  Transcript Sequence Number=SeqID_59430
  Gene Ontology: Mol. function=magnesium ion binding; Cellular component=chloroplast; Biological process=metabolic process
  Homolog annotation: Hit_ID=B3F2V8; Match level="QueryCoverage=99%, HitCoverage=29%, E-value=6e-41, Identity=75%"; Hit description=Ent -kaurene synthase 1 (Fragment)
  Pfam annotation: Domain name=Terpene_synth_C; Domain location=1-111; Score=-39.2; E_value=0.00034; Accession=PF03936.8; Description =Terpene synthase family, metal binding domain
ENKLDQLQFARQKLTYCYLSAAATIFPSELSDARISWAKNGVLTTVVDDFFDVGGSKEELENLIALVEKWHEHHADKFYSEQVKIVFSAIYVNNNQLGAKASAAQGRDVTN

SEQ ID NO: 125405 - protein, 104 aa, Setaria italica
  Transcript Sequence Number=SeqID_59431
  Gene Ontology: Mol. function=magnesium ion binding; Biological process=metabolic process
  Homolog annotation: Hit_ID=Q673F9; Match level="QueryCoverage=60%, HitCoverage=7%, E-value=3e-13, Identity=64%"; Hit description=Ent -kaurene synthase-like protein 1
QEYDKLFRLMSTCGRLLNDIQGFEREGSEGKLNSVSLLVHSGSSVSIEAAKKVIQKSIDTSRRYMYNKVAAGKTYVAHRYTSQIIMYGTSCWPAAASDSYELDI

SEQ ID NO: 125406 - protein, 58 aa, Setaria italica
  Transcript Sequence Number=SeqID_59432
RQFRREYGSSSRQIAICQFGWCSDEQRRFFRLLPCCTCILCMDHGLMKTCDSLIVRVR

SEQ ID NO: 125407 - protein, 55 aa, Setaria italica
  Transcript Sequence Number=SeqID_59433
LEDQVRPAFVPDDVIGGPAAVDANKAAGAPDAAANGAGSVLDQKVWFRPWGAASR

SEQ ID NO: 125408 - protein, 112 aa, Setaria italica
  misc_feature (75)..(75): Xaa can be any naturally occurring amino acid
  Transcript Sequence Number=SeqID_59434
  Gene Ontology: Mol. function=DNA binding; Cellular component=nucleus; Biological process=regulation of transcription
  Homolog annotation: Hit_ID=Q5NKI1; Match level="QueryCoverage=100%, HitCoverage=24%, E-value=3e-53, Identity=89%"; Hit description=MYB18 protein
  Pfam annotation: Domain name=Myb_DNA-binding; Domain location=1-42; Score=27.3; E_value=6.4e-05; Accession=PF00249.23; Description=Myb -like DNA-binding domain
  Pfam annotation: Domain name=Myb_DNA-binding; Domain location=48-101; Score=23.6; E_value=0.00082; Accession=PF00249.23; Description=Myb -like DNA-binding domain
  Pfam module annotation: Pfam domain module=Myb_DNA-binding::Myb_DNA -binding; Domain location=1-42::48-101
EEDEKLMNHITKHGHGCWSSVPKLAGLQRCGKSCRLRWINYLRPDLKRGAFSQEEEDLIIELHAVLGNSPFLFLXRRWSQIAAQLPGRTDNEIKNLWNSCIKKKLRQKGIDP

SEQ ID NO: 125409 - protein, 37 aa, Setaria italica
  Transcript Sequence Number=SeqID_59435
  Gene Ontology: Mol. function=serine-type carboxypeptidase activity; Biological process=proteolysis
  Homolog annotation: Hit_ID=B6SW38; Match level="QueryCoverage=100%, HitCoverage=7%, E-value=2e-10, Identity=78%"; Hit description=Serine carboxypeptidase 1
ESAGLVTPPITPSIESFDPCTDYYVEAYLNDPDVQRA

SEQ ID NO: 125410 - protein, 65 aa, Setaria italica
  Transcript Sequence Number=SeqID_59436
  Gene Ontology: Mol. function=serine-type carboxypeptidase activity; Cellular component=extracellular region; Biological process =proteolysis
  Homolog annotation: Hit_ID=B6SW38; Match level="QueryCoverage=96%, HitCoverage=12%, E-value=7e-26, Identity=92%"; Hit description =Serine carboxypeptidase 1
YCSFSSDVLRRWTDSATTVLPIIQELLKNDIRVWVYSGDTDGRVPVTSSRYSVNQLQLPVAAKWR

SEQ ID NO: 125411 - protein, 65 aa, Setaria italica
  Transcript Sequence Number=SeqID_59437
ESYAGHYVPQLAHAILRHAATAGKASSPINLKGIMVCSAKRVRYITVHRHQPPIDWRVVSGRVGR

SEQ ID NO: 125412 - protein, 69 aa, Setaria italica
  Transcript Sequence Number=SeqID_59438
  Gene Ontology: Mol. function=serine-type carboxypeptidase activity; Biological process=proteolysis
  Homolog annotation: Hit_ID=B6SVE1; Match level="QueryCoverage=86%, HitCoverage=11%, E-value=3e-23, Identity=90%"; Hit description =Serine carboxypeptidase 1
VKLLRVLTSGDTDGRVPVTSSRYSVNQLQLPVAAKWRPWFSSTQGSGEVGGYVVQYKGKEKGTRPTRPR

SEQ ID NO: 125413 - protein, 36 aa, Setaria italica
  Transcript Sequence Number=SeqID_59439
LAMVAEDRQINDVLEELFAEQVYFPKLMVAWSITFY

SEQ ID NO: 125414 - protein, 67 aa, Setaria italica
  Transcript Sequence Number=SeqID_59440
  Gene Ontology: Mol. function=protein serine/threonine kinase activity
  Homolog annotation: Hit_ID=Q9LQA1; Match level="QueryCoverage=91%, HitCoverage=5%, E-value=1e-14, Identity=57%"; Hit description=F4N2.17
KDGIFLLELVDTQAEHCIWKLADVKENRAEAGKGRPLNRKQKDWRLQTSFTSVKKVTLYLDSNYRHY

SEQ ID NO: 125415 - protein, 150 aa, Setaria italica
  misc_feature (60)..(60): Xaa can be any naturally occurring amino acid
  misc_feature (87)..(87): Xaa can be any naturally occurring amino acid
  Transcript Sequence Number=SeqID_59441
  Gene Ontology: Mol. function=protein binding
  Homolog annotation: Hit_ID=C3SAF5; Match level="QueryCoverage=98%, HitCoverage=28%, E-value=6e-49, Identity=61%"; Hit description =Transcription factor related protein
  Pfam annotation: Domain name=BSD; Domain location=30-92; Score=34.4; E_value=4.6e-07; Accession=PF03909.9; Description=BSD domain
LHNLIDEEGNKASKQRPGFKSAMLDLRPSADGQTNRVTFSVNKEIIHQIFVEKPAVHRAXFLDFVPEKMSEDHFWSKYREAEYLLRXKNTALAAAQAAEDEIKQVDPTLDMEADAGDYYIHLLDHRILRDGSIQTVDPDSEFVMRTLSQD

SEQ ID NO: 125416 - protein, 54 aa, Setaria italica
  Transcript Sequence Number=SeqID_59442
TVAFVLFPSTTAFCYNTMHIFVDELNNDFSLYEELASSAIKSFTIRTQKKKKKK

SEQ ID NO: 125417 - protein, 64 aa, Setaria italica
  misc_feature (47)..(47): Xaa can be any naturally occurring amino acid
  Transcript Sequence Number=SeqID_59443
  Gene Ontology: Mol. function=triacylglycerol lipase activity; Biological process=lipid metabolic process
  Homolog annotation: Hit_ID=B6TJX9; Match level="QueryCoverage=76%, HitCoverage=10%, E-value=1e-17, Identity=89%"; Hit description =Calmodulin-binding heat-shock protein
LRCNLPCLLCLRCLRDTCIPEDAMLKDPRRLYAPGRIYHIVEKKNVXRCGRYPPVVKTAVPVDG

SEQ ID NO: 125418 - protein, 77 aa, Setaria italica
  Transcript Sequence Number=SeqID_59444
DNVYHSLQSYNINQLRLLKYILITIMTYGRRTSQLGRVEKIIRQVKNQEPVDAWPALLCFGLCSAMEPWKPPLSSRG

SEQ ID NO: 125419 - protein, 39 aa, Setaria italica
  Transcript Sequence Number=SeqID_59445
MPDHQRNNPSWTDEPPEIKVTVPEGSLCNLNLRFKAGLP

SEQ ID NO: 125420 - protein, 49 aa, Setaria italica
  misc_feature (33)..(33): Xaa can be any naturally occurring amino acid
  Transcript Sequence Number=SeqID_59446
SNGQYTGMIIFPRIHIDEDKFEYASKMLDTIRXDPTKMEHEEQLCFWIN

SEQ ID NO: 125421 - protein, 78 aa, Setaria italica
  Transcript Sequence Number=SeqID_59447
  Gene Ontology: Mol. function=molecular_function; Cellular component =membrane; Biological process=auxin mediated signaling pathway
  Homolog annotation: Hit_ID=B6TLA9; Match level="QueryCoverage=96%, HitCoverage=25%, E-value=6e-25, Identity=59%"; Hit description =Nodulin-like protein 5NG4
AAPASGGGGKSWMLGCLYLMGHCVSWSGWLVLQAPVLKRYPARLSVTSYTCLFGLPELLTVLYAGLVASGVAFAVQTW

SEQ ID NO: 125422 - protein, 102 aa, Setaria italica
  misc_feature (35)..(35): Xaa can be any naturally occurring amino acid
  Transcript Sequence Number=SeqID_59448
DLSSEDEDRIPAQLGLRSCDSHAYALKRRQKVFFXAFLADDVYFHPSLSKSSRWRHHLTTALHHVLYSVTTLMILPSYDTRNCESVLQLCSSAVCSLEESMC

SEQ ID NO: 125423 - protein, 84 aa, Setaria italica
  Transcript Sequence Number=SeqID_59449
  Subcellular localization annotation: CTP_CleavageSite=53; ConfidenceScore=5.08e-01
DVYFHPSLSKSSRWRHHLTTALHHVLYSVTTLMILPSYDTRNCERKCGSFSSSCGRLSGTRQESQLFILSQSSSDLVFLLYTVN

SEQ ID NO: 125424 - protein, 94 aa, Setaria italica
  misc_feature (19)..(19): Xaa can be any naturally occurring amino acid
  Transcript Sequence Number=SeqID_59450
  Homolog annotation: Hit_ID=A1CQ19; Match level="QueryCoverage=96%, HitCoverage=26%, E-value=3e-11, Identity=35%"; Hit description =Vesicle-mediated transport protein Vid24, putative
  Pfam annotation: Domain name=Vac_ImportDeg; Domain location=1-94; Score=18.3; E_value=4.4e-11; Accession=PF09783.1; Description =Vacuolar import and degradation protein
VVTFWEGEIVDAKNYTFFXTGKWEASPEDDIRHWSKFSSFTPLLSQIETDGGKSLDLSNYPHIFMRWKEQYFVNVGVDCGLTIAGFYYVCFLVV

SEQ ID NO: 125425 - protein, 85 aa, Setaria italica
  misc_feature (65)..(65): Xaa can be any naturally occurring amino acid
  Transcript Sequence Number=SeqID_59451
  Pfam annotation: Domain name=Vac_ImportDeg; Domain location=2-85; Score=-32.5; E_value=5.8e-07; Accession=PF09783.1; Description =Vacuolar import and degradation protein
SNLLVSFFQCFAGTQNVSSLQKDEAWKVNVRIHGCDLEQGYLCGTMEALNVPLADTPVVTFWEGXIVDAKNYTFFTGKWEASPED

SEQ ID NO: 125426 - protein, 69 aa, Setaria italica
  Transcript Sequence Number=SeqID_59452
  Pfam annotation: Domain name=Vac_ImportDeg; Domain location=1-69; Score=-87.6; E_value=0.017; Accession=PF09783.1; Description =Vacuolar import and degradation protein
STTLTGISVASPEDDIRHWSKFSSFTPLLSQIETDGGKSLDLSNYPHIFMRWKEQYFVNVGVDCGLTIA

SEQ ID NO: 125427 - protein, 38 aa, Setaria italica
  Transcript Sequence Number=SeqID_59453
SLSRMHRIIFQCRRRRTNELLTGVSANGTLSASIVPHK

SEQ ID NO: 125428 - protein, 50 aa, Setaria italica
  Transcript Sequence Number=SeqID_59454
  Subcellular localization annotation: CTP_CleavageSite=36; ConfidenceScore=5.50e-01
MSIVPLTFTSSLALPSSTASFTPGRQSQKRQFLSCRTEINSKFRVKSTES

SEQ ID NO: 125429 - protein, 71 aa, Setaria italica
  misc_feature (69)..(69): Xaa can be any naturally occurring amino acid
  Transcript Sequence Number=SeqID_59455
  Subcellular localization annotation: CTP_CleavageSite=43; ConfidenceScore=5.03e-01
GLEIIPSYFLRNSYRNYGASTMKPVGVTSNKMLKCTRGNTRIRGFNLFNIHTLHRNEVVQRYHECFFLXFG

SEQ ID NO: 125430 - protein, 77 aa, Setaria italica
  Transcript Sequence Number=SeqID_59456
REQTHQKFDKTFFLNFLTRSVALREDYCLHILRLTWLLPARSVQLRGCTTFFPNFDENTTVYPFSGKTITRSWAFST

SEQ ID NO: 125431 - protein, 86 aa, Setaria italica
  Transcript Sequence Number=SeqID_59457
  Homolog annotation: Hit_ID=B6UEL0; Match level="QueryCoverage=58%, HitCoverage=19%, E-value=3e-16, Identity=84%"; Hit description =Structural molecule
RHFSTPKEKAVNVIKFSARALKILSGKFTIEASYSVTSKTRVDIKLESSTITPEQVKLCCPEHESYHGTAYYKSNPCLDCLPHLYT

SEQ ID NO: 125432 - protein, 39 aa, Setaria italica
  Transcript Sequence Number=SeqID_59458
  Homolog annotation: Hit_ID=Q8RXA7; Match level="QueryCoverage=92%, HitCoverage=3%, E-value=4e-10, Identity=77%"; Hit description =Stomatal cytokinesis defective
ENEGGIKCVKNLTLHTASVLSISAGDHWLGIGAADNSSR

SEQ ID NO: 125433 - protein, 92 aa, Setaria italica
  Transcript Sequence Number=SeqID_59459
ASTQAQAHAVLVFRFELASGGEERDADLGKDPSPDKAVRRSTGVWGGYLARWGQRDWSETGSNGERRKGRARRFAKESSSSSASVASSTASW

SEQ ID NO: 125434 - protein, 45 aa, Setaria italica
  Transcript Sequence Number=SeqID_59460
  Gene Ontology: Mol. function=two-component response regulator activity; Cellular component=nucleus; Biological process=two -component signal transduction system (phosphorelay)
  Homolog annotation: Hit_ID=B6U1H8; Match level="QueryCoverage=100%, HitCoverage=7%, E-value=3e-17, Identity=100%"; Hit description=Two -component response regulator-like PRR95
  Pfam annotation: Domain name=CCT; Domain location=1-40; Score=68.1; E_ value=3.3e-17; Accession=PF06203.6; Description=CCT motif
NKFRLKRKDRCFEKKVRYQSRKLLAEQRPRVKGQFVRQDHSIQGS

SEQ ID NO: 125435 - protein, 116 aa, Setaria italica
  Transcript Sequence Number=SeqID_59461
  Gene Ontology: Mol. function=two-component response regulator activity; Cellular component=nucleus; Biological process=two -component signal transduction system (phosphorelay)
  Homolog annotation: Hit_ID=B6U1H8; Match level="QueryCoverage=77%, HitCoverage=14%, E-value=4e-34, Identity=81%"; Hit description=Two -component response regulator-like PRR95
QGLSFCLPDLDIFFYSVLRRLNLIPLTQSSCTRSELEAESKQTNNVLEYKQPTERHFSIPSHKNAELNGQTKIRTAKDNNLIPTREDDLSPKKRKCLNDNNSEKASRDIELVHIID

SEQ ID NO: 125436 - protein, 79 aa, Setaria italica
  misc_feature (8)..(8): Xaa can be any naturally occurring amino acid
  Transcript Sequence Number=SeqID_59462
  Gene Ontology: Mol. function=sequence-specific DNA binding; Cellular component=nucleus
  Homolog annotation: Hit_ID=B9SKA4; Match level="QueryCoverage=94%, HitCoverage=35%, E-value=9e-12, Identity=49%"; Hit description=Mads box protein, putative
LQALENNXLEMWVHNIRSQKMQIMSREIEMLRNKEGILQAANDILQERINEQNGILNFSGTAMIPQAPFQLTMESNYYF

SEQ ID NO: 125437 - protein, 96 aa, Setaria italica
  Transcript Sequence Number=SeqID_59463
  Gene Ontology: Mol. function=aspartic-type endopeptidase activity; Biological process=proteolysis
  Homolog annotation: Hit_ID=B6U239; Match level="QueryCoverage=100%, HitCoverage=18%, E-value=3e-43, Identity=88%"; Hit description =Aspartic-type endopeptidase/ pepsin A
GTSFTYLADPAYTYITQSFHAQVQANRHAADSRIPFEYCYDLSSGEARILTPDIILRTASGSLFPVIDPGQVISIQEHEYIYCLAIVKSMKLQIIN

SEQ ID NO: 125438 - protein, 68 aa, Setaria italica
  Transcript Sequence Number=SeqID_59464
  Gene Ontology: Mol. function=aspartic-type endopeptidase activity; Biological process=proteolysis
  Homolog annotation: Hit_ID=B6U239; Match level="QueryCoverage=100%, HitCoverage=10%, E-value=1e-18, Identity=70%"; Hit description =Aspartic-type endopeptidase/ pepsin A
IGQNFMTGLRVVFDRERKILGWKKFNCYDTDSSNPLSINSRNSSGFSPSTPENYSPQETRNPAGVSQL

SEQ ID NO: 125439 - protein, 75 aa, Setaria italica
  Transcript Sequence Number=SeqID_59465
  Gene Ontology: Mol. function=nucleic acid binding
  Homolog annotation: Hit_ID=Q9SDG8; Match level="QueryCoverage=72%, HitCoverage=5%, E-value=6e-16, Identity=68%"; Hit description =Protein argonaute 4A
YSRCPPHRRILFKCIKRWFYFDSLHAFEENPSMRRAPAVRRVEDMFEQVKTKLPGAPKFLLCVLAERKNSDVYGP

SEQ ID NO: 125440 - protein, 116 aa, Setaria italica
  misc_feature (7)..(7): Xaa can be any naturally occurring amino acid
  misc_feature (38)..(38): Xaa can be any naturally occurring amino acid
  Transcript Sequence Number=SeqID_59466
  Gene Ontology: Mol. function=nucleic acid binding; Cellular component= cytoplasm; Biological process=stem cell maintenance
  Homolog annotation: Hit_ID=Q9SDG8; Match level="QueryCoverage=96%, HitCoverage=12%, E-value=1e-47, Identity=81%"; Hit description =Protein argonaute 4A
  Subcellular localization annotation: CTP_CleavageSite=44; ConfidenceScore=5.11e-01
SMLQVEXSPAMPLISKVPTMILGMDVSHGSPGQSGVPXSIAAVVSSREWPLISKYRASVRSQSPKMEMIDSLFKPRGTDDDGLIRECLIDFYTSSGKRKPDQIIIFRDGVSEEVQV

SEQ ID NO: 125441 - protein, 92 aa, Setaria italica
  misc_feature (81)..(81): Xaa can be any naturally occurring amino acid
  Transcript Sequence Number=SeqID_59467
  Gene Ontology: Mol. function=nucleic acid binding
  Homolog annotation: Hit_ID=Q9SDG8; Match level="QueryCoverage=84%, HitCoverage=8%, E-value=3e-30, Identity=74%"; Hit description =Protein argonaute 4A
LFCSNTACSNEPLIVDKWAVVNFSARCNVRDLVRDLIKCGGMKGIKVEPPFNAFEENPSMRRAPAVRRVEDMFEQVKTKLXGAPKFLLCVLA

SEQ ID NO: 125442 - protein, 61 aa, Setaria italica
  Transcript Sequence Number=SeqID_59468
CSSAELQSTSRVLWSATGVCLAVWNLSLLWRSALAIHHGFAFGGCLLETLGKLNTIDRTIR

SEQ ID NO: 125443 - protein, 101 aa, Setaria italica
  Transcript Sequence Number=SeqID_59469
  Gene Ontology: Mol. function=acid-amino acid ligase activity; Cellular component=intracellular; Biological process=ubiquitin -dependent protein catabolic process
THGCWFVVHICNVLVYKYVPCILFPNQAADIIAVSTSLLDTLPAVTSPTERADDDDEMPMDVDVKNGLDVDLERQITTAIDSKLLQHLVNALFRGTLSTYH

SEQ ID NO: 125444 - protein, 37 aa, Setaria italica
  Transcript Sequence Number=SeqID_59470
  Gene Ontology: Mol. function=acid-amino acid ligase activity; Cellular component=intracellular; Biological process=ubiquitin -dependent protein catabolic process
QHSAFTRHRFKIRRNRLLEDAFDQLSLLSEEDLKGPV

SEQ ID NO: 125445 - protein, 66 aa, Setaria italica
  misc_feature (41)..(41): Xaa can be any naturally occurring amino acid
  Transcript Sequence Number=SeqID_59471
GGCCRICLSKSTSLLDTLPAVTSPTERADDDDEMPMDVDVXNGLDVDLERQITTAIDSKLLQHLLN

SEQ ID NO: 125446 - protein, 67 aa, Setaria italica
  Transcript Sequence Number=SeqID_59472
  Gene Ontology: Mol. function=acid-amino acid ligase activity; Cellular component=intracellular; Biological process=ubiquitin -dependent protein catabolic process
  Homolog annotation: Hit_ID=Q8RWB8; Match level="QueryCoverage=88%, HitCoverage=5%, E-value=1e-23, Identity=84%"; Hit description=E3 ubiquitin-protein ligase UPL6
VIVNNEYGEQSEEELLPGGRDMRVTNDNVITFIHLVANHRLNYQIRAQSTHFLRGFQQLSKEPDMRT

SEQ ID NO: 125447 - protein, 51 aa, Setaria italica
  Transcript Sequence Number=SeqID_59473
VFPCPVDFTNRQAYFIPTQTAGALVLYHCHLLQTSMMDGSFCINTYVHVHG

SEQ ID NO: 125448 - protein, 30 aa, Setaria italica
  Transcript Sequence Number=SeqID_59474
MHRFVTGCSRGPLLGFQYLEPKFCIHRAGV

SEQ ID NO: 125449 - protein, 112 aa, Setaria italica
  misc_feature (69)..(69): Xaa can be any naturally occurring amino acid
  misc_feature (76)..(76): Xaa can be any naturally occurring amino acid
  misc_feature (95)..(95): Xaa can be any naturally occurring amino acid
  Transcript Sequence Number=SeqID_59475
  Gene Ontology: Mol. function=acid-amino acid ligase activity; Cellular component=intracellular; Biological process=ubiquitin -dependent protein catabolic process
  Homolog annotation: Hit_ID=Q8RWB8; Match level="QueryCoverage=80%, HitCoverage=8%, E-value=9e-34, Identity=76%"; Hit description=E3 ubiquitin-protein ligase UPL6
VKFFYLKVFLLVKLFYFVVLLFDVQYGLFKETADHLLYPNPASGLVHELHLQYFHFLGSLLGKAMYEGXKLKLRIXDQFATFFLSKLKQKYNFLXDLPSLDPELYRHLLFLK

SEQ ID NO: 125450 - protein, 78 aa, Setaria italica
  Transcript Sequence Number=SeqID_59476
  Subcellular localization annotation: CTP_CleavageSite=55; ConfidenceScore=5.18e-01
IQNRALQNKKDGWHLLPLPLIFYPWSLGRAPFPVALHDTRAHQACRSAWLLSRSSCSMQRSTTAAAPGRGSTTAAMGG

SEQ ID NO: 125451 - protein, 64 aa, Setaria italica
  Transcript Sequence Number=SeqID_59477
EREIGEGKHTVIDSKMIYGYVGLLCHFAGLALVVSQFSMICQSQQPLDICLLSRELRGFGSSLP

SEQ ID NO: 125452 - protein, 68 aa, Setaria italica
  misc_feature (23)..(23): Xaa can be any naturally occurring amino acid
  Transcript Sequence Number=SeqID_59478
  Gene Ontology: Mol. function=protein transporter activity; Cellular component=nuclear pore; Biological process=protein import into nucleus, docking
  Homolog annotation: Hit_ID=Q7XTA3; Match level="QueryCoverage=77%, HitCoverage=19%, E-value=1e-17, Identity=83%"; Hit description =OSJNBa0008A08.7 protein
LSLKSSWLSRCSNFLSREHDKKXCCLGLTSLIGLPADKIPPEALDRIFKATLELLVAYKDQVAEIRSK

SEQ ID NO: 125453 - protein, 54 aa, Setaria italica
  Transcript Sequence Number=SeqID_59479
  Gene Ontology: Mol. function=binding; Cellular component=nuclear pore; Biological process=protein import into nucleus, docking
  Homolog annotation: Hit_ID=Q7XTA3; Match level="QueryCoverage=72%, HitCoverage=14%, E-value=4e-12, Identity=87%"; Hit description =OSJNBa0008A08.7 protein
VFIFFCYFLVLGFLVTLLQTLDFRYQALASGIAQHAEERKVEIEKEKLEKANTQ

SEQ ID NO: 125454 - protein, 90 aa, Setaria italica
  Transcript Sequence Number=SeqID_59480
PIPSCAFAYPLVTCLRVVGVGILRSSFRTVGCRLYMVSVFLGHGIAVPWWGCGICFLFLFARGHYICFLFIYLERDKKNWFILRSNLIRK

SEQ ID NO: 125455 - protein, 94 aa, Setaria italica
  misc_feature (37)..(37): Xaa can be any naturally occurring amino acid
  Transcript Sequence Number=SeqID_59481
  Gene Ontology: Mol. function=protein transporter activity; Cellular component=nuclear pore; Biological process=protein import into nucleus, docking
  Homolog annotation: Hit_ID=Q01KY9; Match level="QueryCoverage=84%, HitCoverage=7%, E-value=9e-36, Identity=89%"; Hit description =OSIGBa0137O04.8 protein
EGKSALLLLELRTIAVHSVTKNSMYQMMQPQIDILLXFEIIFPLMCFNDNDQKLWDEDPHEYVRKGYDIIEDLYSPRTAAMDFVSELVRKRGKN

SEQ ID NO: 125456 - protein, 53 aa, Setaria italica
  Transcript Sequence Number=SeqID_59482
MEGAAGRTAAAAAVCVTGAGGFVASWLVERLLAAGRYTVHGTVRDPGNQLPCP

SEQ ID NO: 125457 - protein, 51 aa, Setaria italica
  Transcript Sequence Number=SeqID_59483
VFLGTAKHGEIVSATGNNVTSNVTSNISRPVPPRPWQQQGYGNSYGGYGSN

SEQ ID NO: 125458 - protein, 47 aa, Setaria italica
  Transcript Sequence Number=SeqID_59484
QRRVVLRAVELRHWREQASSLLRHRKLPTAHGTASSCTPMGPLLPLA

SEQ ID NO: 125459 - protein, 45 aa, Setaria italica
  Transcript Sequence Number=SeqID_59485
YCKASRAQHLFVGHSSHVFMKYAGFTRFGLGHQAMPNKNKSNYTE

SEQ ID NO: 125460 - protein, 35 aa, Setaria italica
  Transcript Sequence Number=SeqID_59486
EATEGLLMASIVGSMVGGQHGLIIICCIVPSYDQL

SEQ ID NO: 125461 - protein, 74 aa, Setaria italica
  Transcript Sequence Number=SeqID_59487
FFSSNCPDPLIYYIITFANNTDERHEGSTPRDGKNQGNSRTTQWISSGRGSKSSGGFHNDGSNQQRHLHSVPSS

SEQ ID NO: 125462 - protein, 87 aa, Setaria italica
  Transcript Sequence Number=SeqID_59488
  Gene Ontology: Mol. function=ribonuclease H activity
  Homolog annotation: Hit_ID=B6SJ51; Match level="QueryCoverage=95%, HitCoverage=34%, E-value=4e-40, Identity=93%"; Hit description=FIP1
  Pfam annotation: Domain name=GRAM; Domain location=36-87; Score=13.1; E_value=0.012; Accession=PF02893.12; Description=GRAM domain
RRDVWQHLKTGSSMTDTAMGGIAQISKVISEGGYDKIFQQTFECLPDEKLKKAYVCYLSTSHGPIMGVLYLSTVKIAFGSDSPVKIM

SEQ ID NO: 125463 - protein, 54 aa, Setaria italica
  Transcript Sequence Number=SeqID_59489
HGILVSAVIWKKFKKDQDQLLDSIPGTPKRFSFNELKVATSQFSVKLGCDGLCQ

SEQ ID NO: 125464 - protein, 68 aa, Setaria italica
  Transcript Sequence Number=SeqID_59490
  Homolog annotation: Hit_ID=B6SV77; Match level="QueryCoverage=66%, HitCoverage=6%, E-value=1e-09, Identity=64%"; Hit description =Protein kinase/ transmembrane receptor protein serine/threonine kinase
HGYWFLAVIWKKFKKDQDQLLDSIPGTPKRFSFNELKVATSQFSVKLGCGGFGSVFQGRIGNETIAVK

SEQ ID NO: 125465 - protein, 48 aa, Setaria italica
  Transcript Sequence Number=SeqID_59491
LGSHEQQEGLYAYLTINQVHRYTQSSQHYNRFTYTTFDSKERHMQIIS

SEQ ID NO: 125466 - protein, 56 aa, Setaria italica
  Transcript Sequence Number=SeqID_59492
GDSEGSFAVLVPCYRRGRIERPARPDGRFPGSGGVANGGVSDNKNFVEQWVSSLQN

SEQ ID NO: 125467 - protein, 54 aa, Setaria italica
  Transcript Sequence Number=SeqID_59493
GFHVSSVYKYTEESQIHNHTNDVNAVIVIHVVLEFRRKWDNEVINSLVHCQKCQ

SEQ ID NO: 125468 - protein, 63 aa, Setaria italica
  Transcript Sequence Number=SeqID_59494
  Gene Ontology: Mol. function=phosphoglucan, water dikinase activity; Cellular component=chloroplast
  Homolog annotation: Hit_ID=Q2QTC2; Match level="QueryCoverage=88%, HitCoverage=4%, E-value=2e-20, Identity=83%"; Hit description =Phosphoglucan, water dikinase, chloroplastic
MLFIGISSFIQVERIVPGSLPSSIKEPVVLVVNKADGDEEVKAAGNNIVGVILLQELPHLSHL

SEQ ID NO: 125469 - protein, 106 aa, Setaria italica
  Transcript Sequence Number=SeqID_59495
  Gene Ontology: Mol. function=DNA binding
  Homolog annotation: Hit_ID=B9RNC6; Match level="QueryCoverage=83%, HitCoverage=17%, E-value=3e-09, Identity=43%"; Hit description =Pentatricopeptide repeat-containing protein, putative
KVDSLFKEMKVKNVKPDNLTCCILMTSYASSNKIDAIEELLERKWLEKDVALGWSAYSTLASIYANAGLVEKAESALKKLEGLVGVDDGKSNLFVFSFIVVLLIVF

SEQ ID NO: 125470 - protein, 66 aa, Setaria italica
  Transcript Sequence Number=SeqID_59496
  Gene Ontology: Mol. function=electron carrier activity; Biological process=response to oxidative stress
  Homolog annotation: Hit_ID=B6TFD7; Match level="QueryCoverage=54%, HitCoverage=10%, E-value=3e-12, Identity=91%"; Hit description =Peroxidase 66
PAAEIIVQEEVSKAVSGNPGVAASLVRLHFHDCFVRVRIRQCLRSLVSLMALAAAPIGTIALAVVA

SEQ ID NO: 125471 - protein, 41 aa, Setaria italica
  Transcript Sequence Number=SeqID_59497
KRHKIMGHDHMSRIKMHMAEGSLVDRNRCQQPGCNEVVDGR

SEQ ID NO: 125472 - protein, 120 aa, Setaria italica
  misc_feature (32)..(32): Xaa can be any naturally occurring amino acid
  Transcript Sequence Number=SeqID_59498
  Gene Ontology: Mol. function=nucleoside-triphosphatase activity; Cellular component=protein complex; Biological process=protein catabolic process
  Homolog annotation: Hit_ID=Q8W3N8; Match level="QueryCoverage=82%, HitCoverage=26%, E-value=2e-42, Identity=85%"; Hit description=26S proteasome regulatory particle triple-A ATPase subunit4b (Fragment)
MSEGGEEARRRAAVAEYRKKLLSCRELEARAXTGRENQKNSKKNLEKTEEDLKALQSVGQIIGEVLLPLDKERFIVKASSGPRYVVACRSKVDKEKLIAGTRVVLDMTTLTIMRTLPREV

SEQ ID NO: 125473 - protein, 47 aa, Setaria italica
  Transcript Sequence Number=SeqID_59499
  Gene Ontology: Mol. function=nucleoside-triphosphatase activity; Cellular component=protein complex; Biological process=protein catabolic process
  Homolog annotation: Hit_ID=Q9SEI3; Match level="QueryCoverage=97%, HitCoverage=11%, E-value=2e-19, Identity=97%"; Hit description=26S proteasome AAA-ATPase subunit RPT4a
VESARLIREMFNYAQEHQPCIIFMDEIDAIGGRRFSEGTSADREIQR

SEQ ID NO: 125474 - protein, 148 aa, Setaria italica
  misc_feature (108)..(108): Xaa can be any naturally occurring amino acid
  misc_feature (139)..(139): Xaa can be any naturally occurring amino acid
  Transcript Sequence Number=SeqID_59500
  Gene Ontology: Mol. function=aminoacyl-tRNA ligase activity; Cellular component=cytoplasm; Biological process=tRNA aminoacylation for protein translation
  Homolog annotation: Hit_ID=O82108; Match level="QueryCoverage=85%, HitCoverage=27%, E-value=2e-66, Identity=92%"; Hit description=Seryl- tRNA synthetase
  Pfam annotation: Domain name=tRNA-synt_2b; Domain location=1-120; Score=33.9; E_value=2.5e-08; Accession=PF00587.17; Description=tRNA synthetase class II core domain (G, H, P, S and T)
TSPIYCRLYSILGCIRNFTLAELPIKYAGYSTCFRKEAGSHGRDTAGIFRVHQFEKIEQFCITSPNGNDSWDIHEEMMKNSEDFYQEIGLPYQVVSIVSGALNDAAAXKKYDLEAWFPASKTFRELVSCSNCTDFQARXLGIGYAKKM

SEQ ID NO: 125475 - protein, 44 aa, Setaria italica
  Transcript Sequence Number=SeqID_59501
  Gene Ontology: Mol. function=aminoacyl-tRNA ligase activity; Cellular component=cytoplasm; Biological process=tRNA aminoacylation for protein translation
  Homolog annotation: Hit_ID=O82108; Match level="QueryCoverage=100%, HitCoverage=9%, E-value=5e-16, Identity=93%"; Hit description=Seryl -tRNA synthetase
  Pfam annotation: Domain name=Seryl_tRNA_N; Domain location=1-44; Score=-26.5; E_value=0.072; Accession=PF02403.14; Description=Seryl -tRNA synthetase N-terminal domain
MLDINLFRTDKGGNPDLIRESQRRRSAAVELVDEVIALDKAWRE

SEQ ID NO: 125476 - protein, 133 aa, Setaria italica
  misc_feature (21)..(21): Xaa can be any naturally occurring amino acid
  Transcript Sequence Number=SeqID_59502
  Homolog annotation: Hit_ID=B9T2W5; Match level="QueryCoverage=93%, HitCoverage=14%, E-value=7e-26, Identity=44%"; Hit description =Pentatricopeptide repeat-containing protein, putative
GPAAGSIITEFCRRRRFAEAXQIVDKFASCDVYGAWIHGLIEAGRLDTTLKFIADKKETEGYIPDGQRYDKLVYRLLRCNRLGEVYDLLVEMMEEGIAPGRSTMNAALCFFCKAGLVEVAMQFSNKVQRNRKT

SEQ ID NO: 125477 - protein, 81 aa, Setaria italica
  Transcript Sequence Number=SeqID_59503
  Homolog annotation: Hit_ID=Q6YZ25; Match level="QueryCoverage=100%, HitCoverage=15%, E-value=1e-23, Identity=64%"; Hit description =Transducin / WD-40 repeat protein-like
  Pfam annotation: Domain name=WD40; Domain location=5-44; Score=43.1; E_value=1.1e-09; Accession=PF00400.24; Description=WD domain, G-beta repeat
DERAGKVSTTWNLHDNRINSIDFRPENPYLFATSSTDRTVRIWDMRSMKNKGPGCLKVWEYSRAIQSAYFSPSGNMLATTS

SEQ ID NO: 125478 - protein, 91 aa, Setaria italica
  misc_feature (3)..(3): Xaa can be any naturally occurring amino acid
  misc_feature (11)..(11): Xaa can be any naturally occurring amino acid
  Transcript Sequence Number=SeqID_59504
NSXPSLFQRRXEKWQVNELANSYLCIYSAFLCQLQPLFTIDGESNWSKKESETSFHLWQKVQISLLKIHLHDRKGTRALHAGFLSTLCLLS

SEQ ID NO: 125479 - protein, 55 aa, Setaria italica
  Transcript Sequence Number=SeqID_59505
  Gene Ontology: Mol. function=nucleic acid binding; Cellular component= nucleus
  Homolog annotation: Hit_ID=B6TP96; Match level="QueryCoverage=87%, HitCoverage=10%, E-value=2e-11, Identity=66%"; Hit description=Zinc finger CCCH type domain-containing protein ZFN-like 3
  Pfam annotation: Domain name=zf-CCCH; Domain location=27-53; Score =39.4; E_value=1.4e-08; Accession=PF00642.16; Description=Zinc finger C-x8-C-x5-C-x3-H type (and similar)
MLFAESMRRLGLGGGDGDGDAKLPERPGEVDCAYYIRTGSCGYGERCRYNHPATA

SEQ ID NO: 125480 - protein, 51 aa, Setaria italica
  Transcript Sequence Number=SeqID_59506
LLWNQELKKQATYDVHFNLVSHIISTLLPYRIIENSMSCRTLRALDHLQPQ

SEQ ID NO: 125481 - protein, 57 aa, Setaria italica
  Transcript Sequence Number=SeqID_59507
  Gene Ontology: Cellular component=integral to membrane
  Homolog annotation: Hit_ID=B6SWG6; Match level="QueryCoverage=100%, HitCoverage=11%, E-value=2e-23, Identity=92%"; Hit description=AAP6
GLIGALGFWPLSVYFPVSMHVARLKIRRGEPRWWMLQAMSFVCLLISVAASIGSVQD

SEQ ID NO: 125482 - protein, 82 aa, Setaria italica
  Transcript Sequence Number=SeqID_59508
WPNWRSGEASFGATASPPDRPSESEWLELIIASVPCWSSSCTRMAESTSGEAGSTCLAYGSVSFGVRFRQWGPPLAACRCKR

SEQ ID NO: 125483 - protein, 107 aa, Setaria italica
  misc_feature (85)..(85): Xaa can be any naturally occurring amino acid
  misc_feature (101)..(101): Xaa can be any naturally occurring amino acid
  Transcript Sequence Number=SeqID_59509
  Gene Ontology: Mol. function=phosphatidylinositol binding; Cellular component=clathrin coat; Biological process=clathrin coat assembly
  Homolog annotation: Hit_ID=B9SP68; Match level="QueryCoverage=86%, HitCoverage=16%, E-value=2e-22, Identity=59%"; Hit description =Clathrin assembly protein, putative
RLAFQDKGFDPTGWELALVTAPSNTTSSASSSQLGGGFDKLILDSLYDDGAYRQRQQQQLYGSAVPNPFMTNDPFAMSNQVAPPXSVQMAAMSQQHQQIPXVMQPNP

SEQ ID NO: 125484 - protein, 117 aa, Setaria italica
  Transcript Sequence Number=SeqID_59510
  Subcellular localization annotation: CTP_CleavageSite=58; ConfidenceScore=5.03e-01
NRRWAWALQQTTLFWMLALGHSQWRTTGISNITHSAALNFCRLLSYMRKFVPQQMRFLCDYIMHYAWPFLYATPVLCVGFHHTGLPSYPTLVVKKLVTCVTPSIIVLIKLVRYYWSY

SEQ ID NO: 125485 - protein, 48 aa, Setaria italica
  Transcript Sequence Number=SeqID_59511
MASMQSWRKAYGAIKDSTTVSLANLNSDFKVALDPLSSPPISPGFFST

SEQ ID NO: 125486 - protein, 124 aa, Setaria italica
  Transcript Sequence Number=SeqID_59512
  Gene Ontology: Mol. function=phosphatidylinositol binding; Cellular component=clathrin coat; Biological process=clathrin coat assembly
  Homolog annotation: Hit_ID=B9SP68; Match level="QueryCoverage=92%, HitCoverage=20%, E-value=9e-53, Identity=81%"; Hit description =Clathrin assembly protein, putative
  Pfam annotation: Domain name=ANTH; Domain location=30-124; Score= -85.4; E_value=0.017; Accession=PF07651.8; Description=ANTH domain
  Pfam annotation: Domain name=ENTH; Domain location=30-124; Score= -15.2; E_value=0.0007; Accession=PF01417.12; Description=ENTH domain
  Pfam module annotation: Pfam domain module=ANTH::ENTH; Domain location=30-124::30-124
LVVRLQSWRKAYGAIKDSTTVSLANLNSDFKDLDVAIVKATNHVECPPKERHLRKVVAATSIARPRADVAYCIHALARRLAKTRNWIVALKTLVVIHRLLREGDPTFREELLNFTQRGRNSTTF

SEQ ID NO: 125487 - protein, 82 aa, Setaria italica
  Transcript Sequence Number=SeqID_59513
  Gene Ontology: Mol. function=phosphatidylinositol binding; Cellular component=clathrin coat; Biological process=clathrin coat assembly
  Homolog annotation: Hit_ID=B9SP68; Match level="QueryCoverage=85%, HitCoverage=12%, E-value=2e-14, Identity=55%"; Hit description =Clathrin assembly protein, putative
GIGPCLTVLTKRTKQTKLTSASSSQLGGGFDKLILDSLYDDGAYRQRQQQQLYGSAVPNPFMTNDPFAMSNQVAPPPSVQMA

SEQ ID NO: 125488 - protein, 56 aa, Setaria italica
  Transcript Sequence Number=SeqID_59514
SSSQLGGGFDKLILDSLYDDGAYRQRQQQQLYGSAVPNPFMTKAVQDELVESTTQL

SEQ ID NO: 125489 - protein, 82 aa, Setaria italica
  misc_feature (7)..(7): Xaa can be any naturally occurring amino acid
  Transcript Sequence Number=SeqID_59515
  Gene Ontology: Cellular component=Golgi apparatus
  Homolog annotation: Hit_ID=B9SB27; Match level="QueryCoverage=73%, HitCoverage=6%, E-value=4e-12, Identity=55%"; Hit description=Early endosome antigen, putative
QIGLWYXQMLETRRFELQKAEAKVVILGDKINAHLSLLQKIYLTLDRYSPTLQHHPGLLDAFLKTCKLVADLRSKHNEGDAT

SEQ ID NO: 125490 - protein, 82 aa, Setaria italica
  Transcript Sequence Number=SeqID_59516
  Gene Ontology: Mol. function=zinc ion binding; Cellular component =intracellular; Biological process=regulation of transcription, DNA -dependent
LSPVCLAYPLLRVSVSRIDPEGKLIMGFRKATNMSSEQEQTTKPANGAPATSEANGKVSAPDSSPNAAISRQNKVNTETKSS

SEQ ID NO: 125491 - protein, 64 aa, Setaria italica
  misc_feature (11)..(11): Xaa can be any naturally occurring amino acid
  misc_feature (37)..(37): Xaa can be any naturally occurring amino acid
  Transcript Sequence Number=SeqID_59517
NLYHRDGPHPXNLHDPSHHGGENDSLSSRKVALPDAXQNGPKDHIRIAPAQQQAQMASSSLQEK

SEQ ID NO: 125492 - protein, 56 aa, Setaria italica
  Transcript Sequence Number=SeqID_59518
QYFGSEAMEYMNNSPFTLPKRRADLAIHTSYRVCKAPRNTYGLFLVPYWLLLTLFN

SEQ ID NO: 125493 - protein, 135 aa, Setaria italica
  misc_feature (30)..(30): Xaa can be any naturally occurring amino acid
  Transcript Sequence Number=SeqID_59519
  Gene Ontology: Mol. function=DNA binding; Cellular component=nucleus
  Homolog annotation: Hit_ID=Q8S4P5-3; Match level="QueryCoverage=97%, HitCoverage=20%, E-value=5e-54, Identity=79%"; Hit description =Isoform 3 of Histone-lysine N-methyltransferase EZ2
LGKHKISKHGPRYRERSPGKKARRFFTSDXSFASNILNKLSIPEIRDTRLESRESGGDKLRILDESTKKSSSKDIWGGSTTSTTENVGRDSNNVTSTKNFMEHTLSCWSPLERDLYLKGIEIFGKNSCLIAKKPN

SEQ ID NO: 125494 - protein, 139 aa, Setaria italica
  Transcript Sequence Number=SeqID_59520
  Gene Ontology: Mol. function=DNA binding; Cellular component=nucleus; Biological process=regulation of transcription, DNA-dependent
  Homolog annotation: Hit_ID=Q8S4P4; Match level="QueryCoverage=82%, HitCoverage=13%, E-value=6e-52, Identity=82%"; Hit description =Histone-lysine N-methyltransferase EZ3
VANYMYNNGATMAKRPSKSTLGDFAETEQDYMEQDMAARTRIYRRRGRNRKLKYTWKSAGHPTVRKRIGDGKQWYTQYNPCGCQQMCGKDCPCVENGTCCEKYCGCSKSCKNKFRSLSKGLQQERVVLPIVNFFLFVKV

SEQ ID NO: 125495 - protein, 46 aa, Setaria italica
  Transcript Sequence Number=SeqID_59521
  Gene Ontology: Mol. function=DNA binding; Cellular component=nucleus; Biological process=regulation of transcription, DNA-dependent
  Homolog annotation: Hit_ID=Q8S4P4; Match level="QueryCoverage=100%, HitCoverage=5%, E-value=5e-18, Identity=91%"; Hit description =Histone-lysine N-methyltransferase EZ3
MQNPVSKNDYLGEYTGELISHKEADKRGKIYDRANSSFLFDLNDQF

SEQ ID NO: 125496 - protein, 90 aa, Setaria italica
  misc_feature (41)..(41): Xaa can be any naturally occurring amino acid
  misc_feature (61)..(61): Xaa can be any naturally occurring amino acid
  Transcript Sequence Number=SeqID_59522
  Gene Ontology: Mol. function=unfolded protein binding; Cellular component=mitochondrion; Biological process=cellular protein metabolic process
  Homolog annotation: Hit_ID=B9SN32; Match level="QueryCoverage=94%, HitCoverage=14%, E-value=5e-18, Identity=58%"; Hit description =Chaperonin-60kD, ch60, putative
YQSTILLLDFAKIKTSFLTNNLSSSHHSHIILDGGGDKKAXIEERCQQLRESFETSTAMFXKEKAQERLSKLSGGVAVLKIGGASEAEVG

SEQ ID NO: 125497 - protein, 113 aa, Setaria italica
  misc_feature (8)..(8): Xaa can be any naturally occurring amino acid
  misc_feature (49)..(49): Xaa can be any naturally occurring amino acid
  Transcript Sequence Number=SeqID_59523
  Gene Ontology: Mol. function=unfolded protein binding; Cellular component=mitochondrion; Biological process=cellular protein metabolic process
  Homolog annotation: Hit_ID=Q93ZM7; Match level="QueryCoverage=95%, HitCoverage=18%, E-value=9e-37, Identity=70%"; Hit description =Chaperonin CPN60-like 2, mitochondrial
LLPVLEIXIKNRRPLLIVAEDVEGEALSMLVLNKHRAGLKVCAVKAPGXGDNRRHNLDDMAVMTGGEVVSEERGLDLGKIQQQMLGTAKKVTVSLDDTIILDGGGCTKKSSIS

SEQ ID NO: 125498 - protein, 59 aa, Setaria italica
  misc_feature (15)..(15): Xaa can be any naturally occurring amino acid
  misc_feature (21)..(21): Xaa can be any naturally occurring amino acid
  Transcript Sequence Number=SeqID_59524
  Gene Ontology: Mol. function=amino acid transmembrane transporter activity; Cellular component=integral to membrane; Biological process=amino acid transport
  Homolog annotation: Hit_ID=B6U1T8; Match level="QueryCoverage=89%, HitCoverage=8%, E-value=2e-15, Identity=73%"; Hit description=High -affinity cationic amino acid transporter 1
LLINLGGGTWMRVGXWLVMGXFVYIFYGRSHSSLTDVVYVPVVQANEIYGSSSSSGFVA

SEQ ID NO: 125499 - protein, 72 aa, Setaria italica
  Transcript Sequence Number=SeqID_59525
  Gene Ontology: Mol. function=amino acid transmembrane transporter activity; Cellular component=integral to membrane; Biological process=amino acid transport
  Homolog annotation: Hit_ID=Q2QLY9; Match level="QueryCoverage=87%, HitCoverage=13%, E-value=2e-20, Identity=77%"; Hit description=Amino acid permease family protein, putative, expressed
GTALSICCSLYMLVSVVIVGLVPYFAMDPDTPISSAFERHGMHWAMFLVHAGFSCYCWSGTILCYGPRYPYL

SEQ ID NO: 125500 - protein, 57 aa, Setaria italica
  Transcript Sequence Number=SeqID_59526
ICAASLAFFMDVSQLAGMVWIYKSLKHVIRAYICTSSEVNLVNEPSPQRMGRTWQRS

SEQ ID NO: 125501 - protein, 68 aa, Setaria italica
  Transcript Sequence Number=SeqID_59527
  Gene Ontology: Mol. function=amino acid transmembrane transporter activity; Cellular component=integral to membrane; Biological process=amino acid transport
  Homolog annotation: Hit_ID=B6U1T8; Match level="QueryCoverage=69%, HitCoverage=7%, E-value=5e-15, Identity=80%"; Hit description=High -affinity cationic amino acid transporter 1
ILINTYLLINLGGGTWMRVGVWLVMGVFVYIFYGRSHSSLTDVVYVPEVLRKAVEHIAQDRLRQCLFP

SEQ ID NO: 125502 - protein, 60 aa, Setaria italica
  Transcript Sequence Number=SeqID_59528
  Gene Ontology: Mol. function=protein serine/threonine kinase activity; Cellular component=plasma membrane; Biological process =protein amino acid phosphorylation
  Homolog annotation: Hit_ID=Q9LW66; Match level="QueryCoverage=83%, HitCoverage=8%, E-value=8e-16, Identity=80%"; Hit description =Protein kinase
SDHQSHSIPYPFFKSTSGAFGEVRLCREKATSNVYAMKKLKKSEMLRRGQVEHVRAERNL

SEQ ID NO: 125503 - protein, 46 aa, Setaria italica
  misc_feature (17)..(17): Xaa can be any naturally occurring amino acid
  misc_feature (42)..(42): Xaa can be any naturally occurring amino acid
  Transcript Sequence Number=SeqID_59529
  Gene Ontology: Mol. function=protein serine/threonine kinase activity; Cellular component=plasma membrane; Biological process =protein amino acid phosphorylation
  Homolog annotation: Hit_ID=Q9LW66; Match level="QueryCoverage=100%, HitCoverage=8%, E-value=1e-14, Identity=82%"; Hit description =Protein kinase
MLRRGAFGEVRLCREKXTSNVYAMKKLKKSEMLRRGQVEHVXAERT

SEQ ID NO: 125504 - protein, 78 aa, Setaria italica
  Transcript Sequence Number=SeqID_59530
LKILIGSSSPSPLVHAYISLCIHTNLAINQASNKNSHLELTIAAEPRRHLALSSLVGWLGLVCLRFSGWPRRWGGLRR

SEQ ID NO: 125505 - protein, 58 aa, Setaria italica
  misc_feature (55)..(55): Xaa can be any naturally occurring amino acid
  Transcript Sequence Number=SeqID_59531
LVYMIVTLQQIYPLLSFLLFTSDASRTEGRASPTSLPTDDEQASIWSSDVNNRKXRRG

SEQ ID NO: 125506 - protein, 43 aa, Setaria italica
  Transcript Sequence Number=SeqID_59532
  Gene Ontology: Mol. function=structural constituent of ribosome; Cellular component=intracellular; Biological process=translation
  Homolog annotation: Hit_ID=B6TN36; Match level="QueryCoverage=79%, HitCoverage=14%, E-value=3e-10, Identity=94%"; Hit description=5S rRNA binding protein
RVLMHNIPVHPSLKLLSKNETMPVCKILASKPVESETMQDLKS

SEQ ID NO: 125507 - protein, 57 aa, Setaria italica
  Transcript Sequence Number=SeqID_59533
VVSIILADRVCEVDEMLKRFISEGFVPSTMTYNSIINGFVKAGMMGSAFAMYQQMCE

SEQ ID NO: 125508 - protein, 123 aa, Setaria italica
  misc_feature (27)..(27): Xaa can be any naturally occurring amino acid
  Transcript Sequence Number=SeqID_59534
  Gene Ontology: Mol. function=catalytic activity; Biological process =cellular metabolic process
  Homolog annotation: Hit_ID=Q5VNM2; Match level="QueryCoverage=90%, HitCoverage=48%, E-value=2e-47, Identity=83%"; Hit description =Cinnamoyl CoA reductase-like
GYTKHMARLEAQAAERVIEACVRTESXVRKCVFTSSLLACVWRQNYPHDRRFPTIIDENCWSDESFCRDNKLWFALGKTAAEKAAWRAARGRDLKLVTICPALVTGPGFRRRNSTAFHSSLFF

SEQ ID NO: 125509 - protein, 84 aa, Setaria italica
  Transcript Sequence Number=SeqID_59535
  Gene Ontology: Cellular component=endoplasmic reticulum
  Homolog annotation: Hit_ID=Q306I3; Match level="QueryCoverage=85%, HitCoverage=35%, E-value=4e-21, Identity=63%"; Hit description =Reticulon
  Pfam annotation: Domain name=Reticulon; Domain location=4-82; Score= -9.3; E_value=0.00042; Accession=PF02453.9; Description=Reticulon
CPHATLAQCSQQALVLLRELALGHDLMKFLGVIVALWIVSEIGELCDLLRLMYIVVLILHTVPILYHKYQDQVDDFAAKAHAGV

SEQ ID NO: 125510 - protein, 65 aa, Setaria italica
  Transcript Sequence Number=SeqID_59536
  Gene Ontology: Mol. function=histone deacetylase activity; Cellular component=nucleus
LDVNSVAAEHSRGNGPVADGVGSSKQTLASPNDASPMAVDEPGAQKVETESSNKLQDQPTMQQKP

SEQ ID NO: 125511 - protein, 67 aa, Setaria italica
  Transcript Sequence Number=SeqID_59537
VRTKLPFADVRNSNVIIKMSWVQMHNLFQLHCFSSLLKLFNCHGLSTVNEHEKRIYRLQMQLHQVLS

SEQ ID NO: 125512 - protein, 89 aa, Setaria italica
  Transcript Sequence Number=SeqID_59538
  Gene Ontology: Mol. function=carotene 7,8-desaturase activity; Cellular component=chromoplast; Biological process=carotenoid biosynthetic process
  Homolog annotation: Hit_ID=Q9ZTP4; Match level="QueryCoverage=77%, HitCoverage=12%, E-value=3e-32, Identity=95%"; Hit description=Zeta -carotene desaturase, chloroplastic/chromoplastic
LYYIFIFSQANLNTNTYDYLQVVELFPSARGLEVTWSSVVKIGQSLYREAPGNDPFRPDQKTPVKNFFLSGSYTKQDYIDSMEGATSSS

SEQ ID NO: 125513 - protein, 150 aa, Setaria italica
  misc_feature (21)..(21): Xaa can be any naturally occurring amino acid
  misc_feature (36)..(36): Xaa can be any naturally occurring amino acid
  Transcript Sequence Number=SeqID_59539
  Gene Ontology: Mol. function=carotene 7,8-desaturase activity; Cellular component=chromoplast; Biological process=carotenoid biosynthetic process
  Homolog annotation: Hit_ID=Q9ZTP4; Match level="QueryCoverage=99%, HitCoverage=25%, E-value=2e-75, Identity=92%"; Hit description=Zeta -carotene desaturase, chloroplastic/chromoplastic
LMKKVGADNNLLVKEHTHTFXNKGGTIGELDFGFRXGSPLHGIQAFLRTNQLKVYDKARNAVALALSPVVRALVDPDGALQQVRDLDDVSFSDWFMSKGGTRESITRMWDPVAYALGFIDCDNISARCMLTIFTLFATKTEAFFCLRLLS

SEQ ID NO: 125514 - protein, 60 aa, Setaria italica
  Transcript Sequence Number=SeqID_59540
  Gene Ontology: Mol. function=carotene 7,8-desaturase activity; Cellular component=chromoplast; Biological process=carotenoid biosynthetic process
  Homolog annotation: Hit_ID=Q9ZTP4; Match level="QueryCoverage=88%, HitCoverage=9%, E-value=2e-23, Identity=94%"; Hit description=Zeta -carotene desaturase, chloroplastic/chromoplastic
MAMNGGLWGMFDNIYKLDGVPVVTVQLRYNGWVTELQDLEKSRQLEKAVGLDNLLYTADA

SEQ ID NO: 125515 - protein, 89 aa, Setaria italica
  misc_feature (59)..(59): Xaa can be any naturally occurring amino acid
  Transcript Sequence Number=SeqID_59541
  Homolog annotation: Hit_ID=B6SY13; Match level="QueryCoverage=89%, HitCoverage=20%, E-value=6e-31, Identity=76%"; Hit description =Guanine nucleotide-binding protein beta subunit-like protein 1
QSYKGRIINLPQSSNANTKDHPTKQKGLCMAVQAFIPYESAGYVNILSSYEDGSTLWWXVRKPGLPLSSVKYHSESGFMLTALSFTLAV

SEQ ID NO: 125516 - protein, 80 aa, Setaria italica
  Transcript Sequence Number=SeqID_59542
RSSGCWCRGEVLAWSSFPRGDANGDIAHLDQNKQSSQVRLIVHSSLADLTKSERERMNYGQSVRDKLTSLPFSSSVLGFS

SEQ ID NO: 125517 - protein, 62 aa, Setaria italica
  Transcript Sequence Number=SeqID_59543
  Homolog annotation: Hit_ID=Q2RBL5; Match level="QueryCoverage=61%, HitCoverage=31%, E-value=2e-10, Identity=84%"; Hit description =Macrophage migration inhibitory factor family protein, expressed
MPCLNVSTNVNLEGVDTSAILAEASKVVADIIGKPEAVSLASPFPFPFPPIFFLPPRDSLPV

SEQ ID NO: 125518 - protein, 54 aa, Setaria italica
  misc_feature (29)..(29): Xaa can be any naturally occurring amino acid
  Transcript Sequence Number=SeqID_59544
  Homolog annotation: Hit_ID=Q2RBL5; Match level="QueryCoverage=98%, HitCoverage=43%, E-value=1e-19, Identity=88%"; Hit description =Macrophage migration inhibitory factor family protein, expressed
RLNPGVNKKLSAGVASILESKLSIPKSRXYLKFHDSKAHPAQEHAQCLHALHQE

SEQ ID NO: 125519 - protein, 47 aa, Setaria italica
  Transcript Sequence Number=SeqID_59545
AGTQQEFETQHHYHKSKLESNFGINRSGIHTAKGIKYIAALINDQAC

SEQ ID NO: 125520 - protein, 40 aa, Setaria italica
  Transcript Sequence Number=SeqID_59546
LKSILSCSIVFFKHGFVHCDPHAANMMVRPMPQDSRKFFG

SEQ ID NO: 125521 - protein, 94 aa, Setaria italica
  Transcript Sequence Number=SeqID_59547
  Subcellular localization annotation: CTP_CleavageSite=30; ConfidenceScore=5.47e-01
TLAAGVLALGPVDGAMAAKSGGRVGGQAFRSAPRSSGPRINNSRTNIYVNPPSGGYGSPFFGGYGWSPFTFFAPGPSVAVGVGGGFDTLVLFLV

SEQ ID NO: 125522 - protein, 72 aa, Setaria italica
  Transcript Sequence Number=SeqID_59548
FWLCIDIMNNSNISNMYHYLELLTLEALISTLPFHDAYFLFILLTNDVCFMIVITLSVDLNHVVMLAGVCTG

SEQ ID NO: 125523 - protein, 56 aa, Setaria italica
  Transcript Sequence Number=SeqID_59549
YQCITKTMYRQNQHRATHQPSIHLSTQKNIHSLPLNAQKNLLNSHRTRLRLNQGNR

SEQ ID NO: 125524 - protein, 56 aa, Setaria italica
  Transcript Sequence Number=SeqID_59550
WFEVLFLLYSFLIGTRFFHSVIMQVIYVLTTNYICNLYYHFYLKWDMPFSNVAPLH

SEQ ID NO: 125525 - protein, 62 aa, Setaria italica
  Transcript Sequence Number=SeqID_59551
  Gene Ontology: Mol. function=protein kinase activity
  Homolog annotation: Hit_ID=B6SXV9; Match level="QueryCoverage=98%, HitCoverage=8%, E-value=4e-27, Identity=95%"; Hit description =Ubiquinone biosynthesis protein ubiB
LVHYVNRDSLGLANDFHSLGFVPEGTDLHAVADALRFSFGDARRQSNDFQGLMNHLYDVMYV

SEQ ID NO: 125526 - protein, 120 aa, Setaria italica
  misc_feature (64)..(64): Xaa can be any naturally occurring amino acid
  Transcript Sequence Number=SeqID_59552
  Gene Ontology: Mol. function=protein tyrosine kinase activity; Cellular component=integral to membrane; Biological process =regulation of transcription, DNA-dependent
  Homolog annotation: Hit_ID=Q6R2K3; Match level="QueryCoverage=96%, HitCoverage=14%, E-value=6e-30, Identity=56%"; Hit description =Protein STRUBBELIG-RECEPTOR FAMILY 3
VGYCAEYEQRLLVYNHFSRKTLHDVLHEREDQDDALSWNARLQVALHAAKALEYLHDTCCNLPXVVHQNFEPANVLLDNRCSVRVAECGLAELMLSGSVIQLSGRMRALLNYEAPEIHES

SEQ ID NO: 125527 - protein, 68 aa, Setaria italica
  Transcript Sequence Number=SeqID_59553
YLFPFYFFVTYFSYLIYLVVVSFANVLSRVHQSKCEEEKFKCMLKVAGGFGKAPESVTKEFFGLPADK

SEQ ID NO: 125528 - protein, 106 aa, Setaria italica
  misc_feature (95)..(95): Xaa can be any naturally occurring amino acid
  Transcript Sequence Number=SeqID_59554
EDDCLLTKSGLQGQTQYMLTGAGGSSTNDLPNADAKLLWNTFPVNRIPLETFSSGLSARPMPPPQPYSAVATQHATMSSSSPATLYNQGSVVQPXSPTASIDSNLA

SEQ ID NO: 125529 - protein, 39 aa, Setaria italica
  Transcript Sequence Number=SeqID_59555
DPSGDRPTSNASGYPTQSFDASMPSAFTGLQGQTQYMLT

SEQ ID NO: 125530 - protein, 42 aa, Setaria italica
  Transcript Sequence Number=SeqID_59556
KGFSEGLTFVDPRGSLLLFFQKASRDPPRRKLRRTRVSYESP

SEQ ID NO: 125531 - protein, 48 aa, Setaria italica
  Transcript Sequence Number=SeqID_59557
IDPDHQHYTTVQVVLTTSRLVKSMIRNTTTRTQGCTPTWDPTSGLISM

SEQ ID NO: 125532 - protein, 86 aa, Setaria italica
  Transcript Sequence Number=SeqID_59558
FIQKICIPNPCICCAIDPEAPKGDYSEYSEGFSKFEEIFELVPCKANPSDSANFLSEQGKPRCITPIIWKSIFHVSYSQLFAICMH

SEQ ID NO: 125533 - protein, 87 aa, Setaria italica
  misc_feature (86)..(86): Xaa can be any naturally occurring amino acid
  Transcript Sequence Number=SeqID_59559
  Subcellular localization annotation: CTP_CleavageSite=53; ConfidenceScore=5.58e-01
RSTAVLGRRAAGHAPRSGTSPVGSLTGDGWRTRSSAGRRQTPSTSPGYSAETRCKRKTDKSITVRSSPKFHLSYWLGTRRAGAWGXM

SEQ ID NO: 125534 - protein, 86 aa, Setaria italica
  Transcript Sequence Number=SeqID_59560
  Subcellular localization annotation: CTP_CleavageSite=52; ConfidenceScore=5.24e-01
SHSVRPYPHHPPPIYKAPNSPPQSPLTEHRAPLFPKLCWRNLPRLVHLRPIPCSHGASSMSRFHFATSRAPSLTGRRPPREPLRRP

SEQ ID NO: 125535 - protein, 65 aa, Setaria italica
  Transcript Sequence Number=SeqID_59561
DCPHQSPDPCRAHFSWCNVPHTRPLLFCDHTCHHMRPQGKTPFQRQLIEPLTSRFNQVLGFPIPY

SEQ ID NO: 125536 - protein, 59 aa, Setaria italica
  Transcript Sequence Number=SeqID_59562
TSELYKVSRKSTEGKTTSGSKTSGSDVPSEANRDITDPSPRRLRRDPTRPSNPEGAGAA

SEQ ID NO: 125537 - protein, 90 aa, Setaria italica
  Transcript Sequence Number=SeqID_59563
  Subcellular localization annotation: CTP_CleavageSite=44; ConfidenceScore=5.10e-01
ISPSSPSIAHRIDGNRSFPQVQKLFHRHRRPHMVSHAPALLVPDQQLKWNLGELLTMMLLSVFRLHRVSAIIPGLVNSVRHRRAEPCALP

SEQ ID NO: 125538 - protein, 48 aa, Setaria italica
  Transcript Sequence Number=SeqID_59564
  Pfam annotation: Domain name=PSI_PsaH; Domain location=1-48; Score= -26.4; E_value=0.023; Accession=PF03244.6; Description=Photosystem I reaction centre subunit VI
TKRGLLLKFLLLGGGSLLAYVSASASPDLLPIKKGPQQPPVPGPRGKI

SEQ ID NO: 125539 - protein, 51 aa, Setaria italica
  Transcript Sequence Number=SeqID_59565
RIGRSLISYVATLRIDERGWAICSFWWMLDCPAYLVENCLGRGVLEQWSIV

SEQ ID NO: 125540 - protein, 44 aa, Setaria italica
  Transcript Sequence Number=SeqID_59566
RGRGVMFGTRWFAPSCLHEIKLRSRYDSVRDHVFESTNHIPSMG

SEQ ID NO: 125541 - protein, 53 aa, Setaria italica
  Transcript Sequence Number=SeqID_59567
KNTYILFHACCRTPTIYIRTLVDNKADRLYEARSTNFNCICRSTISTSIKRGS

SEQ ID NO: 125542 - protein, 29 aa, Setaria italica
  Transcript Sequence Number=SeqID_59568
LHLSPHAAARELCSKDSGMIRSRSGSIRY

SEQ ID NO: 125543 - protein, 84 aa, Setaria italica
  Transcript Sequence Number=SeqID_59569
MLLKYQHFICLCKIHFLYNLIFDHQHQCPVVFFIKKIQETIEETFRRQSEAIGKKRSTAKATATAFARKYRRNMQTRGRGRTVN

SEQ ID NO: 125544 - protein, 97 aa, Setaria italica
  Transcript Sequence Number=SeqID_59570
AEPSTTDAHAKIGGATGGKHQRAYKGHTSGCGFRKKHQSLTSTWRDMWDISAYGVRKSCVTDRRHRTLSRERQNPSWMVHKQECHGYARDLPSPYQA

SEQ ID NO: 125545 - protein, 82 aa, Setaria italica
  misc_feature (37)..(37): Xaa can be any naturally occurring amino acid
  misc_feature (76)..(76): Xaa can be any naturally occurring amino acid
  Transcript Sequence Number=SeqID_59571
  Gene Ontology: Mol. function=hydrolase activity, hydrolyzing O -glycosyl compounds; Cellular component=vacuole; Biological process =carbohydrate metabolic process
  Homolog annotation: Hit_ID=B9SAQ6; Match level="QueryCoverage=96%, HitCoverage=15%, E-value=2e-21, Identity=59%"; Hit description=Beta -glucosidase, putative
MLQEKQHGVIGMNIFIYDFVPLTNSTEDITATERAKXFYTGWFLDPLYHGDYPDIMKKIAGSKLPKFSNSQSEQLXNSVDFS

SEQ ID NO: 125546 - protein, 38 aa, Setaria italica
  Transcript Sequence Number=SeqID_59572
IGHYSGDGDVAANGYHKYKEDVKLMKETGLDAYRFSIF

SEQ ID NO: 125547 - protein, 74 aa, Setaria italica
  Transcript Sequence Number=SeqID_59573
  Homolog annotation: Hit_ID=B6SVL3; Match level="QueryCoverage=83%, HitCoverage=10%, E-value=1e-22, Identity=89%"; Hit description=Kelch motif family protein
KQRPLLAHAIPVHARPVPQATGFVLPDCAHHARQGGFPAKAVKSEPERGNSDLHDVVLTQGGAHLPPPGPPSEP

SEQ ID NO: 125548 - protein, 87 aa, Setaria italica
  Transcript Sequence Number=SeqID_59574
  Gene Ontology: Mol. function=protein serine/threonine kinase activity; Biological process=protein amino acid phosphorylation
  Homolog annotation: Hit_ID=B8XSN7; Match level="QueryCoverage=68%, HitCoverage=8%, E-value=4e-19, Identity=78%"; Hit description=Lectin receptor-type kinase
DVAELRGQDGVELDCQDGLALLLFILLSRQGEVASSLDDGREFAYHGFAGANLTLDGLATILPGGLLALTNFTYQTKAHAFHPSPMH

SEQ ID NO: 125549 - protein, 69 aa, Setaria italica
  Transcript Sequence Number=SeqID_59575
  Gene Ontology: Mol. function=protein serine/threonine kinase activity; Biological process=protein amino acid phosphorylation
  Homolog annotation: Hit_ID=B8XSN7; Match level="QueryCoverage=84%, HitCoverage=8%, E-value=6e-19, Identity=81%"; Hit description=Lectin receptor-type kinase
MLALLLFILLSRQGEVASSLDDGREFAYHGFAGANLTLDGLATILPGGLLALTNFTYQTKAHAFHPVPD

SEQ ID NO: 125550 - protein, 58 aa, Setaria italica
  Transcript Sequence Number=SeqID_59576
  Gene Ontology: Mol. function=amino acid transmembrane transporter activity; Cellular component=integral to membrane; Biological process=amino acid transport
  Homolog annotation: Hit_ID=B6U1T8; Match level="QueryCoverage=91%, HitCoverage=8%, E-value=9e-23, Identity=100%"; Hit description=High -affinity cationic amino acid transporter 1
PRILMAMARDGLLPSFFSDVNKQTQVPVKSTIVTGICAAALAFAMDVSQLAGMNYTCM

SEQ ID NO: 125551 - protein, 49 aa, Setaria italica
  Transcript Sequence Number=SeqID_59577
LLGLAELKLKEAILKEPTLLIMVVGVPNVGKSALINSIHRIANSRFPGI

SEQ ID NO: 125552 - protein, 80 aa, Setaria italica
  Transcript Sequence Number=SeqID_59578
  Gene Ontology: Mol. function=transferase activity
  Homolog annotation: Hit_ID=Q5ZCH7; Match level="QueryCoverage=87%, HitCoverage=12%, E-value=4e-29, Identity=87%"; Hit description=O -acetyltransferase-like
LRSSMPNGQPKWLLCFIPDYPMLNFMLTTAIYLLLSYRVFEITNVLKGAFIPSRDNNRLYQNFVAGIAISSSRPSNLTKN

SEQ ID NO: 125553 - protein, 161 aa, Setaria italica
  misc_feature (17)..(17): Xaa can be any naturally occurring amino acid
  misc_feature (28)..(28): Xaa can be any naturally occurring amino acid
  Transcript Sequence Number=SeqID_59579
  Gene Ontology: Mol. function=transferase activity; Cellular component= integral to membrane; Biological process=oxidation reduction
  Homolog annotation: Hit_ID=Q5ZCH7; Match level="QueryCoverage=100%, HitCoverage=29%, E-value=4e-85, Identity=91%"; Hit description=O -acetyltransferase-like
  Pfam annotation: Domain name=Cas1p; Domain location=1-145; Score =180.0; E_value=6.6e-51; Accession=PF07779.4; Description=Cas1p-like protein
MTGFGNFSYYYIKKDFXSIARFAQMMWXLNFFVAFCCIVLDNDLMLYYICPMHTLFTLMVYGALGLFNKYNEIPSVMAIKIACCFLSVILIWEIPGVFELLWAPFTFLLGYKDPSPAKAHLPLLHEWHFRSGLDRYIWIIGMIYAYFHPNVERWMEKLEES

SEQ ID NO: 125554 - protein, 79 aa, Setaria italica
  Transcript Sequence Number=SeqID_59580
  Gene Ontology: Mol. function=transferase activity
  Homolog annotation: Hit_ID=B9S163; Match level="QueryCoverage=86%, HitCoverage=11%, E-value=2e-29, Identity=88%"; Hit description=O -acetyltransferase, putative
YEYIYKLDKVTYNKYHPYTSWIPITAYICLRNCTQQLRSASLALFAWLGKITLETYISQIHIWLRYDLSLRCSRYIAFS

SEQ ID NO: 125555 - protein, 70 aa, Setaria italica
  misc_feature (32)..(32): Xaa can be any naturally occurring amino acid
  misc_feature (69)..(69): Xaa can be any naturally occurring amino acid
  Transcript Sequence Number=SeqID_59581
  Gene Ontology: Mol. function=transferase activity
  Homolog annotation: Hit_ID=Q5ZCH7; Match level="QueryCoverage=95%, HitCoverage=12%, E-value=1e-18, Identity=68%"; Hit description=O -acetyltransferase-like
  Pfam annotation: Domain name=Cas1p; Domain location=1-70; Score= -102.3; E_value=0.0057; Accession=PF07779.4; Description=Cas1p-like protein
SLSKSYNRDLFLFLYILLIIASALTSLKKHHXKSAFTGKSILYLNRHQTEEWKGWMQVLFLMYHYFAAXE

SEQ ID NO: 125556 - protein, 142 aa, Setaria italica
  misc_feature (43)..(43): Xaa can be any naturally occurring amino acid
  Transcript Sequence Number=SeqID_59582
  Gene Ontology: Mol. function=transferase activity
  Homolog annotation: Hit_ID=Q5ZCH7; Match level="QueryCoverage=99%, HitCoverage=26%, E-value=9e-72, Identity=88%"; Hit description=O -acetyltransferase-like
  Pfam annotation: Domain name=Cas1p; Domain location=1-129; Score =103.9; E_value=5.3e-28; Accession=PF07779.4; Description=Cas1p-like protein
FSIARFAQMMWRLNFFVAFCCIALTMISMLYYICPMHTLFTLXVYGALGLFNKYNEIPSVMAIKIACCFLSVILIWEIPGVFELLWAPFTFLLGYKDPSPAKAHLPLLHEWHFRSGLDRYIWIIGMIYAYFHPNVERWMEKT

SEQ ID NO: 125557 - protein, 105 aa, Setaria italica
  misc_feature (34)..(34): Xaa can be any naturally occurring amino acid
  Transcript Sequence Number=SeqID_59583
  Gene Ontology: Mol. function=transferase activity
  Homolog annotation: Hit_ID=Q5ZCH7; Match level="QueryCoverage=100%, HitCoverage=19%, E-value=2e-48, Identity=87%"; Hit description=O -acetyltransferase-like
FAWLGKITLETYISQIHIWLRSSMPNGQPKWLLXFIPDYPMLNFMLTTAIYLLLSYRVFEITNVLKGAFIPSRDNNRLYQNFVAGIAISVCLYFCSLILLKIPVV

SEQ ID NO: 125558 - protein, 138 aa, Setaria italica
  Transcript Sequence Number=SeqID_59584
  Subcellular localization annotation: CTP_CleavageSite=76; ConfidenceScore=5.19e-01
LFTRLVLYQHTLVVATTSKECTGLPNCVQCFSTNKKIKIWTSISAASGSSMSQLFGRAAASGIPTILLMQTGNVARAKTSYQSNILQKRPFYQDCFIWYIFIPVNAVPYRSYTSKNCLVLGLTEYRASSIVSSRCYLY

SEQ ID NO: 125559 - protein, 126 aa, Setaria italica
  Transcript Sequence Number=SeqID_59585
  Gene Ontology: Mol. function=transferase activity
  Homolog annotation: Hit_ID=Q5ZCH7; Match level="QueryCoverage=96%, HitCoverage=22%, E-value=6e-63, Identity=91%"; Hit description=O -acetyltransferase-like
  Pfam annotation: Domain name=Cas1p; Domain location=1-117; Score =73.0; E_value=1.1e-18; Accession=PF07779.4; Description=Cas1p-like protein
ANFFVAFCCIVLDNDLMLYYICPMHTLFTLMVYGALGLFNKYNEIPSVMAIKIACCFLSVILIWEIPGVFELLWAPFTFLLGYKDPSPAKAHLPLLHEWHFRSGLDRYIWIIGMIYAYFHPNDYSH

SEQ ID NO: 125560 - protein, 157 aa, Setaria italica
  misc_feature (117)..(117): Xaa can be any naturally occurring amino acid
  misc_feature (145)..(145): Xaa can be any naturally occurring amino acid
  Transcript Sequence Number=SeqID_59586
  Gene Ontology: Mol. function=transferase activity
  Homolog annotation: Hit_ID=Q5ZCH7; Match level="QueryCoverage=100%, HitCoverage=29%, E-value=4e-81, Identity=89%"; Hit description=O -acetyltransferase-like
  Pfam annotation: Domain name=Cas1p; Domain location=1-113; Score =58.7; E_value=2.2e-14; Accession=PF07779.4; Description=Cas1p-like protein
VAFCCIVLDNDLMLYYICPMHTLFTLMVYGALGLFNKYNEIPSVMAIKIACCFLSVILIWEIPGVFELLWAPFTFLLGYKDPSPAKAHLPLLHEWHFRSGLDRYIWIIGMIYAYFHXNVERWMEKLEESETKVRLSIKGTIVTLXVMAGYLWYEYIY

SEQ ID NO: 125561 - protein, 63 aa, Setaria italica
  Transcript Sequence Number=SeqID_59587
  Gene Ontology: Mol. function=transferase activity
  Homolog annotation: Hit_ID=Q5ZCH7; Match level="QueryCoverage=58%, HitCoverage=6%, E-value=5e-10, Identity=78%"; Hit description=O -acetyltransferase-like
PSFFCRSSMPNGQPKWLLCFIPDYPMLNFMLTTAIYLLVSLPTSKPFHSTLIKKGSSFHDLYC

SEQ ID NO: 125562 - protein, 93 aa, Setaria italica
  Transcript Sequence Number=SeqID_59588
  Subcellular localization annotation: CTP_CleavageSite=50; ConfidenceScore=5.47e-01
LCTMFSTNKKIKIWTSISAASGSSMSQLFGRAAASGIPTILLMQTGNVARAKTSYQSNILQKRTFLPRLLHLVYLHPCKCSTLSELHFKNCLV

SEQ ID NO: 125563 - protein, 150 aa, Setaria italica
  misc_feature (124)..(124): Xaa can be any naturally occurring amino acid
  Transcript Sequence Number=SeqID_59589
  Gene Ontology: Mol. function=transferase activity
  Homolog annotation: Hit_ID=Q5ZCH7; Match level="QueryCoverage=99%, HitCoverage=27%, E-value=6e-70, Identity=83%"; Hit description=O -acetyltransferase-like
  Pfam annotation: Domain name=Cas1p; Domain location=3-97; Score= -36.4; E_value=1.1e-06; Accession=PF07779.4; Description=Cas1p-like protein
QLHTLILLLYWFYGALGPFNKYNEIPSVMAIKIACCFLSVILIWEIPGVFELLWAPFTFLLGYKDPSPAKAHLPLLHEWHFRSGLDRYIWIIGMIYAYFHPNVERWMEKLEESETKVRLSIKGXIVTLSVMAGYLWYEYIYKLDKVTYNK

SEQ ID NO: 125564 - protein, 154 aa, Setaria italica
  misc_feature (121)..(121): Xaa can be any naturally occurring amino acid
  Transcript Sequence Number=SeqID_59590
  Gene Ontology: Mol. function=transferase activity
  Homolog annotation: Hit_ID=Q5ZCH7; Match level="QueryCoverage=91%, HitCoverage=26%, E-value=1e-67, Identity=85%"; Hit description=O -acetyltransferase-like
YKLDKVTYNKYHPYTSWIPITAYICLRNCTQQLRSASLALFAWLGKITLETYISQIHIWLRSSMPNGQPKWLLCFIPDYPMLNFMLTTAIYLLLSYRVFEITNVLKGAFIPSRDNNRLYQXFVAGIAISVCLYFCSLILLEDSCCIGYCIYRDE

SEQ ID NO: 125565 - protein, 156 aa, Setaria italica
  misc_feature (41)..(41): Xaa can be any naturally occurring amino acid
  Transcript Sequence Number=SeqID_59591
  Gene Ontology: Mol. function=transferase activity
  Homolog annotation: Hit_ID=Q5ZCH7; Match level="QueryCoverage=99%, HitCoverage=28%, E-value=5e-81, Identity=89%"; Hit description=O -acetyltransferase-like
FLLGYKDPSPAKAHLPLLHEWHFRSGLDRYIWIIGMIYAYXHPNVERWMEKLEESETKVRLSIKGTIVTLSVMAGYLWYEYIYKLDKVTYNKYHPYTSWIPITAYICLRNCTQQLRSASLALFAWLGKITLETYISQIHIWLRSSMPNGQPKWLLC

SEQ ID NO: 125566 - protein, 158 aa, Setaria italica
  misc_feature (10)..(10): Xaa can be any naturally occurring amino acid
  misc_feature (46)..(46): Xaa can be any naturally occurring amino acid
  Transcript Sequence Number=SeqID_59592
  Gene Ontology: Mol. function=transferase activity
  Homolog annotation: Hit_ID=Q5ZCH7; Match level="QueryCoverage=100%, HitCoverage=29%, E-value=4e-71, Identity=81%"; Hit description=O -acetyltransferase-like
SVMAIKIACXVFLSVILIWEFLGYLNYCGPFTFLLGYKDPSPAKAXLPLLHEWHFRSGLDRYIWIIGMIYAYFHPNVERWMEKLEESETKVRLSIKGTIVTLSVMAGYLWYEYIYKLDKVTYNKYHPYTSWIPITAYICLRNCTQQLRSASLALFAWL

SEQ ID NO: 125567 - protein, 38 aa, Setaria italica
  Transcript Sequence Number=SeqID_59593
  Gene Ontology: Mol. function=transferase activity
  Homolog annotation: Hit_ID=B9S163; Match level="QueryCoverage=76%, HitCoverage=5%, E-value=1e-09, Identity=96%"; Hit description=O -acetyltransferase, putative
THELHCIFLRHQTEEWKGWMQVLFLMYHYFAASEIYNA

SEQ ID NO: 125568 - protein, 145 aa, Setaria italica
  misc_feature (108)..(108): Xaa can be any naturally occurring amino acid
  Transcript Sequence Number=SeqID_59594
  Gene Ontology: Mol. function=transferase activity
  Homolog annotation: Hit_ID=Q5ZCH7; Match level="QueryCoverage=100%, HitCoverage=26%, E-value=4e-70, Identity=86%"; Hit description=O -acetyltransferase-like
YKLDKVTYNKYHPYTSWIPITAYICLRNCTQQLRSASLALFAWLGKITLETYISQIHIWLRSSMPNGQPKWLLCFIPDYPMLNFMLTTAIYLLLSYRVFEITNVLKGXFIPSRDNNRLYQNFVAGIAISVCLYFCSLILLKIPVV

SEQ ID NO: 125569 - protein, 141 aa, Setaria italica
  misc_feature (40)..(40): Xaa can be any naturally occurring amino acid
  Transcript Sequence Number=SeqID_59595
  Gene Ontology: Mol. function=transferase activity
  Homolog annotation: Hit_ID=Q5ZCH7; Match level="QueryCoverage=100%, HitCoverage=25%, E-value=2e-69, Identity=87%"; Hit description=O -acetyltransferase-like
  Pfam annotation: Domain name=Cas1p; Domain location=1-84; Score= -63.5; E_value=3.6e-05; Accession=PF07779.4; Description=Cas1p-like protein
ALGLFNKYNEIPSVMAIKIACCFLSVILIWEIPGVFELFXWPPFTFLLGYKDPSPAKAHLPLLHEWHFRSGLDRYIWIIGMIYAYFHPDVERWMEKLEESETKVRLSIKGTIVTLSVMAGYLWYEYIYKLDKVTYNKYHPY

SEQ ID NO: 125570 - protein, 65 aa, Setaria italica
  misc_feature (46)..(46): Xaa can be any naturally occurring amino acid
  Transcript Sequence Number=SeqID_59596
  Gene Ontology: Mol. function=transferase activity
  Homolog annotation: Hit_ID=Q5ZCH7; Match level="QueryCoverage=100%, HitCoverage=13%, E-value=6e-14, Identity=57%"; Hit description=O -acetyltransferase-like
SYNRDLFLFLYILLIIASALTSLKKHHEKSAFTGKSILYLNRHQTXLMYHYFAASEIYNAIRVFI

SEQ ID NO: 125571 - protein, 151 aa, Setaria italica
  Transcript Sequence Number=SeqID_59597
  Gene Ontology: Mol. function=transferase activity
  Homolog annotation: Hit_ID=Q5ZCH7; Match level="QueryCoverage=100%, HitCoverage=28%, E-value=5e-74, Identity=86%"; Hit description=O -acetyltransferase-like
EKLEESETKVRLSIKGTIVTLSVMAGYLWYEYIYKLDKVTYNKYHPYTSWIPITAYICLRNCTQQLRSASLALFAWLGKITLETYISQIHIWLRSSMPNGQPKWLLCFIPDYPMLNFMLTTAIYLLLSYRVFEITNVLKGAFIPSRDNNRL

SEQ ID NO: 125572 - protein, 131 aa, Setaria italica
  misc_feature (94)..(94): Xaa can be any naturally occurring amino acid
  Transcript Sequence Number=SeqID_59598
  Gene Ontology: Mol. function=transferase activity
  Homolog annotation: Hit_ID=Q5ZCH7; Match level="QueryCoverage=98%, HitCoverage=23%, E-value=2e-58, Identity=83%"; Hit description=O -acetyltransferase-like
IYSIKGTIVTLSVMAGYLWYEYIYKLDKVTYNKYHPYTSWIPITAYICLRNCTQQLRSASLALFAWLGKITLETYISQIHIWLRSSMPNGQPKXWLLCFIPDYPMLNFMLTTAIYLLLSYRVFEITNVLKG

SEQ ID NO: 125573 - protein, 156 aa, Setaria italica
  Transcript Sequence Number=SeqID_59599
  Gene Ontology: Mol. function=transferase activity
  Homolog annotation: Hit_ID=Q5ZCH7; Match level="QueryCoverage=98%, HitCoverage=28%, E-value=6e-76, Identity=86%"; Hit description=O -acetyltransferase-like
KGTIVTLSVMAGYLWYEYIYKLDKVTYNKYHPYTSWIPITAYICLRNCTQQLRSASLALFAWLGKITLETYISQIHIWLRSSMPNGQPKWLLCFIPDYPMLNFMLTTAIYLLLSYRVFEITNVLKGAFIPSRDNNRLYQNFVAGIAISVCLYFCFT

SEQ ID NO: 125574 - protein, 131 aa, Setaria italica
  Transcript Sequence Number=SeqID_59600
  Gene Ontology: Mol. function=transferase activity
  Homolog annotation: Hit_ID=Q5ZCH7; Match level="QueryCoverage=100%, HitCoverage=24%, E-value=3e-64, Identity=88%"; Hit description=O -acetyltransferase-like
EYIYKLDKVTYNKYHPYTSWIPITAYICLRNCTQQLRSASLALFAWLGKITLETYISQIHIWLRSSMPNGQPKWLLCFIPDYPMLNFMLTTAIYLLLSYRVFEITNVLKGAFIPSRDNNRLYQNFVAGIAI

SEQ ID NO: 125575 - protein, 79 aa, Setaria italica
  Transcript Sequence Number=SeqID_59601
  Gene Ontology: Mol. function=transferase activity
  Homolog annotation: Hit_ID=Q5ZCH7; Match level="QueryCoverage=74%, HitCoverage=10%, E-value=9e-22, Identity=84%"; Hit description=O -acetyltransferase-like
QKKIDCSCKHEVKHRIIWYETTAIYLLLSYRVFEITNVLKGAFIPSRDNNRLYQNFVAGIAISVCLYFCSLILLKIPVV

SEQ ID NO: 125576 - protein, 41 aa, Setaria italica
  Transcript Sequence Number=SeqID_59602
  Gene Ontology: Mol. function=transferase activity
  Homolog annotation: Hit_ID=Q5ZCH7; Match level="QueryCoverage=100%, HitCoverage=7%, E-value=3e-13, Identity=87%"; Hit description=O -acetyltransferase-like
LKGAFIPSRDNNRLYQNFVAGIAISVCLYFCSLILLKIPVV

SEQ ID NO: 125577 - protein, 66 aa, Setaria italica
  Transcript Sequence Number=SeqID_59603
ASGIPTILLMQTGNVARAKTSYQSNILQKRPFYQDCFIWYIFIPVNAVPYTTGIFRRISEQKYRHT

SEQ ID NO: 125578 - protein, 125 aa, Setaria italica
  Transcript Sequence Number=SeqID_59604
  Gene Ontology: Mol. function=transferase activity
  Homolog annotation: Hit_ID=Q5ZCH7; Match level="QueryCoverage=100%, HitCoverage=23%, E-value=2e-60, Identity=88%"; Hit description=O -acetyltransferase-like
KVTYNKYHPYTSWIPITAYICLRNCTQQLRSASLALFAWLGKITLETYISQIHIWLRSSMPNGQPKWLLCFIPDYPMLNFMLTTAIYLLLSYRVFEITNVLKGAFIPSRDNNRLYQNFVAGIAIS

SEQ ID NO: 125579 - protein, 139 aa, Setaria italica
  Transcript Sequence Number=SeqID_59605
  Gene Ontology: Mol. function=transferase activity
  Homolog annotation: Hit_ID=Q5ZCH7; Match level="QueryCoverage=98%, HitCoverage=25%, E-value=5e-64, Identity=83%"; Hit description=O -acetyltransferase-like
ETKVRLSIKGTIVTLSVMAGYLWYEYIYKLDKVTYNKYHPYTSWIPITAYICLRNCTQQLRSASLALFAWLGKITLETYISQIHIWLRSSMPNGQPKWLLCFIPDYPMLNFMLTTAIYLLLSYRVFEITNVLKGAILFP

SEQ ID NO: 125580 - protein, 121 aa, Setaria italica
  Transcript Sequence Number=SeqID_59606
  Gene Ontology: Mol. function=transferase activity
  Homolog annotation: Hit_ID=Q5ZCH7; Match level="QueryCoverage=100%, HitCoverage=22%, E-value=2e-58, Identity=88%"; Hit description=O -acetyltransferase-like
HPYTSWIPITAYICLRNCTQQLRSASLALFAWLGKITLETYISQIHIWLRSSMPNGQPKWLLCFIPDYPMLNFMLTTAIYLLLSYRVFEITNVLKGAFIPSRDNNRLYQNFVAGIAISVCL

SEQ ID NO: 125581 - protein, 90 aa, Setaria italica
  Transcript Sequence Number=SeqID_59607
  Gene Ontology: Mol. function=transferase activity
  Homolog annotation: Hit_ID=Q5ZCH7; Match level="QueryCoverage=84%, HitCoverage=14%, E-value=9e-30, Identity=82%"; Hit description=O -acetyltransferase-like
VSSVILPSHAKKSQKRLLCFIPDYPMLNFMLTTAIYLLLSYRVFEITNVLKGAFIPSRDNNRLYQNFVAGIAISVCLYFCSLILLKIPVV

SEQ ID NO: 125582 - protein, 137 aa, Setaria italica
  Transcript Sequence Number=SeqID_59608
  Gene Ontology: Mol. function=transferase activity
  Homolog annotation: Hit_ID=Q5ZCH7; Match level="QueryCoverage=100%, HitCoverage=25%, E-value=5e-66, Identity=86%"; Hit description=O -acetyltransferase-like
EKLEESETKVRLSIKGTIVTLSVMAGYLWYEYIYKLDKVTYNKYHPYTSWIPITAYICLRNCTQQLRSASLALFAWLGKITLETYISQIHIWLRSSMPNGQPKWLLCFIPDYPMLNFMLTTAIYLLLSYRVFEITNV

SEQ ID NO: 125583 - protein, 135 aa, Setaria italica
  Transcript Sequence Number=SeqID_59609
  Gene Ontology: Mol. function=transferase activity
  Homolog annotation: Hit_ID=Q5ZCH7; Match level="QueryCoverage=100%, HitCoverage=25%, E-value=7e-64, Identity=85%"; Hit description=O -acetyltransferase-like
SETKVRLSIKGTIVTLSVMAGYLWYEYIYKLDKVTYNKYHPYTSWIPITAYICLRNCTQQLRSASLALFAWLGKITLETYISQIHIWLRSSMPNGQPKWLLCFIPDYPMLNFMLTTAIYLLLSYRVFEITNVLKG

SEQ ID NO: 125584 - protein, 139 aa, Setaria italica
  misc_feature (14)..(14): Xaa can be any naturally occurring amino acid
  Transcript Sequence Number=SeqID_59610
  Gene Ontology: Mol. function=transferase activity
  Homolog annotation: Hit_ID=Q5ZCH7; Match level="QueryCoverage=99%, HitCoverage=25%, E-value=9e-69, Identity=86%"; Hit description=O -acetyltransferase-like
GPFTFLLGYKDPSXAKAHLPLLHEWHFRSGLDRYIWIIGMIYAYFHPNVERWMEKLEESETKVRLSIKGTIVTLSVMAGYLWYEYIYKLDKVTYNKYHPYTSWIPITAYICLRNCTQQLRSASLALFAWLGKITLENFN

SEQ ID NO: 125585 - protein, 122 aa, Setaria italica
  misc_feature (7)..(7): Xaa can be any naturally occurring amino acid
  Transcript Sequence Number=SeqID_59611
  Gene Ontology: Mol. function=transferase activity
  Homolog annotation: Hit_ID=Q5ZCH7; Match level="QueryCoverage=100%, HitCoverage=22%, E-value=6e-57, Identity=86%"; Hit description=O -acetyltransferase-like
VTYNKYXHPYTSWIPITAYICLRNCTQQLRSASLALFAWLGKITLETYISQIHIWLRSSMPNGQPKWLLCFIPDYPMLNFMLTTAIYLLLSYRVFEITNVLKGAFIPSRDNNRLYQNFVAGI

SEQ ID NO: 125586 - protein, 133 aa, Setaria italica
  Transcript Sequence Number=SeqID_59612
  Gene Ontology: Mol. function=transferase activity
  Homolog annotation: Hit_ID=Q5ZCH7; Match level="QueryCoverage=100%, HitCoverage=24%, E-value=1e-67, Identity=89%"; Hit description=O -acetyltransferase-like
SGLDRYIWIIGMIYAYFHPNVERWMEKLEESETKVRLSIKGTIVTLSVMAGYLWYEYIYKLDKVTYNKYHPYTSWIPITAYICLRNCTQQLRSASLALFAWLGKITLETYISQIHIWLRSSMPNGQPKWLLCL

SEQ ID NO: 125587 - protein, 145 aa, Setaria italica
  misc_feature (19)..(19): Xaa can be any naturally occurring amino acid
  Transcript Sequence Number=SeqID_59613
  Gene Ontology: Mol. function=transferase activity
  Homolog annotation: Hit_ID=Q5ZCH7; Match level="QueryCoverage=86%, HitCoverage=23%, E-value=1e-59, Identity=86%"; Hit description=O -acetyltransferase-like
DIYIWIIGMIYAYFHLMLXRWMEKLEESETKVRLSIKGTIVTLSVMAGYLWYEYIYKLDKVTYNKYHPYTSWIPITAYICLRNCTQQLRSASLALFAWLGKITLETYISQIHIWLRSSMPNGQPKWLLWYRRLLSLLGINAPFKT

SEQ ID NO: 125588 - protein, 118 aa, Setaria italica
  misc_feature (112)..(112): Xaa can be any naturally occurring amino acid
  Transcript Sequence Number=SeqID_59614
  Gene Ontology: Mol. function=transferase activity
  Homolog annotation: Hit_ID=Q5ZCH7; Match level="QueryCoverage=97%, HitCoverage=21%, E-value=1e-53, Identity=86%"; Hit description=O -acetyltransferase-like
FGFYLWYEYIYKLDKVTYNKYHPYTSWIPITAYICLRNCTQQLRSASLALFAWLGKITLETYISQIHIWLRSSMPNGQPKWLLCFIPDYPMLNFMLTTAIYLLLSYRVFEIXNVLKGA

SEQ ID NO: 125589 - protein, 128 aa, Setaria italica
  misc_feature (11)..(11): Xaa can be any naturally occurring amino acid
  misc_feature (73)..(73): Xaa can be any naturally occurring amino acid
  misc_feature (95)..(95): Xaa can be any naturally occurring amino acid
  Transcript Sequence Number=SeqID_59615
  Gene Ontology: Mol. function=transferase activity
  Homolog annotation: Hit_ID=Q5ZCH7; Match level="QueryCoverage=100%, HitCoverage=23%, E-value=7e-55, Identity=82%"; Hit description=O -acetyltransferase-like
ETKVRLSIKGXIVTLSVMAGYLWYEYIYKLDKVTYNKYHPYTSWIPITAYICLRNCTQQLRSASLALFAWLGXKITLETYISQIHIWLRSSMPKXGSQKWLLCFIPDYPMLNFMLTTAIYLLLSYRVF

SEQ ID NO: 125590 - protein, 114 aa, Setaria italica
  Transcript Sequence Number=SeqID_59616
  Gene Ontology: Mol. function=transferase activity
  Homolog annotation: Hit_ID=Q5ZCH7; Match level="QueryCoverage=99%, HitCoverage=20%, E-value=3e-52, Identity=84%"; Hit description=O -acetyltransferase-like
DKVRLSIKGTIVTLSVMAGYLWYEYIYKLDKVTYNKYHPYTSWIPITAYICLRNCTQQLRSASLALFAWLGKITLETYISQIHIWLRSSMPNGQPKWLLCFIPDYPMLNFIALT

SEQ ID NO: 125591 - protein, 125 aa, Setaria italica
  misc_feature (111)..(111): Xaa can be any naturally occurring amino acid
  Transcript Sequence Number=SeqID_59617
  Gene Ontology: Mol. function=transferase activity
  Homolog annotation: Hit_ID=Q5ZCH7; Match level="QueryCoverage=96%, HitCoverage=22%, E-value=9e-56, Identity=85%"; Hit description=O -acetyltransferase-like
FGFTLWYEYIYKLDKVTYNKYHPYTSWIPITAYICLRNCTQQLRSASLALFAWLGKITLETYISQIHIWLRSSMPNGQPKWLLCFIPDYPMLNFMLTTAIYLLLSYRVFEXITNVLKGAFIPSRE

SEQ ID NO: 125592 - protein, 100 aa, Setaria italica
  Transcript Sequence Number=SeqID_59618
  Gene Ontology: Mol. function=transferase activity
  Homolog annotation: Hit_ID=Q5ZCH7; Match level="QueryCoverage=95%, HitCoverage=17%, E-value=2e-39, Identity=81%"; Hit description=O -acetyltransferase-like
TSWIPITAYICLRNCTQQLRSASLALFAWLGKITLETYISQIHIWLRSSMPNGQPKWLLCFIPDYPMLNFMLTTAIYLLLSYRVFEITNVFEGGLFYSPS

SEQ ID NO: 125593 - protein, 113 aa, Setaria italica
  misc_feature (15)..(15): Xaa can be any naturally occurring amino acid
  misc_feature (96)..(96): Xaa can be any naturally occurring amino acid
  Transcript Sequence Number=SeqID_59619
  Gene Ontology: Mol. function=transferase activity
  Homolog annotation: Hit_ID=Q5ZCH7; Match level="QueryCoverage=99%, HitCoverage=20%, E-value=8e-52, Identity=84%"; Hit description=O -acetyltransferase-like
LSIKGTIVTLSVMAXYLWYEYIYKLDKVTYNKYHPYTSWIPITAYICLRNCTQQLRSASLALFAWLGKITLETYISQIHIWLRSSMPNGQPKWLLXFIPDYPMLNFMLTTAIL

SEQ ID NO: 125594 - protein, 115 aa, Setaria italica
  Transcript Sequence Number=SeqID_59620
  Gene Ontology: Mol. function=transferase activity
  Homolog annotation: Hit_ID=Q5ZCH7; Match level="QueryCoverage=93%, HitCoverage=19%, E-value=7e-51, Identity=85%"; Hit description=O -acetyltransferase-like
PLYILLGYKDPSPAKAHLPLLHEWHFRSGLDRYIWIIGMIYAYFHPNVERWMEKLEESETKVRLSIKGTIVTLSVMAGYLWYEYIYKLYKVTYNKYHPYTSWIPINLSLLFLSLS

SEQ ID NO: 125595 - protein, 82 aa, Setaria italica
  misc_feature (63)..(63): Xaa can be any naturally occurring amino acid
  Transcript Sequence Number=SeqID_59621
  Gene Ontology: Mol. function=transferase activity
  Homolog annotation: Hit_ID=Q5ZCH7; Match level="QueryCoverage=100%, HitCoverage=15%, E-value=1e-34, Identity=87%"; Hit description=O -acetyltransferase-like
LGKITLETYISQIHIWLRSSMPNGQPKWLLCFIPDYPMLNFMLTTAIYLLLSYRVFEITNVLXKGAFIPSRDNNRLYQNFVA

SEQ ID NO: 125596 - protein, 109 aa, Setaria italica
  misc_feature (38)..(38): Xaa can be any naturally occurring amino acid
  Transcript Sequence Number=SeqID_59622
  Gene Ontology: Mol. function=transferase activity
  Homolog annotation: Hit_ID=Q5ZCH7; Match level="QueryCoverage=100%, HitCoverage=19%, E-value=3e-47, Identity=84%"; Hit description=O -acetyltransferase-like
MAGYLWYEYIYKLDKVTYNKYHPYTSWIPITAYICLRXNCTQQVEGSASLALFAWLGKITLETYISQIHIWLRSSMPNGQPKWLLCFIPDYPMLNFMLTTAIYLLLSYR

SEQ ID NO: 125597 - protein, 104 aa, Setaria italica
  Transcript Sequence Number=SeqID_59623
  Gene Ontology: Mol. function=transferase activity
  Homolog annotation: Hit_ID=Q5ZCH7; Match level="QueryCoverage=99%, HitCoverage=19%, E-value=6e-49, Identity=87%"; Hit description=O -acetyltransferase-like
TKVRLSIKGTIVTLSVMAGYLWYEYIYKLDKVTYNKYHPYTSWIPITAYICLRNCTQQLRSASLALFAWLGKITLETYISQIHIWLRSSMPNGQPKWLLCFIPD

SEQ ID NO: 125598 - protein, 116 aa, Setaria italica
  misc_feature (74)..(74): Xaa can be any naturally occurring amino acid
  misc_feature (84)..(84): Xaa can be any naturally occurring amino acid
  Transcript Sequence Number=SeqID_59624
  Gene Ontology: Mol. function=transferase activity
  Homolog annotation: Hit_ID=Q5ZCH7; Match level="QueryCoverage=100%, HitCoverage=21%, E-value=7e-55, Identity=87%"; Hit description=O -acetyltransferase-like
WIIGMIYAYFHPNVERWMEKLEESETKVRLSIKGTIVTLSVMAGYLWYEYIYKLDKVTYNKYHPYTSWIPITAXICLRNCTQQXLRSASLALFAWLGKITLETYISQIHIWLRSSM

SEQ ID NO: 125599 - protein, 105 aa, Setaria italica
  Transcript Sequence Number=SeqID_59625
  Gene Ontology: Mol. function=transferase activity
  Homolog annotation: Hit_ID=Q5ZCH7; Match level="QueryCoverage=100%, HitCoverage=19%, E-value=2e-49, Identity=86%"; Hit description=O -acetyltransferase-like
TKVRLSIKGTIVTLSVMAGYLWYEYIYKLDKVTYNKYHPYTSWIPITAYICLRNCTQQLRSASLALFAWLGKITLETYISQIHIWLRSSMPNGQPKWLLCFIPDY

SEQ ID NO: 125600 - protein, 92 aa, Setaria italica
  Transcript Sequence Number=SeqID_59626
  Gene Ontology: Mol. function=transferase activity
  Homolog annotation: Hit_ID=Q5ZCH7; Match level="QueryCoverage=92%, HitCoverage=15%, E-value=4e-36, Identity=84%"; Hit description=O -acetyltransferase-like
LSYLFPYYVLWIPITAYICLRNCTQQLRSASLALFAWLGKITLETYISQIHIWLRSSMPNGQPKWLLCFIPDYPMLNFMLTTAIYLLLSYRV

SEQ ID NO: 125601 - protein, 78 aa, Setaria italica
  Transcript Sequence Number=SeqID_59627
  Gene Ontology: Mol. function=transferase activity
  Homolog annotation: Hit_ID=Q5ZCH7; Match level="QueryCoverage=100%, HitCoverage=14%, E-value=4e-36, Identity=89%"; Hit description=O -acetyltransferase-like
IYKLDKVTYNKYHPYTSWIPITAYICLRNCTQQLRSASLALFAWLGKITLETYISQIHIWLRSSMPNGQPKWLLCFIP

SEQ ID NO: 125602 - protein, 84 aa, Setaria italica
  Transcript Sequence Number=SeqID_59628
  Gene Ontology: Mol. function=transferase activity
  Homolog annotation: Hit_ID=Q5ZCH7; Match level="QueryCoverage=100%, HitCoverage=15%, E-value=2e-39, Identity=89%"; Hit description=O -acetyltransferase-like
  Pfam annotation: Domain name=Cas1p; Domain location=1-84; Score= -59.6; E_value=2.2e-05; Accession=PF07779.4; Description=Cas1p-like protein
LFTLMVYGALGLFNKYNEIPSVMAIKIACCFLSVILIWEIPGVFELLWAPFTFLLGYKDPSPAKAHLPLLHEWHFRSGLDRYIW

SEQ ID NO: 125603 - protein, 84 aa, Setaria italica
  Transcript Sequence Number=SeqID_59629
  Gene Ontology: Mol. function=transferase activity
  Homolog annotation: Hit_ID=Q5ZCH7; Match level="QueryCoverage=98%, HitCoverage=15%, E-value=1e-39, Identity=90%"; Hit description=O -acetyltransferase-like
  Pfam annotation: Domain name=Cas1p; Domain location=1-78; Score= -68.6; E_value=7e-05; Accession=PF07779.4; Description=Cas1p-like protein
YKYNEIPSVMAIKIACCFLSVILIWEIPGVFELLWAPFTFLLGYKDPSPAKAHLPLLHEWHFRSGLDRYIWIIGMIYAYFHPNV

SEQ ID NO: 125604 - protein, 60 aa, Setaria italica
  Transcript Sequence Number=SeqID_59630
  Gene Ontology: Mol. function=transferase activity
  Homolog annotation: Hit_ID=Q5ZCH7; Match level="QueryCoverage=93%, HitCoverage=10%, E-value=1e-23, Identity=89%"; Hit description=O -acetyltransferase-like
MVISTGLDRYIWIIGMIYAYFHPNVERWMEKLEESETKVRLSIKGTIVTLSVMAGYLWYE

SEQ ID NO: 125605 - protein, 86 aa, Setaria italica
  Transcript Sequence Number=SeqID_59631
  Gene Ontology: Mol. function=transferase activity
  Homolog annotation: Hit_ID=Q5ZCH7; Match level="QueryCoverage=100%, HitCoverage=15%, E-value=1e-42, Identity=94%"; Hit description=O -acetyltransferase-like
LSVILIWEIPGVFELLWAPFTFLLGYKDPSPAKAHLPLLHEWHFRSGLDRYIWIIGMIYAYFHPNVERWMEKLEESETKVRLSIKG

SEQ ID NO: 125606 - protein, 85 aa, Setaria italica
  Transcript Sequence Number=SeqID_59632
  Gene Ontology: Mol. function=transferase activity
  Homolog annotation: Hit_ID=Q5ZCH7; Match level="QueryCoverage=100%, HitCoverage=15%, E-value=3e-41, Identity=90%"; Hit description=O -acetyltransferase-like
  Pfam annotation: Domain name=Cas1p; Domain location=1-65; Score= -112.0; E_value=0.02; Accession=PF07779.4; Description=Cas1p-like protein
LACCFLSVILIWEIPGVFELLWAPFTFLLGYKDPSPAKAHLPLLHEWHFRSGLDRYIWIIGMIYAYFHPNVERWMEKLEESETKV

SEQ ID NO: 125607 - protein, 84 aa, Setaria italica
  Transcript Sequence Number=SeqID_59633
  Gene Ontology: Mol. function=transferase activity
  Homolog annotation: Hit_ID=Q5ZCH7; Match level="QueryCoverage=97%, HitCoverage=15%, E-value=4e-39, Identity=90%"; Hit description=O -acetyltransferase-like
  Pfam annotation: Domain name=Cas1p; Domain location=1-79; Score= -63.5; E_value=3.6e-05; Accession=PF07779.4; Description=Cas1p-like protein
FNKYNEIPSVMAIKIACCFLSVILIWEIPGVFELLWAPFTFLLGYKDPSPAKAHLPLLHEWHFRSGLDRYIWIIGMIYAYFHLC

SEQ ID NO: 125608 - protein, 85 aa, Setaria italica
  Transcript Sequence Number=SeqID_59634
  Gene Ontology: Mol. function=transferase activity
  Homolog annotation: Hit_ID=Q5ZCH7; Match level="QueryCoverage=94%, HitCoverage=14%, E-value=4e-39, Identity=92%"; Hit description=O -acetyltransferase-like
  Pfam annotation: Domain name=Cas1p; Domain location=2-64; Score= -122.3; E_value=0.077; Accession=PF07779.4; Description=Cas1p-like protein
LRVSVSVILIWEIPGVFELLWAPFTFLLGYKDPSPAKAHLPLLHEWHFRSGLDRYIWIIGMIYAYFHPNVERWMEKLEESETKVS

SEQ ID NO: 125609 - protein, 83 aa, Setaria italica
  Transcript Sequence Number=SeqID_59635
  Gene Ontology: Mol. function=transferase activity
  Homolog annotation: Hit_ID=Q5ZCH7; Match level="QueryCoverage=87%, HitCoverage=13%, E-value=1e-33, Identity=90%"; Hit description=O -acetyltransferase-like
  Pfam annotation: Domain name=Cas1p; Domain location=1-70; Score= -119.1; E_value=0.051; Accession=PF07779.4; Description=Cas1p-like protein
YPLVCLAFPLLRVSVIWEIPGVFELLWAPFTFLLGYKDPSPAKAHLPLLHEWHFRSGLDRYIWIIGMIYAYFHPNVERWMEKL

SEQ ID NO: 125610 - protein, 77 aa, Setaria italica
  Transcript Sequence Number=SeqID_59636
  Gene Ontology: Mol. function=transferase activity
  Homolog annotation: Hit_ID=Q5ZCH7; Match level="QueryCoverage=100%, HitCoverage=14%, E-value=5e-36, Identity=89%"; Hit description=O -acetyltransferase-like
FLLGYKDPSPAKAHLPLLHEWHFRSGLDRYIWIIGMIYAYFHPNVERWMEKLEESETKVRLSIKGTIVTLSVMAGYL

SEQ ID NO: 125611 - protein, 84 aa, Setaria italica
  Transcript Sequence Number=SeqID_59637
  Gene Ontology: Mol. function=transferase activity
  Homolog annotation: Hit_ID=Q5ZCH7; Match level="QueryCoverage=97%, HitCoverage=15%, E-value=2e-39, Identity=90%"; Hit description=O -acetyltransferase-like
FLGLFELLWAPFTFLLGYKDPSPAKAHLPLLHEWHFRSGLDRYIWIIGMIYAYFHPNVERWMEKLEESETKVRLSIKGTIVTLS

SEQ ID NO: 125612 - protein, 80 aa, Setaria italica
  Transcript Sequence Number=SeqID_59638
  Gene Ontology: Mol. function=transferase activity
  Homolog annotation: Hit_ID=Q5ZCH7; Match level="QueryCoverage=100%, HitCoverage=14%, E-value=4e-38, Identity=90%"; Hit description=O -acetyltransferase-like
LGYKDPSPAKAHLPLLHEWHFRSGLDRYIWIIGMIYAYFHPNVERWMEKLEESETKVRLSIKGTIVTLSVMAGYLWYEYI

SEQ ID NO: 125613 - protein, 80 aa, Setaria italica
  Transcript Sequence Number=SeqID_59639
  Gene Ontology: Mol. function=transferase activity
  Homolog annotation: Hit_ID=Q5ZCH7; Match level="QueryCoverage=100%, HitCoverage=14%, E-value=3e-39, Identity=92%"; Hit description=O -acetyltransferase-like
WHFRSGLDRYIWIIGMIYAYFHPNVERWMEKLEESETKVRLSIKGTIVTLSVMAGYLWYEYIYKLDKVTYNKYHPYTSWI

SEQ ID NO: 125614 - protein, 77 aa, Setaria italica
  Transcript Sequence Number=SeqID_59640
  Gene Ontology: Mol. function=transferase activity
  Homolog annotation: Hit_ID=Q5ZCH7; Match level="QueryCoverage=100%, HitCoverage=14%, E-value=7e-36, Identity=89%"; Hit description=O -acetyltransferase-like
  Pfam annotation: Domain name=Cas1p; Domain location=1-71; Score= -89.3; E_value=0.001; Accession=PF07779.4; Description=Cas1p-like protein
SVMAIKIACCFLSVILIWEIPGVFELLWAPFTFLLGYKDPSPAKAHLPLLHEWHFRSGLDRYIWIIGMIYAYFHPNV

SEQ ID NO: 125615 - protein, 78 aa, Setaria italica
  Transcript Sequence Number=SeqID_59641
  Gene Ontology: Mol. function=transferase activity
  Homolog annotation: Hit_ID=Q5ZCH7; Match level="QueryCoverage=100%, HitCoverage=14%, E-value=9e-34, Identity=85%"; Hit description=O -acetyltransferase-like
TKVRLSIKGTIVTLSVMAGYLWYEYIYKLDKVTYNKYHPYTSWIPITAYICLRNCTQQLRSASLALFAWLGKITLETY

SEQ ID NO: 125616 - protein, 50 aa, Setaria italica
  Transcript Sequence Number=SeqID_59642
  Gene Ontology: Mol. function=transferase activity
  Homolog annotation: Hit_ID=Q5ZCH7; Match level="QueryCoverage=98%, HitCoverage=9%, E-value=8e-22, Identity=95%"; Hit description=O -acetyltransferase-like
SPAKAHLPLLHEWHFRSGLDRYIWIIGMIYAYFHPNVERWMEKLEESETK

SEQ ID NO: 125617 - protein, 75 aa, Setaria italica
  Transcript Sequence Number=SeqID_59643
  Gene Ontology: Mol. function=transferase activity
  Homolog annotation: Hit_ID=Q5ZCH7; Match level="QueryCoverage=100%, HitCoverage=13%, E-value=4e-34, Identity=88%"; Hit description=O -acetyltransferase-like
  Pfam annotation: Domain name=Cas1p; Domain location=1-75; Score= -92.0; E_value=0.0015; Accession=PF07779.4; Description=Cas1p-like protein
GALGLFNKYNEIPSVMAIKIACCFLSVILIWEIPGVFELLWAPFTFLLGYKDPSPAKAHLPLLHEWHFRSGLDRY

SEQ ID NO: 125618 - protein, 59 aa, Setaria italica
  Transcript Sequence Number=SeqID_59644
  Gene Ontology: Mol. function=transferase activity
  Homolog annotation: Hit_ID=Q5ZCH7; Match level="QueryCoverage=96%, HitCoverage=10%, E-value=2e-22, Identity=85%"; Hit description=O -acetyltransferase-like
FNKYNEIPSVMAIKIACCFLSVILIWEIPGVFELLWAPFTFLLGYKDPSPAKAHLPLSY

SEQ ID NO: 125619 - protein, 63 aa, Setaria italica
  Transcript Sequence Number=SeqID_59645
  Gene Ontology: Mol. function=transferase activity
  Homolog annotation: Hit_ID=Q5ZCH7; Match level="QueryCoverage=92%, HitCoverage=10%, E-value=2e-20, Identity=79%"; Hit description=O -acetyltransferase-like
GLTEDNLVCLNKYNEIPSVMAIKIACCFLSVILIWEIPGVFELLWAPFTFLLGYKDPSPAKAH

SEQ ID NO: 125620 - protein, 41 aa, Setaria italica
  Transcript Sequence Number=SeqID_59646
  Gene Ontology: Mol. function=transferase activity
  Homolog annotation: Hit_ID=Q5ZCH7; Match level="QueryCoverage=90%, HitCoverage=6%, E-value=5e-12, Identity=86%"; Hit description=O -acetyltransferase-like
VFACCFLSVILIWEIPGVFELLWAPFTFLLGYKDPSPAKAH

SEQ ID NO: 125621 - protein, 76 aa, Setaria italica
  Transcript Sequence Number=SeqID_59647
  Gene Ontology: Mol. function=transferase activity
  Homolog annotation: Hit_ID=Q5ZCH7; Match level="QueryCoverage=100%, HitCoverage=14%, E-value=1e-32, Identity=86%"; Hit description=O -acetyltransferase-like
YICLRNCTQQLRSASLALFAWLGKITLETYISQIHIWLRSSMPNGQPKWLLCFIPDYPMLNFMLTTAIYLLLSYRV

SEQ ID NO: 125622 - protein, 79 aa, Setaria italica
  Transcript Sequence Number=SeqID_59648
  Gene Ontology: Mol. function=transferase activity
  Homolog annotation: Hit_ID=Q5ZCH7; Match level="QueryCoverage=98%, HitCoverage=14%, E-value=5e-36, Identity=89%"; Hit description=O -acetyltransferase-like
NIYKLDKVTYNKYHPYTSWIPITAYICLRNCTQQLRSASLALFAWLGKITLETYISQIHIWLRSSMPNGQPKWLLCFIP

SEQ ID NO: 125623 - protein, 75 aa, Setaria italica
  Transcript Sequence Number=SeqID_59649
  Gene Ontology: Mol. function=transferase activity
  Homolog annotation: Hit_ID=B9S163; Match level="QueryCoverage=100%, HitCoverage=12%, E-value=2e-32, Identity=85%"; Hit description=O -acetyltransferase, putative
WIPITAYICLRNCTQQLRSASLALFAWLGKITLETYISQIHIWLRSSMPNGQPKWLLCFIPDYPMLNFMLTTAIY

SEQ ID NO: 125624 - protein, 79 aa, Setaria italica
  misc_feature (23)..(23): Xaa can be any naturally occurring amino acid
  Transcript Sequence Number=SeqID_59650
  Gene Ontology: Mol. function=transferase activity
  Homolog annotation: Hit_ID=Q5ZCH7; Match level="QueryCoverage=100%, HitCoverage=14%, E-value=4e-34, Identity=87%"; Hit description=O -acetyltransferase-like
NKYHPYTSWIPITAYICLRNCTXQQLRSASLALFAWLGKITLETYISQIHIWLRSSMPNGQPKWLLCFIPDYPMLNFML

SEQ ID NO: 125625 - protein, 62 aa, Setaria italica
  Transcript Sequence Number=SeqID_59651
  Gene Ontology: Mol. function=transferase activity
  Homolog annotation: Hit_ID=Q5ZCH7; Match level="QueryCoverage=79%, HitCoverage=9%, E-value=1e-18, Identity=87%"; Hit description=O -acetyltransferase-like
ALFAWLGKITLETYISQIHIWLRSSMPNGQPKWLLCFIPDYPMLNFMLTLRHATGDRKAHRG

SEQ ID NO: 125626 - protein, 58 aa, Setaria italica
  Transcript Sequence Number=SeqID_59652
  Gene Ontology: Mol. function=transferase activity
  Homolog annotation: Hit_ID=Q5ZCH7; Match level="QueryCoverage=100%, HitCoverage=10%, E-value=1e-22, Identity=86%"; Hit description=O -acetyltransferase-like
QQLRSASLALFAWLGKITLETYISQIHIWLRSSMPNGQPKWLLCFIPDYPMLNFMLTT

SEQ ID NO: 125627 - protein, 65 aa, Setaria italica
  misc_feature (3)..(3): Xaa can be any naturally occurring amino acid
  misc_feature (6)..(6): Xaa can be any naturally occurring amino acid
  Transcript Sequence Number=SeqID_59653
  Gene Ontology: Mol. function=transferase activity
  Homolog annotation: Hit_ID=Q5ZCH7; Match level="QueryCoverage=100%, HitCoverage=12%, E-value=9e-26, Identity=86%"; Hit description=O -acetyltransferase-like
SLXLFXWLGKITLETYISQIHIWLRSSMPNGQPKWLLCFIPDYPMLNFMLTTAIYLLLSYRVFEI

SEQ ID NO: 125628 - protein, 72 aa, Setaria italica
  Transcript Sequence Number=SeqID_59654
  Gene Ontology: Mol. function=transferase activity
  Homolog annotation: Hit_ID=Q5ZCH7; Match level="QueryCoverage=100%, HitCoverage=13%, E-value=1e-32, Identity=90%"; Hit description=O -acetyltransferase-like
YLWYEYIYKLDKVTYNKYHPYTSWIPITAYICLRNCTQQLRSASLALFAWLGKITLETYISQIHIWLRSSMP

SEQ ID NO: 125629 - protein, 43 aa, Setaria italica
  Transcript Sequence Number=SeqID_59655
  Gene Ontology: Mol. function=transferase activity
  Homolog annotation: Hit_ID=Q5ZCH7; Match level="QueryCoverage=100%, HitCoverage=7%, E-value=6e-16, Identity=90%"; Hit description=O -acetyltransferase-like
LFAWLGKITLETYISQIHIWLRSSMPNGQPKWLLCFIPDYPML

SEQ ID NO: 125630 - protein, 63 aa, Setaria italica
  Transcript Sequence Number=SeqID_59656
  Gene Ontology: Mol. function=transferase activity
  Homolog annotation: Hit_ID=B9S163; Match level="QueryCoverage=96%, HitCoverage=10%, E-value=1e-25, Identity=86%"; Hit description=O -acetyltransferase, putative
DKVTYNKYHPYTSWIPTTAYICLRNCTQQLRSASLALFAWLGKITLETYISQIHIWLRSSMTK

SEQ ID NO: 125631 - protein, 71 aa, Setaria italica
  misc_feature (21)..(21): Xaa can be any naturally occurring amino acid
  misc_feature (60)..(60): Xaa can be any naturally occurring amino acid
  Transcript Sequence Number=SeqID_59657
  Gene Ontology: Mol. function=transferase activity
  Homolog annotation: Hit_ID=Q5ZCH7; Match level="QueryCoverage=95%, HitCoverage=12%, E-value=2e-26, Identity=88%"; Hit description=O -acetyltransferase-like
FGFYLWYEYIYKLDKVTYNKXYHPYTSWIPITAYICLRNCTQQLRSASLALFAWLGKITXLETYISQIHIW

SEQ ID NO: 125632 - protein, 62 aa, Setaria italica
  misc_feature (16)..(16): Xaa can be any naturally occurring amino acid
  Transcript Sequence Number=SeqID_59658
  Gene Ontology: Mol. function=transferase activity
  Homolog annotation: Hit_ID=B9S163; Match level="QueryCoverage=93%, HitCoverage=10%, E-value=1e-20, Identity=81%"; Hit description=O -acetyltransferase, putative
FLVYLWYEYIYKLDKXTYNKYHPYTSWIPITAYICLRNCTQQLRSASLALSHGLARLTLETY

SEQ ID NO: 125633 - protein, 33 aa, Setaria italica
  Transcript Sequence Number=SeqID_59659
  Homolog annotation: Hit_ID=B9S163; Match level="QueryCoverage=87%, HitCoverage=5%, E-value=8e-10, Identity=89%"; Hit description=O -acetyltransferase, putative
SACAIAYNKYHPYTSWIPITAYICLRNCTQQLR

SEQ ID NO: 125634 - protein, 35 aa, Setaria italica
  Transcript Sequence Number=SeqID_59660
  Gene Ontology: Mol. function=transferase activity
  Homolog annotation: Hit_ID=Q5ZCH7; Match level="QueryCoverage=100%, HitCoverage=6%, E-value=9e-11, Identity=91%"; Hit description=O -acetyltransferase-like
FEITNVLKGAFIPSRDNNRLYQNFVAGIAISVCLY

SEQ ID NO: 125635 - protein, 37 aa, Setaria italica
  Transcript Sequence Number=SeqID_59661
  Gene Ontology: Mol. function=transferase activity
  Homolog annotation: Hit_ID=B9S163; Match level="QueryCoverage=83%, HitCoverage=5%, E-value=2e-10, Identity=96%"; Hit description=O -acetyltransferase, putative
WYEYIYKLDKVTYNKYHPYTSWIPITAYICLVVNLLP

SEQ ID NO: 125636 - protein, 37 aa, Setaria italica
  Transcript Sequence Number=SeqID_59662
PSRYEYIYKLRQKLHTTKYLSLHVMDPYNCLYLPAQL

SEQ ID NO: 125637 - protein, 76 aa, Setaria italica
  misc_feature (54)..(54): Xaa can be any naturally occurring amino acid
  Transcript Sequence Number=SeqID_59663
YPLLVRPAQSREGTGSAWPSGGTTSSRDFHTLSFGNSDIPLYMLDAGFPPETAXPVFGERVAGNHAAAVAQAGGRI

SEQ ID NO: 125638 - protein, 63 aa, Setaria italica
  Transcript Sequence Number=SeqID_59664
RYPRLGLHISAAHICCWISPSLYVTQATSLQKKHNMITSPRNLEVLFINCLVIQIKSFLLCLQ

SEQ ID NO: 125639 - protein, 65 aa, Setaria italica
  Transcript Sequence Number=SeqID_59665
  Gene Ontology: Mol. function=aspartic-type endopeptidase activity
ASSFLFHRLICFIDPCQVIISRLTQHHVQLPENLGSYQLLEWNVQPLSRRSWFQEHVVSILLGIL

SEQ ID NO: 125640 - protein, 82 aa, Setaria italica
  misc_feature (7)..(7): Xaa can be any naturally occurring amino acid
  Transcript Sequence Number=SeqID_59666
  Gene Ontology: Mol. function=ATPase activity, coupled to transmembrane movement of ions, phosphorylative mechanism; Cellular component=membrane; Biological process=transport
  Homolog annotation: Hit_ID=P98204; Match level="QueryCoverage=92%, HitCoverage=6%, E-value=2e-24, Identity=71%"; Hit description =Phospholipid-transporting ATPase 1
IWQSIAXFFIPYLAYRKSVIDSSSLGDLWTLSVVILVNIHLAMDVIRWNWITHVAIWGSIVATWICVMIIDSIPIIALVFLG

SEQ ID NO: 125641 - protein, 81 aa, Setaria italica
  misc_feature (36)..(36): Xaa can be any naturally occurring amino acid
  Transcript Sequence Number=SeqID_59667
  Homolog annotation: Hit_ID=Q8H4C0; Match level="QueryCoverage=100%, HitCoverage=19%, E-value=1e-24, Identity=69%"; Hit description=Alpha- rhamnosidase-like protein
GPIKNKPFLLDDGRLLCGSSVESWNSWGAWLEVCIXSYFQQVTDDAGWTWRKYGPIFVESEKLGVIQPVPYQTTNGTIRML

SEQ ID NO: 125642 - protein, 51 aa, Setaria italica
  Transcript Sequence Number=SeqID_59668
QYKSKSILEQRNMMPRRLSSKQEATETIPEFHRTKLLQFSSLPPFKDLIKT

SEQ ID NO: 125643 - protein, 71 aa, Setaria italica
  misc_feature (62)..(62): Xaa can be any naturally occurring amino acid
  Transcript Sequence Number=SeqID_59669
  Homolog annotation: Hit_ID=B6U0W6; Match level="QueryCoverage=91%, HitCoverage=13%, E-value=5e-14, Identity=61%"; Hit description =Polygalacturonase
CLQLLLSCSHDSGITEFEYPSISEQLRSNCRQTPVCYDGSTSSAMRVQAPRHKSSTSQFLSXFSEVGFILV

SEQ ID NO: 125644 - protein, 91 aa, Setaria italica
  misc_feature (57)..(57): Xaa can be any naturally occurring amino acid
  misc_feature (87)..(87): Xaa can be any naturally occurring amino acid
  Transcript Sequence Number=SeqID_59670
  Gene Ontology: Mol. function=hydrolase activity, acting on glycosyl bonds; Cellular component=vacuole; Biological process=cell wall organization and biogenesis
  Homolog annotation: Hit_ID=B6U0W6; Match level="QueryCoverage=92%, HitCoverage=17%, E-value=3e-32, Identity=80%"; Hit description =Polygalacturonase
FYFLFGVSASYFKSFWFFTTVVETQWSTVSGIYCKEMSPNVYRPHSVTITEFGAVGXMGVTLNTKAFQNAIFYLNSFADKGGAQLFXPAGK

SEQ ID NO: 125645 - protein, 114 aa, Setaria italica
  misc_feature (93)..(93): Xaa can be any naturally occurring amino acid
  Transcript Sequence Number=SeqID_59671
  Gene Ontology: Mol. function=hydrolase activity, acting on glycosyl bonds; Cellular component=vacuole; Biological process=cell wall organization and biogenesis
  Homolog annotation: Hit_ID=B6U0W6; Match level="QueryCoverage=100%, HitCoverage=23%, E-value=8e-52, Identity=90%"; Hit description =Polygalacturonase
SEVRAEGLRIVNSLHGIRIKTAPGRGGYVKNVYIADVSMENVSMAIRITGNYGEHPDDKYDRNALPMISNITIKDVVGINIGVAGILEGIQGXYNFSSICLSNVSLSVQSLHPW

SEQ ID NO: 125646 - protein, 81 aa, Setaria italica
  misc_feature (73)..(73): Xaa can be any naturally occurring amino acid
  Transcript Sequence Number=SeqID_59672
  Pfam annotation: Domain name=PAM2; Domain location=60-77; Score=16.2; E_value=0.03; Accession=PF07145.7; Description=Ataxin-2 C-terminal region
VPIIIRKILDSASSRILPASGGDRPRFGPARRSGDGCRGDGEAGKEEVREYESDMRKLEDLLSKLNPSAEEFXPLSRRRGD

SEQ ID NO: 125647 - protein, 60 aa, Setaria italica
  Transcript Sequence Number=SeqID_59673
  Subcellular localization annotation: CTP_CleavageSite=49; ConfidenceScore=5.54e-01
PPQPRPPPSPPPARRPRRGSGPPPPRQPSPLRRAGPNRGRSPPLAGRIREEAESRIFLII

SEQ ID NO: 125648 - protein, 73 aa, Setaria italica
  Transcript Sequence Number=SeqID_59674
  Subcellular localization annotation: CTP_CleavageSite=65; ConfidenceScore=5.41e-01
CIRHQTWAAADRARPTPAGTPPRPWPPPPPRLPPPPSRPALPSPTLSSAHESASRDVTRIIREVRAESWEERS

SEQ ID NO: 125649 - protein, 123 aa, Setaria italica
  Transcript Sequence Number=SeqID_59675
  Gene Ontology: Mol. function=phosphoprotein phosphatase activity; Cellular component=cytoplasm; Biological process=mitotic cell cycle spindle assembly checkpoint
  Homolog annotation: Hit_ID=A3C4N5; Match level="QueryCoverage=54%, HitCoverage=21%, E-value=4e-34, Identity=100%"; Hit description =Serine/threonine-protein phosphatase PP2A-4 catalytic subunit
MASIFQDISEQFNHTNNLKLVARAHQLVMEGYNWAHEQKVVTIFSAPNYCYRCGNMASILEVDDCRNHTFIQVPNFLRLCIFSLLFITFIFLVVLGIPYTSFLLYDMAQYGNVIDELENLGKY

SEQ ID NO: 125650 - protein, 38 aa, Setaria italica
  Transcript Sequence Number=SeqID_59676
PCCPIFDRYGSANVWKIFTDLFDYFPLTALVCVLSFRP

SEQ ID NO: 125651 - protein, 51 aa, Setaria italica
  Transcript Sequence Number=SeqID_59677
  Subcellular localization annotation: CTP_CleavageSite=39; ConfidenceScore=5.36e-01
ILGYPAMGSNAGGANGAFHQQFCHSMVNVLKFRGFPTLPLSRTSNSSWRTS

SEQ ID NO: 125652 - protein, 125 aa, Setaria italica
  Transcript Sequence Number=SeqID_59678
  Gene Ontology: Mol. function=catalytic activity; Cellular component =chloroplast; Biological process=metabolic process
  Homolog annotation: Hit_ID=O24458; Match level="QueryCoverage=100%, HitCoverage=30%, E-value=2e-61, Identity=88%"; Hit description =Pyruvate dehydrogenase E1 beta subunit
  Pfam annotation: Domain name=Transketolase_C; Domain location=1-116; Score=132.8; E_value=1.1e-36; Accession=PF02780.12; Description =Transketolase, C-terminal domain
PGEHVTILTYSRMRYHVMQAAKTLVNKGYDPEVIDIRSLKPFDLHTIGNSIKKTHRVLIVEEFMRTGGIGASLRSAIIDNFWDYLDAPIMCLSSQDVPTPYASTLEDATVVQPAQIVAAVEQICQ

SEQ ID NO: 125653 - protein, 65 aa, Setaria italica
  Transcript Sequence Number=SeqID_59679
  Gene Ontology: Mol. function=catalytic activity; Cellular component =chloroplast; Biological process=metabolic process
  Homolog annotation: Hit_ID=B9S0Z5; Match level="QueryCoverage=89%, HitCoverage=14%, E-value=2e-22, Identity=87%"; Hit description =Pyruvate dehydrogenase, putative
MFSHELLMFEALREALIEEMNLDPTVCVMGEDVGHYGGSYKVTKGLAEMFGDLRVLDTPIAAPTP

SEQ ID NO: 125654 - protein, 69 aa, Setaria italica
  Transcript Sequence Number=SeqID_59680
ISQWCICLRHNQVSLHSKTNRTYVYATIKCRYIAKQIEHGVYICSISQWCIFCKIQCPVLVLVLKPNIG

SEQ ID NO: 125655 - protein, 125 aa, Setaria italica
  misc_feature (51)..(51): Xaa can be any naturally occurring amino acid
  misc_feature (114)..(114): Xaa can be any naturally occurring amino acid
  Transcript Sequence Number=SeqID_59681
  Gene Ontology: Mol. function=catalytic activity; Cellular component =chloroplast; Biological process=metabolic process
  Homolog annotation: Hit_ID=B9S0Z5; Match level="QueryCoverage=100%, HitCoverage=30%, E-value=3e-51, Identity=82%"; Hit description =Pyruvate dehydrogenase, putative
  Pfam annotation: Domain name=Transket_pyr; Domain location=1-125; Score=44.0; E_value=5.8e-10; Accession=PF02779.16; Description =Transketolase, pyrimidine binding dom
MNLDPTVCVMGEDVGHYGGSYKVTKGLAEMFGDLRVLDTPIAENSFTGMGXVGAAMKGLRPVVEGMNMGFLLLAYNQISNNCGMLHYTSGGQFKIPVVIRGPGGVGRQLGAEHXSQRLESYFQSI

SEQ ID NO: 125656 - protein, 58 aa, Setaria italica
  Transcript Sequence Number=SeqID_59682
  Homolog annotation: Hit_ID=Q155V6; Match level="QueryCoverage=67%, HitCoverage=13%, E-value=2e-11, Identity=87%"; Hit description =Myosin heavy chain 2 (Fragment)
QYESEKGSATARTPEADAAELGLHLRRLRVQAEQWRKAAETAMALLTVGKGGNGKVVE

SEQ ID NO: 125657 - protein, 60 aa, Setaria italica
  Transcript Sequence Number=SeqID_59683
PPFRDGIQKCVVCHYIRKAFYLSIVTRVAKSGRVKEAQMLHQELVECKVLKEDSQFVLSS

SEQ ID NO: 125658 - protein, 76 aa, Setaria italica
  Transcript Sequence Number=SeqID_59684
  Subcellular localization annotation: CTP_CleavageSite=66; ConfidenceScore=5.06e-01
GRVNHLLQVVTPLWSKPSPKLSLHISFHVMKHLQILLNTSFMSCHCQHFSRNTKLLRVTHIPHNTSAEMHNQSMQN

SEQ ID NO: 125659 - protein, 94 aa, Setaria italica
  Transcript Sequence Number=SeqID_59685
FFLLLVLIPPVLGDQLNLLAHPSRLNRLFAALIGMQGVFSKVLYMVHHSICYQYQKLYTRNTCFSQTIGQPVKEINAYNLHGCSYACLLSARQD

SEQ ID NO: 125660 - protein, 75 aa, Setaria italica
  misc_feature (45)..(45): Xaa can be any naturally occurring amino acid
  misc_feature (54)..(54): Xaa can be any naturally occurring amino acid
  Transcript Sequence Number=SeqID_59686
  Gene Ontology: Mol. function=nucleoside-triphosphatase activity
  Homolog annotation: Hit_ID=O81459; Match level="QueryCoverage=77%, HitCoverage=10%, E-value=3e-16, Identity=70%"; Hit description =Putative vesicle transfer ATPase
RAGSRSSFLFVAAITTTRFDSIICFGLPDQQTRMEIAAQYAKHLXKSELVQFSXATEGMSGRDIRDACQQAESTG

SEQ ID NO: 125661 - protein, 56 aa, Setaria italica
  Transcript Sequence Number=SeqID_59687
SRSACKALADDLDISRSSGTTALAALVFGRQLLVANAGDSRDISMAMPFRHRTARQ

SEQ ID NO: 125662 - protein, 51 aa, Setaria italica
  Transcript Sequence Number=SeqID_59688
APWPHQLLLLLRAQLRHEADDNNGQLVMEAKRLETAEQSDRYCRLLRVGAG

SEQ ID NO: 125663 - protein, 48 aa, Setaria italica
  Transcript Sequence Number=SeqID_59689
HSNSTLLALLCTLTFRVLVLGLLYNPTDPCTNTLTVPYSLCYVHSHLE

SEQ ID NO: 125664 - protein, 92 aa, Setaria italica
  Transcript Sequence Number=SeqID_59690
  Gene Ontology: Mol. function=catalytic activity; Biological process =guanosine tetraphosphate metabolic process
  Homolog annotation: Hit_ID=B9SAV1; Match level="QueryCoverage=83%, HitCoverage=8%, E-value=2e-23, Identity=59%"; Hit description =Guanosine-3',5'-bis(Diphosphate) 3'-pyrophosphohydrolase, putative
FPTLSKVRFFLGLDHWKSGKISGWHNTEGSSIQWLCIACVDRKGMMAEVTSALTACGITICSCVAEVNKRRGMGVVLFHFEGSYENVVCFLN

SEQ ID NO: 125665 - protein, 42 aa, Setaria italica
  Transcript Sequence Number=SeqID_59691
SATQEHMVIPQAVKADVTSAIIPVNVTKLIHEILQTLPIKDQ

SEQ ID NO: 125666 - protein, 118 aa, Setaria italica
  Transcript Sequence Number=SeqID_59692
  Gene Ontology: Mol. function=inositol or phosphatidylinositol phosphatase activity; Biological process=abscisic acid mediated signaling
  Homolog annotation: Hit_ID=Q94G04; Match level="QueryCoverage=87%, HitCoverage=29%, E-value=2e-36, Identity=74%"; Hit description =Diphosphonucleotide phosphatase 1
GSYNISFSKEGILSAIDDGKSEGGSSGRHWVLDPIDGTKGFLRGDQYAIALALLDEGKIVLGVLACPNLPLSSISNPNGSSSGNQVGALFSATIGCGARTPSFSAIELVKSCMECALS

SEQ ID NO: 125667 - protein, 95 aa, Setaria italica
  Transcript Sequence Number=SeqID_59693
  Gene Ontology: Mol. function=inositol or phosphatidylinositol phosphatase activity; Biological process=abscisic acid mediated signaling
  Homolog annotation: Hit_ID=Q2QWT4; Match level="QueryCoverage=100%, HitCoverage=26%, E-value=3e-33, Identity=77%"; Hit description =3'(2'),5'-bisphosphate nucleotidase
EGILSAIDDGKSEGGSSGRHWVLDPIDGTKGFLRGDQYAIALALLDEGKIVLGVLACPNLPLSSISNPNGSSSGNQVGALFSATIGCGAEVESLE

SEQ ID NO: 125668 - protein, 39 aa, Setaria italica
  Transcript Sequence Number=SeqID_59694
  Gene Ontology: Mol. function=inositol or phosphatidylinositol phosphatase activity
  Homolog annotation: Hit_ID=Q2QWT4; Match level="QueryCoverage=100%, HitCoverage=10%, E-value=9e-13, Identity=94%"; Hit description =3'(2'),5'-bisphosphate nucleotidase
GRFLDLDTGIIATNKQLMPSLLKAVQDAIKEKNQAASLL

SEQ ID NO: 125669 - protein, 65 aa, Setaria italica
  Transcript Sequence Number=SeqID_59695
  Gene Ontology: Mol. function=nucleic acid binding
  Homolog annotation: Hit_ID=Q0DYP5; Match level="QueryCoverage=67%, HitCoverage=10%, E-value=2e-09, Identity=63%"; Hit description=Zinc finger CCCH domain-containing protein 17
TSVLCWEDKLLSCSLDRTVKVWTLSESGNLQVRYTYAEEHVSTALLLMCYLFSLLNAADCYAQHL

SEQ ID NO: 125670 - protein, 67 aa, Setaria italica
  Transcript Sequence Number=SeqID_59696
  Subcellular localization annotation: CTP_CleavageSite=36; ConfidenceScore=5.64e-01
LTTTKRQPAGGGGLSSDPNQTSKSFGIFSSTPKPASSDMRKTDGAGTASKPGNTDSPKSFGIFSSRK

SEQ ID NO: 125671 - protein, 69 aa, Setaria italica
  Transcript Sequence Number=SeqID_59697
RPAAQGARQGSLTLARMCKNSLHPLLHGVRLPECMLCNSLLMFPFPALRFLLINLCHYRTVFLSNLKKK

SEQ ID NO: 125672 - protein, 109 aa, Setaria italica
  Transcript Sequence Number=SeqID_59698
VAKRNHPVLGYVSLPDELRRTAKLKSDARLYRDIAFLDGHLKCVDLASRSLWIRPATTSGVWSQQYKITSFKELRSTTHALISSQAKEACIANPSGTSSYANLSSACKR

SEQ ID NO: 125673 - protein, 60 aa, Setaria italica
  Transcript Sequence Number=SeqID_59699
DKLRLWRKNGCLNFVKCCWSRTTCIQFGVKKASCVARREEERFAPPCMTCTSETAQNPHI

SEQ ID NO: 125674 - protein, 112 aa, Setaria italica
  misc_feature (100)..(100): Xaa can be any naturally occurring amino acid
  Transcript Sequence Number=SeqID_59700
TRPLIRDIAFLDGHLKCVDLASRSLWIRPATTSGVWSQQYKITSFKEIEVNNPRTNLFPGQRGVYRQSFRNLLVCQPVVGLQDDDAARILYFTVKVDQTXAEAAVLGVDMES

SEQ ID NO: 125675 - protein, 52 aa, Setaria italica
  Transcript Sequence Number=SeqID_59701
MLIRACSPAQGVDASVLIDEPKKSEKYAEASRTLRGFDLIEKIKKEMESKCH

SEQ ID NO: 125676 - protein, 119 aa, Setaria italica
  Transcript Sequence Number=SeqID_59702
  Gene Ontology: Mol. function=metal ion binding
  Homolog annotation: Hit_ID=Q2HUT4; Match level="QueryCoverage=65%, HitCoverage=15%, E-value=1e-14, Identity=56%"; Hit description =Putative RING zinc finger protein-related
LSRTSLKLSILRSSLVSLVIHQSILHLTPSLFGNSSSFEILRFPGGITIIPPQTAFVPQKPDGLFNFSLNFPIDVVQDKLSELKAQMKSGLFLNEHEHLRPGYLPTGGSLHHFYTGPLL

SEQ ID NO: 125677 - protein, 63 aa, Setaria italica
  Transcript Sequence Number=SeqID_59703
QVTKLCRFAIPRAWSIESSLDLSFSFYFLFYYILDVGSQKEAPFVFLLTELRACLSQILHDVM

SEQ ID NO: 125678 - protein, 152 aa, Setaria italica
  Transcript Sequence Number=SeqID_59704
  Homolog annotation: Hit_ID=Q8LNH1; Match level="QueryCoverage=65%, HitCoverage=25%, E-value=2e-20, Identity=51%"; Hit description=CBS domain-containing protein, putative, expressed
ALRVLPRASCATRTSVSVRPGESALSAAPLIRHAVATETAVAVVTEDGHLVGEISPALLAACDETAAAAIATLSVADLMAYIDYFGSPPEHILRAVKAGLKDKGLDAMLDLIEDETLSSFSSSFLPSVFPPFRLPPKSSCPRPRNASAVPRR

SEQ ID NO: 125679 - protein, 71 aa, Setaria italica
  Transcript Sequence Number=SeqID_59705
  Homolog annotation: Hit_ID=Q8LNH1; Match level="QueryCoverage=88%, HitCoverage=17%, E-value=5e-21, Identity=77%"; Hit description=CBS domain-containing protein, putative, expressed
VRVAFSSGRPVSSSEDEEAVVCSPASSLVAVMVQALAHRVSYVWVLEEEDDCRLAGIVTFADVLRVFREQL

SEQ ID NO: 125680 - protein, 76 aa, Setaria italica
  Transcript Sequence Number=SeqID_59706
  Gene Ontology: Mol. function=ATPase activity, coupled to transmembrane movement of substances; Cellular component=integral to membrane; Biological process=transport
  Homolog annotation: Hit_ID=O23998; Match level="QueryCoverage=76%, HitCoverage=55%, E-value=2e-18, Identity=71%"; Hit description=P -glycoprotein homologue
LSYYQAHCHRNYNSRSCLKQRIAIARAIIKNPAILLLDEATSALDSESEKLVQHALDQASMGRTTLVVAHKLSTVK

SEQ ID NO: 125681 - protein, 60 aa, Setaria italica
  Transcript Sequence Number=SeqID_59707
RHQVNKSIQNVIHTDDYQVLTFPYFQLPEAAVKQSILHNLTDLIIPPNLPHQGVARVKRA

SEQ ID NO: 125682 - protein, 136 aa, Setaria italica
  Transcript Sequence Number=SeqID_59708
  Gene Ontology: Mol. function=peptidase activity
  Homolog annotation: Hit_ID=B9TA47; Match level="QueryCoverage=81%, HitCoverage=28%, E-value=3e-46, Identity=75%"; Hit description =Protein bem46, putative
FSIPLSHLRAVVLHSQYHSGLRVMYPVKHTYWFDIYKNIDKIPLVKCPVLVIHGTADEVVDCSHGRTLWELSKVKYEPLWVKGGNHCNLELYPEYIKHLKKFVTAIEKSPPVKDESLESSGPSDPSETGSEGTESS

SEQ ID NO: 125683 - protein, 149 aa, Setaria italica
  Transcript Sequence Number=SeqID_59709
  Homolog annotation: Hit_ID=B9SN73; Match level="QueryCoverage=91%, HitCoverage=29%, E-value=9e-40, Identity=58%"; Hit description=Amino acid transporter, putative
EPARLTPNIQATCTLLQLSAVGVVYLQPTNEVLEGLFSDAKQGQYAPRNVVPRLVSRTAAVAVATTVAAMVPFFGDMNSLIGAFGFLPLDFAVPAVFYNVTFKPSKRGLVFWLNTVIAVVFSALAVIASVAAVRQIALDAKTYKLFANV

SEQ ID NO: 125684 - protein, 72 aa, Setaria italica
  Transcript Sequence Number=SeqID_59710
  Gene Ontology: Mol. function=small conjugating protein ligase activity; Biological process=ubiquitin-dependent protein catabolic process
  Homolog annotation: Hit_ID=A9PC20; Match level="QueryCoverage=90%, HitCoverage=40%, E-value=2e-26, Identity=84%"; Hit description =Ubiquitin carrier protein
  Pfam annotation: Domain name=UQ_con; Domain location=1-69; Score= -39.8; E_value=0.03; Accession=PF00179.18; Description=Ubiquitin -conjugating enzyme
IIGLLFLHLSPDILYDSWSPAMTVSSVCISILSMLSSSPAKQRPADNDRYVRNCRNGRSPKETRWWFHDDTV

SEQ ID NO: 125685 - protein, 38 aa, Setaria italica
  misc_feature (1)..(1): Xaa can be any naturally occurring amino acid
  Transcript Sequence Number=SeqID_59711
XIDKMLIQTELTVIAGDHESYNISAYCSFTCLQIYCMT

SEQ ID NO: 125686 - protein, 74 aa, Setaria italica
  misc_feature (44)..(44): Xaa can be any naturally occurring amino acid
  Transcript Sequence Number=SeqID_59712
  Pfam annotation: Domain name=SYS1; Domain location=2-74; Score=-11.7; E_value=5.1e-06; Accession=PF09801.1; Description=Integral membrane protein S linking t
SMSLLVGTRVPRLTLLYFFDFATLTPRTPTGWCAIASFLLAAVXASVTWWVVNIAGLAIMALLGEYLCIRRELK

SEQ ID NO: 125687 - protein, 56 aa, Setaria italica
  Transcript Sequence Number=SeqID_59713
  Gene Ontology: Mol. function=hydrolase activity, acting on acid anhydrides, catalyzing transmembrane movement of substances; Cellular component=integral to membrane
  Homolog annotation: Hit_ID=Q6ATV4; Match level="QueryCoverage=85%, HitCoverage=4%, E-value=1e-12, Identity=70%"; Hit description =Calcium-transporting ATPase 2, plasma membrane-type
NFFPLGNLVLIDELEDFADTTPLTQHQWLVSVLFGLLGMPIAAAIKLIPIEPREEA

SEQ ID NO: 125688 - protein, 85 aa, Setaria italica
  Transcript Sequence Number=SeqID_59714
  Gene Ontology: Mol. function=hydrolase activity, acting on acid anhydrides, catalyzing transmembrane movement of substances; Cellular component=integral to membrane; Biological process=calcium ion transport
  Homolog annotation: Hit_ID=Q2QMX9; Match level="QueryCoverage=95%, HitCoverage=7%, E-value=5e-39, Identity=97%"; Hit description =Calcium-transporting ATPase 1, plasma membrane-type
YKPFQVAKESADVIILDDNFSTIVTVAKWGRSVYINIQKFVQFQLTVNVVALLVNFSSACFTGNAPLTAVQLLWVNMIMDTLGAL

SEQ ID NO: 125689 - protein, 63 aa, Setaria italica
  misc_feature (45)..(45): Xaa can be any naturally occurring amino acid
  misc_feature (53)..(53): Xaa can be any naturally occurring amino acid
  Transcript Sequence Number=SeqID_59715
  Gene Ontology: Mol. function=hydrolase activity, acting on acid anhydrides, catalyzing transmembrane movement of substances; Cellular component=integral to membrane; Biological process=calcium ion transport
  Homolog annotation: Hit_ID=Q9FVE8; Match level="QueryCoverage=63%, HitCoverage=3%, E-value=6e-10, Identity=75%"; Hit description=Plasma membrane Ca2+-ATPase
MFLCNLLSTLGQCFYSHAIARECGILTEDGLAIEGAEFREKNPKXLLELIPKXQVYHLSNVYL

SEQ ID NO: 125690 - protein, 64 aa, Setaria italica
  Transcript Sequence Number=SeqID_59716
  Gene Ontology: Mol. function=carbon-nitrogen ligase activity, with glutamine as amido-N-donor
  Homolog annotation: Hit_ID=B9RX50; Match level="QueryCoverage=96%, HitCoverage=10%, E-value=6e-21, Identity=70%"; Hit description =Glutamyl-tRNA(Gln) amidotransferase subunit A, putative
MAGATTFFDQTHTVEKDAVCVARLRKCGVIFIGKANMHELGLGVTGNNPNYGTSLRNPHSVDRY

SEQ ID NO: 125691 - protein, 44 aa, Setaria italica
  Transcript Sequence Number=SeqID_59717
FSLHKFSTCLSETMPMVYPTMLGSSIVQKSSLYMPSGNYDQPPV

SEQ ID NO: 125692 - protein, 75 aa, Setaria italica
  misc_feature (54)..(54): Xaa can be any naturally occurring amino acid
  Transcript Sequence Number=SeqID_59718
  Gene Ontology: Mol. function=carbon-nitrogen ligase activity, with glutamine as amido-N-donor
  Homolog annotation: Hit_ID=B9RX50; Match level="QueryCoverage=94%, HitCoverage=11%, E-value=4e-24, Identity=67%"; Hit description =Glutamyl-tRNA(Gln) amidotransferase subunit A, putative
RIGGTYVAIKDDIDCFPYPTKGATTFFDQTHTVEKDAVCVARLRKCGVIFIGKXANMHELGLGVTGNNPNYGYDQ

SEQ ID NO: 125693 - protein, 79 aa, Setaria italica
  misc_feature (58)..(58): Xaa can be any naturally occurring amino acid
  Transcript Sequence Number=SeqID_59719
HLCFVVTSCFGLLYCAKCALNVPFHGGVYRRRIMHYHMEAFKKVDVIATPTTGITAPXIPPSALKSGESDYVVSAYLMR

SEQ ID NO: 125694 - protein, 102 aa, Setaria italica
  misc_feature (22)..(22): Xaa can be any naturally occurring amino acid
  Transcript Sequence Number=SeqID_59720
  Gene Ontology: Mol. function=carbon-nitrogen ligase activity, with glutamine as amido-N-donor
  Homolog annotation: Hit_ID=B9RX50; Match level="QueryCoverage=99%, HitCoverage=16%, E-value=2e-25, Identity=54%"; Hit description =Glutamyl-tRNA(Gln) amidotransferase subunit A, putative
SGTVAVASPLASSVEDVMLVYXAIAGSRPMDKLTLRPSPLCVPNLLSPDNSNIMGSVKIGKYTEWFHDVSDREISSTCEDALNLLCSTFGCQVSPFVSQQLR

SEQ ID NO: 125695 - protein, 87 aa, Setaria italica
  misc_feature (52)..(52): Xaa can be any naturally occurring amino acid
  Transcript Sequence Number=SeqID_59721
  Gene Ontology: Mol. function=ATP binding; Cellular component =chromosome; Biological process=chromosome organization and biogenesis
  Homolog annotation: Hit_ID=Q8GU52; Match level="QueryCoverage=98%, HitCoverage=7%, E-value=4e-28, Identity=75%"; Hit description=SMC6 protein
LGGERFFFQRFCFTLALHGNDRITFLGPWMSFDVFMDAVSRKISLDTLVDFXAIAQGSQWIFITPHDISMVKAGDRIKKQQMAAPRG

SEQ ID NO: 125696 - protein, 87 aa, Setaria italica
  Transcript Sequence Number=SeqID_59722
RPWRAAPLLHFAVRRRSRWHPLLRCLGLVDDAQRLFSAADASGGGLVTWNTVSLLVQSGRFDEVVEVLYDMTWNTMICIQSYLKNSY

SEQ ID NO: 125697 - protein, 85 aa, Setaria italica
  Transcript Sequence Number=SeqID_59723
REAHAFALKNGFLDGDERFAFNALLSMYARLGLVDDAQRLFGSVGAADAPGGGLVTWNTMVSLLVQSGRFDEAVEVLYDMVARGV

SEQ ID NO: 125698 - protein, 65 aa, Setaria italica
  Transcript Sequence Number=SeqID_59724
  Homolog annotation: Hit_ID=B6SU58; Match level="QueryCoverage=86%, HitCoverage=20%, E-value=6e-22, Identity=85%"; Hit description=COV1
SPLFSPEMQAFHKVVRSWASKKFMTGCVILFPIAITFYITWWFIHFVDGFFSPIYAQLGINIFGK

SEQ ID NO: 125699 - protein, 33 aa, Setaria italica
  Transcript Sequence Number=SeqID_59725
WYSMLPDCRHISPQITGRIHSQRYLKPCPWKCH

SEQ ID NO: 125700 - protein, 38 aa, Setaria italica
  Transcript Sequence Number=SeqID_59726
ITAGESASPGAHNRETNSAGSNDTAMDMVSDSAANEYY

SEQ ID NO: 125701 - protein, 41 aa, Setaria italica
  Transcript Sequence Number=SeqID_59727
MNTLSQSFQILGVHSLLWLMDEFDHQQIIKLACMHSSYDRS

SEQ ID NO: 125702 - protein, 124 aa, Setaria italica
  Transcript Sequence Number=SeqID_59728
  Gene Ontology: Mol. function=mRNA (2'-O-methyladenosine-N6-) -methyltransferase activity; Cellular component=nucleus; Biological process=nucleobase, nucleoside, nucleotide and nucleic acid metabolic process
  Homolog annotation: Hit_ID=B6SVX1; Match level="QueryCoverage=100%, HitCoverage=17%, E-value=6e-52, Identity=88%"; Hit description=N6 -adenosine-methyltransferase MT-A70-like protein
  Pfam annotation: Domain name=MT-A70; Domain location=1-68; Score= -35.9; E_value=0.0064; Accession=PF05063.6; Description=MT-A70
YLVRKLKGNPLVNRNIDTDVIVAEVRETSRKPDEMYAMLERISPRTRKLELFARMHNTQAGWLSLGNQLNGVRLVDEGLRARYKAAYPDVDVQPPSPPRTSVPADVEQSSSQKAAPPDGGERPA

SEQ ID NO: 125703 - protein, 100 aa, Setaria italica
  Transcript Sequence Number=SeqID_59729
  Gene Ontology: Mol. function=mRNA (2'-O-methyladenosine-N6-) -methyltransferase activity; Cellular component=nucleus; Biological process=nucleobase, nucleoside, nucleotide and nucleic acid metabolic process
  Homolog annotation: Hit_ID=B6SVX1; Match level="QueryCoverage=100%, HitCoverage=14%, E-value=7e-41, Identity=92%"; Hit description=N6 -adenosine-methyltransferase MT-A70-like protein
VRETSRKPDEMYAMLERISPRTRKLELFARMHNTQAGWLSLGNQLNGVRLVDEGLRARYKAAYPDVDVQPPSPPRTSVPADVEQSSSQKAAPPDGGERPA

SEQ ID NO: 125704 - protein, 92 aa, Setaria italica
  misc_feature (37)..(37): Xaa can be any naturally occurring amino acid
  misc_feature (55)..(55): Xaa can be any naturally occurring amino acid
  Transcript Sequence Number=SeqID_59730
  Gene Ontology: Mol. function=nucleic acid binding; Cellular component= cytoplasm; Biological process=RNA processing
  Homolog annotation: Hit_ID=B6SLI2; Match level="QueryCoverage=80%, HitCoverage=37%, E-value=9e-29, Identity=82%"; Hit description=RNA -binding protein 8A
  Pfam annotation: Domain name=RRM_1; Domain location=3-60; Score=21.7; E_value=0.0019; Accession=PF00076.14; Description=RNA recognition motif. (a.k.a. RRM, RBD, o
VLTFHNAFREFGQVRNLHLNLDRRTGFVKGYALIEYXNFEEAQAAIKELDGTELXAQIISVDWAFSSGPAKRRNTQKRPPPRYRSRSPRRTH

SEQ ID NO: 125705 - protein, 53 aa, Setaria italica
  Transcript Sequence Number=SeqID_59731
KMSQPSAIGRLCREREALPVAQKSQPSAIGRLCREREALPLDTRNSFWELSYV

SEQ ID NO: 125706 - protein, 49 aa, Setaria italica
  Transcript Sequence Number=SeqID_59732
TKGSLVANRTVYHQISFIYIDGIYHSTITSNPCLTQYRKFKAYYMIGHS

SEQ ID NO: 125707 - protein, 27 aa, Setaria italica
  Transcript Sequence Number=SeqID_59733
GFVVMGFVGFFVKLIFIPINNIIVGSG

SEQ ID NO: 125708 - protein, 49 aa, Setaria italica
  misc_feature (40)..(40): Xaa can be any naturally occurring amino acid
  misc_feature (44)..(44): Xaa can be any naturally occurring amino acid
  Transcript Sequence Number=SeqID_59734
  Gene Ontology: Mol. function=transcription factor activity; Cellular component=nucleus; Biological process=regulation of transcription, DNA-dependent
  Homolog annotation: Hit_ID=Q84P66; Match level="QueryCoverage=91%, HitCoverage=4%, E-value=5e-17, Identity=88%"; Hit description=TF -like protein (Fragment)
MSSCELVWLNDKNAIAVFNDPARAATALRRLDYGSAYQGXAMFXPSSAQ

SEQ ID NO: 125709 - protein, 59 aa, Setaria italica
  Transcript Sequence Number=SeqID_59735
LVPTLDLQVLIVTGVYSTTRHIQYTDSSLFSAMQLLPSTRCLPACLHRDSCRAGRRAAV

SEQ ID NO: 125710 - protein, 61 aa, Setaria italica
  Transcript Sequence Number=SeqID_59736
  Gene Ontology: Mol. function=protein kinase activity; Cellular component=integral to membrane; Biological process=protein amino acid phosphorylation
  Homolog annotation: Hit_ID=Q94HB9; Match level="QueryCoverage=93%, HitCoverage=7%, E-value=1e-16, Identity=73%"; Hit description =Putative leucine-rich repeat transmembrane protein kinase 1
MDQIHISRTNSSCCFKMKHLQASDQGSGYGAPEVDMTGQYTLKSDVYSFGVVMLELLTGRK

SEQ ID NO: 125711 - protein, 41 aa, Setaria italica
  Transcript Sequence Number=SeqID_59737
  Homolog annotation: Hit_ID=B9RJH0; Match level="QueryCoverage=97%, HitCoverage=11%, E-value=5e-10, Identity=65%"; Hit description =Transporter, putative
KPDEIRWDDISDEAVTGKIYRADYFDKSGRSILVMRPGCQV

SEQ ID NO: 125712 - protein, 102 aa, Setaria italica
  Transcript Sequence Number=SeqID_59738
  Homolog annotation: Hit_ID=A6N0K3; Match level="QueryCoverage=85%, HitCoverage=80%, E-value=7e-09, Identity=55%"; Hit description=Lim domain containing protein (Fragment)
ESEAIAEPSEDNAAIGKPLEEDKANDEPSDDSVALGKLQEEGVDSVKPSEEDVAPEKSAADKPSEEVVDEKPSHDDAIVEPSSQDDTATEKPSATTEQLQEN

SEQ ID NO: 125713 - protein, 58 aa, Setaria italica
  Transcript Sequence Number=SeqID_59739
MAWHSPHFPPMASREKHCFLMAQHLSLPPPVASEKSSEEDKADAEPSEDNASLEKQLE

SEQ ID NO: 125714 - protein, 80 aa, Setaria italica
  misc_feature (67)..(67): Xaa can be any naturally occurring amino acid
  Transcript Sequence Number=SeqID_59740
  Homolog annotation: Hit_ID=Q9LN06; Match level="QueryCoverage=76%, HitCoverage=10%, E-value=6e-11, Identity=54%"; Hit description =T6D22.10
GWQTNEALNSTDDEQGKGNMTVGKLMEAYETCIAKLRKSQSNRRKISLKKVEEANFSKEARKLVPEXIVKQIISLNSLDM

SEQ ID NO: 125715 - protein, 45 aa, Setaria italica
  Transcript Sequence Number=SeqID_59741
DFTEDHEESARLFAHMVGAQVLSQSGTLNFDLKEDLPSENGGWCS

SEQ ID NO: 125716 - protein, 80 aa, Setaria italica
  Transcript Sequence Number=SeqID_59742
  Gene Ontology: Mol. function=cyclin-dependent protein kinase activity; Biological process=protein amino acid phosphorylation
  Homolog annotation: Hit_ID=Q84SN3; Match level="QueryCoverage=96%, HitCoverage=17%, E-value=3e-23, Identity=70%"; Hit description =Cyclin-dependent kinase F-3
PVHDASHTKANEPKAHPRLELNLWDFSTEPDDCFLDLTLSLKPSFPGTDLANHVPQRTEEEILLYSGFENTPVKPGMSVF

SEQ ID NO: 125717 - protein, 123 aa, Setaria italica
  misc_feature (30)..(30): Xaa can be any naturally occurring amino acid
  Transcript Sequence Number=SeqID_59743
  Gene Ontology: Mol. function=cyclin-dependent protein kinase activity; Biological process=protein amino acid phosphorylation
  Homolog annotation: Hit_ID=Q84SN3; Match level="QueryCoverage=92%, HitCoverage=27%, E-value=1e-40, Identity=71%"; Hit description =Cyclin-dependent kinase F-3
EPKAHPRLELNLWDFSTEPDDCFLDLTLSXKPSFPGTDLANHVPQRTEEEILLYSGFENTPVKPGFWPLVPSDRPIGDVPAMPSWQQAYMVDSRASLPGFSGTPFGLSLQPSLIGSNLPTISS

SEQ ID NO: 125718 - protein, 49 aa, Setaria italica
  Transcript Sequence Number=SeqID_59744
WSQPTNINDDDVPLKLAAAALSMMVVHIMMLNHSCCDTLEWNFLLLMQP

SEQ ID NO: 125719 - protein, 81 aa, Setaria italica
  Transcript Sequence Number=SeqID_59745
GRTGKPPLLASELYVRLENGVANLCGIKFQDNVPSRKFRLGVMEADDRISETILEGISEPFTIKSGRGFCKFTQFHPNTKI

SEQ ID NO: 125720 - protein, 86 aa, Setaria italica
  misc_feature (75)..(75): Xaa can be any naturally occurring amino acid
  Transcript Sequence Number=SeqID_59746
LYVRLENGVANLCGIKFQDNVPSRKFRLGVMEADDRISETILEGISEPFTIKSGRGFSYRKDPHPSLSDPIYKLXTKFKENGDRHR

SEQ ID NO: 125721 - protein, 95 aa, Setaria italica
  Transcript Sequence Number=SeqID_59747
  Gene Ontology: Mol. function=GTPase activity
  Homolog annotation: Hit_ID=UPI000034EE3F; Match level="QueryCoverage =100%, HitCoverage=13%, E-value=3e-38, Identity=71%"; Hit description= guanylate-binding family protein
VYRNFLLANEYQSSKLCEARFSECEDKMDHLQVLKLPSMAKFNAGFTHCNRSFVRECVGPAKESYERRMSKMLVKSRALFIKEYNNKLFNWLVTF

SEQ ID NO: 125722 - protein, 60 aa, Setaria italica
  Transcript Sequence Number=SeqID_59748
FSNSHHQVHAISNLEPQVLFAYPPEKPLPLKYKDTLSFCLPGGVQVCHIQAACNLVLIPF

SEQ ID NO: 125723 - protein, 104 aa, Setaria italica
  misc_feature (10)..(10): Xaa can be any naturally occurring amino acid
  Transcript Sequence Number=SeqID_59749
  Homolog annotation: Hit_ID=UPI000034F28B; Match level="QueryCoverage =58%, HitCoverage=7%, E-value=3e-22, Identity=81%"; Hit description =DENN (AEX-3) domain-containing protein
MQVEAAKGFXAVLRDYLDTLCSNLRSHTITNVQSNNDKVSLLLRESFIGSFPSRDRPFMKVLNCILSFAFNIISVSGLHRSKSHASFASFVDFIRSSDTETSDI

SEQ ID NO: 125724 - protein, 79 aa, Setaria italica
  Transcript Sequence Number=SeqID_59750
  Homolog annotation: Hit_ID=B9RRB9; Match level="QueryCoverage=96%, HitCoverage=10%, E-value=5e-27, Identity=68%"; Hit description =Suppression of tumorigenicity, putative
LSYSASVLSIIPLIRPYQWQSLLIPVLPIDMMDFLDAPVPYIVGVQNKASDVLNRLANAVVIDANRNQIKSSSVPQLPQ

SEQ ID NO: 125725 - protein, 64 aa, Setaria italica
  Transcript Sequence Number=SeqID_59751
LLLSRELYWFFSRSRDRPFMKLFVGHTIVLSTYRPSSLLLSKGLSVCYRLESLPHIAKPLGAEL

SEQ ID NO: 125726 - protein, 56 aa, Setaria italica
  Transcript Sequence Number=SeqID_59752
  Gene Ontology: Mol. function=iron ion binding; Cellular component =integral to membrane; Biological process=transport
  Homolog annotation: Hit_ID=Q6H7J6; Match level="QueryCoverage=94%, HitCoverage=7%, E-value=1e-22, Identity=98%"; Hit description =Probable metal-nicotianamine transporter YSL14
KADAFGPAVASGLICGDGIWTLPQSILALAKVKPPICMKFLSRATNAKVDSFLGLS

SEQ ID NO: 125727 - protein, 84 aa, Setaria italica
  Transcript Sequence Number=SeqID_59753
RCPDTVSCADVLALMARDAVWLVSTRHTVPSLQCVYSSPSRNSQHKFADSFTYHAQSKGPFWAVPLGRRDGRVSISNETDQLPP

SEQ ID NO: 125728 - protein, 59 aa, Setaria italica
  Transcript Sequence Number=SeqID_59754
YHILCLHDYLLSFSFLSLQKFVLIWVNRNLVTQHWKANNFTTAVSSILLPVQHFVLTNE

SEQ ID NO: 125729 - protein, 49 aa, Setaria italica
  Transcript Sequence Number=SeqID_59755
  Pfam annotation: Domain name=LRR_1; Domain location=12-34; Score =17.6; E_value=0.051; Accession=PF00560.25; Description=Leucine Rich Repeat
GSIPDTLGRLPKLEIMDLSQNHLSGSIPSSFINLQLRHATGDRQGTQGI

SEQ ID NO: 125730 - protein, 53 aa, Setaria italica
  Transcript Sequence Number=SeqID_59756
  Pfam annotation: Domain name=LRR_1; Domain location=23-45; Score =17.7; E_value=0.05; Accession=PF00560.25; Description=Leucine Rich Repeat
VCRSLSSSGLTGTLSPSIAKITTLQELILHGNSITGVIPQEFGNLSSLKTLDL

SEQ ID NO: 125731 - protein, 52 aa, Setaria italica
  Transcript Sequence Number=SeqID_59757
RLRDIKLNEPALDWSTRKGKLRASLLVSYRTLSTLVCFYWTAMLINSTSLRK

SEQ ID NO: 125732 - protein, 57 aa, Setaria italica
  Transcript Sequence Number=SeqID_59758
  Gene Ontology: Mol. function=protein serine/threonine kinase activity; Cellular component=plasma membrane; Biological process =protein amino acid phosphorylation
  Homolog annotation: Hit_ID=B6SHH9; Match level="QueryCoverage=94%, HitCoverage=8%, E-value=1e-24, Identity=96%"; Hit description =BRASSINOSTEROID INSENSITIVE 1-associated receptor kinase 1
LVYPFMENLSVASRLRDIKLNEPALDWSTRMQIALGAARGLEYLHEHCNPKIIHHLR

SEQ ID NO: 125733 - protein, 71 aa, Setaria italica
  misc_feature (12)..(12): Xaa can be any naturally occurring amino acid
  Transcript Sequence Number=SeqID_59759
MLPTTASKGRGXARSAPPLFGPYLRRIVKWQQMDIEYTFWQMVHLCTSPKVCMHPALSPVLNCLYFLVGHT

SEQ ID NO: 125734 - protein, 64 aa, Setaria italica
  Transcript Sequence Number=SeqID_59760
  Pfam annotation: Domain name=UNC-50; Domain location=1-64; Score= -115.5; E_value=0.0015; Accession=PF05216.5; Description=UNC-50 family
QRVEWLYAFDVHCNSFFPAFVILYGYDVLPFLDRTTFFLYPIGLVIILSPLMILIGFNPTRLLS

SEQ ID NO: 125735 - protein, 64 aa, Setaria italica
  misc_feature (58)..(58): Xaa can be any naturally occurring amino acid
  Transcript Sequence Number=SeqID_59761
  Gene Ontology: Cellular component=integral to membrane
  Homolog annotation: Hit_ID=Q54DD7; Match level="QueryCoverage=71%, HitCoverage=17%, E-value=9e-09, Identity=58%"; Hit description =Protein unc-50 homolog
LRWRSITLIVHTIFFFVRLYAFDVHCNSFFPAFVILYVLQYFLSPLLVAHGFFPALLXNLLFVV

SEQ ID NO: 125736 - protein, 57 aa, Setaria italica
  Transcript Sequence Number=SeqID_59762
SDNVILHFGSSESLTNFFSCPALQLLAKDVVAVLGPQSSAVAHVICHAVNELHRPCL

SEQ ID NO: 125737 - protein, 71 aa, Setaria italica
  Transcript Sequence Number=SeqID_59763
  Gene Ontology: Mol. function=protein binding
  Homolog annotation: Hit_ID=Q10GD4; Match level="QueryCoverage=76%, HitCoverage=9%, E-value=1e-21, Identity=87%"; Hit description =Leucine Rich Repeat family protein, expressed
IDALYVNCPEFNDLNLNSCTNLHPERLVLQCPNLKNVHAVGCQDMLIGAIRNQVNQVHPLFFNNWLSAEHT

SEQ ID NO: 125738 - protein, 60 aa, Setaria italica
  Transcript Sequence Number=SeqID_59764
CHVKFPGTEPMRSINVFFYGEQNGCFQCVERIKLQHQYRLHGTPQLHCTETKAKIMVSKL

SEQ ID NO: 125739 - protein, 93 aa, Setaria italica
  Transcript Sequence Number=SeqID_59765
  Gene Ontology: Mol. function=protein binding
  Homolog annotation: Hit_ID=Q10GD4; Match level="QueryCoverage=81%, HitCoverage=12%, E-value=6e-26, Identity=75%"; Hit description =Leucine Rich Repeat family protein, expressed
KFRKKTTSLLGCSAIDALYVNCPELNDLNLNSCTNLHPERLVLQCPNLKNVHAVGCQDMLIGAIRNQVNQTLITCKPTKPKRSKLYELESSME

SEQ ID NO: 125740 - protein, 73 aa, Setaria italica
  Transcript Sequence Number=SeqID_59766
NRWSLKKGQCFSLSGWIFVASLKKPTQGCFPGYHCSGASRNLCWTAKTYKHTFMEDLQGQLGANPNGPALKRW

SEQ ID NO: 125741 - protein, 119 aa, Setaria italica
  Transcript Sequence Number=SeqID_59767
  Subcellular localization annotation: CTP_CleavageSite=81; ConfidenceScore=5.42e-01
MSPGVTSSRQSAPGSATELMANFLQSPPSTTPVPMAAQQASGLIPGLHHMPGGPPNGAAGIRQSGGHLAVMNQAAPEPSPEAMLLFQRRWRTHPHSTTKLSSPNSGIGIKPTSRFFVRY

SEQ ID NO: 125742 - protein, 63 aa, Setaria italica
  Transcript Sequence Number=SeqID_59768
  Subcellular localization annotation: CTP_CleavageSite=31; ConfidenceScore=5.44e-01
LHSQSQQITLKAKLNFRGNQASSISKLKPHRSMGEGCSSTLPRTLQGKPKRKNKITNLNFNQL

SEQ ID NO: 125743 - protein, 80 aa, Setaria italica
  Transcript Sequence Number=SeqID_59769
  Gene Ontology: Mol. function=nucleoside diphosphate kinase activity; Cellular component=chloroplast; Biological process=nucleotide metabolic process
  Homolog annotation: Hit_ID=Q07661; Match level="QueryCoverage=100%, HitCoverage=46%, E-value=3e-29, Identity=82%"; Hit description =Nucleoside diphosphate kinase 1
  Pfam annotation: Domain name=NDK; Domain location=1-69; Score=17.8; E_ value=4.7e-09; Accession=PF00334.11; Description=Nucleoside diphosphate kinase
KDVVLTGRRIIGATRPWEAAPGTIRGDYANFHGIVTTDGAVEVGRNVIHGSDSVENGKKEIALWFPEGLAEWRSNLHPWI

SEQ ID NO: 125744 - protein, 64 aa, Setaria italica
  Transcript Sequence Number=SeqID_59770
SHLILTVSMQGWWTHIIGEPYLFRKELRCKDHSHIRLAALFLICLNFNHSLLHKYWCRNLFKCF

SEQ ID NO: 125745 - protein, 55 aa, Setaria italica
  Transcript Sequence Number=SeqID_59771
  Gene Ontology: Cellular component=cytoskeleton; Biological process =phagocytosis
  Homolog annotation: Hit_ID=Q9SS63; Match level="QueryCoverage=76%, HitCoverage=23%, E-value=8e-10, Identity=71%"; Hit description =T12J13.11 protein
ILVQKSFQMLLNKVQGQRSDWEYPFAVAGINTSFMLIQMLDLQSSNIPFTNPLNT

SEQ ID NO: 125746 - protein, 140 aa, Setaria italica
  misc_feature (87)..(87): Xaa can be any naturally occurring amino acid
  Transcript Sequence Number=SeqID_59772
  Gene Ontology: Mol. function=ATPase activity, coupled to transmembrane movement of substances; Cellular component=integral to membrane; Biological process=transport
  Homolog annotation: Hit_ID=Q7FMW2; Match level="QueryCoverage=100%, HitCoverage=10%, E-value=3e-64, Identity=81%"; Hit description=MDR -like ABC transporter
EKQSITTYNKFIRKAYESALQEGAVQGLGLGSIMTVLFCSYGLAVWYGSRLIVERGYNGGMIISVIMAVMMGAMSLGQATPSVTAFXAEGQGAAYRMFKTIERKPDIDIYDTTGIILEDIKGDVELKDVYFSYPTRSEHL

SEQ ID NO: 125747 - protein, 113 aa, Setaria italica
  Transcript Sequence Number=SeqID_59773
  Gene Ontology: Mol. function=RNA-directed DNA polymerase activity; Cellular component=chromatin; Biological process=RNA-dependent DNA replication
  Homolog annotation: Hit_ID=Q8L7J3; Match level="QueryCoverage=100%, HitCoverage=8%, E-value=1e-48, Identity=71%"; Hit description=Gag -pol polyprotein
KSFGHVQRDCPCKRVLVVKEDGSEKQPEEEIGAKDADHYESLIVQLVLSAQIEKAEQNQHHTLFQTKCVIKERSCRLIIDGGSCNNLASSDMVEKLALTTKPQPHPYHIRWLN

SEQ ID NO: 125748 - protein, 91 aa, Setaria italica
  Transcript Sequence Number=SeqID_59774
  Subcellular localization annotation: CTP_CleavageSite=28; ConfidenceScore=5.18e-01
RRFRRWIGRSRTTPTRPSRTRSLLPLLSQSTPSAPLLIFSAGQTGGGWVGIHELRSSATGCSIGWRGVDGDARVRLGGGALLEIIGAAYCS

SEQ ID NO: 125749 - protein, 65 aa, Setaria italica
  Transcript Sequence Number=SeqID_59775
  Gene Ontology: Mol. function=binding; Cellular component =intracellular; Biological process=RNA processing
  Homolog annotation: Hit_ID=O64496; Match level="QueryCoverage=98%, HitCoverage=4%, E-value=7e-15, Identity=56%"; Hit description =F20D22.14 protein
QYMREWGPTITYNSRSEIDTVLSFLPFFLRFTAEAIFNSLPAELYKEEGPTGPKEKNNWEGDERG

SEQ ID NO: 125750 - protein, 83 aa, Setaria italica
  Transcript Sequence Number=SeqID_59776
  Gene Ontology: Mol. function=binding; Cellular component =intracellular; Biological process=RNA processing
  Homolog annotation: Hit_ID=O64496; Match level="QueryCoverage=97%, HitCoverage=6%, E-value=2e-23, Identity=53%"; Hit description =F20D22.14 protein
KVGNLKSAELYVHVKPAHGGTFTDIAMWVFCPFNGPATIKVGIASFALQKVGRHIGDWEHFTLRVSHFGPHRFLLQHQASQTP

SEQ ID NO: 125751 - protein, 65 aa, Setaria italica
  Transcript Sequence Number=SeqID_59777
KYVKLKCPIIAQQSFIKYTFICTLKMYLMKDCCAMIGQQSFIKYIFKVQIKVEGLVFVAFIIYPS

SEQ ID NO: 125752 - protein, 50 aa, Setaria italica
  Transcript Sequence Number=SeqID_59778
REEQLGRRREGLVFVAFIIYPSYLYLYLKDVFDERLLCYHSTAIFHQIHL

SEQ ID NO: 125753 - protein, 50 aa, Setaria italica
  Transcript Sequence Number=SeqID_59779
  Gene Ontology: Mol. function=ubiquitin-protein ligase activity; Cellular component=ubiquitin ligase complex; Biological process =ubiquitin-dependent protein catabolic process
  Homolog annotation: Hit_ID=B9T3S8; Match level="QueryCoverage=70%, HitCoverage=3%, E-value=1e-11, Identity=82%"; Hit description =Ubiquitin-protein ligase, putative
VLDDFLSFIIMFMGSTSYIKNPYLRAKMVEVLNCWYCPTKVSWSLLVFFT

SEQ ID NO: 125754 - protein, 46 aa, Setaria italica
  Transcript Sequence Number=SeqID_59780
  Gene Ontology: Mol. function=serine-type endopeptidase activity; Cellular component=cell wall; Biological process=negative regulation of catalytic activity
  Homolog annotation: Hit_ID=B9SV70; Match level="QueryCoverage=97%, HitCoverage=8%, E-value=9e-15, Identity=84%"; Hit description =Peptidase, putative
QDLASPADSDGHGTHTASIAAGNHGIPVVVAGHQFGNASGMAPRAQ

SEQ ID NO: 125755 - protein, 81 aa, Setaria italica
  Transcript Sequence Number=SeqID_59781
IGSTIRDKIIPHAVSWFTGEAAQDDDFEGLIDGDEDDDEDDEDDEDEEDEESEDDYDAKKTQGAAGGEGQQGERPAECKLV

SEQ ID NO: 125756 - protein, 88 aa, Setaria italica
  Transcript Sequence Number=SeqID_59782
  Gene Ontology: Cellular component=nucleus; Biological process =nucleosome assembly
  Homolog annotation: Hit_ID=Q8L8G5; Match level="QueryCoverage=70%, HitCoverage=16%, E-value=3e-24, Identity=85%"; Hit description =Nucleosome/chromatin assembly factor group A
  Pfam annotation: Domain name=NAP; Domain location=1-62; Score=-127.3; E_value=0.06; Accession=PF00956.10; Description=Nucleosome assembly protein (NAP)
EDCESFFNFFSPPQVPDDDEEIDEDTAEQLQNQMEQDYDIGSTIRDKIIPHAVSWFTGEAAQDDDFEGLIDGDEDDDEDDEDDEDEEE

SEQ ID NO: 125757 - protein, 37 aa, Setaria italica
  misc_feature (32)..(32): Xaa can be any naturally occurring amino acid
  Transcript Sequence Number=SeqID_59783
MDEEDEESEDDYDAKKTQGAAGGEGQQGERPXECKQQ

SEQ ID NO: 125758 - protein, 60 aa, Setaria italica
  misc_feature (25)..(25): Xaa can be any naturally occurring amino acid
  Transcript Sequence Number=SeqID_59784
ARPVLVPCKQVENELAGKNSVNEFXKDSESSNETKDSSVIVDKPNTALVDIAVKDSPGQM

SEQ ID NO: 125759 - protein, 84 aa, Setaria italica
  Transcript Sequence Number=SeqID_59785
LPGNCISRLILQSHNHINGCNFFPFVVIVDKPNTALVDIAVKDSPEERQLLNVQVTDVVKESSGQTRNVDVRMTDEIKITSGTI

SEQ ID NO: 125760 - protein, 71 aa, Setaria italica
  Transcript Sequence Number=SeqID_59786
  Gene Ontology: Mol. function=oxidoreductase activity, acting on the CH-OH group of donors, NAD or NADP as acceptor; Cellular component =glycerol-3-phosphate dehydrogenase complex; Biological process =glycerol-3-phosphate catabolic process
  Homolog annotation: Hit_ID=B6TIZ1; Match level="QueryCoverage=85%, HitCoverage=13%, E-value=2e-29, Identity=100%"; Hit description =Glycerol-3-phosphate dehydrogenase
CSINFLFCYLAGMVAALTNESATSKSVYFALCTSEMIYITHLLEEEPEKLAGPLLADTYVTLLKGRNAWYG

SEQ ID NO: 125761 - protein, 51 aa, Setaria italica
  Transcript Sequence Number=SeqID_59787
NNNNDLSDCVCGCLGEVGFIGGQVNGKRLEWFWFLAGSRNQNSTLFLSSPI

SEQ ID NO: 125762 - protein, 94 aa, Setaria italica
  Transcript Sequence Number=SeqID_59788
MMKETEAVKDNSVTATDGICTASILKNSSHRDGAIYKGNWEECYLIDIADRKESKGSKYLSCSYSLFLGHLQTMSSIVLLLLGFVIIGSFGYLL

SEQ ID NO: 125763 - protein, 83 aa, Setaria italica
  Transcript Sequence Number=SeqID_59789
  Subcellular localization annotation: CTP_CleavageSite=52; ConfidenceScore=5.20e-01
DLHACQTSPSFSFRSFPSWLPLSKNQEKKYRYPCVFCVELLVFPLMNGNGVGASSRKKNRIKWVTEIIPKLKLICKSSFQLSF

SEQ ID NO: 125764 - protein, 139 aa, Setaria italica
  misc_feature (80)..(80): Xaa can be any naturally occurring amino acid
  misc_feature (82)..(82): Xaa can be any naturally occurring amino acid
  misc_feature (124)..(124): Xaa can be any naturally occurring amino acid
  Transcript Sequence Number=SeqID_59790
  Gene Ontology: Mol. function=nucleic acid binding; Cellular component= intracellular; Biological process=mRNA processing
  Homolog annotation: Hit_ID=B9SDF9; Match level="QueryCoverage=85%, HitCoverage=13%, E-value=2e-32, Identity=55%"; Hit description =Tuftelin interacting protein, putative
  Pfam annotation: Domain name=TFP11; Domain location=4-139; Score =55.0; E_value=9e-16; Accession=PF08697.3; Description=Tuftelin interacting protein 11
LFYLVINFYWVGLRVTGNLIVFNFLELWDNKKLLPPVLLQSILEHVIMPKLSAAVDSWDPRRESVPIHVWVHPWLPMLRXRXETLCHSIRYKLSTVLHVWQAHDASAYAVLSPWKDVFDFGQLXDLIVRYIIPKLRLAL

SEQ ID NO: 125765 - protein, 57 aa, Setaria italica
  misc_feature (25)..(25): Xaa can be any naturally occurring amino acid
  Transcript Sequence Number=SeqID_59791
  Gene Ontology: Mol. function=pseudouridine synthase activity; Biological process=tRNA pseudouridine synthesis
  Homolog annotation: Hit_ID=B9S669; Match level="QueryCoverage=94%, HitCoverage=11%, E-value=4e-23, Identity=85%"; Hit description=tRNA -pseudouridine synthase, putative
LVTLDPMATGLLIVCVGKATKIVDXYSGVFRLGEATSTWDADSPVIQREPWEHIKDG

SEQ ID NO: 125766 - protein, 63 aa, Setaria italica
  Transcript Sequence Number=SeqID_59792
ASETGSRPNIQTTHINGVFYLETITEITTTQKGKNARPKSGLVVVQHLLLDCRSCIIWRGRIH

SEQ ID NO: 125767 - protein, 108 aa, Setaria italica
  Transcript Sequence Number=SeqID_59793
PPLGPRAGNEALCERTPGFFPLAAAAAAVATTPKQAKAAVANGSEAASGRAAEKKANSARTPVVARRAMPVKSGSVDAAAPNDATPAVQESHENTAKPLKQVQPEKTR

SEQ ID NO: 125768 - protein, 88 aa, Setaria italica
  Transcript Sequence Number=SeqID_59794
  Subcellular localization annotation: CTP_CleavageSite=76; ConfidenceScore=5.37e-01
PIPCVPCLSPVACLRNSARVNEVAENNKPRAPARKPVQRSVTKTTSQVSGTAKAEPRPMVTKPKTSNSKSKVSRAKAAQVQDNPVEVP

SEQ ID NO: 125769 - protein, 104 aa, Setaria italica
  Transcript Sequence Number=SeqID_59795
  Homolog annotation: Hit_ID=B6U8B2; Match level="QueryCoverage=59%, HitCoverage=16%, E-value=1e-18, Identity=79%"; Hit description=WDL1
  Pfam annotation: Domain name=TPX2; Domain location=2-46; Score=8.6; E_ value=0.088; Accession=PF06886.3; Description=Targeting protein for Xklp2 (TPX2)
LRRVKKLRFFPANLFVQAPLQEKSKESQEAEIKLLRKSLTFKATPMPSFYKEQPPKVELKKIPPTRARSPKLGRHKPTNSATAASADGSVSCESPRSTATSLPW

SEQ ID NO: 125770 - protein, 87 aa, Setaria italica
  Transcript Sequence Number=SeqID_59796
  Gene Ontology: Mol. function=binding
KGIPTITPVKQLEKIISVLSRMFDMGISMVAAPESYARENAMSAERNIQGDTASGNSGISHTFVNQEMASEMILDFDAISRLTKVLK

SEQ ID NO: 125771 - protein, 51 aa, Setaria italica
  Transcript Sequence Number=SeqID_59797
LIPSLHNQRTISIILLYQCRYQVKLFLVPCKLCQNLPCQAYLNQRNCPLPQ

SEQ ID NO: 125772 - protein, 120 aa, Setaria italica
  misc_feature (81)..(81): Xaa can be any naturally occurring amino acid
  misc_feature (108)..(108): Xaa can be any naturally occurring amino acid
  Transcript Sequence Number=SeqID_59798
  Gene Ontology: Mol. function=phosphogluconate dehydrogenase (decarboxylating) activity; Cellular component=mitochondrion; Biological process=valine metabolic process
  Homolog annotation: Hit_ID=B6SHU3; Match level="QueryCoverage=100%, HitCoverage=43%, E-value=3e-50, Identity=71%"; Hit description=3 -hydroxyisobutyrate dehydrogenase
MVGGLEEAYLAAKPLLLSMGKRAIYCGGAGNGSAAKICNNMAMAISMLGVSEAFALGQNLGIKASTLTDIFNCSSARCWSXAKDLDLAMASASGVGFKCPLGSEALEXRKLSKDGCELKD

SEQ ID NO: 125773 - protein, 128 aa, Setaria italica
  Transcript Sequence Number=SeqID_59799
  Gene Ontology: Mol. function=phosphogluconate dehydrogenase (decarboxylating) activity; Cellular component=mitochondrion; Biological process=valine metabolic process
  Homolog annotation: Hit_ID=B6TJR8; Match level="QueryCoverage=85%, HitCoverage=32%, E-value=2e-51, Identity=91%"; Hit description=3 -hydroxyisobutyrate dehydrogenase
  Pfam annotation: Domain name=NAD_binding_2; Domain location=1-58; Score=-89.8; E_value=0.099; Accession=PF03446.7; Description=NAD binding domain of 6-phosphogluconate dehydrogenase
NKGYAENPMILDAPVSGGVPAAEAGKLTFMVGGLEEAYLAAKPLLLSMGKRAIYCGGAGNGSAAKICNNMAMAISMLGVSEAFALGQNLGIKASTLTDIFNCSSARCWSRLKIWIWPWPLHLESASNV

SEQ ID NO: 125774 - protein, 61 aa, Setaria italica
  Transcript Sequence Number=SeqID_59800
GRSSGERERERREGGGSGWRVGSKVQRWGRSCLRGFSSHAIPSQLENRSLVVADSQSPFVA

SEQ ID NO: 125775 - protein, 38 aa, Setaria italica
  Transcript Sequence Number=SeqID_59801
LGYNQAGESNCIRCSCATLVVPTLRFCNTFVRERSVCS

SEQ ID NO: 125776 - protein, 106 aa, Setaria italica
  Transcript Sequence Number=SeqID_59802
  Gene Ontology: Mol. function=hydrogen-translocating pyrophosphatase activity; Cellular component=membrane; Biological process=proton transport
  Homolog annotation: Hit_ID=B9HV07; Match level="QueryCoverage=100%, HitCoverage=16%, E-value=2e-38, Identity=76%"; Hit description =Vacuolar H+-translocating inorganic pyrophosphatase
MDMFGPIADNAGGIVEMSQQPESVREITDVLDAVGNNTTKATTKGFAIGSAALASFLLFSAYMDEVASFAQLPFKEVDIAVPEIFVGGLLGSMLIFLFSAWACSAV

SEQ ID NO: 125777 - protein, 64 aa, Setaria italica
  Transcript Sequence Number=SeqID_59803
TQFKDTAGPSLHVLIKMLATITLVMAPDILVINQTNHQAYSRRCIYPTHLPSLNVVPKEKKNQR

SEQ ID NO: 125778 - protein, 81 aa, Setaria italica
  Transcript Sequence Number=SeqID_59804
  Gene Ontology: Mol. function=hydrogen-translocating pyrophosphatase activity; Cellular component=membrane; Biological process=proton transport
  Homolog annotation: Hit_ID=A4RWE1; Match level="QueryCoverage=45%, HitCoverage=4%, E-value=1e-14, Identity=100%"; Hit description=H+ -PPase family transporter: proton
RPFRLQVRVGGIYTKAADVGADLVGKVEQGIPEDDPRNPAVIADLVLMFSNKHWLPSHFHIFLLKIAQLFFFLRKGIAQLC

SEQ ID NO: 125779 - protein, 111 aa, Setaria italica
  Transcript Sequence Number=SeqID_59805
  Gene Ontology: Mol. function=hydrogen-translocating pyrophosphatase activity; Cellular component=membrane; Biological process=proton transport
  Homolog annotation: Hit_ID=B9HV07; Match level="QueryCoverage=100%, HitCoverage=21%, E-value=2e-39, Identity=65%"; Hit description =Vacuolar H+-translocating inorganic pyrophosphatase
TGHGTNIIAGTSGLVDESGDPTGGLFGTAVATMGMLSTAGYVLTMDMFGPIADNAGGIVEMSQQPESVREITDVLDAVGNTTKATTKGFAIGSAALASFLLFSAYMDEVAS

SEQ ID NO: 125780 - protein, 78 aa, Setaria italica
  misc_feature (45)..(45): Xaa can be any naturally occurring amino acid
  Transcript Sequence Number=SeqID_59806
  Gene Ontology: Mol. function=hydrogen-translocating pyrophosphatase activity; Cellular component=membrane; Biological process=proton transport
  Homolog annotation: Hit_ID=B9HV07; Match level="QueryCoverage=62%, HitCoverage=7%, E-value=5e-17, Identity=81%"; Hit description =Vacuolar H+-translocating inorganic pyrophosphatase
VSLTFYSYYYALNRRKEASAYMDEVASFAQLPFKEVDIAVPEIFXGGLLGSMLIFLFSAWACSAVGKKLTTGIVMRSG

SEQ ID NO: 125781 - protein, 114 aa, Setaria italica
  misc_feature (76)..(76): Xaa can be any naturally occurring amino acid
  misc_feature (91)..(91): Xaa can be any naturally occurring amino acid
  Transcript Sequence Number=SeqID_59807
  Gene Ontology: Mol. function=hydrogen-translocating pyrophosphatase activity; Cellular component=membrane; Biological process=proton transport
  Homolog annotation: Hit_ID=B9HK20; Match level="QueryCoverage=88%, HitCoverage=20%, E-value=3e-30, Identity=68%"; Hit description =Vacuolar H+-translocating inorganic pyrophosphatase
GNYLVSIVFLRLIPAVIADLVGDNVGDCAARGADLFESIAAEIISAMILGGTMAQRCKIEDPSGFILFPLVVHSFXILVVSSVGILSIRGXRDSGLISPIRRSHVNYAKGYSIT

SEQ ID NO: 125782 - protein, 85 aa, Setaria italica
  misc_feature (56)..(56): Xaa can be any naturally occurring amino acid
  Transcript Sequence Number=SeqID_59808
  Gene Ontology: Mol. function=hydrogen-translocating pyrophosphatase activity; Cellular component=membrane; Biological process=proton transport
  Homolog annotation: Hit_ID=Q56ZN6; Match level="QueryCoverage=97%, HitCoverage=10%, E-value=3e-30, Identity=78%"; Hit description =Pyrophosphate-energized membrane proton pump 2
TRASTSPILVFVFCICTLSLFFSLYLTKWVLAKDEGPPEMSEISDAIRDGAEGFFXRTQYGTISKMACILGFVILVIYLFRTTTP

SEQ ID NO: 125783 - protein, 88 aa, Setaria italica
  Transcript Sequence Number=SeqID_59809
  Subcellular localization annotation: CTP_CleavageSite=50; ConfidenceScore=5.58e-01
WKLAPPKHAATAGLLQGAADRAPLLHPRATPLRQGRLTPPSRLARPQQSRCRTRTPPGRESARDQGATYPRVGSFLFQLQGGQTRIPS

SEQ ID NO: 125784 - protein, 75 aa, Setaria italica
  misc_feature (18)..(18): Xaa can be any naturally occurring amino acid
  Transcript Sequence Number=SeqID_59810
  Gene Ontology: Mol. function=metal ion binding; Cellular component =nucleus; Biological process=regulation of transcription, DNA -dependent
  Homolog annotation: Hit_ID=B9RZ08; Match level="QueryCoverage=85%, HitCoverage=8%, E-value=2e-28, Identity=84%"; Hit description =Transcription factor, putative
SLNSTVQKPGEFVVTFPXAYHSGFSHGFNCGEAVNFAMGEWFPLGAVASQRYALLKRIPVLPYEELLCKRNSTCC

SEQ ID NO: 125785 - protein, 74 aa, Setaria italica
  misc_feature (20)..(20): Xaa can be any naturally occurring amino acid
  Transcript Sequence Number=SeqID_59811
RRFEALEDGVGAGAEKPGHXGRYCNCFHGGDNSDDEEDEEAAAAASDVAETIKGLVHCATLRERNLLADVCAHL

SEQ ID NO: 125786 - protein, 61 aa, Setaria italica
  Transcript Sequence Number=SeqID_59812
DGTLLLLLHNTKLRGVKLKVHHDEVANPLEPSAWLNPISVSEPSQQPRWFSRYPGRCAPGW

SEQ ID NO: 125787 - protein, 45 aa, Setaria italica
  Transcript Sequence Number=SeqID_59813
  Gene Ontology: Mol. function=glutamate-1-semialdehyde 2,1-aminomutase activity; Cellular component=chloroplast; Biological process =tetrapyrrole biosynthetic process
  Homolog annotation: Hit_ID=Q6YZE2; Match level="QueryCoverage=100%, HitCoverage=9%, E-value=2e-16, Identity=88%"; Hit description =Glutamate-1-semialdehyde 2,1-aminomutase, chloroplastic
GAKTGHEMCGGHIRGMFGVFFTGGPVHNFADAKKSDTEKFGRFHR

SEQ ID NO: 125788 - protein, 37 aa, Setaria italica
  Transcript Sequence Number=SeqID_59814
  Gene Ontology: Mol. function=glutamate-1-semialdehyde 2,1-aminomutase activity; Cellular component=chloroplast; Biological process =tetrapyrrole biosynthetic process
  Homolog annotation: Hit_ID=Q6YZE2; Match level="QueryCoverage=100%, HitCoverage=7%, E-value=8e-13, Identity=94%"; Hit description =Glutamate-1-semialdehyde 2,1-aminomutase, chloroplastic
MTAGIHTLKRLMEPGTYEYLDKITGDLVRGILDAGAK

SEQ ID NO: 125789 - protein, 85 aa, Setaria italica
  Transcript Sequence Number=SeqID_59815
GAELLNKCKYAVMGEEDLEMKVSPMEGYHLELKDNVVVTVGDIWTQDMGDLLQQDPSIKRLCLSFALYKLLRRRFEDHPITDVET

SEQ ID NO: 125790 - protein, 66 aa, Setaria italica
  Transcript Sequence Number=SeqID_59816
HQLQEVGDDGAELLNKCKYAVMGEEDLEMKVSPMEGYHLELKDNVVVTVGDIWTQDMGDLLLKPPA

SEQ ID NO: 125791 - protein, 119 aa, Setaria italica
  misc_feature (20)..(20): Xaa can be any naturally occurring amino acid
  Transcript Sequence Number=SeqID_59817
  Gene Ontology: Mol. function=catalytic activity; Biological process =metabolic process
  Homolog annotation: Hit_ID=B8XVQ4; Match level="QueryCoverage=89%, HitCoverage=10%, E-value=1e-35, Identity=70%"; Hit description =Autophagy-related 7
GARVPRQLLVEAIECLADEXGFWDALRRLKLEVLGIDDFLIPITGYYAPCQFHQASLFNLRSESLVPPSHNPVGDRNSCPILGTLINTNNMRGFQDLDRELLLKTEAKKIFALTFVVLG

SEQ ID NO: 125792 - protein, 71 aa, Setaria italica
  Transcript Sequence Number=SeqID_59818
ITKHKQTHQLFFVVCVKEDASAAYSGSANLQHFLSKNQIMIDRLVLTEDEAHEVPVPDEPLAVDEMEAGEG

SEQ ID NO: 125793 - protein, 54 aa, Setaria italica
  Transcript Sequence Number=SeqID_59819
  Subcellular localization annotation: CTP_CleavageSite=48; ConfidenceScore=5.09e-01
FGFNVFVTALFPFMGDFVNLVGSFSLVPLTFMFPSMVILKVVVKPWIVAVVYDG

SEQ ID NO: 125794 - protein, 54 aa, Setaria italica
  Transcript Sequence Number=SeqID_59820
  Gene Ontology: Mol. function=DNA binding; Cellular component=nucleus; Biological process=regulation of transcription, DNA-dependent
  Homolog annotation: Hit_ID=Q5ZBP6; Match level="QueryCoverage=100%, HitCoverage=10%, E-value=4e-21, Identity=88%"; Hit description =LEUNIG-like
MDPRDNLGRCMDASKGFGFSEVAKARASSTKVVCCHFSSDGKLLATGGHDKKVF

SEQ ID NO: 125795 - protein, 48 aa, Setaria italica
  Transcript Sequence Number=SeqID_59821
VAGAQSAQLDISHKTSRIKKKKCACLLLFNCSSLYPSSYTPIGVEEEG

SEQ ID NO: 125796 - protein, 62 aa, Setaria italica
  Transcript Sequence Number=SeqID_59822
NNQPVVVPSLYPTVQLHRLLDDVCLVYPMLPFCVDMESFAVTCLLPLDCMVRTPYFYWCRHC

SEQ ID NO: 125797 - protein, 43 aa, Setaria italica
  Transcript Sequence Number=SeqID_59823
  Gene Ontology: Cellular component=integral to membrane
GNQADYDSDDEYIVPRSGIRQPLVNQQQGAADPRVPNLDYRPI

SEQ ID NO: 125798 - protein, 80 aa, Setaria italica
  Transcript Sequence Number=SeqID_59824
  Gene Ontology: Mol. function=protein serine/threonine kinase activity; Cellular component=cytoplasmic vesicle; Biological process= protein amino acid phosphorylation
  Homolog annotation: Hit_ID=B9V0H3; Match level="QueryCoverage=96%, HitCoverage=11%, E-value=4e-16, Identity=53%"; Hit description =Protein kinase domain containing protein
  Pfam annotation: Domain name=WD40; Domain location=1-38; Score=22.8; E_value=0.0014; Accession=PF00400.24; Description=WD domain, G-beta repeat
VVVSTLKEHLADVSVVFSHPELPVLVTGSIDGTIRLWNSSTFSLLGVLNCGLRNVVAITSLKGSRRIAILHYGGLAIAEN

SEQ ID NO: 125799 - protein, 40 aa, Setaria italica
  Transcript Sequence Number=SeqID_59825
YKNREQVVEDDSSEDEDDDEEDELPQYKFKVRTVGVRSVK

SEQ ID NO: 125800 - protein, 72 aa, Setaria italica
  Transcript Sequence Number=SeqID_59826
PILLAICCIVLKSLAPIPECEEESLYLEEEKDELLPKGDQKIETSITKSDQPETKLVLENKPSNGHILERKP

SEQ ID NO: 125801 - protein, 38 aa, Setaria italica
  Transcript Sequence Number=SeqID_59827
FLDEQLCFMICQMLSVNNSRVQAEKIVCFLKRWRWTGW

SEQ ID NO: 125802 - protein, 78 aa, Setaria italica
  Transcript Sequence Number=SeqID_59828
  Gene Ontology: Mol. function=nucleic acid binding
FHSTSNYQSQAAARVIRIGSRTDFMLGDVLHPAINWADKESHVDADEMAKITTAFVGNLPANVNEEYLRKLFEQFGEV

SEQ ID NO: 125803 - protein, 114 aa, Setaria italica
  misc_feature (55)..(55): Xaa can be any naturally occurring amino acid
  misc_feature (70)..(70): Xaa can be any naturally occurring amino acid
  Transcript Sequence Number=SeqID_59829
  Gene Ontology: Mol. function=ATP binding
  Homolog annotation: Hit_ID=B9T5Z0; Match level="QueryCoverage=90%, HitCoverage=17%, E-value=3e-29, Identity=60%"; Hit description=Zinc finger protein, putative
IFGMNVYHKNRLIMPFWKVLQEGSSRGRSVVGVLEANFIEPAHDKQDFERTPLFXRLETKLRQIIVDFWXEKCHLIGYQPTDPHLRSQYKATLKDSGGSASQVQPIKTYQVVPE

SEQ ID NO: 125804 - protein, 90 aa, Setaria italica
  Transcript Sequence Number=SeqID_59830
  Gene Ontology: Mol. function=kinase activity
  Homolog annotation: Hit_ID=B9T5Z0; Match level="QueryCoverage=92%, HitCoverage=10%, E-value=3e-14, Identity=46%"; Hit description=Zinc finger protein, putative
VSFNIPPLQPFWKVLQEGSSRGRSVVGEFNMFSTAVIVNHVISLYDDKCHNSGVLEANFIEPAHDKQDFERTPLFLRLETKLRQIIVDFW

SEQ ID NO: 125805 - protein, 84 aa, Setaria italica
  misc_feature (69)..(69): Xaa can be any naturally occurring amino acid
  Transcript Sequence Number=SeqID_59831
  Gene Ontology: Mol. function=transferase activity, transferring glycosyl groups; Biological process=metabolic process
  Homolog annotation: Hit_ID=B6TL37; Match level="QueryCoverage=98%, HitCoverage=18%, E-value=3e-30, Identity=71%"; Hit description =Cytokinin-O-glucosyltransferase 2
LWKQDAECLAWLDTQEPRSVVYVNFGSHTVMTPEQLAEFAWGLAASDHPFLWSIRDDLVRSAGLPPAFXAETAGRCRVAAWCPA

SEQ ID NO: 125806 - protein, 63 aa, Setaria italica
  Transcript Sequence Number=SeqID_59832
  Gene Ontology: Mol. function=transferase activity, transferring hexosyl groups; Biological process=metabolic process
  Homolog annotation: Hit_ID=B6TL37; Match level="QueryCoverage=85%, HitCoverage=10%, E-value=7e-18, Identity=79%"; Hit description =Cytokinin-O-glucosyltransferase 2
TMLMSFALGVARELGIPTLAFWTGSAAALMTHMRLRELEERGYVPLKGKQRITQKSFTLSRTW

SEQ ID NO: 125807 - protein, 37 aa, Setaria italica
  Transcript Sequence Number=SeqID_59833
LEELYAKYQHSSSNDLASIAAISNPSDQSLLRTEGLL

SEQ ID NO: 125808 - protein, 46 aa, Setaria italica
  Transcript Sequence Number=SeqID_59834
  Subcellular localization annotation: CTP_CleavageSite=21; ConfidenceScore=5.01e-01
LAQNHSSGSGSRFGHMMQGTCSTSLVKILITTPSVPNNYSFGFSKI

SEQ ID NO: 125809 - protein, 97 aa, Setaria italica
  Transcript Sequence Number=SeqID_59835
  Subcellular localization annotation: CTP_CleavageSite=72; ConfidenceScore=5.12e-01
NLVDINKVKPDSWIFPCYLLQPGLQVNAFPPPLPPPPPPPWRPPPRPRRSPATTSAPAPFPAPASPPSPSPSAAAPPSPSPSPTPSPPPSPSSPPPP

SEQ ID NO: 125810 - protein, 77 aa, Setaria italica
  Transcript Sequence Number=SeqID_59836
CIPQGIGLFGMLGHLLLISLNHPPSPRSILNQSQNIVNSPFDEDQSNSSSFYLNKALTFSGEFRRSRNKKEQDYACH

SEQ ID NO: 125811 - protein, 78 aa, Setaria italica
  misc_feature (63)..(63): Xaa can be any naturally occurring amino acid
  misc_feature (71)..(71): Xaa can be any naturally occurring amino acid
  Transcript Sequence Number=SeqID_59837
  Gene Ontology: Biological process=cell redox homeostasis
  Homolog annotation: Hit_ID=B6TWZ8; Match level="QueryCoverage=94%, HitCoverage=17%, E-value=2e-31, Identity=90%"; Hit description=PDIL5- 2-Zea mays protein disulfide isomerase
VFSLFFLGFGVNESLIAEYGKKYKKRAWFAVAKDFSEDIMVTYEFDKVPALVAIHPQYKEQSXLFYGPFEXNFLEDFV

SEQ ID NO: 125812 - protein, 41 aa, Setaria italica
  Transcript Sequence Number=SeqID_59838
TIELTDGNHKCTLQLAQMKTKGNQKISRNKIMMSYGDRTEN

SEQ ID NO: 125813 - protein, 36 aa, Setaria italica
  Transcript Sequence Number=SeqID_59839
SISLCSIYCAFSKHCILHKFIHYIGLVCLTSLCNSC

SEQ ID NO: 125814 - protein, 73 aa, Setaria italica
  misc_feature (7)..(7): Xaa can be any naturally occurring amino acid
  misc_feature (66)..(66): Xaa can be any naturally occurring amino acid
  Transcript Sequence Number=SeqID_59840
  Gene Ontology: Mol. function=protein tyrosine kinase activity; Cellular component=integral to membrane; Biological process=protein amino acid phosphorylation
  Homolog annotation: Hit_ID=Q5QNM3; Match level="QueryCoverage=100%, HitCoverage=10%, E-value=1e-32, Identity=82%"; Hit description =Leucine-rich receptor-like protein kinase-like
NFTNLLXGYCLENEPFMRMMVFEFSPHGSLSQHLHLKEFEDLDWAARMRVIMGVAYCLQYMHHELXPPVAIHD

SEQ ID NO: 125815 - protein, 98 aa, Setaria italica
  Transcript Sequence Number=SeqID_59841
FALARILFHSHVARCVKKNCKGYKHFSKVSHYPILMKTECLSISCLQELKCKMSLNHQPLAFLCLGLSASLVKAISYISLYLSTKLVLSKYLSFYYLV

SEQ ID NO: 125816 - protein, 67 aa, Setaria italica
  Transcript Sequence Number=SeqID_59842
  Gene Ontology: Mol. function=nucleoside-triphosphatase activity; Cellular component=mitochondrial matrix; Biological process=ATP -dependent proteolysis
  Homolog annotation: Hit_ID=Q4ZJ72; Match level="QueryCoverage=95%, HitCoverage=6%, E-value=4e-31, Identity=100%"; Hit description=Lon protease homolog
WSWKTSIGRSIARALNRKFYRFSVGGLADVAEIKGHRRTYVGAMPGKMVQCLKSVGTANPLVLIDEI

SEQ ID NO: 125817 - protein, 53 aa, Setaria italica
  Transcript Sequence Number=SeqID_59843
  Subcellular localization annotation: CTP_CleavageSite=15; ConfidenceScore=5.03e-01
MKTTTFTGAMSSSATAALATSAVNGVATLVGNDDAESENPMKTTTLAEQVDEY

SEQ ID NO: 125818 - protein, 130 aa, Setaria italica
  Transcript Sequence Number=SeqID_59844
  Homolog annotation: Hit_ID=B6TY40; Match level="QueryCoverage=100%, HitCoverage=29%, E-value=4e-44, Identity=72%"; Hit description =Bromodomain containing protein
FEKMYKAAVDWFEEECKRLEPPKPVPAELPPPPTVEAKVKPRTGNVKMRKPKAREPNKREMSLEEKNLLRLGLESLPEEKMHNVLQIVRKRNSNQEMLGDEIELDIDEMDVETQWELDRFVTNFNKALKK

SEQ ID NO: 125819 - protein, 110 aa, Setaria italica
  misc_feature (82)..(82): Xaa can be any naturally occurring amino acid
  Transcript Sequence Number=SeqID_59845
  Homolog annotation: Hit_ID=B6TTX0; Match level="QueryCoverage=93%, HitCoverage=28%, E-value=1e-32, Identity=59%"; Hit description =Acyltransferase
NFDDLIIDNSDDTQHTSRGILYDKATQRIGQRLQELKQVDWEGFGIGNSMLSSEPSAVQEQSKEAEPELRLEVEQSVSPAPXSDVAVPNWFQRHVDPSELSGLLPWPDQD

SEQ ID NO: 125820 - protein, 35 aa, Setaria italica
  Transcript Sequence Number=SeqID_59846
  Gene Ontology: Mol. function=acyltransferase activity
  Homolog annotation: Hit_ID=Q5JK26; Match level="QueryCoverage=100%, HitCoverage=6%, E-value=8e-12, Identity=97%"; Hit description =Putative tafazzin isoform
PAKRGVGRLVMDTDSLPVVIPFVHTGMQDIMPVGK

SEQ ID NO: 125821 - protein, 66 aa, Setaria italica
  Transcript Sequence Number=SeqID_59847
  Gene Ontology: Mol. function=acyltransferase activity; Biological process=metabolic process
  Homolog annotation: Hit_ID=Q5JK26; Match level="QueryCoverage=98%, HitCoverage=12%, E-value=8e-31, Identity=95%"; Hit description =Putative tafazzin isoform
SVIFRSLQALAVPLIGNACYVFMHGLNSVQIYGAEKLHQALQERPKGKPLLTVSNHVAAMDDPFVC

SEQ ID NO: 125822 - protein, 54 aa, Setaria italica
  Transcript Sequence Number=SeqID_59848
FPSFKSSNDAIFLFYILILQPSDCTFQVRNMLDDILEKNLEIVKAPCLNLTDPT

SEQ ID NO: 125823 - protein, 75 aa, Setaria italica
  Transcript Sequence Number=SeqID_59849
  Subcellular localization annotation: CTP_CleavageSite=66; ConfidenceScore=5.10e-01
HQFLHGTSSTKGTLDSRINQAPGHQNSYTMPLTHDKGRKRSKQSTLIWYSLSLGACGFPSCGCSSSASLSASPLP

SEQ ID NO: 125824 - protein, 59 aa, Setaria italica
  Transcript Sequence Number=SeqID_59850
QHYIRQPSCCCRRRHECCCRCLHEYVWKMKKTYNTETTLQLIIHHQELLLIAMGFRHKT

SEQ ID NO: 125825 - protein, 44 aa, Setaria italica
  Transcript Sequence Number=SeqID_59851
  Gene Ontology: Mol. function=zinc ion binding
  Homolog annotation: Hit_ID=Q9FEA0; Match level="QueryCoverage=84%, HitCoverage=11%, E-value=2e-12, Identity=81%"; Hit description =F2G19.2
VVGLLSIVLLLPCRHLCLCKECESKLSFCPLCQSSKILGMEIYM

SEQ ID NO: 125826 - protein, 76 aa, Setaria italica
  Transcript Sequence Number=SeqID_59852
  Gene Ontology: Mol. function=zinc ion binding
  Homolog annotation: Hit_ID=B9R7A6; Match level="QueryCoverage=100%, HitCoverage=22%, E-value=9e-21, Identity=60%"; Hit description=ATP binding protein, putative
  Pfam annotation: Domain name=zf-C3HC4; Domain location=30-64; Score =6.2; E_value=0.02; Accession=PF00097.17; Description=Zinc finger, C3HC4 type (RING finger)
NNGQSCCNGGAVNLQLMPKENRQPKDLTACRVCKSSEACMLLLPCRHLCLCKECESKLSFCPLCQSSKILGMEIYM

SEQ ID NO: 125827 - protein, 65 aa, Setaria italica
  Transcript Sequence Number=SeqID_59853
  Homolog annotation: Hit_ID=Q84VC6; Match level="QueryCoverage=75%, HitCoverage=19%, E-value=1e-18, Identity=97%"; Hit description=S -ribonuclease-binding protein SBP1-like protein (Fragment)
DMDRFIKAQSERLRQSILEKVQAKQFEALASVEDKILRKIRDKEAEVETTANCLIWSSSSEFLLL

SEQ ID NO: 125828 - protein, 58 aa, Setaria italica
  Transcript Sequence Number=SeqID_59854
  Gene Ontology: Mol. function=transketolase activity; Cellular component=chloroplast; Biological process=metabolic process
  Homolog annotation: Hit_ID=Q7SIC9; Match level="QueryCoverage=75%, HitCoverage=6%, E-value=4e-13, Identity=81%"; Hit description =Transketolase, chloroplastic
RRRTRGTARRKCGGEEHELKQLGQWGSRTPGHPESFLTAGVEVTTGPLGQGIANAVGL

SEQ ID NO: 125829 - protein, 67 aa, Setaria italica
  misc_feature (47)..(47): Xaa can be any naturally occurring amino acid
  Transcript Sequence Number=SeqID_59855
LALATAMQECQGSQQDRHLVRKALKSALSHLKADHAGDFLSCHGPAXCAFCFLSSNIMQYAFDFLLT

SEQ ID NO: 125830 - protein, 106 aa, Setaria italica
  Transcript Sequence Number=SeqID_59856
  Gene Ontology: Mol. function=protein dimerization activity; Cellular component=nucleus; Biological process=regulation of transcription, DNA-dependent
  Homolog annotation: Hit_ID=Q84UA5; Match level="QueryCoverage=52%, HitCoverage=11%, E-value=4e-12, Identity=62%"; Hit description =Liguleless2-like protein
MTNLRKQWQVNHGNKLVTLNVPLRKSLRIPLRVQVITFLSITLPLPILISQLDPLTEQQLLGIYNQKQSSEQAEEALAQGLHELRQSHADIIDAAPNYMSLMAITL

SEQ ID NO: 125831 - protein, 76 aa, Setaria italica
  Transcript Sequence Number=SeqID_59857
TSIVSTINLSQTQKIAEAPQLTLPCLQRREHRCIQQLHMTSSSSSATLGITCPWRPISNTSQQHVVADHIFAHRLV

SEQ ID NO: 125832 - protein, 98 aa, Setaria italica
  misc_feature (29)..(29): Xaa can be any naturally occurring amino acid
  misc_feature (68)..(68): Xaa can be any naturally occurring amino acid
  Transcript Sequence Number=SeqID_59858
  Gene Ontology: Mol. function=protein kinase activity; Cellular component=integral to membrane; Biological process=protein amino acid phosphorylation
  Homolog annotation: Hit_ID=B9S2Z2; Match level="QueryCoverage=93%, HitCoverage=14%, E-value=1e-39, Identity=90%"; Hit description =BRASSINOSTEROID INSENSITIVE 1-associated receptor kinase 1, putative
LITGQRAFDLARLANDDDVMLLDWVKGLXLKEKRLESLVDEDLQHNYIDVEVESLIQVALLCTQSSPXERPKMSEVVRMLEGDGLAERWEEWLVRLVS

SEQ ID NO: 125833 - protein, 57 aa, Setaria italica
  Transcript Sequence Number=SeqID_59859
  Gene Ontology: Mol. function=protein serine/threonine kinase activity; Biological process=protein amino acid phosphorylation
  Homolog annotation: Hit_ID=Q5S1N9; Match level="QueryCoverage=73%, HitCoverage=6%, E-value=1e-13, Identity=90%"; Hit description =Somatic embryogenesis receptor kinase
  Subcellular localization annotation: CTP_CleavageSite=31; ConfidenceScore=5.02e-01
LLLLNYRDLSNNNLSGEVPSTGSFSLFTPISFANNPNLCGPGTTKPCPGAPPFSPPP

SEQ ID NO: 125834 - protein, 86 aa, Setaria italica
  misc_feature (72)..(72): Xaa can be any naturally occurring amino acid
  Transcript Sequence Number=SeqID_59860
  Gene Ontology: Mol. function=protein kinase activity; Cellular component=integral to membrane; Biological process=protein amino acid phosphorylation
  Homolog annotation: Hit_ID=B9S2Z2; Match level="QueryCoverage=81%, HitCoverage=11%, E-value=1e-26, Identity=87%"; Hit description =BRASSINOSTEROID INSENSITIVE 1-associated receptor kinase 1, putative
DVEVESLIQTLQSLLLDWVKGLLKEKRLESLVDEDLQHNYIDVEVESLIQVALLCTQSSPMERPKMSEVVRXMLEGDGLAERWGGV

SEQ ID NO: 125835 - protein, 67 aa, Setaria italica
  Transcript Sequence Number=SeqID_59861
  Gene Ontology: Mol. function=protein serine/threonine kinase activity; Biological process=protein amino acid phosphorylation
  Homolog annotation: Hit_ID=Q5S1N9; Match level="QueryCoverage=58%, HitCoverage=6%, E-value=4e-11, Identity=76%"; Hit description =Somatic embryogenesis receptor kinase
HGYHTGGARQPQKLQSAGSNYSSTGEFCFACWPRRKLQKHFSDVPGKEDPEVHLGQLKKFSLRELRV

SEQ ID NO: 125836 - protein, 58 aa, Setaria italica
  Transcript Sequence Number=SeqID_59862
SSGELGSKPSGGKFTEPSAGSRQGVSATVAGAQNSPIDVEAIEDEVQAISPSRVPPPV

SEQ ID NO: 125837 - protein, 81 aa, Setaria italica
  Transcript Sequence Number=SeqID_59863
  Subcellular localization annotation: CTP_CleavageSite=64; ConfidenceScore=5.28e-01
KARSALQPGLHGLKIGDKQTVKAASSISPSPYFISFLLSRARSPEPKMQVGSKPITSAPWCWARAYQLVSLKKAHGNHAQL

SEQ ID NO: 125838 - protein, 96 aa, Setaria italica
  misc_feature (38)..(38): Xaa can be any naturally occurring amino acid
  misc_feature (78)..(78): Xaa can be any naturally occurring amino acid
  Transcript Sequence Number=SeqID_59864
  Gene Ontology: Mol. function=metal ion binding
  Homolog annotation: Hit_ID=Q69T46; Match level="QueryCoverage=83%, HitCoverage=17%, E-value=2e-11, Identity=48%"; Hit description=Zinc -finger protein-like
RWSTNSRFICLFCFSQSWQVELELLRFLCERIVKREKXKKDLVVCAHDILAARRITSVSSMWTPYYASGPGASSESAXTSVNNKSYRSDDVTVRSD

SEQ ID NO: 125839 - protein, 127 aa, Setaria italica
  misc_feature (72)..(72): Xaa can be any naturally occurring amino acid
  Transcript Sequence Number=SeqID_59865
  Gene Ontology: Mol. function=metal ion binding
  Homolog annotation: Hit_ID=Q69T47; Match level="QueryCoverage=98%, HitCoverage=10%, E-value=2e-24, Identity=50%"; Hit description=PHD finger protein-like
  Subcellular localization annotation: CTP_CleavageSite=18; ConfidenceScore=5.56e-01
SARQENMPRASAGSSRISQSSSSPQAKDLSFSTNSKVSEDTNFGIFDLAKFSKKSALPCDICMRCDTVLNRXFVCSSCKVLCIYCLSSPNCTPSTYLTLHDQQAAVHLDCYQTMKYPTGPWKCELLS

SEQ ID NO: 125840 - protein, 71 aa, Setaria italica
  Transcript Sequence Number=SeqID_59866
  Gene Ontology: Mol. function=metal ion binding
  Homolog annotation: Hit_ID=Q69T47; Match level="QueryCoverage=66%, HitCoverage=4%, E-value=3e-16, Identity=78%"; Hit description=PHD finger protein-like
MNCLVEFIFLQLSELIFQSSLYLAEDLILKVVQNISYELDSVSKRKWDHIIVNQFLRDLREAKKRGNSERR

SEQ ID NO: 125841 - protein, 147 aa, Setaria italica
  misc_feature (27)..(27): Xaa can be any naturally occurring amino acid
  misc_feature (47)..(47): Xaa can be any naturally occurring amino acid
  Transcript Sequence Number=SeqID_59867
  Gene Ontology: Mol. function=metal ion binding
  Homolog annotation: Hit_ID=Q69T47; Match level="QueryCoverage=91%, HitCoverage=18%, E-value=1e-21, Identity=38%"; Hit description=PHD finger protein-like
TADGNLMSNSGDISRGLTKLVDQGKDXVGDLESEPGLHSESLEAALXGTLLGSESKNSTVSELQSRQEDGTLSIDPCPEKDNANKGDLVQNGFCSCPDPHVNKVSGRHLRNMDGYRCYIHPFIEKRVQDLWGNNLEQTIQENCIYSI

SEQ ID NO: 125842 - protein, 77 aa, Setaria italica
  Transcript Sequence Number=SeqID_59868
  Gene Ontology: Mol. function=DNA binding; Biological process =regulation of transcription
  Homolog annotation: Hit_ID=Q6NQK2; Match level="QueryCoverage=62%, HitCoverage=10%, E-value=9e-11, Identity=64%"; Hit description=NAC domain-containing protein 8
THYSNSGDVICDRATLLYSFFFQFIFCRTTWIIDGQRFATKIKNASGPSDPSKQKWMSNPSKECPKCSHVIDNSDVV

SEQ ID NO: 125843 - protein, 85 aa, Setaria italica
  misc_feature (41)..(41): Xaa can be any naturally occurring amino acid
  misc_feature (57)..(57): Xaa can be any naturally occurring amino acid
  Transcript Sequence Number=SeqID_59869
IDKLRLWLKEQTYADNSLLLIESSSWEKLSSDQLPDDDVPXWIAAQRAVSRYEGILXSPVGPRGRLLRRLLTWTGLIPSLPEANE

SEQ ID NO: 125844 - protein, 74 aa, Setaria italica
  Transcript Sequence Number=SeqID_59870
DENDQSEKKDKSEMLPLQLKIYEKIPIPDLPVVFPHKKLSFRILDTVRLDIATVIGLLAYVVNYKFESLASSPL

SEQ ID NO: 125845 - protein, 68 aa, Setaria italica
  Transcript Sequence Number=SeqID_59871
GYNTRGCRHVNHAVPAVYCNVGVGLHCDPSLLHSIRLHSTQITSSYHVTLLCPVLPTRLIPNRTTYKE

SEQ ID NO: 125846 - protein, 54 aa, Setaria italica
  Transcript Sequence Number=SeqID_59872
DWSFMEAAKKLQSYFISLQREDQPTAEDVLRKEITTMEEELKTKSVLGNKLRLG

SEQ ID NO: 125847 - protein, 88 aa, Setaria italica
  Transcript Sequence Number=SeqID_59873
  Homolog annotation: Hit_ID=B6T791; Match level="QueryCoverage=69%, HitCoverage=15%, E-value=1e-22, Identity=83%"; Hit description =Hydrolase
  Subcellular localization annotation: CTP_CleavageSite=54; ConfidenceScore=5.34e-01
LSPVRALPSLTPAPPTLPCSNDLADLRIRVCKRRMSTQAQPRFAPLPTEQSESQADAGAAGYQFRLVSYNILAQVYVKSAFFPHSPSA

SEQ ID NO: 125848 - protein, 50 aa, Setaria italica
  Transcript Sequence Number=SeqID_59874
  Homolog annotation: Hit_ID=B6T791; Match level="QueryCoverage=100%, HitCoverage=12%, E-value=6e-18, Identity=86%"; Hit description =Hydrolase
ESQADAGAAGYQFRLVSYNILAQVYVKSAFFPHSPSACLKWKSRSKAVLT

SEQ ID NO: 125849 - protein, 54 aa, Setaria italica
  Transcript Sequence Number=SeqID_59875
  Gene Ontology: Mol. function=sequence-specific DNA binding; Cellular component=intracellular
  Homolog annotation: Hit_ID=B6UFK1; Match level="QueryCoverage=68%, HitCoverage=9%, E-value=2e-10, Identity=83%"; Hit description=Mating- type switching protein swi10
MYGYCHTFNSIYIYSFGYVLQLTHALTSIRHVNKTDVVTLGSSFGSLSQVMNAS

SEQ ID NO: 125850 - protein, 57 aa, Setaria italica
  Transcript Sequence Number=SeqID_59876
  Gene Ontology: Mol. function=deoxyhypusine monooxygenase activity
  Homolog annotation: Hit_ID=B6UH29; Match level="QueryCoverage=61%, HitCoverage=10%, E-value=2e-11, Identity=94%"; Hit description=HEAT -like
FLSWHFNAFGFIQHSAFLGIILQVAYVLGQLQNKAASDALSMVLKDVCEHPMVRHEA

SEQ ID NO: 125851 - protein, 41 aa, Setaria italica
  Transcript Sequence Number=SeqID_59877
  Homolog annotation: Hit_ID=Q7X7P2; Match level="QueryCoverage=97%, HitCoverage=29%, E-value=3e-11, Identity=77%"; Hit description =OSJNBa0074L08.18 protein
MGGFDLQVKERTKELKHLKAAAMRGIKAAGESCKKAWSKVS

SEQ ID NO: 125852 - protein, 80 aa, Setaria italica
  misc_feature (17)..(17): Xaa can be any naturally occurring amino acid
  Transcript Sequence Number=SeqID_59878
WEFLNPDASDSDSESSXTEDDQYEPSDMETGSESDNEGSDSESVVNSGDDDGGSDEDDGGESWDEMETQRTKGTTKRQEE

SEQ ID NO: 125853 - protein, 36 aa, Setaria italica
  Transcript Sequence Number=SeqID_59879
LLFTILGFAAVNFNLYERIYACKHQVSRKHKSSHIN

SEQ ID NO: 125854 - protein, 49 aa, Setaria italica
  Transcript Sequence Number=SeqID_59880
MLPTQFESVTISPALQHHNRIPICSIATFRLIWLDLLRFIELCSLVVKT

SEQ ID NO: 125855 - protein, 58 aa, Setaria italica
  Transcript Sequence Number=SeqID_59881
  Gene Ontology: Mol. function=FMN binding
  Homolog annotation: Hit_ID=B6SUB0; Match level="QueryCoverage=62%, HitCoverage=10%, E-value=2e-10, Identity=88%"; Hit description=Root border cell-specific protein
SLKTSYNYKRILSGNPKCSLLVAKDPEDRTDTVITVYGDAVPVIPPSCACPLSISCLF

SEQ ID NO: 125856 - protein, 78 aa, Setaria italica
  misc_feature (23)..(23): Xaa can be any naturally occurring amino acid
  misc_feature (48)..(48): Xaa can be any naturally occurring amino acid
  Transcript Sequence Number=SeqID_59882
  Gene Ontology: Mol. function=FMN binding
  Homolog annotation: Hit_ID=B6SUB0; Match level="QueryCoverage=89%, HitCoverage=20%, E-value=3e-30, Identity=90%"; Hit description=Root border cell-specific protein
YIFFGQIKVDFGDFSFLRIKPKXVRYVSGVATALLGSGEFSAAEYREXKVDPISQFSTPITSHMNKDHADDTKLIVQH

SEQ ID NO: 125857 - protein, 83 aa, Setaria italica
  Transcript Sequence Number=SeqID_59883
  Gene Ontology: Mol. function=aspartic-type endopeptidase activity; Cellular component=nucleus; Biological process=DNA integration
  Homolog annotation: Hit_ID=Q53QA4; Match level="QueryCoverage=100%, HitCoverage=8%, E-value=7e-31, Identity=64%"; Hit description =Retrotransposon protein, putative, Ty1-copia subclass
EDLPIAHRKSKRTVAPPTRLIEECNLSYHALSCAEQVENVHEPATYKEALPKNKKAIRCKWIFKRKEGLSPSEPPKYKARLVA

SEQ ID NO: 125858 - protein, 109 aa, Setaria italica
  Transcript Sequence Number=SeqID_59884
  Gene Ontology: Mol. function=hydrolase activity, hydrolyzing O -glycosyl compounds; Cellular component=extracellular region; Biological process=carbohydrate metabolic process
  Homolog annotation: Hit_ID=B5U8Y9; Match level="QueryCoverage=98%, HitCoverage=11%, E-value=2e-45, Identity=81%"; Hit description=Alpha- glucosidase
  Subcellular localization annotation: CTP_CleavageSite=70; ConfidenceScore=5.06e-01
ARNALGMRYKLLPYLYTLNYQAHLTGAPVARPVFFSFPDFTPCYGLSTQFLLGSSVMVSPVLEEGATLVSAMFPPGTWYNLFDTTKVVVSKSGAPVRLDAPLNEINVTT

SEQ ID NO: 125859 - protein, 104 aa, Setaria italica
  misc_feature (37)..(37): Xaa can be any naturally occurring amino acid
  misc_feature (99)..(99): Xaa can be any naturally occurring amino acid
  Transcript Sequence Number=SeqID_59885
  Gene Ontology: Cellular component=membrane
  Homolog annotation: Hit_ID=B9SJK6; Match level="QueryCoverage=90%, HitCoverage=22%, E-value=5e-38, Identity=73%"; Hit description =Catalytic, putative
GKGLRINLQSNLRNAKFCLAPRGESSWTLRFYESFFXDEAELPFQNVIDYREISIKWPSSRIGPELLEYLESIPDERVEEMIGHGRDMRCLWVYAADSXPCSAM

SEQ ID NO: 125860 - protein, 54 aa, Setaria italica
  Transcript Sequence Number=SeqID_59886
ASWIARLSALERRAIQEAQRAAKAAAKEAGLKINSQGVRCEHQKYQSNLRQERH

SEQ ID NO: 125861 - protein, 122 aa, Setaria italica
  misc_feature (85)..(85): Xaa can be any naturally occurring amino acid
  Transcript Sequence Number=SeqID_59887
  Gene Ontology: Mol. function=catalytic activity; Cellular component =chloroplast
  Homolog annotation: Hit_ID=B8QQD4; Match level="QueryCoverage=90%, HitCoverage=21%, E-value=1e-48, Identity=86%"; Hit description =Protein pyrophosphatase
LKLVTVLRFTVRWSSIGSLVLVGSFEGINAGLYARELMDGCKKIVIETQGAPGMRTEEVLAKAADEARSPGSSTVLVAHFDGQVXLHASNIGDSGFLVIRNGEVYKKSNPMTYGFNFPLQIE

SEQ ID NO: 125862 - protein, 93 aa, Setaria italica
  Transcript Sequence Number=SeqID_59888
SNLTPSTPLQRRLCLRNPEHPAPPLHSLHPEQTKPNRIMKRRSKQKLAAKIISEQSNRRRLLFRSTATAGGDYWSSVYRPRHGLGVPFTTNRA

SEQ ID NO: 125863 - protein, 39 aa, Setaria italica
  Transcript Sequence Number=SeqID_59889
FFLIVGSCFYLGFLFLLALKKMLIWFCAMSTDRGLEIGL

SEQ ID NO: 125864 - protein, 66 aa, Setaria italica
  misc_feature (14)..(14): Xaa can be any naturally occurring amino acid
  Transcript Sequence Number=SeqID_59890
  Homolog annotation: Hit_ID=Q6Z2T9; Match level="QueryCoverage=87%, HitCoverage=15%, E-value=2e-14, Identity=50%"; Hit description =Probable mannan synthase 6
FFTLSFSSILIPLXHLFPEAQIPVWELIYIPTAIILLNSVGTPRANEWIVTQKLGNLQKLKSIASV

SEQ ID NO: 125865 - protein, 32 aa, Setaria italica
  Transcript Sequence Number=SeqID_59891
SADPCVGVDLYPPQLSFSLIQLDSEVRSVFLH

SEQ ID NO: 125866 - protein, 88 aa, Setaria italica
  Transcript Sequence Number=SeqID_59892
PPSSPKHGEEYACDIEGAPFLSLVFFICCVSSTLFFCLCEDSCCFVTENPLTSDICSSSFRAAELGAFRFSALLFLFVSSHLCSALAI

SEQ ID NO: 125867 - protein, 84 aa, Setaria italica
  misc_feature (61)..(61): Xaa can be any naturally occurring amino acid
  Transcript Sequence Number=SeqID_59893
  Gene Ontology: Mol. function=aspartic-type endopeptidase activity; Cellular component=endoplasmic reticulum membrane; Biological process=DNA integration
  Homolog annotation: Hit_ID=Q69P72; Match level="QueryCoverage=97%, HitCoverage=15%, E-value=3e-32, Identity=79%"; Hit description =Putative elicitor-inducible cytochrome P450
TSVDGYDIPAGTNVFVNVWSIGRDPALWDAPEEFCPAQFIGSEVDVKGQDFELLPFGSGRXRMCPGLSLGPKVTLLSIANLLRC

SEQ ID NO: 125868 - protein, 52 aa, Setaria italica
  Transcript Sequence Number=SeqID_59894
NVLLVPFLPGSPLFSLFKGSKLDFSFAVMGKVEGQGESWHGHVTAVSVASEF

SEQ ID NO: 125869 - protein, 117 aa, Setaria italica
  misc_feature (10)..(10): Xaa can be any naturally occurring amino acid
  misc_feature (98)..(98): Xaa can be any naturally occurring amino acid
  Transcript Sequence Number=SeqID_59895
  Gene Ontology: Mol. function=metal ion binding
  Homolog annotation: Hit_ID=B6STH0; Match level="QueryCoverage=100%, HitCoverage=53%, E-value=1e-47, Identity=73%"; Hit description=RNA -binding protein
DGTTTMSTHXRKASIKEFYAVIFPSLLQLQRGITDVEDKKQKAVCMERYRKKDEDERSSLSDIDVEREEECGICMEMNSKVVLPNCTHVLVLNIDPQXHQDRSSSGDLWIYVEDQDV

SEQ ID NO: 125870 - protein, 78 aa, Setaria italica
  Transcript Sequence Number=SeqID_59896
  Gene Ontology: Mol. function=carboxypeptidase activity; Cellular component=integral to membrane; Biological process=proteolysis
  Homolog annotation: Hit_ID=B1PDK9; Match level="QueryCoverage=61%, HitCoverage=6%, E-value=2e-21, Identity=93%"; Hit description =Putative membrane localized peptidase
TYGAVDPNSGTASLLDIARRLGIMLQSGWKPRRSIILCSWDAEEFGMVSRHGRKMIICYCINVRYISISGPRYALNIR

SEQ ID NO: 125871 - protein, 81 aa, Setaria italica
  misc_feature (66)..(66): Xaa can be any naturally occurring amino acid
  Transcript Sequence Number=SeqID_59897
  Homolog annotation: Hit_ID=B6U990; Match level="QueryCoverage=95%, HitCoverage=22%, E-value=3e-30, Identity=88%"; Hit description =Ankyrin repeat domain-containing protein 2
MASSGDPPGSADEKKSPKPEGSSNEHQGLPPAGFSNPFDFASMQSLLNDPSIKEMADQIARDPAFXNQMAEQLQKGATEYR

SEQ ID NO: 125872 - protein, 127 aa, Setaria italica
  Transcript Sequence Number=SeqID_59898
  Gene Ontology: Mol. function=structural constituent of ribosome; Cellular component=intracellular; Biological process=translation
  Homolog annotation: Hit_ID=B6SQA2; Match level="QueryCoverage=97%, HitCoverage=84%, E-value=3e-62, Identity=94%"; Hit description=60S ribosomal protein L28
  Pfam annotation: Domain name=Ribosomal_L28e; Domain location=1-127; Score=191.8; E_value=1.9e-54; Accession=PF01778.9; Description =Ribosomal L28e protein family
IWQIVRKNNSFLVKQFGNGHAKVQFTKEPNNLYNVHSYKYSGLANKKTVTIQPAAGKESAVVLSTTKTKKQNTPAKLNHKSVMRKEFRKMAKAVKNQVSDNYYRPDLTKPALARLSSVYRSLQVRPK

SEQ ID NO: 125873 - protein, 86 aa, Setaria italica
  Transcript Sequence Number=SeqID_59899
  Gene Ontology: Mol. function=structural constituent of ribosome; Cellular component=intracellular; Biological process=translation
  Homolog annotation: Hit_ID=B6SQA2; Match level="QueryCoverage=60%, HitCoverage=35%, E-value=9e-16, Identity=80%"; Hit description=60S ribosomal protein L28
VRPVVVVANLFFTALAILRNSLRITDLWLSLAGVFCFLVLAVKNQVSDNYYRPDLTKPALARLSSVYRSLQVAKSGVKKKNRQTKH

SEQ ID NO: 125874 - protein, 98 aa, Setaria italica
  misc_feature (20)..(20): Xaa can be any naturally occurring amino acid
  Transcript Sequence Number=SeqID_59900
  Gene Ontology: Mol. function=structural constituent of ribosome; Cellular component=intracellular; Biological process=translation
  Homolog annotation: Hit_ID=B6SQA2; Match level="QueryCoverage=69%, HitCoverage=46%, E-value=4e-28, Identity=91%"; Hit description=60S ribosomal protein L28
  Pfam annotation: Domain name=Ribosomal_L28e; Domain location=1-82; Score=18.7; E_value=4e-06; Accession=PF01778.9; Description =Ribosomal L28e protein family
  Subcellular localization annotation: CTP_CleavageSite=69; ConfidenceScore=5.21e-01
TVTIQPAAGKESAVVLSTTXTKKQNTPAKLNHKSVMRKEFRKMAKAVKNQVSDNYYRPDLTKPALARLSSSSNKSHFKSQNCRNKDNKLGLFEHLTRY

SEQ ID NO: 125875 - protein, 73 aa, Setaria italica
  Transcript Sequence Number=SeqID_59901
  Gene Ontology: Mol. function=structural constituent of ribosome; Cellular component=intracellular; Biological process=translation
  Homolog annotation: Hit_ID=B6SQA2; Match level="QueryCoverage=94%, HitCoverage=47%, E-value=2e-28, Identity=88%"; Hit description=60S ribosomal protein L28
  Pfam annotation: Domain name=Ribosomal_L28e; Domain location=3-67; Score=7.5; E_value=3.3e-05; Accession=PF01778.9; Description =Ribosomal L28e protein family
GEFGNGHAKVQFTKEPNNLYNVHSYKYSGLANKKTVTIQPAAGKESAVVLSTTKTKKQNTPAKLNHKFLLIVV

SEQ ID NO: 125876 - protein, 46 aa, Setaria italica
  Transcript Sequence Number=SeqID_59902
SCNHQVQAICDYGTTHSSSFNKVALVLTSLTSSLKTVGTKIISWDY

SEQ ID NO: 125877 - protein, 44 aa, Setaria italica
  Transcript Sequence Number=SeqID_59903
  Homolog annotation: Hit_ID=B6SQA2; Match level="QueryCoverage=97%, HitCoverage=27%, E-value=1e-09, Identity=79%"; Hit description=60S ribosomal protein L28
GNGHAKVQFTLAWPLPNNLYNVHSYKYSGLANKKTVTIQLQAGL

SEQ ID NO: 125878 - protein, 66 aa, Setaria italica
  Transcript Sequence Number=SeqID_59904
  Gene Ontology: Mol. function=zinc ion binding; Cellular component =COPII vesicle coat; Biological process=ER to Golgi vesicle-mediated transport
  Homolog annotation: Hit_ID=B9RRN0; Match level="QueryCoverage=78%, HitCoverage=6%, E-value=4e-18, Identity=82%"; Hit description =Protein transport protein sec23, putative
  Subcellular localization annotation: CTP_CleavageSite=48; ConfidenceScore=5.33e-01
YPLCALPSPVACLSNLRRSQFVQVFNNSPDETAYFRMLLNRETVTNSVAMIQPSLISFSFDSPPSP

SEQ ID NO: 125879 - protein, 111 aa, Setaria italica
  misc_feature (74)..(74): Xaa can be any naturally occurring amino acid
  Transcript Sequence Number=SeqID_59905
  Gene Ontology: Mol. function=zinc ion binding; Cellular component =COPII vesicle coat; Biological process=ER to Golgi vesicle-mediated transport
  Homolog annotation: Hit_ID=A7LIT7; Match level="QueryCoverage=100%, HitCoverage=42%, E-value=9e-30, Identity=62%"; Hit description =Transport protein (Fragment)
  Pfam annotation: Domain name=Sec23_helical; Domain location=1-66; Score=15.2; E_value=0.00012; Accession=PF04815.7; Description =Sec23Sec24 helical domain
LSLCLTCGNNEKFECRLNEEGSLFPQFMFNLRRSQFVQVFNNSPDETAYFRMLLNRETVTNSVAMIQPSLISFXSFDSPPSPVFLDVASIAADRILLLDAYFSVVIFHGMT

SEQ ID NO: 125880 - protein, 71 aa, Setaria italica
  misc_feature (22)..(22): Xaa can be any naturally occurring amino acid
  misc_feature (60)..(60): Xaa can be any naturally occurring amino acid
  Transcript Sequence Number=SeqID_59906
  Gene Ontology: Mol. function=zinc ion binding; Cellular component =COPII vesicle coat; Biological process=ER to Golgi vesicle-mediated transport
PTWLLRHLGEARAAGAGQPQLXKMPQQPGGPQVNGMHPATTAGVNRFLLPVSECECTLSXLLDELQPDQWP

SEQ ID NO: 125881 - protein, 46 aa, Setaria italica
  Transcript Sequence Number=SeqID_59907
GQMRIRVTTICRKWVDGSTNTEERTGERRNRAHATARTRRAQAHPT

SEQ ID NO: 125882 - protein, 74 aa, Setaria italica
  misc_feature (9)..(9): Xaa can be any naturally occurring amino acid
  misc_feature (16)..(16): Xaa can be any naturally occurring amino acid
  Transcript Sequence Number=SeqID_59908
  Gene Ontology: Mol. function=zinc ion binding; Cellular component =COPII vesicle coat; Biological process=ER to Golgi vesicle-mediated transport
  Homolog annotation: Hit_ID=A7LIT7; Match level="QueryCoverage=72%, HitCoverage=20%, E-value=3e-21, Identity=81%"; Hit description =Transport protein (Fragment)
HGMTIAQWXNMGYQNXPEHEQFAQLLQAPHEEAQMIIKGRFPVPRLVVCDQHGSQVCYFYMFHGSFSFVVIFIS

SEQ ID NO: 125883 - protein, 95 aa, Setaria italica
  Transcript Sequence Number=SeqID_59909
LSRLSYWSVLFVVCLGWSVGSFEKRVKRGAPGASGEADGSGERRNFGAVAKVWSSWVESASAAASGVSVNVAVQLRELEPKTGLGLAAVAGLFSA

SEQ ID NO: 125884 - protein, 86 aa, Setaria italica
  misc_feature (21)..(21): Xaa can be any naturally occurring amino acid
  Transcript Sequence Number=SeqID_59910
MADIALLVAEEFEKRVKRGAXPGASGEADGSGERRNFGAVAKVWSSWVESASAAASGVRVNVAVQLRELEPKTGLGLAAVDGLFSA

SEQ ID NO: 125885 - protein, 60 aa, Setaria italica
  Transcript Sequence Number=SeqID_59911
ATVAETQVNIVRQIHYYQGLWCPHHHRYNNPACCGVSKKLEKVSMYIIHINLSKPKNNSI

SEQ ID NO: 125886 - protein, 91 aa, Setaria italica
  Transcript Sequence Number=SeqID_59912
  Gene Ontology: Mol. function=protein binding
  Homolog annotation: Hit_ID=Q8S5N8; Match level="QueryCoverage=94%, HitCoverage=7%, E-value=1e-35, Identity=85%"; Hit description =Putative F-box protein family
RQCKEDNCPQLKVLKLSACKYLGDSSLDALYRDGALPLLVELDLSYSSIGQTAIEDLLACCTNLVNVNLNGCTNLQELVCNDCSSVDMPVD

SEQ ID NO: 125887 - protein, 49 aa, Setaria italica
  Transcript Sequence Number=SeqID_59913
  Gene Ontology: Mol. function=protein binding
  Homolog annotation: Hit_ID=Q8S5N8; Match level="QueryCoverage=75%, HitCoverage=3%, E-value=2e-11, Identity=97%"; Hit description =Putative F-box protein family
EGITSASMAAIAYSRLLEALQLDNCSLLTSVSLDLPNQQTCVSAQDLYS

SEQ ID NO: 125888 - protein, 45 aa, Setaria italica
  Transcript Sequence Number=SeqID_59914
VNSCFQEKLALPSNVIPALYVFNIKVQVATCFFFIMEDGLAMKFT

SEQ ID NO: 125889 - protein, 54 aa, Setaria italica
  Transcript Sequence Number=SeqID_59915
VNSCFQEKLALPSNVIPALYVFNIKVQVATCFFFIYGRWTSNEEQATIKDKYNA

SEQ ID NO: 125890 - protein, 116 aa, Setaria italica
  misc_feature (93)..(93): Xaa can be any naturally occurring amino acid
  Transcript Sequence Number=SeqID_59916
  Gene Ontology: Mol. function=protein kinase activity; Cellular component=plastoglobule; Biological process=protein amino acid phosphorylation
  Homolog annotation: Hit_ID=B6UDS6; Match level="QueryCoverage=89%, HitCoverage=14%, E-value=4e-48, Identity=90%"; Hit description =Ubiquinone biosynthesis protein ubiB
IGIQCSLRQLLEYGYFHADPHPGNILATPEGEGLLFLIFGMMSETPEDARVAIIGHVVHLVNRDYEAMARDYYALDFLEPDVDVSPIVPALKXFFDDALKRQTSRSRRLENLQKNE

SEQ ID NO: 125891 - protein, 81 aa, Setaria italica
  Transcript Sequence Number=SeqID_59917
MESLFKRYSATRNILLRNTIKELGCQNDPWDIFLQQSRTYTQHPTIRDMMHAVQEKYVRISRGHHGDPEYIAKGSSIPILK

SEQ ID NO: 125892 - protein, 105 aa, Setaria italica
  Transcript Sequence Number=SeqID_59918
  Gene Ontology: Mol. function=protein serine/threonine kinase activity; Cellular component=intracellular; Biological process =protein amino acid phosphorylation
  Homolog annotation: Hit_ID=Q5QN75; Match level="QueryCoverage=91%, HitCoverage=27%, E-value=3e-54, Identity=97%"; Hit description =Mitogen-activated protein kinase kinase 1
SMGQRDTFVGTYNYMAPERISGSSYDYKSDIWSLGLVILECAIGRFPYIPSEGEGWISFYELLEAIVDQPPPSAPADQFSPEFCSFISSCIQKDPASSRYCSCLS

SEQ ID NO: 125893 - protein, 81 aa, Setaria italica
  Transcript Sequence Number=SeqID_59919
  Gene Ontology: Mol. function=metal ion binding
  Homolog annotation: Hit_ID=B6TV57; Match level="QueryCoverage=74%, HitCoverage=13%, E-value=3e-18, Identity=75%"; Hit description=RING -H2 finger protein ATL5I
VTKRGKVFFRCSKVFWSNWFLILEGQATCWFGLDHCQSFSVSKIWQWSNLKGKLPAGSDECSDAGSLPWMKRGGAADTSNI

SEQ ID NO: 125894 - protein, 62 aa, Setaria italica
  Transcript Sequence Number=SeqID_59920
  Gene Ontology: Mol. function=two-component response regulator activity; Biological process=two-component signal transduction system (phosphorelay)
  Homolog annotation: Hit_ID=Q0PVB3; Match level="QueryCoverage=85%, HitCoverage=25%, E-value=2e-13, Identity=73%"; Hit description =Response regulator
MSTMPEPPHVLAVDDSIVDRAVISRLLRSSKYRVTTVDSGKRALEVLSLDRSVHMIITDCRR

SEQ ID NO: 125895 - protein, 76 aa, Setaria italica
  Transcript Sequence Number=SeqID_59921
MFSLIFSAAYISLVLTMEFSMFLGGQFQLAQQLMLNWWSKVKASDLVRRKRLLKSQQLAIQCFELVLFILGKSSFS

SEQ ID NO: 125896 - protein, 43 aa, Setaria italica
  Transcript Sequence Number=SeqID_59922
IDSAIKEGVNILKMVATKGLTEAARLSNADQKYKHLRSHDLQD

SEQ ID NO: 125897 - protein, 96 aa, Setaria italica
  Transcript Sequence Number=SeqID_59923
  Gene Ontology: Mol. function=protein serine/threonine kinase activity; Cellular component=integral to membrane; Biological process=protein amino acid phosphorylation
  Homolog annotation: Hit_ID=B9SFF2; Match level="QueryCoverage=100%, HitCoverage=11%, E-value=3e-20, Identity=48%"; Hit description=S -locus-specific glycoprotein S6, putative
NPKITDFGIARLLGSALNEEVIEGTLGYVAPEYLLVGRASTKSDIYSFGVILIEMIMGKRSFKPSCQRPLHGATEHYAWELWTAGRSLELVDPSLR

SEQ ID NO: 125898 - protein, 60 aa, Setaria italica
  Transcript Sequence Number=SeqID_59924
GAGACHGWIESRTRGVAWEGEEVELEVLEVAGQGHCFHLVDFACADAVKQDDAIARFVNL

SEQ ID NO: 125899 - protein, 90 aa, Setaria italica
  Transcript Sequence Number=SeqID_59925
  Gene Ontology: Mol. function=strictosidine synthase activity
MRAEVLVLAVLVAAAAFLSLDSLSDVRRLEIGNGDDVELVPLLDGAAGPESIAFDESGGGPYTSVSDGRVLRWLPEERRWVEHSCSAPEL

SEQ ID NO: 125900 - protein, 101 aa, Setaria italica
  Transcript Sequence Number=SeqID_59926
  Gene Ontology: Mol. function=strictosidine synthase activity; Cellular component=plasma membrane; Biological process=biosynthetic process
  Homolog annotation: Hit_ID=B9T2X5; Match level="QueryCoverage=100%, HitCoverage=26%, E-value=6e-15, Identity=43%"; Hit description =Strictosidine synthase, putative
FWVGLHAKRGKIAEWSISYPWLRRLILKLPMRHVQRASWLLNRLGRQVIALRLSEDGKTIEVVSVHGAVQKAFKSVSEVEERNGSLWIGSVTSPFLGVYKL

SEQ ID NO: 125901 - protein, 72 aa, Setaria italica
  Transcript Sequence Number=SeqID_59927
  Gene Ontology: Mol. function=strictosidine synthase activity
PMRHVQRASWLLNLLGRQVIALRLSEDGKTIEVVSVHGAVQKAFKSVSEVEERNGSLWIGSVTSPFLGVYKL

SEQ ID NO: 125902 - protein, 105 aa, Setaria italica
  Transcript Sequence Number=SeqID_59928
  Gene Ontology: Mol. function=strictosidine synthase activity
TTSRQENLTTSCLPASSSSLSLAMRAEVVVLAVLVAAAAFLSLDSLSDVRRLEIGDGDVELVPLDGAAGPESIVVDERGGGPYTSVSDGRVLRWLAEERRWVEHS

SEQ ID NO: 125903 - protein, 73 aa, Setaria italica
  Transcript Sequence Number=SeqID_59929
  Gene Ontology: Mol. function=strictosidine synthase activity; Biological process=biosynthetic process
  Homolog annotation: Hit_ID=B9T2X8; Match level="QueryCoverage=94%, HitCoverage=18%, E-value=3e-13, Identity=49%"; Hit description =Strictosidine synthase, putative
  Pfam annotation: Domain name=Str_synth; Domain location=1-70; Score =36.0; E_value=1.5e-07; Accession=PF03088.8; Description =Strictosidine synthase
PRLLRFICREFLNIVISGDNTGRLLKYDPKSNQVEVLVDGLSFANGLAMSTDGTYLLLAETTTGKILKVTWIQ

SEQ ID NO: 125904 - protein, 59 aa, Setaria italica
  Transcript Sequence Number=SeqID_59930
CYSIKRLPYTHIHVAYSIIQSKCFYNLYTPRKGDMTEPIHKLPFLSSNLRLELELRKTF

SEQ ID NO: 125905 - protein, 77 aa, Setaria italica
  misc_feature (72)..(72): Xaa can be any naturally occurring amino acid
  Transcript Sequence Number=SeqID_59931
  Subcellular localization annotation: CTP_CleavageSite=52; ConfidenceScore=5.47e-01
SLKQICTGPASLHSAEFTLLPPCFFFVSVSRDARGGGGARRARRRGGLPVARLAQRRQAARDRGRDVELVPXDGAAG

SEQ ID NO: 125906 - protein, 90 aa, Setaria italica
  Transcript Sequence Number=SeqID_59932
  Gene Ontology: Mol. function=DNA binding; Biological process =regulation of transcription
  Homolog annotation: Hit_ID=B6T0L0; Match level="QueryCoverage=73%, HitCoverage=21%, E-value=1e-28, Identity=89%"; Hit description=MYB -like transcription factor DIVARICATA
  Pfam annotation: Domain name=Myb_DNA-binding; Domain location=37-84; Score=52.4; E_value=1.7e-12; Accession=PF00249.23; Description=Myb -like DNA-binding domain
PPSSGFTLEDWDGGDGGFRRGYCLKRARGPDQERKKGIPWTEEEHKLFLMGLKKYGRGDWRNISRKYVTTRTPTQVASHAQKYFIRLNSG

SEQ ID NO: 125907 - protein, 131 aa, Setaria italica
  Transcript Sequence Number=SeqID_59933
  Gene Ontology: Mol. function=kinase activity
  Homolog annotation: Hit_ID=B9S1A3; Match level="QueryCoverage=44%, HitCoverage=10%, E-value=1e-14, Identity=74%"; Hit description =Bromodomain-containing protein, putative
TPCSEEARGVNNFPPLVQRKQEVESYLHLEPLSPSKALRIAMLKSRFAGTIVKAQQNALLDHGKEVDLAKLQLEKERLEKSQLEEKARIEAQVKAAEAAAQLKLEEEMRMKREKERKAARLALHMMKKTVD

SEQ ID NO: 125908 - protein, 48 aa, Setaria italica
  misc_feature (13)..(13): Xaa can be any naturally occurring amino acid
  Transcript Sequence Number=SeqID_59934
PQGLGSPLEALGXFIKKDLEEEVEQELEDSLSTSLNADVEEGEISCCQ

SEQ ID NO: 125909 - protein, 86 aa, Setaria italica
  Transcript Sequence Number=SeqID_59935
  Subcellular localization annotation: CTP_CleavageSite=94; ConfidenceScore=5.34e-01
TVPYGESQLSQAPKKISQKGHIIPPFRATVPHQQLTCCSRIHPDPTLRVQFSSSSSSTSSPSKSSSSSSSPSKLQYLQTYNLFVSY

SEQ ID NO: 125910 - protein, 63 aa, Setaria italica
  misc_feature (19)..(19): Xaa can be any naturally occurring amino acid
  Transcript Sequence Number=SeqID_59936
  Gene Ontology: Mol. function=protein kinase activity; Biological process=protein amino acid phosphorylation
  Homolog annotation: Hit_ID=Q6Y2W9; Match level="QueryCoverage=98%, HitCoverage=9%, E-value=5e-20, Identity=80%"; Hit description =Atypical receptor-like kinase MARK
PMAQLLQLAIDCVAQVPEXRPSMAHVVMRLEEIKKSSVASNIEGGDDQSSKAESEVPTNPFAP

SEQ ID NO: 125911 - protein, 101 aa, Setaria italica
  Transcript Sequence Number=SeqID_59937
  Homolog annotation: Hit_ID=B6U2I0; Match level="QueryCoverage=43%, HitCoverage=5%, E-value=3e-09, Identity=77%"; Hit description =Atypical receptor-like kinase MARK
  Pfam annotation: Domain name=SKG6; Domain location=26-60; Score=10.0; E_value=0.053; Accession=PF08693.2; Description=Transmembrane alpha -helix domain
  Subcellular localization annotation: CTP_CleavageSite=77; ConfidenceScore=5.22e-01
LTRRTDGRPSKRTASNGGNGGRSGHKSKKLSGGAIAGIAVGSALGAALLLFLFVCLCRKSGGTKTRSLEMPPPSSTPAAVAGGRKPPEMTSGAAVAPLTTI

SEQ ID NO: 125912 - protein, 43 aa, Setaria italica
  Transcript Sequence Number=SeqID_59938
SLIDLTEESAITLARIRSIHAFDESYLQLSRLFFSSFSLLNLT

SEQ ID NO: 125913 - protein, 50 aa, Setaria italica
  misc_feature (16)..(16): Xaa can be any naturally occurring amino acid
  Transcript Sequence Number=SeqID_59939
  Subcellular localization annotation: CTP_CleavageSite=33; ConfidenceScore=5.22e-01
SQHPSNLAPGPSTTTXHIVFGRPDSEFSTVPLASSSYSSVPTPFLRPPPR

SEQ ID NO: 125914 - protein, 59 aa, Setaria italica
  Transcript Sequence Number=SeqID_59940
LYSIGFLFVPGLVPHPKVKLFVSFVDNAMMIIVDSKFTLLFSSLVHVKKLICKWTVSHP

SEQ ID NO: 125915 - protein, 75 aa, Setaria italica
  Transcript Sequence Number=SeqID_59941
QWMEIEPELLIIPCTKEENRRVNFESTIIIIALSTNETNSLTFGCGTSPGTKRNPILYSVHLTAIILEVVLRMES

SEQ ID NO: 125916 - protein, 50 aa, Setaria italica
  Transcript Sequence Number=SeqID_59942
KGWNHSTQSTVFLIQLVTQVTKPDSSDEYRKNYNRMRTNSRKAKLYHTNC

SEQ ID NO: 125917 - protein, 76 aa, Setaria italica
  Transcript Sequence Number=SeqID_59943
LLAFRVVAFFILASLLLIDIVTDGWSIFLYYTQWTFLLVTLYFGVCSLRLKKNIYFRCWPLYHLRLAAPVTDFTLY

SEQ ID NO: 125918 - protein, 54 aa, Setaria italica
  Transcript Sequence Number=SeqID_59944
EPSRLIRQMPKTIRVRGVTTVYSYSSYSVGEKRGAEVCRSWRNLVLQYIAILES

SEQ ID NO: 125919 - protein, 79 aa, Setaria italica
  Transcript Sequence Number=SeqID_59945
  Gene Ontology: Mol. function=serine-type peptidase activity; Biological process=proteolysis
  Homolog annotation: Hit_ID=Q9FW17; Match level="QueryCoverage=79%, HitCoverage=10%, E-value=1e-29, Identity=90%"; Hit description =Putative serine peptidase
LQACKYLFTLQFLLGSRLWWFQVCSEVAFFQIAPKTDSVRSARIDTRYHLDLCRNVFGEGVYPDVFMTNLYYGGTRIAA

SEQ ID NO: 125920 - protein, 31 aa, Setaria italica
  Transcript Sequence Number=SeqID_59946
RRSCASRVAIHSYSGVLTTAMCISRCAASTS

SEQ ID NO: 125921 - protein, 100 aa, Setaria italica
  misc_feature (41)..(41): Xaa can be any naturally occurring amino acid
  Transcript Sequence Number=SeqID_59947
  Subcellular localization annotation: CTP_CleavageSite=64; ConfidenceScore=5.34e-01
PSPSALGLPLHSAHLPSAGGGRAFREVNAGVGTGTKTKDGXAVGAVGGPSATSVLELLECPVCTCSMFPPIHQVGASLSLLRFRMGFQMGVACRFGGSRW

SEQ ID NO: 125922 - protein, 51 aa, Setaria italica
  Transcript Sequence Number=SeqID_59948
VPCLQPRLPIVTRPIHQVGASLPLLRFQMGFQMGLRADLGISVVSSHPWRC

SEQ ID NO: 125923 - protein, 108 aa, Setaria italica
  misc_feature (73)..(73): Xaa can be any naturally occurring amino acid
  misc_feature (101)..(101): Xaa can be any naturally occurring amino acid
  Transcript Sequence Number=SeqID_59949
  Gene Ontology: Cellular component=integral to membrane
  Homolog annotation: Hit_ID=Q9LNJ8; Match level="QueryCoverage=73%, HitCoverage=40%, E-value=2e-31, Identity=83%"; Hit description =F6F3.4 protein
  Pfam annotation: Domain name=ORMDL; Domain location=5-108; Score =70.6; E_value=5.6e-18; Accession=PF04061.6; Description=ORMDL family
QCKITVWHFSSRLQPKSLSISVACLIKYFFQITYHFFHWKKGTPFADDQGMYNTLTWWEQMDNGKQLTRNRKXFLTAVPVVLYLIASHTTDYQHPMLFLNXLAVTVLV

SEQ ID NO: 125924 - protein, 72 aa, Setaria italica
  Transcript Sequence Number=SeqID_59950
PLDKEQTCTCINCQILARERITTLRVYRTFCSLVAESIIVPAFLAFLCTMITCHLRTALKHCYRYSGDSIQN

SEQ ID NO: 125925 - protein, 47 aa, Setaria italica
  Transcript Sequence Number=SeqID_59951
LSWFCSVYRRKEVSYKMNQKFQGNMQKYLVDGYDFLNYSFLCLKSHG

SEQ ID NO: 125926 - protein, 102 aa, Setaria italica
  Transcript Sequence Number=SeqID_59952
GDRRRRRREPRPITANVFIWLGTSNLKDFCYGIRICLNRIPIRRRFKILEIISVPNKKYTLISFLSRMKIGVENSVHPPWPTGNKALGTTGRSRDAPPDHKA

SEQ ID NO: 125927 - protein, 151 aa, Setaria italica
  misc_feature (74)..(74): Xaa can be any naturally occurring amino acid
  Transcript Sequence Number=SeqID_59953
  Gene Ontology: Mol. function=RNA polymerase II transcription factor activity; Cellular component=nucleus; Biological process=regulation of transcription, DNA-dependent
  Homolog annotation: Hit_ID=B9RZ76; Match level="QueryCoverage=93%, HitCoverage=31%, E-value=4e-42, Identity=61%"; Hit description=Tfiih, polypeptide, putative
  Pfam annotation: Domain name=Tfb2; Domain location=2-151; Score= -188.8; E_value=4.6e-05; Accession=PF03849.6; Description =Transcription factor Tfb2
SSFLLYCKYYFQRGLLSSRDGEAPKLTENGFQFLLMETNAQLWYIMREYISSAEERGVDPTELISFLLELSFHXLGAAYSLNTLTDVERIAIRDLAELGLVKLQQGRKDSWFIPTQLATNLSASLSDSSSSKEALLFGDKLRMYAYSTSKL

SEQ ID NO: 125928 - protein, 75 aa, Setaria italica
  Transcript Sequence Number=SeqID_59954
  Gene Ontology: Mol. function=RNA polymerase II transcription factor activity; Cellular component=nucleus; Biological process=regulation of transcription, DNA-dependent
  Homolog annotation: Hit_ID=B9RZ76; Match level="QueryCoverage=89%, HitCoverage=14%, E-value=2e-20, Identity=71%"; Hit description=Tfiih, polypeptide, putative
MMMTSTEFQGRKDSWFIPTQLATNLSASLSDSSSSKEGFVVLETNFRMYAYSTSKLHCEILRLFSRYMRVEYQLP

SEQ ID NO: 125929 - protein, 73 aa, Setaria italica
  misc_feature (34)..(34): Xaa can be any naturally occurring amino acid
  Transcript Sequence Number=SeqID_59955
  Gene Ontology: Mol. function=RNA polymerase II transcription factor activity; Cellular component=nucleus; Biological process=regulation of transcription, DNA-dependent
  Homolog annotation: Hit_ID=B9RZ76; Match level="QueryCoverage=75%, HitCoverage=15%, E-value=2e-13, Identity=57%"; Hit description=Tfiih, polypeptide, putative
RRRNNNLPTAEERGVDPTELISFLLELSFHKLGXDLAELGLVKLQQGRKDSWFIPTQLATNLSASLSDSSSSK

SEQ ID NO: 125930 - protein, 42 aa, Setaria italica
  Transcript Sequence Number=SeqID_59956
PAASSVHLWRTEGWVLNPSLLQNRLSDSFQFKLWRTGISAHA

SEQ ID NO: 125931 - protein, 111 aa, Setaria italica
  misc_feature (21)..(21): Xaa can be any naturally occurring amino acid
  Transcript Sequence Number=SeqID_59957
  Gene Ontology: Mol. function=catalytic activity; Cellular component =ribosome; Biological process=metabolic process
  Homolog annotation: Hit_ID=Q10J52; Match level="QueryCoverage=82%, HitCoverage=37%, E-value=6e-20, Identity=55%"; Hit description =Transposon protein, putative, Pong sub-class
  Pfam annotation: Domain name=Plant_tran; Domain location=1-42; Score=- 14.4; E_value=6.5e-06; Accession=PF04827.6; Description=Plant transposon protein
MQARFAIIHGPARFWDKEILXEIMKVCIIMHNMIIEDGRNDDEDFDYDGVGQVVIPTPHEVRNRTQELHDFIQVHHNIRDLQGHSPLQEDLIGTTGARLDLLEVENWSLSK

SEQ ID NO: 125932 - protein, 71 aa, Setaria italica
  Transcript Sequence Number=SeqID_59958
ATNRTAWPLRIRQAWIDFFFCLDGVSSYLMIMEPKHSAEMSKHLEKQNQALMGTYRAMSHELYKLQVCPRL

SEQ ID NO: 125933 - protein, 112 aa, Setaria italica
  Transcript Sequence Number=SeqID_59959
LRLAGARHGARHEVGLPFQHYAFSLAHPRNSSSCCFICSSSFTIDLANKTGAKIESRGENPADLPKPKPNPWQIAGTKSALRDRPRKPPNQVLPATPPPRNPPPPVLPTLGS

SEQ ID NO: 125934 - protein, 82 aa, Setaria italica
  Transcript Sequence Number=SeqID_59960
CPLRLRLAGARHGARHEVGLPFQHYAFSLAHPRNSSSCCFICSSSFTIDLNRIHGRSQAPNLQQEEEFRGEQGVRLPRHTGG

SEQ ID NO: 125935 - protein, 105 aa, Setaria italica
  Transcript Sequence Number=SeqID_59961
  Gene Ontology: Mol. function=oxidoreductase activity, acting on the aldehyde or oxo group of donors, disulfide as acceptor; Biological process=metabolic process
  Homolog annotation: Hit_ID=B9RNK3; Match level="QueryCoverage=86%, HitCoverage=21%, E-value=3e-39, Identity=83%"; Hit description =Pyruvate dehydrogenase, putative
AIVKLTPSHSLCTDEKTHYAARDPITALKKYIIEQNLATEPELKSIEKNIDNVVEEAVEFADASPHPPRSQLLENVFADPKGFGIGPDGKYRCEDPKFTQGTAQV

SEQ ID NO: 125936 - protein, 96 aa, Setaria italica
  Transcript Sequence Number=SeqID_59962
  Gene Ontology: Mol. function=protein phosphatase type 2A regulator activity; Cellular component=protein phosphatase type 2A complex; Biological process=signal transduction
  Homolog annotation: Hit_ID=Q32SG1; Match level="QueryCoverage=92%, HitCoverage=17%, E-value=3e-46, Identity=98%"; Hit description =Protein phosphatase 2A regulatory subunit B'
DTVIRGLLKYWPITNSSKEVMFLGELEEILEATQPAEFQKCMVPLFRQIARCLNSSHFQVAERALFLWNNDHIESLIKQNSRVILPIIFRTFRVRL

SEQ ID NO: 125937 - protein, 70 aa, Setaria italica
  Transcript Sequence Number=SeqID_59963
MIQQSTADLSMPKEARTQDQENDATVPKPIWLLRSFVNLPTLIYLVYTTQSCTTFHEHHMNDLTRYTADD

SEQ ID NO: 125938 - protein, 47 aa, Setaria italica
  Transcript Sequence Number=SeqID_59964
  Gene Ontology: Mol. function=protein phosphatase type 2A regulator activity; Cellular component=protein phosphatase type 2A complex; Biological process=signal transduction
  Homolog annotation: Hit_ID=B9SH46; Match level="QueryCoverage=89%, HitCoverage=7%, E-value=1e-15, Identity=95%"; Hit description =Protein phosphatase 2a, regulatory subunit, putative
LSPELEILGSIINGFALPLKEEHKLFLVRALIPLHKPKGISMYHQQF

SEQ ID NO: 125939 - protein, 96 aa, Setaria italica
  Transcript Sequence Number=SeqID_59965
LYLYSCLVLVLVLGIVICYCRFFKLSQTQRFDETDSNPVIIGTLHVPYASSLIGQVSYHKNGASGWLLERLKGHQVWISVGSAICDLSTNKSSRNN

SEQ ID NO: 125940 - protein, 116 aa, Setaria italica
  misc_feature (76)..(76): Xaa can be any naturally occurring amino acid
  Transcript Sequence Number=SeqID_59966
MLVQLEAGTSTGCVPLLVQLEAGTSTGCMSNGTQHVGPQNTISACPDVASDLRVSASMVPHFNSPDYSKLLSEQEXLLMNGLKNINITGNGYLEQRLQAGLSGLQFMGIYLRYLLN

SEQ ID NO: 125941 - protein, 34 aa, Setaria italica
  Transcript Sequence Number=SeqID_59967
ERPSPLHLFHMIMYQICNVTTRFNSLWVFTSDTC

SEQ ID NO: 125942 - protein, 67 aa, Setaria italica
  Transcript Sequence Number=SeqID_59968
TKIIEAGTYLLEHQNNQMATVVSQTIEHAVELSEHLHRIRISDVRYSDPTLGHVCRLGGNGGAEDPR

SEQ ID NO: 125943 - protein, 79 aa, Setaria italica
  Transcript Sequence Number=SeqID_59969
  Gene Ontology: Mol. function=aspartic-type endopeptidase activity; Cellular component=nuclear pore; Biological process=DNA integration
  Homolog annotation: Hit_ID=Q10CH1; Match level="QueryCoverage=55%, HitCoverage=3%, E-value=7e-12, Identity=65%"; Hit description =Retrotransposon protein, putative, Ty1-copia subclass
YGYFCATGEPQTLEEALGDSKWKKAMEEEYMALLRNQTWHLVPPAGWEAMVVRRIHGEASRPPALPRCKPSPQHHARRP

SEQ ID NO: 125944 - protein, 95 aa, Setaria italica
  Transcript Sequence Number=SeqID_59970
  Homolog annotation: Hit_ID=B6SY37; Match level="QueryCoverage=94%, HitCoverage=15%, E-value=8e-28, Identity=71%"; Hit description=VHS and GAT domain protein
MLLRSARDGTVAQSNQPSAPRNERPYPSPLLPPPPASKRPVYTEASNIDYLSGDSYKSEKVSDDFINPTAPANISTSSHLKTEAYPPPSYGSRSV

SEQ ID NO: 125945 - protein, 86 aa, Setaria italica
  misc_feature (14)..(14): Xaa can be any naturally occurring amino acid
  Transcript Sequence Number=SeqID_59971
  Gene Ontology: Mol. function=oxidoreductase activity, acting on paired donors, with incorporation or reduction of molecular oxygen, 2-oxoglutarate as one donor, and incorporation of one atom each of oxygen into both ...
  Gene Ontology: Mol. function=donors; Biological process=protein metabolic process
  Homolog annotation: Hit_ID=B6U853; Match level="QueryCoverage=100%, HitCoverage=20%, E-value=2e-36, Identity=87%"; Hit description =Oxidoreductase
YDYTHIPGQAVLHXGRHRHGARATSSGLRINLLLWCRSSVFREMKKYQKDFPSWCGECQRRKRERQSQYVKATKMAFLRGAGGAMI

SEQ ID NO: 125946 - protein, 86 aa, Setaria italica
  Transcript Sequence Number=SeqID_59972
  Gene Ontology: Mol. function=oxidoreductase activity, acting on paired donors, with incorporation or reduction of molecular oxygen, 2-oxoglutarate as one donor, and incorporation of one atom each of oxygen into both ...
  Gene Ontology: Mol. function=donors; Biological process=protein metabolic process
  Homolog annotation: Hit_ID=B6U853; Match level="QueryCoverage=100%, HitCoverage=20%, E-value=9e-31, Identity=76%"; Hit description =Oxidoreductase
YDYTHIPGQAVLHRGRHRHGARATSSGLRINLLLWCRSSVFREMKKYQKDFPSWCGECQREKRERQSQYVKATKMAFLRGAGGAMI

SEQ ID NO: 125947 - protein, 35 aa, Setaria italica
  Transcript Sequence Number=SeqID_59973
QTQPLRQPHLYPPPGQSYEDAAIEASLQSALLYLP

SEQ ID NO: 125948 - protein, 129 aa, Setaria italica
  Transcript Sequence Number=SeqID_59974
  Gene Ontology: Mol. function=oxidoreductase activity, acting on paired donors, with incorporation or reduction of molecular oxygen, 2-oxoglutarate as one donor, and incorporation of one atom each of oxygen into both ...
  Gene Ontology: Mol. function=donors; Biological process=protein metabolic process
  Homolog annotation: Hit_ID=B6U853; Match level="QueryCoverage=89%, HitCoverage=29%, E-value=5e-58, Identity=91%"; Hit description =Oxidoreductase
ISLHGAVLDDFGLEAMLNQFMEQFIAPISRVFYAEVGGGTLDSHHAFVVEYGKDRDVELGFHVDDSEVTLNVCLGKQFSGGELYFRGIRCENHVNSETQHEEMYDYTHIPGQAVLHRGRHRHGARATSS

SEQ ID NO: 125949 - protein, 134 aa, Setaria italica
  Transcript Sequence Number=SeqID_59975
  Gene Ontology: Mol. function=oxidoreductase activity, acting on paired donors, with incorporation or reduction of molecular oxygen, 2-oxoglutarate as one donor, and incorporation of one atom each of oxygen into both ...
  Gene Ontology: Mol. function=donors; Biological process=protein metabolic process
  Homolog annotation: Hit_ID=B6U853; Match level="QueryCoverage=100%, HitCoverage=34%, E-value=7e-71, Identity=93%"; Hit description =Oxidoreductase
FPPSLLDADRGVKLHFMRDILARYWPQGERNKVQRHKEYRQRILHLYKPLHEELYNMHPSAFFLPTFLEAVSSNSEESFRSIMTEPIPGVYSFAMLQPAFCEMLLEEVENFEKWVHAMKFKIMRPNTMNKYGAV

SEQ ID NO: 125950 - protein, 75 aa, Setaria italica
  Transcript Sequence Number=SeqID_59976
  Gene Ontology: Mol. function=oxidoreductase activity, acting on paired donors, with incorporation or reduction of molecular oxygen, 2-oxoglutarate as one donor, and incorporation of one atom each of oxygen into both ...
  Gene Ontology: Mol. function=donors; Biological process=protein metabolic process
  Homolog annotation: Hit_ID=B6U853; Match level="QueryCoverage=96%, HitCoverage=18%, E-value=8e-33, Identity=90%"; Hit description =Oxidoreductase
GGTLDSHHAFVVEYGKDRDVELGFHVDDSEVTLNVCLGKQFSGGELYFRGIRCENHVNSETQHEAVLHRGHIGMV

SEQ ID NO: 125951 - protein, 128 aa, Setaria italica
  misc_feature (112)..(112): Xaa can be any naturally occurring amino acid
  Transcript Sequence Number=SeqID_59977
  Gene Ontology: Mol. function=oxidoreductase activity, acting on paired donors, with incorporation or reduction of molecular oxygen, 2-oxoglutarate as one donor, and incorporation of one atom each of oxygen into both ...
  Gene Ontology: Mol. function=donors; Biological process=protein metabolic process
  Homolog annotation: Hit_ID=B6U853; Match level="QueryCoverage=97%, HitCoverage=44%, E-value=4e-43, Identity=56%"; Hit description =Oxidoreductase
NGNGVAPLQVSRPAGRPAAATAPYADRRLRLNPNAEHKPQDYSDVRGEYAPAVYSALERHLPPSLLDADRGVKLHFMRDILARYWPQGERNKVQRHKEYRQRILHLYKPAFXEMLLEEVENFEKWSMQ

SEQ ID NO: 125952 - protein, 139 aa, Setaria italica
  misc_feature (27)..(27): Xaa can be any naturally occurring amino acid
  misc_feature (121)..(121): Xaa can be any naturally occurring amino acid
  misc_feature (132)..(132): Xaa can be any naturally occurring amino acid
  Transcript Sequence Number=SeqID_59978
  Gene Ontology: Mol. function=oxidoreductase activity, acting on paired donors, with incorporation or reduction of molecular oxygen, 2-oxoglutarate as one donor, and incorporation of one atom each of oxygen into both ...
  Gene Ontology: Mol. function=donors; Biological process=protein metabolic process
  Homolog annotation: Hit_ID=B6U853; Match level="QueryCoverage=91%, HitCoverage=31%, E-value=1e-61, Identity=91%"; Hit description =Oxidoreductase
LVGITSYLLQAFFHEELYNMHPSAFFXLPTFLEAVSSNSEESFRSIMTEPIPGVYSFAMLQPAFCEMLLEEVENFEKWVHAMKFKIMRPNTMNKYGAVLDDFGLEAMLNQFMEQFIAPISXVFYAEVGGGTXLDSHHAF

SEQ ID NO: 125953 - protein, 128 aa, Setaria italica
  misc_feature (44)..(44): Xaa can be any naturally occurring amino acid
  misc_feature (98)..(98): Xaa can be any naturally occurring amino acid
  misc_feature (114)..(114): Xaa can be any naturally occurring amino acid
  Transcript Sequence Number=SeqID_59979
  Gene Ontology: Mol. function=oxidoreductase activity, acting on paired donors, with incorporation or reduction of molecular oxygen, 2-oxoglutarate as one donor, and incorporation of one atom each of oxygen into both ...
  Gene Ontology: Mol. function=donors; Biological process=protein metabolic process
  Homolog annotation: Hit_ID=B6U853; Match level="QueryCoverage=99%, HitCoverage=32%, E-value=3e-61, Identity=88%"; Hit description =Oxidoreductase
QVSSNSEESFRSIMTEPIPGVYSFAMLQPAFCEMLLEEVENFEXWVHAMKFKIMRPNTMNKYGAVLDDFGLEAMLNQFMEQFIAPISRVFYAEVGGGXLDSHHAFVLNMGKDRXDVELGFHVDDSEVT

SEQ ID NO: 125954 - protein, 78 aa, Setaria italica
  Transcript Sequence Number=SeqID_59980
  Gene Ontology: Mol. function=oxidoreductase activity, acting on paired donors, with incorporation or reduction of molecular oxygen, 2-oxoglutarate as one donor, and incorporation of one atom each of oxygen into both ...
  Gene Ontology: Mol. function=donors; Biological process=protein metabolic process
  Homolog annotation: Hit_ID=B6U853; Match level="QueryCoverage=100%, HitCoverage=20%, E-value=1e-20, Identity=66%"; Hit description =Oxidoreductase
MALEGPAERRDEVQVAMGNGNGVAPLQVSRPAGRPAAATAPYADRRLRLNPNAEHKPQDYSDVRGEYAPAVYSALERH

SEQ ID NO: 125955 - protein, 54 aa, Setaria italica
  Transcript Sequence Number=SeqID_59981
  Homolog annotation: Hit_ID=B6SY37; Match level="QueryCoverage=94%, HitCoverage=8%, E-value=6e-14, Identity=74%"; Hit description=VHS and GAT domain protein
LTEASGPSVERERGERGMVNVLDEMLNALDHRHPEGVREEVIIDLVGQCRSYQS

SEQ ID NO: 125956 - protein, 64 aa, Setaria italica
  misc_feature (62)..(62): Xaa can be any naturally occurring amino acid
  Transcript Sequence Number=SeqID_59982
  Gene Ontology: Mol. function=heat shock protein binding; Cellular component=nucleus; Biological process=protein folding
  Homolog annotation: Hit_ID=B4G111; Match level="QueryCoverage=100%, HitCoverage=16%, E-value=2e-24, Identity=84%"; Hit description =Chaperone protein dnaJ 10
  Pfam annotation: Domain name=DnaJ; Domain location=6-63; Score=96.0; E_value=1.3e-25; Accession=PF00226.23; Description=DnaJ domain
MEWETGYYDVLGVTPAATEAEIKKAYYIKARQVHPDKNPNDPLAAARFQELGEAYQVLSDPXQR

SEQ ID NO: 125957 - protein, 116 aa, Setaria italica
  Transcript Sequence Number=SeqID_59983
  Gene Ontology: Mol. function=oxidoreductase activity, acting on paired donors, with incorporation or reduction of molecular oxygen, 2-oxoglutarate as one donor, and incorporation of one atom each of oxygen into both ...
  Gene Ontology: Mol. function=donors; Biological process=protein metabolic process
  Homolog annotation: Hit_ID=B6U853; Match level="QueryCoverage=100%, HitCoverage=28%, E-value=2e-50, Identity=84%"; Hit description =Oxidoreductase
  Pfam annotation: Domain name=2OG-FeII_Oxy; Domain location=2-101; Score=23.8; E_value=0.00071; Accession=PF03171.12; Description=2OG -Fe(II) oxygenase superfamily
LDSHHAFVVEYGKDRDVELGFHVDDSEVTLNVCLGKQFSGGELYFRGIRCENHVNSETQHEEMYDYTHIPGQAVLHRGRHRHGARATSSGLRINLLLWCRSSVFREMKKYQKDFPS

SEQ ID NO: 125958 - protein, 112 aa, Setaria italica
  Transcript Sequence Number=SeqID_59984
  Gene Ontology: Mol. function=oxidoreductase activity, acting on paired donors, with incorporation or reduction of molecular oxygen, 2-oxoglutarate as one donor, and incorporation of one atom each of oxygen into both ...
  Gene Ontology: Mol. function=donors; Biological process=protein metabolic process
  Homolog annotation: Hit_ID=B6U853; Match level="QueryCoverage=100%, HitCoverage=28%, E-value=9e-51, Identity=84%"; Hit description =Oxidoreductase
  Pfam annotation: Domain name=2OG-FeII_Oxy; Domain location=19-112; Score=5.3; E_value=0.048; Accession=PF03171.12; Description=2OG -Fe(II) oxygenase superfamily
FIAPISRVFYAEVGGGTLDSHHAFVVEYGKDRDVELGFHVDDSEVTLNVCLGKQFSGGELYFRGIRCENHVNSETQHEEMYDYTHIPGQAVLHRGRHRHGARATSSGLRINL

SEQ ID NO: 125959 - protein, 106 aa, Setaria italica
  misc_feature (84)..(84): Xaa can be any naturally occurring amino acid
  misc_feature (101)..(101): Xaa can be any naturally occurring amino acid
  Transcript Sequence Number=SeqID_59985
  Gene Ontology: Mol. function=oxidoreductase activity, acting on paired donors, with incorporation or reduction of molecular oxygen, 2-oxoglutarate as one donor, and incorporation of one atom each of oxygen into both ...
  Gene Ontology: Mol. function=donors; Biological process=protein metabolic process
  Homolog annotation: Hit_ID=B6U853; Match level="QueryCoverage=99%, HitCoverage=25%, E-value=3e-34, Identity=69%"; Hit description =Oxidoreductase
FRGIRCENHVNSETQHEEMYDYTHIPGQAVLHRGRHRHGARATSSGLRINLLLWCRSSVFREMKKYQKDFPSWCGECQREKREXRVSMLKQLRWAFSRGGXGGAMI

SEQ ID NO: 125960 - protein, 62 aa, Setaria italica
  misc_feature (27)..(27): Xaa can be any naturally occurring amino acid
  Transcript Sequence Number=SeqID_59986
RNWQRHTRYCSYSFHFNYMDHRIMGLXVLEASKVAFRSCNWQRHTQIFVPIVFISIIWITEL

SEQ ID NO: 125961 - protein, 129 aa, Setaria italica
  misc_feature (34)..(34): Xaa can be any naturally occurring amino acid
  misc_feature (55)..(55): Xaa can be any naturally occurring amino acid
  Transcript Sequence Number=SeqID_59987
  Gene Ontology: Mol. function=oxidoreductase activity, acting on paired donors, with incorporation or reduction of molecular oxygen, 2-oxoglutarate as one donor, and incorporation of one atom each of oxygen into both ...
  Gene Ontology: Mol. function=donors; Biological process=protein metabolic process
  Homolog annotation: Hit_ID=B6U853; Match level="QueryCoverage=79%, HitCoverage=26%, E-value=1e-49, Identity=91%"; Hit description =Oxidoreductase
RGRELLKKWVHAMKFKIMRPNTMNKYGAVLDDFXGLEAMLNQFMEQFIAPISRVXYAEVGGGTLDSHHAFVVEYGKDRDVELGFHVDDSEVTLNVCLGKQFSGGEINNLPKDNYVSRRNTIVENLTKVK

SEQ ID NO: 125962 - protein, 122 aa, Setaria italica
  misc_feature (73)..(73): Xaa can be any naturally occurring amino acid
  Transcript Sequence Number=SeqID_59988
  Gene Ontology: Mol. function=oxidoreductase activity, acting on paired donors, with incorporation or reduction of molecular oxygen, 2-oxoglutarate as one donor, and incorporation of one atom each of oxygen into both ...
  Gene Ontology: Mol. function=donors; Biological process=protein metabolic process
  Homolog annotation: Hit_ID=B6U853; Match level="QueryCoverage=100%, HitCoverage=30%, E-value=4e-62, Identity=93%"; Hit description =Oxidoreductase
NTMNKYGAVLDDFGLEAMLNQFMEQFIAPISRVFYAEVGGGTLDSHHAFVVEYGKDRDVELGFHVDDSEVTLXNVCLGKQFSGGELYFRGIRCENHVNSETQHEEMYDYTHIPGQAVLHRGR

SEQ ID NO: 125963 - protein, 96 aa, Setaria italica
  misc_feature (80)..(80): Xaa can be any naturally occurring amino acid
  Transcript Sequence Number=SeqID_59989
  Gene Ontology: Mol. function=oxidoreductase activity, acting on paired donors, with incorporation or reduction of molecular oxygen, 2-oxoglutarate as one donor, and incorporation of one atom each of oxygen into both ...
  Gene Ontology: Mol. function=donors; Biological process=protein metabolic process
  Homolog annotation: Hit_ID=B6U853; Match level="QueryCoverage=96%, HitCoverage=23%, E-value=7e-45, Identity=89%"; Hit description =Oxidoreductase
QFIAPISRVFYAEVGGGTLDSHHAFVVEYGKDRDVELGFHVDDSEVTLNVCLGKQFSGGELYFRGIRCENHVNSETQHEXMYDYTHYSWTGLYSIV

SEQ ID NO: 125964 - protein, 109 aa, Setaria italica
  misc_feature (14)..(14): Xaa can be any naturally occurring amino acid
  Transcript Sequence Number=SeqID_59990
  Gene Ontology: Mol. function=oxidoreductase activity, acting on paired donors, with incorporation or reduction of molecular oxygen, 2-oxoglutarate as one donor, and incorporation of one atom each of oxygen into both ...
  Gene Ontology: Mol. function=donors; Biological process=protein metabolic process
  Homolog annotation: Hit_ID=B6U853; Match level="QueryCoverage=100%, HitCoverage=26%, E-value=3e-44, Identity=81%"; Hit description =Oxidoreductase
KQFSGGELYFRGIXCENHVNSETQHEEMYDYTHIPGQAVLHRGRHRHGARATSSGLRINLLLWCRSSVFREMKKYQKDFPSWCGECQREKRERQSQYVKATKMAFLRGA

SEQ ID NO: 125965 - protein, 77 aa, Setaria italica
  Transcript Sequence Number=SeqID_59991
  Gene Ontology: Mol. function=oxidoreductase activity, acting on paired donors, with incorporation or reduction of molecular oxygen, 2-oxoglutarate as one donor, and incorporation of one atom each of oxygen into both ...
  Gene Ontology: Mol. function=donors; Biological process=protein metabolic process
  Homolog annotation: Hit_ID=B6U853; Match level="QueryCoverage=100%, HitCoverage=18%, E-value=3e-26, Identity=76%"; Hit description =Oxidoreductase
AVLHRGRHRHGARATSSGLRINLLLWCRSSVFREMKKYQKDFPSWCGECQREKRERQSQYVKATKMAFLRGAGGAMI

SEQ ID NO: 125966 - protein, 47 aa, Setaria italica
  Transcript Sequence Number=SeqID_59992
  Gene Ontology: Mol. function=metal ion binding
  Homolog annotation: Hit_ID=Q9M7F3; Match level="QueryCoverage=80%, HitCoverage=19%, E-value=5e-13, Identity=94%"; Hit description=LIM transcription factor homolog
MGGGEGKTAMATSFQGTTTKCTACDKTVYLVDKLTADNRVYHKACFR

SEQ ID NO: 125967 - protein, 73 aa, Setaria italica
  Transcript Sequence Number=SeqID_59993
  Gene Ontology: Mol. function=oxidoreductase activity, acting on paired donors, with incorporation or reduction of molecular oxygen, 2-oxoglutarate as one donor, and incorporation of one atom each of oxygen into both ...
  Gene Ontology: Mol. function=donors; Biological process=protein metabolic process
  Homolog annotation: Hit_ID=B6U853; Match level="QueryCoverage=100%, HitCoverage=17%, E-value=2e-24, Identity=76%"; Hit description =Oxidoreductase
ENHVNSETQHEEMYDYTHIPGQAVLHRGRHRHGARATSSGLRINLLLWCRSSVFREMKKYQKDFPSWCGECQR

SEQ ID NO: 125968 - protein, 90 aa, Setaria italica
  Transcript Sequence Number=SeqID_59994
  Gene Ontology: Mol. function=oxidoreductase activity, acting on paired donors, with incorporation or reduction of molecular oxygen, 2-oxoglutarate as one donor, and incorporation of one atom each of oxygen into both ...
  Gene Ontology: Mol. function=donors; Biological process=protein metabolic process
  Homolog annotation: Hit_ID=B6U853; Match level="QueryCoverage=80%, HitCoverage=17%, E-value=2e-23, Identity=75%"; Hit description =Oxidoreductase
SRRNTIVEITETQHEEMYDYTHIPGQAVLHRGRHRHGARATSSGLRINLLLWCRSSVFREMKKYQKDFPSWCGECQREKREGRVSMLKQL

SEQ ID NO: 125969 - protein, 63 aa, Setaria italica
  misc_feature (46)..(46): Xaa can be any naturally occurring amino acid
  Transcript Sequence Number=SeqID_59995
  Gene Ontology: Mol. function=oxidoreductase activity, acting on paired donors, with incorporation or reduction of molecular oxygen, 2-oxoglutarate as one donor, and incorporation of one atom each of oxygen into both ...
  Gene Ontology: Mol. function=donors; Biological process=protein metabolic process
  Homolog annotation: Hit_ID=B6U853; Match level="QueryCoverage=98%, HitCoverage=14%, E-value=3e-21, Identity=82%"; Hit description =Oxidoreductase
HSSGLRINLLLWCRSSVFREMKKYQKDFPSWCGECQREKREGRVSXVKATKMAFLRGAGGAMI

SEQ ID NO: 125970 - protein, 38 aa, Setaria italica
  Transcript Sequence Number=SeqID_59996
  Gene Ontology: Mol. function=metal ion binding
  Homolog annotation: Hit_ID=Q9M7F3; Match level="QueryCoverage=100%, HitCoverage=19%, E-value=8e-13, Identity=94%"; Hit description=LIM transcription factor homolog
MATSFQGTTTKCTACDKTVYLVDKLTADNRVYHKACFR

SEQ ID NO: 125971 - protein, 83 aa, Setaria italica
  Transcript Sequence Number=SeqID_59997
  Gene Ontology: Mol. function=oxidoreductase activity, acting on paired donors, with incorporation or reduction of molecular oxygen, 2-oxoglutarate as one donor, and incorporation of one atom each of oxygen into both ...
  Gene Ontology: Mol. function=donors; Biological process=protein metabolic process
  Homolog annotation: Hit_ID=B6U853; Match level="QueryCoverage=100%, HitCoverage=21%, E-value=7e-42, Identity=93%"; Hit description =Oxidoreductase
NQFMEQFIAPISRVFYAEVGGGTLDSHHAFVVEYGKDRDVELGFHVDDSEVTLNVCLGKQFSGGELYFRGIRCENHVNSETQQ

SEQ ID NO: 125972 - protein, 83 aa, Setaria italica
  Transcript Sequence Number=SeqID_59998
  Gene Ontology: Mol. function=oxidoreductase activity, acting on paired donors, with incorporation or reduction of molecular oxygen, 2-oxoglutarate as one donor, and incorporation of one atom each of oxygen into both ...
  Gene Ontology: Mol. function=donors; Biological process=protein metabolic process
  Homolog annotation: Hit_ID=B6U853; Match level="QueryCoverage=100%, HitCoverage=21%, E-value=8e-25, Identity=70%"; Hit description =Oxidoreductase
NGVAPLQVSRPAGRPAAATAPYADRRLRLNPNAEHKPQDYSDVRGEYAPAVYSALERHLPPSLLDADRGVKLHFMRDILARYW

SEQ ID NO: 125973 - protein, 78 aa, Setaria italica; identical to SEQ ID NO: 125954
  Transcript Sequence Number=SeqID_59999
  Gene Ontology: Mol. function=oxidoreductase activity, acting on paired donors, with incorporation or reduction of molecular oxygen, 2-oxoglutarate as one donor, and incorporation of one atom each of oxygen into both ...
  Gene Ontology: Mol. function=donors; Biological process=protein metabolic process
  Homolog annotation: Hit_ID=B6U853; Match level="QueryCoverage=100%, HitCoverage=20%, E-value=1e-20, Identity=66%"; Hit description =Oxidoreductase

SEQ ID NO: 125974 - protein, 85 aa, Setaria italica
  Transcript Sequence Number=SeqID_60000
  Gene Ontology: Mol. function=oxidoreductase activity, acting on paired donors, with incorporation or reduction of molecular oxygen, 2-oxoglutarate as one donor, and incorporation of one atom each of oxygen into both ...
  Gene Ontology: Mol. function=donors; Biological process=protein metabolic process
  Homolog annotation: Hit_ID=B6U853; Match level="QueryCoverage=98%, HitCoverage=21%, E-value=1e-24, Identity=69%"; Hit description =Oxidoreductase
NGNGVAPLQVSRPAGRPAAATAPYADRRLRLNPNAEHKPQDYSDVRGEYAPAVYSALERHLPPSLLDADRGVKLHFMRDIFARYS

SEQ ID NO: 125975 - protein, 82 aa, Setaria italica
  Transcript Sequence Number=SeqID_60001
  Gene Ontology: Mol. function=oxidoreductase activity, acting on paired donors, with incorporation or reduction of molecular oxygen, 2-oxoglutarate as one donor, and incorporation of one atom each of oxygen into both ...
  Gene Ontology: Mol. function=donors; Biological process=protein metabolic process
  Homolog annotation: Hit_ID=B6U853; Match level="QueryCoverage=98%, HitCoverage=20%, E-value=8e-41, Identity=95%"; Hit description =Oxidoreductase
MKFKIMRPNTMNKYGAVLDDFGLEAMLNQFMEQFIAPISRVFYAEVGGGTLDSHHAFVVEYGKDRDVELGFHVDDSEVTLNS

SEQ ID NO: 125976 - protein, 79 aa, Setaria italica
  Transcript Sequence Number=SeqID_60002
  Gene Ontology: Mol. function=oxidoreductase activity, acting on paired donors, with incorporation or reduction of molecular oxygen, 2-oxoglutarate as one donor, and incorporation of one atom each of oxygen into both ...
  Gene Ontology: Mol. function=donors; Biological process=protein metabolic process
  Homolog annotation: Hit_ID=B6U853; Match level="QueryCoverage=100%, HitCoverage=20%, E-value=5e-39, Identity=94%"; Hit description =Oxidoreductase
MLNQFMEQFIAPISRVFYAEVGGGTLDSHHAFVVEYGKDRDVELGFHVDDSEVTLNVCLGKQFSGGELYFRGIRCENHV

SEQ ID NO: 125977 - protein, 57 aa, Setaria italica
  Transcript Sequence Number=SeqID_60003
  Gene Ontology: Mol. function=oxidoreductase activity, acting on paired donors, with incorporation or reduction of molecular oxygen, 2-oxoglutarate as one donor, and incorporation of one atom each of oxygen into both ...
  Gene Ontology: Mol. function=donors; Biological process=protein metabolic process
  Homolog annotation: Hit_ID=B6U853; Match level="QueryCoverage=100%, HitCoverage=14%, E-value=5e-26, Identity=96%"; Hit description =Oxidoreductase
VELGFHVDDSEVTLNVCLGKQFSGGELYFRGIRCENHVNSETQHEEMYDYTHIPGQA

SEQ ID NO: 125978 - protein, 50 aa, Setaria italica
  Transcript Sequence Number=SeqID_60004
  Gene Ontology: Mol. function=oxidoreductase activity, acting on paired donors, with incorporation or reduction of molecular oxygen, 2-oxoglutarate as one donor, and incorporation of one atom each of oxygen into both ...
  Gene Ontology: Mol. function=donors; Biological process=protein metabolic process
  Homolog annotation: Hit_ID=B6U853; Match level="QueryCoverage=100%, HitCoverage=12%, E-value=7e-21, Identity=94%"; Hit description =Oxidoreductase
EYAPAVYSALERHLPPSLLDADRGVKLHFMRDILARYWPQGERNKVQRHK

SEQ ID NO: 125979 - protein, 61 aa, Setaria italica
  misc_feature (55)..(56): Xaa can be any naturally occurring amino acid
  Transcript Sequence Number=SeqID_60005
  Gene Ontology: Mol. function=oxidoreductase activity, acting on paired donors, with incorporation or reduction of molecular oxygen, 2-oxoglutarate as one donor, and incorporation of one atom each of oxygen into both ...
  Gene Ontology: Mol. function=donors; Biological process=protein metabolic process
  Homolog annotation: Hit_ID=B6U853; Match level="QueryCoverage=100%, HitCoverage=15%, E-value=3e-26, Identity=90%"; Hit description =Oxidoreductase
LDADRGVKLHFMRDILARYWPQGERNKVQRHKEYRQRILHLYKPLHEELYNMHPXXFLLPT

SEQ ID NO: 125980 - protein, 73 aa, Setaria italica
  Transcript Sequence Number=SeqID_60006
QLNCQPCVWLLVHYLAAQLLTVCLVIGSEWVGTGSTHFDPCLVGEGGGWVGPNREIFLVDAGRVRPLKTRGRT

SEQ ID NO: 125981 - protein, 65 aa, Setaria italica
  Transcript Sequence Number=SeqID_60007
EQFQKGMILLLLVFHLFLWVLYVINMKVEPCMGAVLACVLVLGRRGSGWSQPLLWVGVNPASLFE

SEQ ID NO: 125982 - protein, 65 aa, Setaria italica
  Transcript Sequence Number=SeqID_60008
RRGGGGAGRHGGSAGCREAGELLETFLAKAAPVLDSAIQHLLEENNQLLSQIAANIKTFKTEENM

SEQ ID NO: 125983 - protein, 82 aa, Setaria italica
  Transcript Sequence Number=SeqID_60009
SQQQNRPAVTYYICRNLLGVAYISPHSAICMRRCGVFHAIYTENHQGAISSPPHQHSQATTSHPISTRPQPKSAYPIPIHPA

SEQ ID NO: 125984 - protein, 121 aa, Setaria italica
  misc_feature (113)..(113): Xaa can be any naturally occurring amino acid
  Transcript Sequence Number=SeqID_60010
  Homolog annotation: Hit_ID=Q2HVT6; Match level="QueryCoverage=67%, HitCoverage=9%, E-value=4e-25, Identity=64%"; Hit description =Nuclear pore complex protein Nup205 , related (Fragment)
LKEHNELARGNFSIIRKEAQAIVDLVTKDAIHGSEAGKAISFYVLDALISVDHEKYFLNQLQSRGILRSCLSDVTTYLSKFYVCVFRIRHFTSESSQRFCKVDAQLSLLLRIXHHYGKHGS

SEQ ID NO: 125985 - protein, 47 aa, Setaria italica
  Transcript Sequence Number=SeqID_60011
QGPVKCRMYLQKRRETRQSMKLLSGDVFLCVYTTYLLSHVTFESGNL

SEQ ID NO: 125986 - protein, 144 aa, Setaria italica
  Transcript Sequence Number=SeqID_60012
  Gene Ontology: Mol. function=ribose phosphate diphosphokinase activity; Cellular component=mitochondrion; Biological process =nucleotide biosynthetic process
  Homolog annotation: Hit_ID=Q8S2E5; Match level="QueryCoverage=90%, HitCoverage=32%, E-value=4e-70, Identity=95%"; Hit description =Ribose-phosphate pyrophosphokinase 3
  Pfam annotation: Domain name=Pribosyltran; Domain location=24-129; Score=18.7; E_value=0.00018; Accession=PF00156.19; Description =Phosphoribosyl transferase domain
FNISVKITLCLIHQERFYFGDSVLPCFESGIPLLKSRLQELPDSHNITIAFPDDGAWKRFYKQLQHFPMVVCNKVREGDQRIVRIKEGDPSGRHVVIVDDLVQSGGTLIECQKVLAAHGAAKVSAYVTHGIFPNNSWEKFQHDN

SEQ ID NO: 125987 - protein, 36 aa, Setaria italica
  Transcript Sequence Number=SeqID_60013
GFEGAEPELAAIVTLASSVDYTTSNSSLKMLLPLVS

SEQ ID NO: 125988 - protein, 72 aa, Setaria italica
  Transcript Sequence Number=SeqID_60014
  Gene Ontology: Mol. function=protein tyrosine kinase activity; Cellular component=plasma membrane; Biological process=protein amino acid phosphorylation
  Homolog annotation: Hit_ID=Q9LKY3; Match level="QueryCoverage=80%, HitCoverage=16%, E-value=2e-14, Identity=67%"; Hit description=Pti1 kinase-like protein
LSEDKVKQCVDPRLKGEYPPKGVAKLAAVAALCVQYEAEFRPNMSIVVKALSPLLQQRPAPTASEPAPEPAS

SEQ ID NO: 125989 - protein, 58 aa, Setaria italica
  misc_feature (1)..(2): Xaa can be any naturally occurring amino acid
  misc_feature (5)..(5): Xaa can be any naturally occurring amino acid
  misc_feature (8)..(8): Xaa can be any naturally occurring amino acid
  misc_feature (12)..(12): Xaa can be any naturally occurring amino acid
  misc_feature (16)..(16): Xaa can be any naturally occurring amino acid
  Transcript Sequence Number=SeqID_60015
  Subcellular localization annotation: CTP_CleavageSite=30; ConfidenceScore=5.09e-01
XXFFXFFXFFFXFFFXFFFFFFFFGSNDIMQQTENHSILPNMASPLNLQSLVKKGLKV

SEQ ID NO: 125990 - protein, 80 aa, Setaria italica
  misc_feature (17)..(17): Xaa can be any naturally occurring amino acid
  Transcript Sequence Number=SeqID_60016
  Homolog annotation: Hit_ID=B6SYB6; Match level="QueryCoverage=97%, HitCoverage=14%, E-value=6e-32, Identity=91%"; Hit description =Glycosyltransferase
PGGGGRSRYACRLRAPXLVLTIYSVVTVLRIPSSSLVVTTADSERVERREDLEALKTHLPSNQNSLEAREETRSVASLPC

SEQ ID NO: 125991 - protein, 72 aa, Setaria italica
  Transcript Sequence Number=SeqID_60017
RITRCGAPNLKTSRSGRVGGWDRFGRGSGKSYGGLGDRLGDQETPDLVRGGGGGEGIRVSAGGRWRRREPGP

SEQ ID NO: 125992 - protein, 70 aa, Setaria italica
  Transcript Sequence Number=SeqID_60018
  Homolog annotation: Hit_ID=B9RDR1; Match level="QueryCoverage=72%, HitCoverage=14%, E-value=1e-11, Identity=56%"; Hit description =Protein AFR, putative
CSVRFLIFDLSYLYKHGIHYKLEQKLGTTLMMWQKDTKEWVMLGRLSDKVTRPPCQLVAIGRKIYVIGRG

SEQ ID NO: 125993 - protein, 134 aa, Setaria italica
  Transcript Sequence Number=SeqID_60019
  Gene Ontology: Mol. function=aminoacyl-tRNA ligase activity; Cellular component=cytoplasm; Biological process=tRNA aminoacylation for protein translation
  Homolog annotation: Hit_ID=Q7G2B1; Match level="QueryCoverage=97%, HitCoverage=12%, E-value=8e-59, Identity=80%"; Hit description=Valyl- tRNA synthetase
  Pfam annotation: Domain name=Anticodon_1; Domain location=1-100; Score=13.4; E_value=9.1e-06; Accession=PF08264.5; Description =Anticodon-binding domain
LGRSLRGASRDTLWVCLDTGLRLLHPFMPYITEELWQRLPQPKEACTKDSIMISEYPAAVHEWTNDQIENEMEIVLDTVNKLRSLRPSTDTYERRPAFVLCRGLETAATMRSYQSYITTLASVSSLQILAEDDP

SEQ ID NO: 125994 - protein, 70 aa, Setaria italica
  Transcript Sequence Number=SeqID_60020
  Gene Ontology: Mol. function=aminoacyl-tRNA ligase activity; Cellular component=cytoplasm; Biological process=tRNA aminoacylation for protein translation
  Homolog annotation: Hit_ID=Q7G2B1; Match level="QueryCoverage=100%, HitCoverage=6%, E-value=1e-27, Identity=82%"; Hit description=Valyl -tRNA synthetase
LSPVCLAYPLRVSGKDFPNGIPECGTDALRFALISYTSQSDKINLDIKRVHGYRQWCNKLWNAIRFAMNK

SEQ ID NO: 125995 - protein, 69 aa, Setaria italica
  misc_feature (26)..(26): Xaa can be any naturally occurring amino acid
  misc_feature (43)..(43): Xaa can be any naturally occurring amino acid
  Transcript Sequence Number=SeqID_60021
  Gene Ontology: Mol. function=aminoacyl-tRNA ligase activity; Cellular component=cytoplasm; Biological process=tRNA aminoacylation for protein translation
  Homolog annotation: Hit_ID=Q7G2B1; Match level="QueryCoverage=100%, HitCoverage=8%, E-value=3e-24, Identity=60%"; Hit description=Valyl -tRNA synthetase
PQDERYKHLHGKYALHPFNGRKLKIXICDAELVDPSFGTGAVXDDGKINEMGGSQFEGMPRFAARTAVI

SEQ ID NO: 125996 - protein, 109 aa, Setaria italica
  Transcript Sequence Number=SeqID_60022
  Gene Ontology: Mol. function=nucleoside-triphosphatase activity; Cellular component=microtubule
  Homolog annotation: Hit_ID=Q7XXR9; Match level="QueryCoverage=77%, HitCoverage=22%, E-value=1e-40, Identity=97%"; Hit description =Katanin
  Pfam annotation: Domain name=AAA; Domain location=1-108; Score=-5.3; E_value=7.1e-05; Accession=PF00004.21; Description=ATPase family associated with various cellular activities (AAA)
ISASSIVSKWRGDSEKLVKVLFELARHHAPSTIFLDEIDAIISQRGEARSEHEASRRLKTELLIQMDGLTKTDELVFVLAATNLPMGRLGIDKTNRLDVRTRKKDVVIP

SEQ ID NO: 125997 - protein, 93 aa, Setaria italica
  Transcript Sequence Number=SeqID_60023
  Gene Ontology: Mol. function=nucleoside-triphosphatase activity
  Homolog annotation: Hit_ID=Q5QMP5; Match level="QueryCoverage=72%, HitCoverage=44%, E-value=2e-29, Identity=92%"; Hit description =Katanin p60 subunit A 1-like
  Pfam annotation: Domain name=Vps4_C; Domain location=31-88; Score= -9.3; E_value=0.048; Accession=PF09336.2; Description=Vps4 C terminal oligomerisation domain
VSLLVVKLVRYYFLVFLYYFVLCYCKEAAMQPLRRLMTVLERNQEVPEDELPEVGPVTTEDIELALRNTRPSAHLHAHRYEKFNQDYGSHVHG

SEQ ID NO: 125998 - protein, 65 aa, Setaria italica
  Transcript Sequence Number=SeqID_60024
  Subcellular localization annotation: CTP_CleavageSite=13; ConfidenceScore=5.33e-01
LCQYSSPARHGGRSDEATSSRNGGRFLANRHRKRSPSDFLGSGSAQSGSGTPGRNCSNAGIGRNG

SEQ ID NO: 125999 - protein, 78 aa, Setaria italica
  Transcript Sequence Number=SeqID_60025
  Gene Ontology: Mol. function=3-deoxy-7-phosphoheptulonate synthase activity; Cellular component=chloroplast; Biological process =aromatic amino acid family biosynthetic process
  Homolog annotation: Hit_ID=B6UAK5; Match level="QueryCoverage=94%, HitCoverage=14%, E-value=1e-34, Identity=94%"; Hit description =Phospho-2-dehydro-3-deoxyheptonate aldolase 2
GRRRHSCDVHFLWVGERTRQLDGAHVEFLRGIANPLGIKVSDKMDPAELVRLIDILNPENRAGRITIITRMGPENMRV

SEQ ID NO: 126000 - protein, 115 aa, Setaria italica
  Transcript Sequence Number=SeqID_60026
  Gene Ontology: Mol. function=3-deoxy-7-phosphoheptulonate synthase activity; Cellular component=chloroplast; Biological process =aromatic amino acid family biosynthetic process
  Homolog annotation: Hit_ID=B6UAK5; Match level="QueryCoverage=55%, HitCoverage=12%, E-value=2e-29, Identity=96%"; Hit description =Phospho-2-dehydro-3-deoxyheptonate aldolase 2
MLQFEKAKKFKALSEIHFTPTSDEIQVSDKMDPAELVRLIDILNPENRAGRITIITRMGPENMRVKLPHLIRAVRGAGQIVTWVTDPIVYWVTTYCKVPFVGTFLKPVLSFSLLR

SEQ ID NO: 126001 - protein, 87 aa, Setaria italica
  Transcript Sequence Number=SeqID_60027
  Gene Ontology: Mol. function=3-deoxy-7-phosphoheptulonate synthase activity; Cellular component=chloroplast; Biological process =aromatic amino acid family biosynthetic process
  Homolog annotation: Hit_ID=B6UAK5; Match level="QueryCoverage=95%, HitCoverage=15%, E-value=2e-37, Identity=90%"; Hit description =Phospho-2-dehydro-3-deoxyheptonate aldolase 2
  Pfam annotation: Domain name=DAHP_synth_2; Domain location=1-84; Score=-262.7; E_value=0.0014; Accession=PF01474.8; Description=Class- II DAHP synthetase family
KLSFYLIRAVRGAGQIVTWVTDPMHGNTMKAPCGLKTRSFDRILAEVRAFFDVHEQEGSYPGGVHLEMTGQNVTECIGGINGTSRTI

SEQ ID NO: 126002 - protein, 43 aa, Setaria italica
  Transcript Sequence Number=SeqID_60028
  Gene Ontology: Mol. function=3-deoxy-7-phosphoheptulonate synthase activity; Cellular component=chloroplast; Biological process =aromatic amino acid family biosynthetic process
  Homolog annotation: Hit_ID=P37215; Match level="QueryCoverage=90%, HitCoverage=7%, E-value=9e-14, Identity=89%"; Hit description =Phospho-2-dehydro-3-deoxyheptonate aldolase 1, chloroplastic
RVLELKLPSYRGDNINGDTFDEKSRLPDPHRLIRAYSQSAATL

SEQ ID NO: 126003 - protein, 48 aa, Setaria italica
  Transcript Sequence Number=SeqID_60029
SLPEDTSSGSYDDFVYQVHLKVYDIVIGDITIRYNRTFYTVFHRNHHC

SEQ ID NO: 126004 - protein, 69 aa, Setaria italica
  misc_feature (63)..(63): Xaa can be any naturally occurring amino acid
  Transcript Sequence Number=SeqID_60030
  Gene Ontology: Mol. function=serine-type carboxypeptidase activity; Biological process=proteolysis
  Homolog annotation: Hit_ID=B6U0V5; Match level="QueryCoverage=47%, HitCoverage=6%, E-value=6e-10, Identity=96%"; Hit description=Serine carboxypeptidase 1
MLLIPILGCPKKVALFCLWWCNAVWCSCWDFFLFFAEANVIYLETPAGVGYSYSADAAYYQGXVDDKMT

SEQ ID NO: 126005 - protein, 73 aa, Setaria italica
  misc_feature (52)..(52): Xaa can be any naturally occurring amino acid
  Transcript Sequence Number=SeqID_60031
PWLHQGTASCFQESQDGKTMPGCKQIYRQAQYICYRWYTFYRRGSTVPWLHXVHFSRGPWHIFEVDVTTSKKK

SEQ ID NO: 126006 - protein, 73 aa, Setaria italica
  Transcript Sequence Number=SeqID_60032
  Subcellular localization annotation: CTP_CleavageSite=35; ConfidenceScore=5.31e-01
DEFTPLQYKYLPPHAKLVDIRSTNVNIFRRLHGSRAISRKQRSRSRSKLFSSRLKIGWKSSRLVLCCLCSCRM

SEQ ID NO: 126007 - protein, 46 aa, Setaria italica
  Transcript Sequence Number=SeqID_60033
  Gene Ontology: Mol. function=hydrolase activity
  Homolog annotation: Hit_ID=B9RUZ0; Match level="QueryCoverage=89%, HitCoverage=9%, E-value=1e-16, Identity=87%"; Hit description =Hydrolase, putative
ARQVGCNVLAFDRPGWGLTSRPRRKDWEDKKLPNPYELESQVILLI

SEQ ID NO: 126008 - protein, 40 aa, Setaria italica
  Transcript Sequence Number=SeqID_60034
  Gene Ontology: Mol. function=protein kinase activity; Cellular component=integral to membrane; Biological process=protein amino acid phosphorylation
  Homolog annotation: Hit_ID=B9RXF7; Match level="QueryCoverage=92%, HitCoverage=5%, E-value=2e-12, Identity=86%"; Hit description =Serine/threonine-protein kinase PBS1, putative
QLHDIDLLAKMVDPAMDGLYPAKSLSRFADIIAICVQTAT

SEQ ID NO: 126009 - protein, 43 aa, Setaria italica
  Transcript Sequence Number=SeqID_60035
REATYRYSSETMVDMEYGRLPERLFFRQIQIRLRFCIGLTWLR

SEQ ID NO: 126010 - protein, 94 aa, Setaria italica
  Transcript Sequence Number=SeqID_60036
  Homolog annotation: Hit_ID=B0FSK5; Match level="QueryCoverage=97%, HitCoverage=41%, E-value=6e-15, Identity=36%"; Hit description=Mucin- like protein (Fragment)
NSHDREFHVATLPYKPDFKVMPEGWDGTTRDPDEVLYEISMKEDQMLHEEFVQRLEFNKKKVAGEVKCHKYSRRRPDDGWSYMVEKLGPTTEKT

SEQ ID NO: 126011 - protein, 56 aa, Setaria italica
  Transcript Sequence Number=SeqID_60037
  Subcellular localization annotation: CTP_CleavageSite=49; ConfidenceScore=5.72e-01
KVADGQRTASFTSSQMATLSNVSGSVMSTAATTRSTVTDLGVVGRGVKRASSLASR

SEQ ID NO: 126012 - protein, 51 aa, Setaria italica
  Transcript Sequence Number=SeqID_60038
  Gene Ontology: Mol. function=ATP-dependent helicase activity; Cellular component=intracellular; Biological process=DNA recombination
  Homolog annotation: Hit_ID=Q2QZ07; Match level="QueryCoverage=82%, HitCoverage=5%, E-value=1e-16, Identity=80%"; Hit description=ATP -dependent DNA helicase, RecQ family protein, expressed
MVVMQEAHCCSQWGHDFRPDYKNLGILKIQFPSVPMIALTVSNTNTNNNQV

SEQ ID NO: 126013 - protein, 91 aa, Setaria italica
  Transcript Sequence Number=SeqID_60039
  Gene Ontology: Mol. function=ATP-dependent helicase activity; Cellular component=intracellular; Biological process=DNA recombination
  Homolog annotation: Hit_ID=Q1ERC6; Match level="QueryCoverage=97%, HitCoverage=11%, E-value=5e-34, Identity=76%"; Hit description=RecQ -like helicase 2
SRSSCYHHYMCHVFDEQSSMVFYENCGLQNLYDIVRYCQSKRSCRRGAIFRHFGEALQDCNGMCDNCASSIELKEIGATRMMTLHQSRNYN

SEQ ID NO: 126014 - protein, 80 aa, Setaria italica
  Transcript Sequence Number=SeqID_60040
GRSSRGAKRSRMSDLEAKLDELRRELSSSSSNGGISIFPHAVLSSEQISLLSCQKPTTEAEVRCLILISLCLQLQVNEVM

SEQ ID NO: 126015 - protein, 119 aa, Setaria italica
  Transcript Sequence Number=SeqID_60041
EITQAHEKESDYTLLQDQITEKRMECEIAYESRISLEEAYTLGGADTCGVAVNVSDSTQNKETCTTEEAMEDKQHHEVEHVNEERILEDTTMIDSSELKSDVTHVEVDMAGSKEGTLNQ

SEQ ID NO: 126016 - protein, 36 aa, Setaria italica
  Transcript Sequence Number=SeqID_60042
VPVFPPFDPAMPTSTSVACWFSVPSFDPAIVQTYQQ

SEQ ID NO: 126017 - protein, 65 aa, Setaria italica
  Transcript Sequence Number=SeqID_60043
FLPVLVSSLFISFLYSREKITWTRPFRCVRALKMRYSIFLKILCCISLIWPPSNHFVLLPYHIRG

SEQ ID NO: 126018 - protein, 55 aa, Setaria italica
  misc_feature (44)..(44): Xaa can be any naturally occurring amino acid
  Transcript Sequence Number=SeqID_60044
  Homolog annotation: Hit_ID=B6T3J6; Match level="QueryCoverage=90%, HitCoverage=15%, E-value=2e-14, Identity=90%"; Hit description=RNA -binding protein 25
LCHCSLENEVNQMKDKIAAKEQHIADLQKKAQKLEDELVAARKXSSERQLAVTDL

SEQ ID NO: 126019 - protein, 91 aa, Setaria italica
  Transcript Sequence Number=SeqID_60045
  Subcellular localization annotation: CTP_CleavageSite=44; ConfidenceScore=5.09e-01
NCKKSNTQKAKPRIRCGTSVAMKLLRKHSKSIKLRSPATIELCHAFSPANNGSLPQGQKGVPSFSLLGTGIVRKLSFVISGSVTFVLRSLG

SEQ ID NO: 126020 - protein, 41 aa, Setaria italica
  Transcript Sequence Number=SeqID_60046
TLPCLSVQPTMVLCPEFSIQVCKLTLFILAYYCSLIKYLCD

SEQ ID NO: 126021 - protein, 146 aa, Setaria italica
  Transcript Sequence Number=SeqID_60047
  Homolog annotation: Hit_ID=B6TYE1; Match level="QueryCoverage=80%, HitCoverage=36%, E-value=4e-52, Identity=87%"; Hit description =Myosin-like protein
EASKTDSVRAQIETMRREIQKGRAAVDFEKKAHSDNLEQSKAMEKNMIAVASEIERLRGELLNAEKGTTAVNSAAAVPNSGYPAAYGNSEATYPGMYGNPDPTYAAHSYPDAYSTNQVCYLLYNCSLICFSFNFNISLPGLIIVAC

SEQ ID NO: 126022 - protein, 92 aa, Setaria italica
  Transcript Sequence Number=SeqID_60048
AAEETAPRRRSDREPEVKGATWQRPAPTPIPPRLSPPSPPARTGSWPPPVSDFCPPFAPSLALPVSWRVHVCHVSVMRLSRGLGSGLGRVRL

SEQ ID NO: 126023 - protein, 56 aa, Setaria italica
  Transcript Sequence Number=SeqID_60049
  Gene Ontology: Mol. function=protein serine/threonine kinase activity
  Homolog annotation: Hit_ID=Q94CU5; Match level="QueryCoverage=89%, HitCoverage=5%, E-value=2e-10, Identity=68%"; Hit description =Serine/threonine-protein kinase Nek5
MVLLELEAGPLLKHLSPIVEHSPTVKNKLDERLHPDPAKQFGEDADATAGKAKNKT

SEQ ID NO: 126024 - protein, 53 aa, Setaria italica
  Transcript Sequence Number=SeqID_60050
TLNWRLHPDPAKQFGEDADATAGKAKNKTPPSFIRCTSIPARRQGAASPSRQH

SEQ ID NO: 126025 - protein, 118 aa, Setaria italica
  Transcript Sequence Number=SeqID_60051
  Homolog annotation: Hit_ID=B6T3N5; Match level="QueryCoverage=99%, HitCoverage=33%, E-value=1e-54, Identity=87%"; Hit description =Protein-tyrosine phosphatase mitochondrial 1
AVQEFYQLRVKKTGRSTCLDNPIIKPPLFLATRNLVAFDDSAFVMVSESDLEGYNADALALNMGSGLWEISLIYRAQFASKAAFAGFSYLWLRCRACKEALPENVATETCSLEAEQIA

SEQ ID NO: 126026 - protein, 46 aa, Setaria italica
  Transcript Sequence Number=SeqID_60052
  Gene Ontology: Mol. function=protein tyrosine/serine/threonine phosphatase activity; Biological process=protein amino acid dephosphorylation
  Homolog annotation: Hit_ID=B6T3N5; Match level="QueryCoverage=65%, HitCoverage=8%, E-value=7e-10, Identity=100%"; Hit description =Protein-tyrosine phosphatase mitochondrial 1
VQYKNMTPAEAYEHVRLRRPRVLLASAQWQVSFTIFFSCLHTQFCP

SEQ ID NO: 126027 - protein, 79 aa, Setaria italica
  Transcript Sequence Number=SeqID_60053
CESVLPRELILWACFLHQGQGMLHRRSIENLLNLSVPYLVRETTQSMVMPELQLWPPDFTTEYKGSMGQRNKKFRIKKN

SEQ ID NO: 126028 - protein, 113 aa, Setaria italica
  misc_feature (85)..(85): Xaa can be any naturally occurring amino acid
  Transcript Sequence Number=SeqID_60054
  Homolog annotation: Hit_ID=B7ETM3; Match level="QueryCoverage=93%, HitCoverage=49%, E-value=4e-44, Identity=82%"; Hit description=(RAP Annotation release2) Histone deacetylase superfamily protein
  Pfam annotation: Domain name=NC; Domain location=7-63; Score=3.9; E _value=0.016; Accession=PF04970.5; Description=NC domain
PHTQNGRGTCTLAPSDPDEAVIRRAKYLLSNGFRCYNLFKSNCEDFAIYCKTGLLVAERGVVGQSGQAISIIGGPLAAVISTPFXLVTTNIYGMAVMAVGVYCASRYAADIGN

SEQ ID NO: 126029 - protein, 71 aa, Setaria italica
  Transcript Sequence Number=SeqID_60055
  Gene Ontology: Mol. function=GTP binding; Cellular component =intracellular
  Homolog annotation: Hit_ID=B9S055; Match level="QueryCoverage=94%, HitCoverage=10%, E-value=3e-25, Identity=76%"; Hit description=GTP -binding protein enga, putative
  Pfam annotation: Domain name=MMR_HSR1; Domain location=1-68; Score= -20.7; E_value=0.082; Accession=PF01926.15; Description=GTPase of unknown function
GPEAGLTRDSIRAQFQFDNRTVYLVDTAGWMERSGKEKGPASLSVVQSRKNLMRAHIVALVLDAEKVLLSF

SEQ ID NO: 126030 - protein, 84 aa, Setaria italica
  Transcript Sequence Number=SeqID_60056
SSRRHRRSRTNLERQPWHSELSSRQGWPGPAAPSPLPVPRSLSNFICSRVKAQQQATTIIYGNIVILTIMEDNYPLKVAGTAAN

SEQ ID NO: 126031 - protein, 82 aa, Setaria italica
  Transcript Sequence Number=SeqID_60057
  Subcellular localization annotation: CTP_CleavageSite=38; ConfidenceScore=5.65e-01
MCAAGHPSRRASTAPPRWPPSVPPERLPMTSAGHPSRRASTAPPRWPPSVPPERLPMTSAGQCPPSLRGIQLICILHHQARS

SEQ ID NO: 126032 - protein, 80 aa, Setaria italica
  Transcript Sequence Number=SeqID_60058
  Subcellular localization annotation: CTP_CleavageSite=43; ConfidenceScore=5.52e-01
AEPSASARSPYLMCAAGHPSRRASTAPPRWPPSVPPERLPMTSAGAVPSVSAGDPVNLHPPSSSKIRSCKNSPGCCPPSA

SEQ ID NO: 126033 - protein, 109 aa, Setaria italica
  misc_feature (81)..(81): Xaa can be any naturally occurring amino acid
  Transcript Sequence Number=SeqID_60059
  Gene Ontology: Mol. function=electron carrier activity; Cellular component=endoplasmic reticulum membrane; Biological process =oxidation reduction
  Homolog annotation: Hit_ID=Q10S01; Match level="QueryCoverage=77%, HitCoverage=17%, E-value=6e-27, Identity=67%"; Hit description =Cytochrome P450 family protein, expressed
VKIGPSVFGRYVFVLVFRSSVHRSSKRRADKIEQGITESADLLSSFICHEKDSSHNDDVFLRDTTVNLLLAGRDTTGAALXWFFYLLCKNPRVEQKILDELAPVASRKV

SEQ ID NO: 126034 - protein, 69 aa, Setaria italica
  Transcript Sequence Number=SeqID_60060
  Gene Ontology: Mol. function=protein serine/threonine kinase activity; Biological process=protein amino acid phosphorylation
SKDLSFVGYTYKNFDAVKAIKISDLQRNSSLTRPSIGSIFGPPGMDSPMEPNGRDTHMHTVSSGDPMIP

SEQ ID NO: 126035 - protein, 89 aa, Setaria italica
  misc_feature (7)..(7): Xaa can be any naturally occurring amino acid
  Transcript Sequence Number=SeqID_60061
  Gene Ontology: Mol. function=protein serine/threonine kinase activity; Cellular component=plasma membrane; Biological process =protein amino acid phosphorylation
  Homolog annotation: Hit_ID=B9RK53; Match level="QueryCoverage=86%, HitCoverage=15%, E-value=1e-24, Identity=72%"; Hit description =Serine/threonine-protein kinase, putative
YIHRDIXKPDNLLLDKNGHMKLSDFGLCKPIDCSKLSTLNEDEPMGDDNLRESMDVDSSLSDTANGRRWRSQHEQLQTTRTRIETRKKN

SEQ ID NO: 126036 - protein, 61 aa, Setaria italica
  Transcript Sequence Number=SeqID_60062
LQQLCYENSYFQKWEKFLIHIKHHHEQQQLSHVIPDTYQTPSRTTTAQPCNSCRKNTILFP

SEQ ID NO: 126037 - protein, 72 aa, Setaria italica
  Transcript Sequence Number=SeqID_60063
ASTSLQERNGKNITYEAFDRLKIHSYMDRLPDKTLKYALAETVKHMLSIYSTKVNKAWNIHRYMHSTAKMIH

SEQ ID NO: 126038 - protein, 118 aa, Setaria italica
  Transcript Sequence Number=SeqID_60064
  Subcellular localization annotation: CTP_CleavageSite=43; ConfidenceScore=5.54e-01
QYCWTVRSTVAAASWMPVRQICPWQAPVASCSTACMGSRRTAVASESPSSTNWLLFLEQTPPMIEAQNRTKSSHFSWYQQFWFYKKLVAAPPLSYHPIMVYSKPASVTSHSILTGDYL

SEQ ID NO: 126039 - protein, 68 aa, Setaria italica
  Transcript Sequence Number=SeqID_60065
  Gene Ontology: Mol. function=protein binding
  Homolog annotation: Hit_ID=B6SP96; Match level="QueryCoverage=91%, HitCoverage=10%, E-value=2e-21, Identity=80%"; Hit description =Regulatory subunit
NVSSIVFFFSDLTKLESLNLRYCNYIADSDIKYLTDLTNLKDLQLSCCRITDLGVSYLRGKQDLKFLY

SEQ ID NO: 126040 - protein, 45 aa, Setaria italica
  Transcript Sequence Number=SeqID_60066
  Homolog annotation: Hit_ID=B6SP96; Match level="QueryCoverage=84%, HitCoverage=6%, E-value=1e-09, Identity=84%"; Hit description =Regulatory subunit
LQNNLERNNSKNLRSLSLDSTRVTANEMKKLRATTLPNLISMRPE

SEQ ID NO: 126041 - protein, 42 aa, Setaria italica
  misc_feature (34)..(34): Xaa can be any naturally occurring amino acid
  Transcript Sequence Number=SeqID_60067
  Homolog annotation: Hit_ID=B6T5W0; Match level="QueryCoverage=80%, HitCoverage=10%, E-value=3e-12, Identity=94%"; Hit description =Receptor expression-enhancing protein 3
MPMSCRLAFGYAYPAYECYKTVELNKPEIEQLIXFWCQYWYF

SEQ ID NO: 126042 - protein, 79 aa, Setaria italica
  misc_feature (46)..(46): Xaa can be any naturally occurring amino acid
  misc_feature (56)..(56): Xaa can be any naturally occurring amino acid
  Transcript Sequence Number=SeqID_60068
  Homolog annotation: Hit_ID=B6T4S5; Match level="QueryCoverage=86%, HitCoverage=19%, E-value=7e-22, Identity=79%"; Hit description =Receptor expression-enhancing protein 3
LIYALSLQGTTDIYGTFFRSYISQHENEINRNLLELRARATTDTVXLYFQKAASVXQNTFFDVLKYVVADQSPHQVTST

SEQ ID NO: 126043 - protein, 79 aa, Setaria italica
  Transcript Sequence Number=SeqID_60069
FCMNWHKLPPKERSCIFSLQERNTGLRSSNEYPSADCILVCLPFVDAHPYLFFFLTDTAIVGVTEINSNSGNYSTEQII

SEQ ID NO: 126044 - protein, 67 aa, Setaria italica
  Transcript Sequence Number=SeqID_60070
  Gene Ontology: Mol. function=transferase activity, transferring glycosyl groups; Cellular component=integral to membrane; Biological process=protein amino acid glycosylation
  Homolog annotation: Hit_ID=B6TEC2; Match level="QueryCoverage=95%, HitCoverage=18%, E-value=2e-28, Identity=95%"; Hit description=Beta -1,3-galactosyltransferase sqv-2
RKKPLIVIGIMSSFGRKNYRDAVRKSWLPTGSMLRKLEEEKGIVVRFIVGRSANRGDTFDREILDYR

SEQ ID NO: 126045 - protein, 60 aa, Setaria italica
  Transcript Sequence Number=SeqID_60071
  Homolog annotation: Hit_ID=B6TEC2; Match level="QueryCoverage=55%, HitCoverage=9%, E-value=9e-11, Identity=93%"; Hit description=Beta-1, 3-galactosyltransferase sqv-2
IENNVCFNTTVWSTILSYLLYLILILCTGSMLRKLEEEKGIVVRFIVGRSANRGDTFDRE

SEQ ID NO: 126046 - protein, 49 aa, Setaria italica
  Transcript Sequence Number=SeqID_60072
NLEFILFPCGANLTCYMKFQVPPFLASMKHGLSKEKSMSKMKSNLLYDL

SEQ ID NO: 126047 - protein, 45 aa, Setaria italica
  Transcript Sequence Number=SeqID_60073
MFLLAAGHLDLVCVEADRNKRPSIVDIVDKLNGKRVPIFDQVPPS

SEQ ID NO: 126048 - protein, 46 aa, Setaria italica
  Transcript Sequence Number=SeqID_60074
VNVKGHNGYIAPEYLYRGEISTMSDIYSLGMLILADLSSETELFFS

SEQ ID NO: 126049 - protein, 52 aa, Setaria italica
  Transcript Sequence Number=SeqID_60075
  Pfam annotation: Domain name=MAP1_LC3; Domain location=10-50; Score= -20.2; E_value=0.00051; Accession=PF02991.8; Description=Microtubule associated protein 1A1B, light chain 3
GRGRLPCSPRRWQTSERLLVEGVLMSAIYEENKDADGFLYMTYSGENTFGLF

SEQ ID NO: 126050 - protein, 77 aa, Setaria italica
  Transcript Sequence Number=SeqID_60076
  Gene Ontology: Mol. function=protein binding; Cellular component =cytoplasmic vesicle; Biological process=ubiquitin-dependent protein catabolic process
  Homolog annotation: Hit_ID=Q6Z1D5; Match level="QueryCoverage=87%, HitCoverage=55%, E-value=6e-30, Identity=100%"; Hit description =Autophagy-related protein 8C
  Pfam annotation: Domain name=MAP1_LC3; Domain location=12-77; Score =103.5; E_value=7.4e-28; Accession=PF02991.8; Description=Microtubule associated protein 1A1B, light chain 3
ILIVHLPFVTERRQAEANRIREKYPDRIPVIVEKAERSDIPDIDKKKYLVPADLTVGQFVYVVRKRIKLSAEKAIFI

SEQ ID NO: 126051 - protein, 78 aa, Setaria italica
  Transcript Sequence Number=SeqID_60077
VVSQECAKEQHWHIIFLTYKMTFHHLSNLNIDSDMFINASNFYTSDYHLITILAPSNYINVLGLHISDHSGKLYIFQG

SEQ ID NO: 126052 - protein, 55 aa, Setaria italica
  misc_feature (49)..(49): Xaa can be any naturally occurring amino acid
  Transcript Sequence Number=SeqID_60078
  Homolog annotation: Hit_ID=Q9SA28; Match level="QueryCoverage=98%, HitCoverage=11%, E-value=5e-10, Identity=59%"; Hit description =F3O9.9 protein
MHRDCGYRAYTVISVDDLYNPFASMYFGASYLAWLSHYEGREQSYEFIXVQAYLG

SEQ ID NO: 126053 - protein, 162 aa, Setaria italica
  Transcript Sequence Number=SeqID_60079
  Homolog annotation: Hit_ID=Q9SA28; Match level="QueryCoverage=90%, HitCoverage=78%, E-value=3e-40, Identity=45%"; Hit description =F3O9.9 protein
SKEWTDAGEEQGQKVHLSRDPDGEAYLTQTEMMAVASIIVHRHFKSQLDPYMIGALAEIASGRRLFVDTYDRKTKETKVGIMQVAPEVAQWLGRELGYKKYDIEDDTNLLYWPLVNVYFGAAYAKWLFSCDDKQRTEEFVVSSILRVGLKSKVFLLLNSNFP

SEQ ID NO: 126054 - protein, 50 aa, Setaria italica
  Transcript Sequence Number=SeqID_60080
  Gene Ontology: Mol. function=DNA binding
  Pfam annotation: Domain name=B3; Domain location=1-50; Score=5.0; E _value=0.024; Accession=PF02362.13; Description=B3 DNA binding domain
YSQKQFRNQRLSKGWKQFARDNNLQLGDLCLFELLENKKYTMNVHIIRIK

SEQ ID NO: 126055 - protein, 77 aa, Setaria italica
  Transcript Sequence Number=SeqID_60081
  Homolog annotation: Hit_ID=B6SZA7; Match level="QueryCoverage=50%, HitCoverage=21%, E-value=2e-13, Identity=89%"; Hit description =Membrane protein
SSLGSFGLLVLLPSLLDKACAYTTFATTVAAAQACVIALDGAHALQWTKLCNIYTRFCEQIAGSLVLGILAAAGTAV

SEQ ID NO: 126056 - protein, 52 aa, Setaria italica
  Transcript Sequence Number=SeqID_60082
WRRDDSGYLCFSIVCLPLCEVPTVCLAKSSMCFLKNKQLASDAAGICQIVYS

SEQ ID NO: 126057 - protein, 46 aa, Setaria italica
  Transcript Sequence Number=SeqID_60083
MKYNERLKVSSHYPFMFFSCLDKAAVDTGKTGAWSLCSITQVEETK

SEQ ID NO: 126058 - protein, 31 aa, Setaria italica
  Transcript Sequence Number=SeqID_60084
YGLPGSRSTGTSCQQAAPSQELIRQGYYVKY

SEQ ID NO: 126059 - protein, 50 aa, Setaria italica
  Transcript Sequence Number=SeqID_60085
TARRTASAIFPLLEACADRNGRMEPAVRPKPAVCRSGRPLRLRGREEGRD

SEQ ID NO: 126060 - protein, 82 aa, Setaria italica
  Transcript Sequence Number=SeqID_60086
  Gene Ontology: Mol. function=serine-type endopeptidase activity; Cellular component=plasma membrane; Biological process=negative regulation of catalytic activity
  Homolog annotation: Hit_ID=B3TZE7; Match level="QueryCoverage=98%, HitCoverage=14%, E-value=1e-17, Identity=60%"; Hit description =Subtilisin protease (Fragment)
  Subcellular localization annotation: CTP_CleavageSite=57; ConfidenceScore=5.46e-01
TAKQIAVLTRDGSVTDCSKRSGSVGDHNYPAFSVVFSSGDGKVTQRRVVRNVGSNAMATYTASVTSPAGVRVTVEPPTLQFS

SEQ ID NO: 126061 - protein, 109 aa, Setaria italica
  misc_feature (63)..(63): Xaa can be any naturally occurring amino acid
  Transcript Sequence Number=SeqID_60087
  Gene Ontology: Mol. function=oxidoreductase activity, acting on the CH-OH group of donors, NAD or NADP as acceptor; Cellular component =cytoplasm; Biological process=malate metabolic process
  Homolog annotation: Hit_ID=O50015; Match level="QueryCoverage=98%, HitCoverage=16%, E-value=3e-50, Identity=91%"; Hit description=Malic enzyme
  Pfam annotation: Domain name=Malic_M; Domain location=1-109; Score= -32.7; E_value=6.2e-09; Accession=PF03949.7; Description=Malic enzyme, NAD binding domain
VEEARKKIWLVDSKGLIVTSRNETLQPFKKRYAHEHEPVKDLLGAVKAIRPTALIGSAGVGQXSFTKEVIEAMSSINERPIILALSNPTSQSECTAEQAYTWSRVVFHA

SEQ ID NO: 126062 - protein, 85 aa, Setaria italica
  misc_feature (3)..(3): Xaa can be any naturally occurring amino acid
  Transcript Sequence Number=SeqID_60088
  Homolog annotation: Hit_ID=B6THR2; Match level="QueryCoverage=61%, HitCoverage=14%, E-value=2e-12, Identity=71%"; Hit description =Peptidase C45, acyl-coenzyme A/6-aminopenicillanic acid acyl -transferase
LVXREQLLPFASTAEARRLLAALQAANSERYPRYWDELVGTADGSGVPLLHVRKMTPLPLLSSLLLPPALTVSSFRAGHPGQLQE

SEQ ID NO: 126063 - protein, 84 aa, Setaria italica
  Transcript Sequence Number=SeqID_60089
  Gene Ontology: Biological process=penicillin biosynthetic process
  Homolog annotation: Hit_ID=B6THR2; Match level="QueryCoverage=100%, HitCoverage=22%, E-value=2e-36, Identity=88%"; Hit description =Peptidase C45, acyl-coenzyme A/6-aminopenicillanic acid acyl -transferase
NDEIVAGAIARNFVSRDLLEAKNLDDAMHRICSPSVSVGHSYNLMNVRGRRIVNVETASRNRSAVLEAGAAPFFHANMYRHLQV

SEQ ID NO: 126064 - protein, 100 aa, Setaria italica
  misc_feature (74)..(74): Xaa can be any naturally occurring amino acid
  misc_feature (85)..(85): Xaa can be any naturally occurring amino acid
  Transcript Sequence Number=SeqID_60090
  Gene Ontology: Mol. function=binding; Cellular component=nuclear pore; Biological process=intracellular protein transport
  Homolog annotation: Hit_ID=B6TJW5; Match level="QueryCoverage=98%, HitCoverage=20%, E-value=2e-44, Identity=88%"; Hit description =Importin alpha-1b subunit
  Pfam annotation: Domain name=Arm; Domain location=25-65; Score=50.4; E_value=7.1e-12; Accession=PF00514.15; Description=Armadillobeta -catenin-like repeat
  Pfam annotation: Domain name=HEAT; Domain location=30-67; Score=23.2; E_value=0.0011; Accession=PF02985.14; Description=HEAT repeat
  Pfam module annotation: Pfam domain module=Arm::HEAT; Domain location= 25-65::30-67
FSFLSTIGLPQLQLEAAWVLTNIAASDYTLLVAECGAVPRLVELLESPNANIRHQAIWCLGNIAADLPSCRDIXFDHGVMTPLLXQFREDMKIPVLRTAM

SEQ ID NO: 126065 - protein, 69 aa, Setaria italica
  Transcript Sequence Number=SeqID_60091
  Gene Ontology: Mol. function=structural constituent of ribosome; Cellular component=intracellular; Biological process=translation
  Homolog annotation: Hit_ID=B4FCK9; Match level="QueryCoverage=50%, HitCoverage=26%, E-value=2e-12, Identity=91%"; Hit description=60S ribosomal protein L22-2
  Pfam annotation: Domain name=Ribosomal_L22e; Domain location=1-69; Score=30.3; E_value=6.7e-09; Accession=PF01776.9; Description =Ribosomal L22e protein family
MLTLQNEVFFVQFLKLCCSILRYLKYLTKKYLKKHNVRDWLRVIASNKDRSVYELRYFNIAENEGEEED

SEQ ID NO: 126066 - protein, 52 aa, Setaria italica
  Transcript Sequence Number=SeqID_60092
HSTYIFLLALILGNVEVPELIHGSHLHLSSHVMLRRSNVRILQINHPKFTTA

SEQ ID NO: 126067 - protein, 55 aa, Setaria italica
  misc_feature (14)..(14): Xaa can be any naturally occurring amino acid
  Transcript Sequence Number=SeqID_60093
  Gene Ontology: Mol. function=structural constituent of ribosome; Cellular component=intracellular; Biological process=translation
  Homolog annotation: Hit_ID=B4FCK9; Match level="QueryCoverage=98%, HitCoverage=41%, E-value=8e-14, Identity=72%"; Hit description=60S ribosomal protein L22-2
  Pfam annotation: Domain name=Ribosomal_L22e; Domain location=16-55; Score=-36.1; E_value=0.0098; Accession=PF01776.9; Description =Ribosomal L22e protein family
MARGVVAAKGGAAXGKKKGSVTFTIDCTKPVEDKIMEIASLEKFLQERIKVAGGN

SEQ ID NO: 126068 - protein, 85 aa, Setaria italica
  Transcript Sequence Number=SeqID_60094
  Gene Ontology: Mol. function=bile acid:sodium symporter activity; Cellular component=membrane; Biological process=sodium ion transport
  Homolog annotation: Hit_ID=B6TYA0; Match level="QueryCoverage=72%, HitCoverage=18%, E-value=3e-11, Identity=56%"; Hit description=Bile acid sodium symporter
QEHISCHRLLHFALLAFNAAMLQILSRLEQKGEPVFAKKEYARAVILVASQLGGALGESAFLVIPCIAAHINQIIIDSIIVNWWR

SEQ ID NO: 126069 - protein, 67 aa, Setaria italica
  Transcript Sequence Number=SeqID_60095
TRLFCCKCCSSQPSMYQILKYLASTFDYLIELLCPVQIGKTLLVVIVTLNLQKKKMLIYALVDSGAA

SEQ ID NO: 126070 - protein, 74 aa, Setaria italica
  misc_feature (29)..(29): Xaa can be any naturally occurring amino acid
  Transcript Sequence Number=SeqID_60096
  Gene Ontology: Mol. function=bile acid:sodium symporter activity; Cellular component=membrane; Biological process=sodium ion transport
  Homolog annotation: Hit_ID=B6TYA0; Match level="QueryCoverage=68%, HitCoverage=12%, E-value=1e-16, Identity=88%"; Hit description=Bile acid sodium symporter
QEHISCHRLLHFALLAFNAAMLQILSRLXQKGEPVFAKKEYARAVILVASQKTLPVLIAVVDQLGGALGESAFL

SEQ ID NO: 126071 - protein, 136 aa, Setaria italica
  misc_feature (47)..(47): Xaa can be any naturally occurring amino acid
  Transcript Sequence Number=SeqID_60097
  Gene Ontology: Mol. function=hydrolase activity, acting on ester bonds; Biological process=lipid metabolic process
  Homolog annotation: Hit_ID=B6TLI6; Match level="QueryCoverage=83%, HitCoverage=32%, E-value=1e-55, Identity=92%"; Hit description =Anther-specific proline-rich protein APG
AGKQCHHSRGTLPWLIFFLLHGGRGAAAGKVPAIIVFGDSSVDTGNXNFIPTIARSNFWPYGRDYANGLPTGRFSNGRLATDFISEAFGLPPSIPAYLDTNCSIDQLATGVSFASAATGLDNATAGVLSVITLDVV

SEQ ID NO: 126072 - protein, 114 aa, Setaria italica
  Transcript Sequence Number=SeqID_60098
  Gene Ontology: Cellular component=nucleus; Biological process=cell division
  Homolog annotation: Hit_ID=Q8S524; Match level="QueryCoverage=93%, HitCoverage=29%, E-value=4e-51, Identity=94%"; Hit description=D -type cyclin
VPSLLARSRSADLILSTAKGAEFVVFRPSEIAASVALAAIGECRSSVIERAATSCKYLDKERVLRCHEMIKEKITMGSIILKSAGSSISSVPQSPIGVLDAAACLSQQRRMIAN

SEQ ID NO: 126073 - protein, 70 aa, Setaria italica
  Transcript Sequence Number=SeqID_60099
  Gene Ontology: Mol. function=protein binding; Cellular component =nucleus; Biological process=cell division
  Homolog annotation: Hit_ID=Q8S524; Match level="QueryCoverage=98%, HitCoverage=19%, E-value=7e-29, Identity=91%"; Hit description=D -type cyclin
VVLSTLKWRMHAVTACSFIEYFLHKLSDLGVPSLLARSRSADLILSTAKGAEFVVFRPSEIAASVALAAN

SEQ ID NO: 126074 - protein, 74 aa, Setaria italica
  Transcript Sequence Number=SeqID_60100
  Gene Ontology: Cellular component=nucleus; Biological process=cell division
  Homolog annotation: Hit_ID=Q8S524; Match level="QueryCoverage=83%, HitCoverage=17%, E-value=9e-27, Identity=93%"; Hit description=D -type cyclin
ERVLRCHEMIKEKITMGSIILKSAGSSISSVPQSPIGVLDAAACLSQQSDDATVGSPATCYHSSSTSKRRRITR

SEQ ID NO: 126075 - protein, 37 aa, Setaria italica
  Transcript Sequence Number=SeqID_60101
RCAPHLKQSEQSSSNPSTSCFRCAPHHSRSFWWFNHL

SEQ ID NO: 126076 - protein, 121 aa, Setaria italica
  misc_feature (18)..(18): Xaa can be any naturally occurring amino acid
  Transcript Sequence Number=SeqID_60102
  Gene Ontology: Cellular component=chromosome; Biological process =regulation of transcription, DNA-dependent
  Homolog annotation: Hit_ID=Q8H6B1; Match level="QueryCoverage=97%, HitCoverage=11%, E-value=7e-49, Identity=80%"; Hit description=FACT complex subunit SPT16
  Pfam annotation: Domain name=SPT16; Domain location=56-116; Score= -6.8; E_value=2.8e-07; Accession=PF08644.3; Description=FACT complex subunit (SPT16CDC68)
RQHQAELARQKNEETARXLAGGGSGSGEGRGPARASNELVAYKNVNDVPFVRELVIQVDQKNEAVLLPIYGSMVPFHVSTVKSVTSHQDNRTCTIRIFFNVPGMPFSNDSKLNSQGAILTL

SEQ ID NO: 126077 - protein, 56 aa, Setaria italica
  Transcript Sequence Number=SeqID_60103
GGQWLNQLLNKIFTCYLLCITYSALGIWQHNYSTYLDMHCHIKFKIWATIIYQWQF

SEQ ID NO: 126078 - protein, 80 aa, Setaria italica
  misc_feature (19)..(19): Xaa can be any naturally occurring amino acid
  Transcript Sequence Number=SeqID_60104
TTYSDGEDDELGDLDAPGXMNVDSLDDHVEIDLNDDEGIEYSMNKMSITPHRSFYHPMAMSSDSGLSMPARIRPSVSPPS

SEQ ID NO: 126079 - protein, 40 aa, Setaria italica
  Transcript Sequence Number=SeqID_60105
LLRESDRYGSNGKNMSSLFDPYLLRESDRYIRPNFEFWSL

SEQ ID NO: 126080 - protein, 46 aa, Setaria italica
  Transcript Sequence Number=SeqID_60106
FLFYESRVKRNSNDNSYILSAECLQFHMLEAICPGQGSFLQIQLLL

SEQ ID NO: 126081 - protein, 126 aa, Setaria italica
  misc_feature (21)..(21): Xaa can be any naturally occurring amino acid
  misc_feature (67)..(67): Xaa can be any naturally occurring amino acid
  Transcript Sequence Number=SeqID_60107
  Gene Ontology: Mol. function=catalytic activity; Cellular component =plasma membrane; Biological process=metabolic process
  Homolog annotation: Hit_ID=Q53PH5; Match level="QueryCoverage=93%, HitCoverage=21%, E-value=3e-60, Identity=90%"; Hit description =Neutral/alkaline invertase, putative, expressed
  Pfam annotation: Domain name=Invertase_neut; Domain location=1-126; Score=-200.0; E_value=1.7e-06; Accession=PF04853.4; Description =Plant neutral invertase
  Subcellular localization annotation: CTP_CleavageSite=46; ConfidenceScore=5.02e-01
LFISGFLFPDWLFDFMPCQGXFFVGNVSPARMDFRWFALGNMIAILSSLATPEQSVAIMDLIEERWXEELIGEMPLKICYPAIENHEWRIVTGCDPKNTRWSYHNGGSWPVLLWLLTAACIKTGRP

SEQ ID NO: 126082 - protein, 58 aa, Setaria italica
  Transcript Sequence Number=SeqID_60108
  Gene Ontology: Mol. function=catalytic activity; Cellular component =plasma membrane; Biological process=metabolic process
  Homolog annotation: Hit_ID=Q53PH5; Match level="QueryCoverage=96%, HitCoverage=10%, E-value=2e-27, Identity=96%"; Hit description =Neutral/alkaline invertase, putative, expressed
RQSVAIMDLIEERWEELIGEMPLKICYPAIENHEWRIVTGCDPKNTRWSYHNGGSWPG

SEQ ID NO: 126083 - protein, 90 aa, Setaria italica
  misc_feature (52)..(52): Xaa can be any naturally occurring amino acid
  misc_feature (64)..(64): Xaa can be any naturally occurring amino acid
  Transcript Sequence Number=SeqID_60109
  Gene Ontology: Mol. function=catalytic activity; Cellular component =plasma membrane
  Homolog annotation: Hit_ID=A7IZK9; Match level="QueryCoverage=90%, HitCoverage=20%, E-value=5e-26, Identity=56%"; Hit description =Neutral/alkaline invertase
PSSALHSFEPHPIVGDAWEALRRSLVFFRGQPLGTVAAVDHASEEVLNYDRXAWEKKVDRFKLXGEGAMPASFKVMHDDKRKGLSTTLHA

SEQ ID NO: 126084 - protein, 47 aa, Setaria italica
  Transcript Sequence Number=SeqID_60110
  Gene Ontology: Mol. function=catalytic activity; Cellular component =plasma membrane; Biological process=metabolic process
  Homolog annotation: Hit_ID=Q56UL5; Match level="QueryCoverage=91%, HitCoverage=27%, E-value=2e-11, Identity=82%"; Hit description =Neutral/alkaline invertase 8 (Fragment)
YFGSYSSWVILVAKMMLEDPSHLGMISLEEDKAMLKPVLKRSASWTN

SEQ ID NO: 126085 - protein, 108 aa, Setaria italica
  Transcript Sequence Number=SeqID_60111
  Gene Ontology: Mol. function=transferase activity, transferring glycosyl groups; Biological process=metabolic process
  Homolog annotation: Hit_ID=B6SSE4; Match level="QueryCoverage=84%, HitCoverage=18%, E-value=5e-40, Identity=84%"; Hit description =Hydroquinone glucosyltransferase
RAFPTEQMRELALGLELSGQRFLWVVRSPSDEGAVNDNYYDAESKKDPFAYLPEGFVERTKEVGLVVPSWAPQIKVLAHRATGGFLTHCGWKLGAGRSLRTNGRRPNR

SEQ ID NO: 126086 - protein, 104 aa, Setaria italica
  Transcript Sequence Number=SeqID_60112
  Gene Ontology: Mol. function=transferase activity, transferring glycosyl groups; Biological process=metabolic process
  Homolog annotation: Hit_ID=B6SSN2; Match level="QueryCoverage=83%, HitCoverage=18%, E-value=7e-36, Identity=82%"; Hit description =Hydroquinone glucosyltransferase
VRRRARRTPFAYLPEGFVERTKEVGLVVPSWAPQIKVLAHRATGGFLTHCGWNSVLESLVHGVPMVAWPLYAEQRQNAVMLSAEGVGAAIETLMSEECARSVPA

SEQ ID NO: 126087 - protein, 87 aa, Setaria italica
  Transcript Sequence Number=SeqID_60113
  Gene Ontology: Mol. function=homoserine dehydrogenase activity; Cellular component=chloroplast; Biological process=aspartate family amino acid biosynthetic process
  Homolog annotation: Hit_ID=Q6ZD10; Match level="QueryCoverage=85%, HitCoverage=8%, E-value=5e-34, Identity=89%"; Hit description =Putative aspartate kinase, homoserine dehydrogenase
  Pfam annotation: Domain name=Homoserine_dh; Domain location=1-77; Score=-60.7; E_value=0.0021; Accession=PF00742.11; Description =Homoserine dehydrogenase
VRFLVGYCLVVRWYVGCNKEGQVELQRYKRDHPFAQLSGSDNIIAFTTSRYKEQPLIVRGPGAGAEVTAGGVFCDILRLASYLGAPS

SEQ ID NO: 126088 - protein, 104 aa, Setaria italica
  Transcript Sequence Number=SeqID_60114
  Gene Ontology: Mol. function=homoserine dehydrogenase activity; Cellular component=chloroplast; Biological process=aspartate family amino acid biosynthetic process
  Homolog annotation: Hit_ID=P49080; Match level="QueryCoverage=98%, HitCoverage=11%, E-value=3e-49, Identity=93%"; Hit description =Homoserine dehydrogenase
TIPRQPIIPVMKDNIPIVIRNMFNISAPGTMICRQPANDNGDLDACVKSFATIDNLALVNVEGTGMAGVPGTSSAIFSAVKDVGANVIMISQASSEHSVCFAVP

SEQ ID NO: 126089 - protein, 77 aa, Setaria italica
  Transcript Sequence Number=SeqID_60115
  Gene Ontology: Mol. function=homoserine dehydrogenase activity; Cellular component=chloroplast; Biological process=aspartate family amino acid biosynthetic process
  Homolog annotation: Hit_ID=P49080; Match level="QueryCoverage=94%, HitCoverage=7%, E-value=2e-28, Identity=83%"; Hit description =Homoserine dehydrogenase
  Pfam annotation: Domain name=Homoserine_dh; Domain location=1-77; Score=-68.9; E_value=0.0086; Accession=PF00742.11; Description =Homoserine dehydrogenase
LSGTDVARKVIILARESGLRLELSDIPVKSLVPEALASCSSADEFMQKLPSFDEDWARQRSDARRTRQGRKYLDGNS

SEQ ID NO: 126090 - protein, 64 aa, Setaria italica
  Transcript Sequence Number=SeqID_60116
  Gene Ontology: Mol. function=homoserine dehydrogenase activity; Cellular component=chloroplast; Biological process=methionine biosynthetic process
  Homolog annotation: Hit_ID=Q6ZD10; Match level="QueryCoverage=73%, HitCoverage=5%, E-value=5e-19, Identity=97%"; Hit description =Putative aspartate kinase, homoserine dehydrogenase
GHPQANSSKNATTINVRAIAQGCSEYNITVVLKQEDCVRALRAAHSRFFLSKTTLAVGILQLVK

SEQ ID NO: 126091 - protein, 40 aa, Setaria italica
  Transcript Sequence Number=SeqID_60117
IGITGSSTMLLSDTGIDLTQWKELLLPFVEALSTGLSLFP

SEQ ID NO: 126092 - protein, 54 aa, Setaria italica
  Transcript Sequence Number=SeqID_60118
PLIVPVRRAKQISSISIKHYRVKYLLLKYSQCEIKNNFAMSNTLGCSLSQLAKE

SEQ ID NO: 126093 - protein, 35 aa, Setaria italica
  Transcript Sequence Number=SeqID_60119
LVLLVQVGDGINDAPSLAAADVGIAMRTHSKRMLP

SEQ ID NO: 126094 - protein, 152 aa, Setaria italica
  Transcript Sequence Number=SeqID_60120
  Gene Ontology: Mol. function=hydrolase activity, acting on acid anhydrides, catalyzing transmembrane movement of substances; Cellular component=integral to membrane; Biological process=metal ion transport
  Homolog annotation: Hit_ID=Q10QZ3; Match level="QueryCoverage=84%, HitCoverage=14%, E-value=2e-43, Identity=71%"; Hit description =Copper-translocating P-type ATPase family protein, expressed
LRLAAAVEKTALHPIANAIMNKAELLKLDIPITSGQLTEPGFGCLAEVDGCLVAVGTLDWVHNRFETKASPTELRDLRNHLEFMLSSEASSSNQSKSIAYVGREGEGIIGAIAISDILREDAKLTVDRCFLFILTVFPWYTDIFLLSNKELN

SEQ ID NO: 126095 - protein, 100 aa, Setaria italica
  misc_feature (67)..(67): Xaa can be any naturally occurring amino acid
  misc_feature (88)..(88): Xaa can be any naturally occurring amino acid
  Transcript Sequence Number=SeqID_60121
  Gene Ontology: Mol. function=hydrolase activity, acting on acid anhydrides, catalyzing transmembrane movement of substances; Cellular component=integral to membrane; Biological process=metal ion transport
  Homolog annotation: Hit_ID=Q10QZ3; Match level="QueryCoverage=76%, HitCoverage=8%, E-value=4e-30, Identity=84%"; Hit description=Copper- translocating P-type ATPase family protein, expressed
MVVKHTLCPLLLAVKRMGERMFDCICFILEQVEDAQAREAPVQRLADSIAGPFVYTVMTLAAATFSXWYYIGTHLFPEVLLNDIAGPXDSLLLSIKLAVD

SEQ ID NO: 126096 - protein, 39 aa, Setaria italica
  Transcript Sequence Number=SeqID_60122
  Gene Ontology: Mol. function=hydrolase activity, acting on acid anhydrides, catalyzing transmembrane movement of substances; Cellular component=integral to membrane; Biological process=metal ion transport
  Homolog annotation: Hit_ID=Q10QZ2; Match level="QueryCoverage=100%, HitCoverage=4%, E-value=7e-16, Identity=94%"; Hit description=Copper- translocating P-type ATPase family protein, expressed
ADSIAGPFVYTVMTLAAATFSFWYYIGTHLFPEVLLNDI

SEQ ID NO: 126097 - protein, 31 aa, Setaria italica
  Transcript Sequence Number=SeqID_60123
AFWATSIVATLVGYINCTRTNMLQLARIACY

SEQ ID NO: 126098 - protein, 121 aa, Setaria italica
  Transcript Sequence Number=SeqID_60124
  Gene Ontology: Mol. function=transferase activity, transferring glycosyl groups; Cellular component=chloroplast
  Homolog annotation: Hit_ID=Q575Z6; Match level="QueryCoverage=97%, HitCoverage=15%, E-value=2e-53, Identity=81%"; Hit description =Alkaline alpha galactosidase 3
HSGVVGAFNCQGAGWCRVGKKNLVHDEQPGTVTGVIRARDVDYLAKVADQSWNGDVIVYSHIGGEVVYLPKNASLPVTLRSREYEVFTVVPVKHLPNSASFAPIGLISMFNSGGAVREGEE

SEQ ID NO: 126099 - protein, 47 aa, Setaria italica
  Transcript Sequence Number=SeqID_60125
FFFLNTVSFFSYISDGYSLNVSRYIDLNTLPKQSTGTVLARGGQAQR

SEQ ID NO: 126100 - protein, 63 aa, Setaria italica
  Transcript Sequence Number=SeqID_60126
  Gene Ontology: Mol. function=transferase activity, transferring glycosyl groups
  Homolog annotation: Hit_ID=Q8W2G5; Match level="QueryCoverage=84%, HitCoverage=7%, E-value=5e-22, Identity=90%"; Hit description =Alkaline alpha-galactosidase
RFIFLTHNVKQSRYVYVWHAITGYWGGVRPGAVGMEHYESKMQHPVSSPGVQKNEHCDALNSI

SEQ ID NO: 126101 - protein, 73 aa, Setaria italica
  Transcript Sequence Number=SeqID_60127
  Gene Ontology: Mol. function=transferase activity, transferring glycosyl groups
  Homolog annotation: Hit_ID=Q575Z6; Match level="QueryCoverage=75%, HitCoverage=7%, E-value=3e-23, Identity=87%"; Hit description =Alkaline alpha galactosidase 3
ILPHYKCTETYLFFIFSFGKGGVSPKFVIIDDGWQSVSMDPVGIACLADNSANFANRLTHIKENHKFQKMGGR

SEQ ID NO: 126102 - protein, 89 aa, Setaria italica
  Transcript Sequence Number=SeqID_60128
  Gene Ontology: Mol. function=transferase activity, transferring glycosyl groups; Cellular component=chloroplast
  Homolog annotation: Hit_ID=Q575Z6; Match level="QueryCoverage=91%, HitCoverage=10%, E-value=2e-35, Identity=82%"; Hit description =Alkaline alpha galactosidase 3
SFEGTHLVFVGAGSDPFEVITSSVKAVERHLQTFSHREKKKMPDILNWFGWCTWDAFYTNVTAEGVEEGLQRSFQMTNLTPFPQTILNP

SEQ ID NO: 126103 - protein, 40 aa, Setaria italica
  Transcript Sequence Number=SeqID_60129
LLHTIDVHEHIPSTKRETNYFSIPLLQVLNQVIPCSSPLV

SEQ ID NO: 126104 - protein, 51 aa, Setaria italica
  misc_feature (37)..(37): Xaa can be any naturally occurring amino acid
  Transcript Sequence Number=SeqID_60130
  Gene Ontology: Mol. function=phosphotransferase activity, alcohol group as acceptor; Biological process=phosphoinositide-mediated signaling
  Homolog annotation: Hit_ID=Q53RI7; Match level="QueryCoverage=74%, HitCoverage=1%, E-value=9e-15, Identity=97%"; Hit description =Phosphatidylinositol 3-and 4-kinase, putative
QQDGEKNELETSCSVTQALEFLTPPYKGHPRVMAYVXRVLETYPPETVTFS

SEQ ID NO: 126105 - protein, 139 aa, Setaria italica
  Transcript Sequence Number=SeqID_60131
  Gene Ontology: Mol. function=hydrolase activity
  Homolog annotation: Hit_ID=B9R9Y4; Match level="QueryCoverage=100%, HitCoverage=35%, E-value=9e-46, Identity=65%"; Hit description =Catalytic, putative
IFGRTGKHLFLTDYDDGKPPLLQRMVDNWGDLQFMSALQAFRRRVAYSNACYDHIVGWRTSSIRQDSELPKWVDSTNKIYPHIVYEELSKAEAPNQCVDTDNCTLEERLLRGLKRVSWEKVDVSFHNSKVRSAAHSVIQ

SEQ ID NO: 126106 - protein, 62 aa, Setaria italica
  Transcript Sequence Number=SeqID_60132
LLLQFTERLLRGLKRVSWEKVDVSFHNSKVRSAAHSVIQVKDPVMHCEGADVIQHMIDHFTL

SEQ ID NO: 126107 - protein, 129 aa, Setaria italica
  Transcript Sequence Number=SeqID_60133
  Gene Ontology: Mol. function=hydrolase activity
  Homolog annotation: Hit_ID=B9R9Y4; Match level="QueryCoverage=100%, HitCoverage=32%, E-value=2e-40, Identity=63%"; Hit description =Catalytic, putative
LTDYDDGKPPLLQRMVDNWGDLQFMSALQAFRRRVAYSNACYDHIVGWRTSSIRQDSELPKWVDSTNKIYPHIVYEELSKAEAPNQCVDTDNCTLEERLLRGLKRVSWEKVDVSFHNSKVRSAAHSVIQ

SEQ ID NO: 126108 - protein, 102 aa, Setaria italica
  Transcript Sequence Number=SeqID_60134
  Homolog annotation: Hit_ID=B9R9Y4; Match level="QueryCoverage=86%, HitCoverage=15%, E-value=4e-14, Identity=46%"; Hit description =Catalytic, putative
ACCIIHLIFGRTGKHLFLTDYDDGKPPLLQRMVDNWGDLQFMYAYLPQLLLCAWIMNIFSLPICWCRSALQAFRRRVAYSNACYDRILTSHLKLACSIVVIS

SEQ ID NO: 126109 - protein, 62 aa, Setaria italica; identical to SEQ ID NO: 126106
  Transcript Sequence Number=SeqID_60135

SEQ ID NO: 126110 - protein, 50 aa, Setaria italica
  Transcript Sequence Number=SeqID_60136
  Subcellular localization annotation: CTP_CleavageSite=34; ConfidenceScore=5.06e-01
LCTAASHLSSSIMFVARSSGITMLSFRYEFASLFAARKRAGRNIRSITRH

SEQ ID NO: 126111 - protein, 48 aa, Setaria italica
  Transcript Sequence Number=SeqID_60137
PARFLAANKEANSYLKLSIVIPLDTSGVVFREMVPSIATTTSRAVVRW

SEQ ID NO: 126112 - protein, 66 aa, Setaria italica
  Transcript Sequence Number=SeqID_60138
HYISYSGVNCIYNCPEVKAAKGPQRKQSQPLHPFPFKTGHSVQELLSRLILGWSRNYCINLVSLCP

SEQ ID NO: 126113 - protein, 45 aa, Setaria italica
  Transcript Sequence Number=SeqID_60139
  Gene Ontology: Mol. function=catalytic activity; Cellular component =plasma membrane
  Homolog annotation: Hit_ID=Q0JAA0; Match level="QueryCoverage=100%, HitCoverage=14%, E-value=2e-17, Identity=97%"; Hit description =Probable protein phosphatase 2C 44
MTNQEAVDLVKSIKDPQAAAKRLTTEALARKSKDDISCIVIRFRC

SEQ ID NO: 126114 - protein, 38 aa, Setaria italica
  Transcript Sequence Number=SeqID_60140
LHTQQPESRLHLLSTCPCHQQLGPGGSTAVTAIVVDGK

SEQ ID NO: 126115 - protein, 78 aa, Setaria italica
  Transcript Sequence Number=SeqID_60141
  Gene Ontology: Mol. function=hydrolase activity, acting on ester bonds; Biological process=lipid metabolic process
  Homolog annotation: Hit_ID=Q8LSS1; Match level="QueryCoverage=97%, HitCoverage=19%, E-value=1e-11, Identity=53%"; Hit description =Putative lipase
SSRGITSVVPISLGNETSWFVNVLQLLNSSGYDQRKITARSLFFVGEIGVNDYFLALMSKSADVAESLVPHIIGTIRS

SEQ ID NO: 126116 - protein, 105 aa, Setaria italica
  misc_feature (17)..(17): Xaa can be any naturally occurring amino acid
  Transcript Sequence Number=SeqID_60142
  Gene Ontology: Mol. function=ATP-dependent helicase activity; Biological process=regulation of transcription, DNA-dependent
  Homolog annotation: Hit_ID=Q2R377; Match level="QueryCoverage=94%, HitCoverage=11%, E-value=3e-45, Identity=92%"; Hit description=CarD -like transcriptional regulator family protein, expressed
GLLVVDEEQKFGVQQKXEKIASYKSSIDVLTLSATPIPRTLYLALTGFRDASLMSTPPPERVAVKTYVSAFSKERALSTIKFELQRGGQVFYVVPRIKGHSFVIF

SEQ ID NO: 126117 - protein, 68 aa, Setaria italica
  Transcript Sequence Number=SeqID_60143
FACRDESEQATFFKWHCSSSFIATFTLLSAPQLPQNACWVTALLIMPQKKLGCNFSGTFHNAGLSIVL

SEQ ID NO: 126118 - protein, 89 aa, Setaria italica
  misc_feature (49)..(49): Xaa can be any naturally occurring amino acid
  misc_feature (54)..(54): Xaa can be any naturally occurring amino acid
  Transcript Sequence Number=SeqID_60144
  Gene Ontology: Mol. function=nucleic acid binding
  Pfam annotation: Domain name=RRM_1; Domain location=12-79; Score =81.3; E_value=3.5e-21; Accession=PF00076.14; Description=RNA recognition motif. (a.k.a. RRM, RBD, o
MCTHAQVIHRRAGLSYDTNETALKDAFSQHGDVIAVKVICHPTTGKSKXFGFVXFSSEDEAAAAVQKMNGEVLDGRTIRVQYSDSGRSD

SEQ ID NO: 126119 - protein, 37 aa, Setaria italica
  Transcript Sequence Number=SeqID_60145
ICTAVKVICHPTTGKSKGFGFVTFSSEDEAAAAVQKM

SEQ ID NO: 126120 - protein, 51 aa, Setaria italica
  Transcript Sequence Number=SeqID_60146
  Gene Ontology: Mol. function=protein serine/threonine kinase activity; Cellular component=plasma membrane; Biological process =protein amino acid phosphorylation
  Homolog annotation: Hit_ID=Q41493; Match level="QueryCoverage=90%, HitCoverage=7%, E-value=5e-20, Identity=100%"; Hit description=Stpk1 protein kinase
MFSHCRFYVAEVLLALEYLHMLGIIYRDLKPENVLVREDGHIMLSDFDLSL

SEQ ID NO: 126121 - protein, 87 aa, Setaria italica
  Transcript Sequence Number=SeqID_60147
  Gene Ontology: Mol. function=metal ion binding; Biological process =response to stress
  Homolog annotation: Hit_ID=A1YAQ3; Match level="QueryCoverage=89%, HitCoverage=47%, E-value=1e-30, Identity=82%"; Hit description=Zinc finger protein
  Pfam annotation: Domain name=zf-A20; Domain location=21-45; Score =35.5; E_value=2.1e-07; Accession=PF01754.8; Description=A20-like zinc finger
MAQESWKQESEETGVHAPEAPILCINNCGFFGSSMTNNMCSKCYRDFIKLMEAPVVEKKVITAASSSAVPLETAKHDDAHAAAVTEA

SEQ ID NO: 126122 - protein, 44 aa, Setaria italica
  Transcript Sequence Number=SeqID_60148
FFHLQVLGEKAFEKFGKWFISLHFSDQLAGSYKKVLTFKFVLPD

SEQ ID NO: 126123 - protein, 98 aa, Setaria italica
  Transcript Sequence Number=SeqID_60149
  Homolog annotation: Hit_ID=Q6K999; Match level="QueryCoverage=98%, HitCoverage=18%, E-value=6e-19, Identity=54%"; Hit description =Cticosapeptide/Phox/Bem1p (PB1) domain-containing protein-like
  Subcellular localization annotation: CTP_CleavageSite=74; ConfidenceScore=5.57e-01
IGYFAATASPGATSFPAMYAVAPPNANANGNGSAPSPAVSNATAYAPAPQVAYDSNGRAIYYTSMLPQYPSAVNGMSAAGAVLGTEPAKPVAVKPTVS

SEQ ID NO: 126124 - protein, 88 aa, Setaria italica
  misc_feature (42)..(42): Xaa can be any naturally occurring amino acid
  misc_feature (72)..(72): Xaa can be any naturally occurring amino acid
  misc_feature (79)..(79): Xaa can be any naturally occurring amino acid
  Transcript Sequence Number=SeqID_60150
  Homolog annotation: Hit_ID=Q7XC74; Match level="QueryCoverage=98%, HitCoverage=4%, E-value=2e-19, Identity=63%"; Hit description=Agenet domain containing protein, expressed
VLSKSTLGYGKTLKLIDQAQLNLEPSSSGKELQLEEIHSGHXVEDVPTAVPLDGNRNDTAPISIIWNGIEKXSAVEVLXDKGGFGVAW

SEQ ID NO: 126125 - protein, 144 aa, Setaria italica
  Transcript Sequence Number=SeqID_60151
  Homolog annotation: Hit_ID=Q7XC74; Match level="QueryCoverage=97%, HitCoverage=5%, E-value=1e-21, Identity=45%"; Hit description=Agenet domain containing protein, expressed
NHYLFTLRELLEAGPDGYWKSERVRNKTGSSNVNPVTETLEVYAPANLSKPGRKRGRKPKYDQAQLNLEPSSSGKELQLEEIHSGKVTTYFWHAKNALFTSSSFTFCFANVGHGVEDVPTAVPLDGNRNDTAPISIIWNGIEKG

SEQ ID NO: 126126 - protein, 72 aa, Setaria italica
  Transcript Sequence Number=SeqID_60152
WASQCWKCLLYFPQKVEVLSETNNSVLGTGLRTEVPSVSEMQAASTVPTSKQNVPVTHSRNIFPFSLRIYLT

SEQ ID NO: 126127 - protein, 114 aa, Setaria italica
  misc_feature (16)..(16): Xaa can be any naturally occurring amino acid
  misc_feature (21)..(21): Xaa can be any naturally occurring amino acid
  Transcript Sequence Number=SeqID_60153
  Gene Ontology: Mol. function=RNA binding
  Homolog annotation: Hit_ID=Q7XC74; Match level="QueryCoverage=89%, HitCoverage=5%, E-value=7e-27, Identity=70%"; Hit description=Agenet domain containing protein, expressed
CGEAGGPSKDKNTNAXKPEEXKPLPLSQRDMVFNIGKSVAENKSDALAFKRPGLQKEGSKVVYGVPKHGKKKKFMEVSKHYDAGQSDKISEGNASSRLAKQLLIDQQIRPKNRT

SEQ ID NO: 126128 - protein, 66 aa, Setaria italica
  Transcript Sequence Number=SeqID_60154
PPPPTQQANALARAQFPRVSLAAMSAEEAAAAATEVPETEVESEAPAAEEAEAAKPAKGRKKGRTD

SEQ ID NO: 126129 - protein, 32 aa, Setaria italica
  misc_feature (8)..(8): Xaa can be any naturally occurring amino acid
  Transcript Sequence Number=SeqID_60155
  Gene Ontology: Mol. function=glycylpeptide N-tetradecanoyltransferase activity; Biological process=N-terminal protein myristoylation
  Homolog annotation: Hit_ID=Q8LR54; Match level="QueryCoverage=100%, HitCoverage=7%, E-value=1e-11, Identity=96%"; Hit description =Glycylpeptide N-tetradecanoyltransferase
KFGPGDGXLHYYLYNYRIRNGIKPSELGLVLL

SEQ ID NO: 126130 - protein, 53 aa, Setaria italica
  Transcript Sequence Number=SeqID_60156
  Gene Ontology: Mol. function=glycylpeptide N-tetradecanoyltransferase activity; Cellular component=cytoplasm; Biological process=N-terminal protein myristoylation
  Homolog annotation: Hit_ID=Q8LR54; Match level="QueryCoverage=83%, HitCoverage=10%, E-value=3e-15, Identity=88%"; Hit description =Glycylpeptide N-tetradecanoyltransferase
AYLAKFVVAPDFDEVDVEHWLLPQEDVVDSYLVESPETHEVDSYLMRLRALHK

SEQ ID NO: 126131 - protein, 61 aa, Setaria italica
  Transcript Sequence Number=SeqID_60157
  Homolog annotation: Hit_ID=Q0JBL5; Match level="QueryCoverage=60%, HitCoverage=11%, E-value=8e-15, Identity=100%"; Hit description=ATP -dependent Clp protease proteolytic subunit
EQCMERDMFMDPEEAHDWGLIDEVIEHRPVSLVSDAVGGDPPNLGGGGNGENKGAEEPSSA

SEQ ID NO: 126132 - protein, 51 aa, Setaria italica
  Transcript Sequence Number=SeqID_60158
FSRLKDGLPGSEQLRSLLPTRVLPNTRFLRLLCSSAKRLLREYASWQQRPK

SEQ ID NO: 126133 - protein, 115 aa, Setaria italica
  misc_feature (47)..(47): Xaa can be any naturally occurring amino acid
  misc_feature (91)..(91): Xaa can be any naturally occurring amino acid
  Transcript Sequence Number=SeqID_60159
  Gene Ontology: Mol. function=nucleic acid binding; Cellular component= spliceosome; Biological process=mRNA processing
  Homolog annotation: Hit_ID=Q6ZK48; Match level="QueryCoverage=86%, HitCoverage=18%, E-value=1e-49, Identity=89%"; Hit description=Pre -mRNA-splicing factor SLU7
FKGQDVSLPKSKYEEDIFINNHTTVWGSWWKDHQWGYKCCKQTIKNXYCTGLAGIEAAEASADLMKANMARKEAAEDEPVQQEEKRLATWXTDVPQDLVLDKKLLEESLKKENAR

SEQ ID NO: 126134 - protein, 111 aa, Setaria italica
  Transcript Sequence Number=SeqID_60160
  Gene Ontology: Mol. function=nucleic acid binding; Cellular component= spliceosome; Biological process=mRNA processing
  Homolog annotation: Hit_ID=Q6ZK48; Match level="QueryCoverage=96%, HitCoverage=19%, E-value=9e-53, Identity=91%"; Hit description=Pre -mRNA-splicing factor SLU7
SWEAFDKGQDIHMQAAPSQAELLYKSFKIKKEMLKSEHKDKIMEKYGNAASEDTMPRELLLGQSEKEIEYDRTGRIIKGQDVSLPKSKYEEDIFINNHTTVWGSWWKRPIK

SEQ ID NO: 126135 - protein, 91 aa, Setaria italica
  Transcript Sequence Number=SeqID_60161
  Gene Ontology: Mol. function=nucleic acid binding; Cellular component= spliceosome; Biological process=mRNA processing
  Homolog annotation: Hit_ID=Q6ZK48; Match level="QueryCoverage=67%, HitCoverage=11%, E-value=4e-18, Identity=78%"; Hit description=Pre -mRNA-splicing factor SLU7
EEGRTKEKSNLKEQQLKKLEEKDSEKDGENAGSEDDEEDGLRIDEAKVDESAQMDFAKVEKRVRTTGGGSTGTVRNLRIREDTAKYLLNLD

SEQ ID NO: 126136 - protein, 51 aa, Setaria italica
  Transcript Sequence Number=SeqID_60162
FFVFFFFFVYTYSCYAHLFSWSSYIPYSKLSVAHKQACHDFTSLITDTGHY

SEQ ID NO: 126137 - protein, 135 aa, Setaria italica
  Transcript Sequence Number=SeqID_60163
  Gene Ontology: Mol. function=catalytic activity; Biological process =metabolic process
LLSLDEFVSLRSWQKEHPGCKVYGQTASTNHHSELMDLGIIPSLKGSTISQKVPHVIFCAPPSGSDDYPGDVRVAASNWSGEGSFLFTSSTALYDCSDNMMCNEDCPSVPIGRSPRTDVLLKVENVVLEAGGCVL

SEQ ID NO: 126138 - protein, 54 aa, Setaria italica
  misc_feature (9)..(9): Xaa can be any naturally occurring amino acid
  Transcript Sequence Number=SeqID_60164
  Gene Ontology: Mol. function=catalytic activity; Biological process =metabolic process
  Homolog annotation: Hit_ID=Q942T8; Match level="QueryCoverage=100%, HitCoverage=35%, E-value=8e-22, Identity=88%"; Hit description =P0560B06.4 protein
MDAVNRSGXFDTKFEGFTGTDGPLGKRMENSKTRAEIGWEPTYPSFTEFLGLSS

SEQ ID NO: 126139 - protein, 76 aa, Setaria italica
  Transcript Sequence Number=SeqID_60165
  Gene Ontology: Mol. function=catalytic activity; Biological process =metabolic process
VFWLRKGTLDTRPDHIINQIHYEDAASLAIAIMKKQLRSRIFLGCDNKPLSRSLQTFSTSVSSFCKASFAVQCLFG

SEQ ID NO: 126140 - protein, 49 aa, Setaria italica
  Transcript Sequence Number=SeqID_60166
EKASKGKGEGQEQGGRRRPPTPPAGEEEKRRRGWGGVLNWRSWGLWGSH

SEQ ID NO: 126141 - protein, 85 aa, Setaria italica
  Transcript Sequence Number=SeqID_60167
TSGDCRGLTGGSLVSLLRHCGQSLEILDLSRCPSIAVGNVELFAQRATRLNHMIIEESVISEELKAIAQKKGLKIGSLLPCEGPF

SEQ ID NO: 126142 - protein, 138 aa, Setaria italica
  Transcript Sequence Number=SeqID_60168
  Gene Ontology: Mol. function=protein serine/threonine kinase activity; Cellular component=plasma membrane; Biological process =protein amino acid phosphorylation
  Homolog annotation: Hit_ID=B6SYS4; Match level="QueryCoverage=99%, HitCoverage=18%, E-value=4e-63, Identity=82%"; Hit description=ATP binding protein
NILLKSYSRCEIKVIDLGSSCFLSDNLNLYIQSRSYRSPEVILGLPYDQKIDVWSLGCILAELYTGEVLFPNESVPIILARMIGTIGPIDTEMLALGQETQKYFTDDHDLFHKNEETGQLEYLIPEKSSLKRHLQCPT

SEQ ID NO: 126143 - protein, 48 aa, Setaria italica
  Transcript Sequence Number=SeqID_60169
LEEACLGLAPLACLADAGMFLDTIDVSGHREMRSFFNGIVRLQKDLIS

SEQ ID NO: 126144 - protein, 118 aa, Setaria italica
  misc_feature (61)..(61): Xaa can be any naturally occurring amino acid
  Transcript Sequence Number=SeqID_60170
  Homolog annotation: Hit_ID=O65250; Match level="QueryCoverage=80%, HitCoverage=17%, E-value=1e-14, Identity=40%"; Hit description =F21E10.11 protein
  Pfam annotation: Domain name=PAE; Domain location=2-118; Score= -180.7; E_value=0.00014; Accession=PF03283.5; Description =Pectinacetylesterase
  Subcellular localization annotation: CTP_CleavageSite=62; ConfidenceScore=5.27e-01
TSIDVSGHREMRSFFNGIVRLQGSGRSLPRSCTSRMDKTSVMQTSMNIHQRLKHVKIYFFXTSGSYSAFFPQNVVPNIQTPTFILNTAYDVWQLQQSVAPKAADPQGLWSKCRTNHAF

SEQ ID NO: 126145 - protein, 95 aa, Setaria italica
  misc_feature (30)..(30): Xaa can be any naturally occurring amino acid
  Transcript Sequence Number=SeqID_60171
  Gene Ontology: Cellular component=membrane; Biological process =embryonic development ending in birth or egg hatching
  Homolog annotation: Hit_ID=Q9M586; Match level="QueryCoverage=90%, HitCoverage=29%, E-value=2e-38, Identity=90%"; Hit description =Prohibitin
VIGLVKNLVLRVLTRPMPERLPHIYRTLGXNFNERVLPSIIHETLKAVVAQYNASQLITQRETVSREIRKILTERARNFSIALDDVSITSLSFGK

SEQ ID NO: 126146 - protein, 57 aa, Setaria italica
  Transcript Sequence Number=SeqID_60172
RCYVQNPPVPPNVWYKDIHTLRTRGCIISLLLRHVQLLELSSRSLESRKTLLAEAAI

SEQ ID NO: 126147 - protein, 51 aa, Setaria italica
  Transcript Sequence Number=SeqID_60173
FLRKAEEVVNSGCIPLFVIVTLLVNRVYIGTQLAICSLPQFCCETEFTLHM

SEQ ID NO: 126148 - protein, 87 aa, Setaria italica
  Transcript Sequence Number=SeqID_60174
  Subcellular localization annotation: CTP_CleavageSite=39; ConfidenceScore=5.01e-01
PVTGSSSLTFANFRGLFILTGAASTSSLFIALIIYAILRSSAARGGVWSRYPAGLRWRGAAGQEIQEDVSLEARAKRTRRILSRCRP

SEQ ID NO: 126149 - protein, 54 aa, Setaria italica
  Transcript Sequence Number=SeqID_60175
MSPSSLTFANFRGLFILTGAASTSSLFIALIIYAYKKQHRSTKLMQNDNKQVGK

SEQ ID NO: 126150 - protein, 82 aa, Setaria italica
  Transcript Sequence Number=SeqID_60176
  Homolog annotation: Hit_ID=Q53LU3; Match level="QueryCoverage=93%, HitCoverage=20%, E-value=7e-27, Identity=72%"; Hit description =Leucine Rich Repeat family protein, expressed
MERETMDVSSENYISHLSDDCLLSIFNKLESELDRNAFGLTCRNWLKVRNIGRKSLTFHCSFNPTIDKEHARCIPNILARSP

SEQ ID NO: 126151 - protein, 103 aa, Setaria italica
  Transcript Sequence Number=SeqID_60177
  Gene Ontology: Cellular component=endoplasmic reticulum membrane; Biological process=protein transport
  Homolog annotation: Hit_ID=B6SZ84; Match level="QueryCoverage=100%, HitCoverage=27%, E-value=3e-46, Identity=83%"; Hit description=Sec12- like protein 1
VSLDGKYLALGTCDGNFCVVEVQKMEVAHWSKEVHLGSPISSIEFCPTERVVISTSHQWGAEITKLDVPPEWKVWQIWLVLLTLFVSSAVLFYLFFKHARIHL

SEQ ID NO: 126152 - protein, 74 aa, Setaria italica
  Transcript Sequence Number=SeqID_60178
  Gene Ontology: Cellular component=endoplasmic reticulum membrane; Biological process=protein transport
  Homolog annotation: Hit_ID=B6SZ84; Match level="QueryCoverage=100%, HitCoverage=19%, E-value=2e-32, Identity=87%"; Hit description=Sec12- like protein 1
WSKKVHLGSPISSIEFCPTERVVISTSHQWGAEITKLDVPPEWKVWQIWLVLLTLFVSSAVLFYLFFKHARIHL

SEQ ID NO: 126153 - protein, 91 aa, Setaria italica
  Transcript Sequence Number=SeqID_60179
YNLNSFIHQSITHDNVNIVVTPSSINKDRGQLLVLVAADRHTTHTNACARLKLKQSEQRTYHEQFDSYSWEYKFFFWLSRNLSSINKDSRF

SEQ ID NO: 126154 - protein, 34 aa, Setaria italica
  Transcript Sequence Number=SeqID_60180
LLIDIQHTRTHAHANKQSEQRTYHEQFDSYSWEY

SEQ ID NO: 126155 - protein, 78 aa, Setaria italica
  Transcript Sequence Number=SeqID_60181
  Gene Ontology: Mol. function=protein serine/threonine kinase activity; Cellular component=extracellular region; Biological process=protein amino acid phosphorylation
  Homolog annotation: Hit_ID=Q069I5; Match level="QueryCoverage=85%, HitCoverage=17%, E-value=9e-24, Identity=80%"; Hit description=MAP kinase kinase
RVFISISLPLYLQVIQLNIEDSIRRQIAKELKINLSTQYQYIVVFYQCFYFNGAISIVLEYMDGGSLSDFLKTVKTIP

SEQ ID NO: 126156 - protein, 101 aa, Setaria italica
  misc_feature (64)..(64): Xaa can be any naturally occurring amino acid
  misc_feature (75)..(75): Xaa can be any naturally occurring amino acid
  Transcript Sequence Number=SeqID_60182
  Gene Ontology: Mol. function=ribose-5-phosphate isomerase activity; Biological process=pentose-phosphate shunt, non-oxidative branch
  Homolog annotation: Hit_ID=Q6ZEZ1; Match level="QueryCoverage=100%, HitCoverage=38%, E-value=6e-48, Identity=95%"; Hit description =Putative ribose-5-phosphate isomerase
  Pfam annotation: Domain name=Rib_5-P_isom_A; Domain location=1-101; Score=63.7; E_value=1.2e-17; Accession=PF06026.6; Description=Ribose 5-phosphate isomerase A (phosphoriboisomerase A)
PTSKRTFEQAQSLGIPLSTLDDHPLIDLAIDGADEVDPDLNLVKGRGGALLREKMVEAASDKFXVVVDETKLVDXGLGGSGLAMPVEVVQFCWKYNLVRLQ

SEQ ID NO: 126157 - protein, 79 aa, Setaria italica
  Transcript Sequence Number=SeqID_60183
  Gene Ontology: Mol. function=ribose-5-phosphate isomerase activity; Biological process=pentose-phosphate shunt, non-oxidative branch
  Homolog annotation: Hit_ID=Q6ZEZ1; Match level="QueryCoverage=77%, HitCoverage=24%, E-value=2e-25, Identity=88%"; Hit description =Putative ribose-5-phosphate isomerase
  Pfam annotation: Domain name=Rib_5-P_isom_A; Domain location=1-79; Score=-79.3; E_value=7.7e-05; Accession=PF06026.6; Description =Ribose 5-phosphate isomerase A (phosphoriboisomerase A)
SRSAEGYQVRQAPRAGIVLGGSGLAMPVEVVQFCWKYNLVRLQELFKEEGVEAKLRLEGDKPYVTDNSNYIVDLYFKTP

SEQ ID NO: 126158 - protein, 83 aa, Setaria italica
  Transcript Sequence Number=SeqID_60184
  Gene Ontology: Mol. function=nucleoside-triphosphatase activity; Cellular component=plasma membrane
  Homolog annotation: Hit_ID=B6SXQ2; Match level="QueryCoverage=98%, HitCoverage=16%, E-value=9e-20, Identity=64%"; Hit description =Mitochondrial protein
EDIDCCFDAAASRKGAKAPELVAELDPGYTSDSSDDSGPMNTHQPAKGITLSGLLNFIDGLWSTCGEERIIVFTTNYKDRLDP

SEQ ID NO: 126159 - protein, 77 aa, Setaria italica
  misc_feature (16)..(16): Xaa can be any naturally occurring amino acid
  misc_feature (46)..(46): Xaa can be any naturally occurring amino acid
  Transcript Sequence Number=SeqID_60185
  Homolog annotation: Hit_ID=B6SKZ4; Match level="QueryCoverage=84%, HitCoverage=10%, E-value=9e-26, Identity=93%"; Hit description =Nucleotide binding protein
FIGIQKILTQYLLKEXGGLIKETWMDEDPREAILKYADAAEKDPKXFIAPAYSQTQPKPVFAESDSDNEGKLTLCLS

SEQ ID NO: 126160 - protein, 75 aa, Setaria italica
  Transcript Sequence Number=SeqID_60186
MRSVCAWPHGRASAPGEAAMRDTAATAAMRRSLPSAAMAAMTRRNWGGIGGGSIQLWTIKTGWGSRPDIHVEKTH

SEQ ID NO: 126161 - protein, 83 aa, Setaria italica
  Transcript Sequence Number=SeqID_60187
LAKKNQINANGKEILFSVKRKKDNQYIMLQSGNWLNVGCIPHNSYVGDWGNASQFPNTDKTMIKSAWVEHEQNALQGPYNATT

SEQ ID NO: 126162 - protein, 78 aa, Setaria italica
  Transcript Sequence Number=SeqID_60188
HRRRPAISCGDRLVDSVFHSSRRDGLQVLRSGSARWEVRVSYYSRFLLVLLVATSRNMVVALVEVEYVELFQTLTETI

SEQ ID NO: 126163 - protein, 56 aa, Setaria italica
  Transcript Sequence Number=SeqID_60189
EILCFLSFMLFAVRGLPKSNQDFIPTYGDFSKHPLVQGSIRLSLSRFQVDLELCLI

SEQ ID NO: 126164 - protein, 86 aa, Setaria italica
  Transcript Sequence Number=SeqID_60190
ALDWARWIGGGGGSEEGLVLVHWKTWFHYNIKMSVCYFHMGSQSVILLKIFTCAFSGNLKEYGSSTGRGGICRTIPDFDRDYMSYF

SEQ ID NO: 126165 - protein, 50 aa, Setaria italica
  misc_feature (37)..(37): Xaa can be any naturally occurring amino acid
  Transcript Sequence Number=SeqID_60191
LIFDDNQCNQLLADHVALSSCSLYIVPDPGRLVSTEXVPRNNPTQSVVRT

SEQ ID NO: 126166 - protein, 49 aa, Setaria italica
  Transcript Sequence Number=SeqID_60192
  Gene Ontology: Mol. function=metal ion binding
STVALVLQILVVLFLTSGRDPGIIPRNAHPPEPEDIGESSNLPDWPGGQ

SEQ ID NO: 126167 - protein, 58 aa, Setaria italica
  Transcript Sequence Number=SeqID_60193
MDHQHQLVAMALPASPSTTTTAAPHVAHKIPAGDGPYARAKHFQVRASSIDLHALLEV

SEQ ID NO: 126168 - protein, 55 aa, Setaria italica
  Transcript Sequence Number=SeqID_60194
SLLPKHSYLDNITCSQGVLNIALLTYMLLHLYLALQRFHSPFLLLMRGLYPSWRT

SEQ ID NO: 126169 - protein, 76 aa, Setaria italica
  Transcript Sequence Number=SeqID_60195
  Gene Ontology: Mol. function=protein tyrosine/serine/threonine phosphatase activity; Cellular component=cytoplasm; Biological process=protein amino acid dephosphorylation
  Homolog annotation: Hit_ID=Q3S4H6; Match level="QueryCoverage=73%, HitCoverage=32%, E-value=1e-22, Identity=94%"; Hit description=Dual -specificity protein-like phosphatase 2
CFAGRSRSVTIVVAYLMKKHQMSLESALSLVRSKRPQVAPNEGFISQLENFDKSLQGQIDCHALHLRKSIWSLHWS

SEQ ID NO: 126170 - protein, 79 aa, Setaria italica
  Transcript Sequence Number=SeqID_60196
  Homolog annotation: Hit_ID=B6T558; Match level="QueryCoverage=45%, HitCoverage=9%, E-value=1e-09, Identity=88%"; Hit description =Choline/ethanolamine kinase
TIIHVYSNNYFQYVVHDAYSFLPTVLKVSVKEDTDNEFSVTVRLYGPNTDLVIDRKRELQVRILMLQDCMLQSYYIYMH

SEQ ID NO: 126171 - protein, 61 aa, Setaria italica
  Transcript Sequence Number=SeqID_60197
  Gene Ontology: Mol. function=kinase activity
  Homolog annotation: Hit_ID=Q69QD7; Match level="QueryCoverage=96%, HitCoverage=15%, E-value=8e-15, Identity=66%"; Hit description =Putative ethanolamine kinase 1
ELHRFHQVDIPGPKEPQLWDDIFKFLKKASALKFKDNEKQKRYETISFTEIQDEVQELKVP

SEQ ID NO: 126172 - protein, 35 aa, Setaria italica
  Transcript Sequence Number=SeqID_60198
  Homolog annotation: Hit_ID=Q69J34; Match level="QueryCoverage=97%, HitCoverage=5%, E-value=8e-11, Identity=85%"; Hit description =Putative agenet domain-containing protein / bromo-adjacent homology (BAH) domain-containing protein
VDDIATVLTPDHYEKCSNALPTSSFVGIRFCFRQV

SEQ ID NO: 126173 - protein, 84 aa, Setaria italica
  Transcript Sequence Number=SeqID_60199
TTYQFRTCQQSSVLKRLSLNLIQCLLYQLSLDAAKQKMKGTITSVILNQPFSEECFEDDQNKTCQVIILAFLCRSFTSTIVASK

SEQ ID NO: 126174 - protein, 105 aa, Setaria italica
  misc_feature (59)..(59): Xaa can be any naturally occurring amino acid
  Transcript Sequence Number=SeqID_60200
  Gene Ontology: Mol. function=aminoacyl-tRNA ligase activity; Cellular component=cytoplasm; Biological process=tRNA aminoacylation for protein translation
  Homolog annotation: Hit_ID=B6T3D4; Match level="QueryCoverage=93%, HitCoverage=27%, E-value=3e-42, Identity=86%"; Hit description =Methionyl-tRNA synthetase
SPWVSLVGYCSIVLVLDLVLCASTEDHTAVEPLIPPEGAKIGERISFAGFDGKPEDVLXNPKKKQLDKITPHLRTDENGIATFKGIPFTTSAGPCRSSIRNGNVK

SEQ ID NO: 126175 - protein, 47 aa, Setaria italica
  Transcript Sequence Number=SeqID_60201
SSRLRGFRAEKIGSVYYIGSFGQIRAYCSSKHSFFFLHVPPFQLYAL

SEQ ID NO: 126176 - protein, 75 aa, Setaria italica
  Transcript Sequence Number=SeqID_60202
SGCLLRFPRASHGAEYFFAALSALVKKKQRGSLFNSKSRGFLCLVFALLVWYISNIKATVCPCFGVLLGGAAVQD

SEQ ID NO: 126177 - protein, 64 aa, Setaria italica
  Transcript Sequence Number=SeqID_60203
MLSRLIVCLTATTPMQKRTGTCCHHSSAGRSFTARVIVMDNGEKLLLDVKTMASHRHQLHSTSN

SEQ ID NO: 126178 - protein, 59 aa, Setaria italica
  Transcript Sequence Number=SeqID_60204
IFLSLVLFCCSISICLLLVLLVSYRYCSSLCLGFVNAAFWSLVFFFLIYGFGILQVFFS

SEQ ID NO: 126179 - protein, 79 aa, Setaria italica
  Transcript Sequence Number=SeqID_60205
  Gene Ontology: Mol. function=zinc ion binding; Cellular component =intracellular
  Homolog annotation: Hit_ID=B6TZ64; Match level="QueryCoverage=73%, HitCoverage=17%, E-value=1e-25, Identity=93%"; Hit description=Zn -finger, RanBP-type, containing protein
GLPPYSGGSMMGAGGMYGMPMDRYGLIPASPGAMGTRAGSYSDEGSQKKPAGAGRDNDWECPNCHNINFAFRTVCNMRK

SEQ ID NO: 126180 - protein, 100 aa, Setaria italica
  Transcript Sequence Number=SeqID_60206
  Gene Ontology: Mol. function=hydrolase activity, acting on ester bonds; Cellular component=extracellular region; Biological process =lipid metabolic process
  Homolog annotation: Hit_ID=B6TDT3; Match level="QueryCoverage=97%, HitCoverage=22%, E-value=4e-47, Identity=86%"; Hit description=Alpha- L-fucosidase 2
NDYQVLSKLQRLHKNGARKFWIHGTGALGCMPQKLAMPRDDDSGLDEHGCIASINNVCKKFNSLLSEALDELRLTLKKSAIVFVDMFAIKYDLVVNHKKY

SEQ ID NO: 126181 - protein, 155 aa, Setaria italica
  misc_feature (124)..(124): Xaa can be any naturally occurring amino acid
  Transcript Sequence Number=SeqID_60207
  Gene Ontology: Mol. function=hydrolase activity, acting on ester bonds; Biological process=lipid metabolic process
  Homolog annotation: Hit_ID=B6TDT3; Match level="QueryCoverage=90%, HitCoverage=32%, E-value=2e-67, Identity=85%"; Hit description=Alpha- L-fucosidase 2
  Pfam annotation: Domain name=Lipase_GDSL; Domain location=7-155; Score=8.0; E_value=0.0018; Accession=PF00657.14; Description=GDSL -like LipaseAcylhydrolase
LLPNGPTYNTYELTICESLGTHHLSPFMKPLGSDFTNGVNFAIAGSTAMPGVTTFSLDVQVDQFIFFKERCLDLIERGESAPVDELGFQTALYTMDIGHNDINGILHMPYDEMLANLPPVIVEXKKAIERLHKNGARKFWIHGTGALGCMPQKLA

SEQ ID NO: 126182 - protein, 83 aa, Setaria italica
  Transcript Sequence Number=SeqID_60208
  Gene Ontology: Mol. function=hydrolase activity, acting on ester bonds; Biological process=lipid metabolic process
  Homolog annotation: Hit_ID=B6TDT3; Match level="QueryCoverage=87%, HitCoverage=16%, E-value=6e-34, Identity=87%"; Hit description=Alpha- L-fucosidase 2
KTGFTKTRLLITTMDIGHNDINGILHMPYDEMLANLPPVIVEIKKAIERLHKNGARKFWIHGTGALGCMPQKLAMPRDDDSGL

SEQ ID NO: 126183 - protein, 150 aa, Setaria italica
  misc_feature (9)..(9): Xaa can be any naturally occurring amino acid
  misc_feature (26)..(26): Xaa can be any naturally occurring amino acid
  misc_feature (49)..(49): Xaa can be any naturally occurring amino acid
  misc_feature (126)..(126): Xaa can be any naturally occurring amino acid
  Transcript Sequence Number=SeqID_60209
  Gene Ontology: Mol. function=phosphatidate cytidylyltransferase activity; Cellular component=integral to membrane; Biological process=phospholipid biosynthetic process
  Homolog annotation: Hit_ID=B6TYH9; Match level="QueryCoverage=100%, HitCoverage=37%, E-value=3e-52, Identity=70%"; Hit description =Phosphatidate cytidylyltransferase
  Pfam annotation: Domain name=CTP_transf_1; Domain location=1-149; Score=52.2; E_value=2e-12; Accession=PF01148.12; Description =Cytidylyltransferase family
NIYDGIFWXLLPASLIAINDVAAYFXGFFFGKTPLIKLSPKKTWEGFIXANFMGHFQWLTCPRKDLSTGWLHCDPGPMFTPEIYNLRGWMPQCFPWREVAIMPVQWHALALGLFASIIAPFGGFFXASGFKRAFKFKDFGDSIPGHGGFT

SEQ ID NO: 126184 - protein, 46 aa, Setaria italica
  Transcript Sequence Number=SeqID_60210
KLVSGLIKYQMFICYFLYIAGSCDHLLRVFPNKGHANYNIGVTLMF

SEQ ID NO: 126185 - protein, 94 aa, Setaria italica
  misc_feature (38)..(38): Xaa can be any naturally occurring amino acid
  Transcript Sequence Number=SeqID_60211
  Homolog annotation: Hit_ID=Q5ZE06; Match level="QueryCoverage=79%, HitCoverage=21%, E-value=7e-21, Identity=61%"; Hit description =Putative transcription factor X1
  Pfam annotation: Domain name=XH; Domain location=6-91; Score=86.8; E _value=7.9e-23; Accession=PF03469.6; Description=XH domain
QQSACAPFFKRVRDNFEIIKEDDEKLQALKAELGEKAXSVVVRALREINEYNPSGRYPLPELWNFKDDRKAPMGEVAAYIVKQWKTNKRKNTYT

SEQ ID NO: 126186 - protein, 56 aa, Setaria italica
  Transcript Sequence Number=SeqID_60212
  Homolog annotation: Hit_ID=B9SM11; Match level="QueryCoverage=69%, HitCoverage=11%, E-value=4e-12, Identity=79%"; Hit description=Non -imprinted in Prader-Willi/Angelman syndrome region protein, putative
GVLGCVMCIAGSVVIVIHAPQEQEITSVREIWNMATQPGEDYYGCGLLIQLLAHDL

SEQ ID NO: 126187 - protein, 37 aa, Setaria italica
  Transcript Sequence Number=SeqID_60213
LTIMLSAPSGVTRTAGAKAYAMFHISLTDVISCSCGA

SEQ ID NO: 126188 - protein, 59 aa, Setaria italica
  Transcript Sequence Number=SeqID_60214
RTKNTNLISFTAPLHLPHLIYSFVYPPFPTTTSLTSPVSIYVYLDSCLFETLYHEWNGN

SEQ ID NO: 126189 - protein, 45 aa, Setaria italica
  Transcript Sequence Number=SeqID_60215
TRSRRRCRTGGPVVRPARAGDFEFMNASEDRQRFGSSQLLHDFVA

SEQ ID NO: 126190 - protein, 123 aa, Setaria italica
  misc_feature (82)..(82): Xaa can be any naturally occurring amino acid
  Transcript Sequence Number=SeqID_60216
VIQLDELYNHFEVGLTGFQVKVLLPDRHNVSSTLIKLDASIALQLCVFLDEPVLKQLEVGFIVPFIDMYLSQTMYSAIVNLXYSERTNLVRNSTFDNAKTHGHKKLALNMSVSLKLAKLGLQY

SEQ ID NO: 126191 - protein, 50 aa, Setaria italica
  Transcript Sequence Number=SeqID_60217
PNVSILNLQYHKTSQTASQITMPEEPRFHAGTKRLHLVEGPEDKSCQHPI

SEQ ID NO: 126192 - protein, 77 aa, Setaria italica
  misc_feature (9)..(9): Xaa can be any naturally occurring amino acid
  misc_feature (11)..(11): Xaa can be any naturally occurring amino acid
  Transcript Sequence Number=SeqID_60218
QTFGVCTTXFXLNLGLASTTEGASIQHVRVSIIVDAWKRACMLGVYRHHVQPGEHRKRPLTCTRYTGRSGWWVILGS

SEQ ID NO: 126193 - protein, 108 aa, Setaria italica
  Transcript Sequence Number=SeqID_60219
  Gene Ontology: Mol. function=serine-type carboxypeptidase activity; Biological process=proteolysis
  Homolog annotation: Hit_ID=B6SWY3; Match level="QueryCoverage=77%, HitCoverage=16%, E-value=4e-38, Identity=85%"; Hit description =Serine carboxypeptidase
SQTIYSITCWKQIGNAYLNDDTNTRATIDYYWTHAMISKETHKAVQENCSFNGTYTGLCRTAIEAANNEKGLIDQSNIYASFCWDASAPRQHHASVKVISQILNKFTS

SEQ ID NO: 126194 - protein, 117 aa, Setaria italica
  Transcript Sequence Number=SeqID_60220
  Gene Ontology: Mol. function=serine-type carboxypeptidase activity; Cellular component=extracellular region; Biological process =proteolysis
  Homolog annotation: Hit_ID=B6SWY3; Match level="QueryCoverage=88%, HitCoverage=15%, E-value=3e-32, Identity=69%"; Hit description =Serine carboxypeptidase
NYRKNYLKISGPGCSSLGGAMLEIGPFFVNRDNKTLSRNKYAWNNGRLIPTRLHMAVNTLNTSVLTDHSWMTVANMLFLESPAGVGFSYSNRTSDYNNTGDRSTTADAYTFLINLAL

SEQ ID NO: 126195 - protein, 72 aa, Setaria italica
  Transcript Sequence Number=SeqID_60221
  Homolog annotation: Hit_ID=B9RUS0; Match level="QueryCoverage=73%, HitCoverage=1%, E-value=2e-17, Identity=67%"; Hit description =Vacuolar protein sorting-associated protein, putative
LKNANGNFALPLGYDLVWRNCAEDYKSPVSIWLPRPPGGYVALGCVAVSAFEEPPLDCSFETRSAMNCSELL

SEQ ID NO: 126196 - protein, 48 aa, Setaria italica
  misc_feature (7)..(7): Xaa can be any naturally occurring amino acid
  Transcript Sequence Number=SeqID_60222
  Homolog annotation: Hit_ID=B4FRE3; Match level="QueryCoverage=100%, HitCoverage=13%, E-value=7e-19, Identity=95%"; Hit description =Ankyrin repeat domain-containing protein 2
GRKDCVXLLLESGAAVTLQNLDGKTPIDVAKLNNQEDVLKLLEKHAFV

SEQ ID NO: 126197 - protein, 54 aa, Setaria italica
  Transcript Sequence Number=SeqID_60223
TNGWTEQDPSIKEMAEQIAKDPAFTQMAEQLQKTVVSPRQAPAASRRCPRRRRR

SEQ ID NO: 126198 - protein, 114 aa, Setaria italica
  Transcript Sequence Number=SeqID_60224
  Homolog annotation: Hit_ID=B4FRE3; Match level="QueryCoverage=97%, HitCoverage=30%, E-value=1e-40, Identity=78%"; Hit description =Ankyrin repeat domain-containing protein 2
GNPFDFSTMMNLLNDPSIKEMAEQIAKDPAFTQMAEQLQKTVVSPRQAPAAKQAVPQAAAALDPQKYVATMQQLMQNPQFVAMAERLGSALMQDPAMATMLGGLTNPAHKEQSS

SEQ ID NO: 126199 - protein, 63 aa, Setaria italica
  Transcript Sequence Number=SeqID_60225
  Homolog annotation: Hit_ID=B4FRE3; Match level="QueryCoverage=73%, HitCoverage=12%, E-value=1e-17, Identity=93%"; Hit description =Ankyrin repeat domain-containing protein 2
AARRKRWPWLRLRWLPQKYVATMQQLMQNPQFVAMAERLGSALMQDPAMATMLGGLTNPAHQG

SEQ ID NO: 126200 - protein, 51 aa, Setaria italica
  Transcript Sequence Number=SeqID_60226
RNQNEVSYLGFIKTALKFIQFFYNIDLHLVNEKIIAYLSIIATTKLQTDSN

SEQ ID NO: 126201 - protein, 58 aa, Setaria italica
  misc_feature (2)..(2): Xaa can be any naturally occurring amino acid
  Transcript Sequence Number=SeqID_60227
SXGEKTSIALVAPTIHCTSNGIKMKYFSSQVNFKDLACPRSLYYSMILRMQFSCNTKV

SEQ ID NO: 126202 - protein, 97 aa, Setaria italica
  Transcript Sequence Number=SeqID_60228
TSTALRLILRCVETEDTIQRFLQLSDIQNRIPENGSINGMTSINRTQTGTRKTTATEGSSWSGRSLQAVKLVRTLVHQDDADRAIFCCSFPRTQTGT

SEQ ID NO: 126203 - protein, 54 aa, Setaria italica
  Transcript Sequence Number=SeqID_60229
FGTEGVLANTEYFHIDIGIAYTLTALQAAQLINRKCYCRAAVLFRMHADSSCFD

SEQ ID NO: 126204 - protein, 64 aa, Setaria italica
  Transcript Sequence Number=SeqID_60230
  Subcellular localization annotation: CTP_CleavageSite=27; ConfidenceScore=5.09e-01
MAGGNLFGRALSYVVNEFLVEGLANNRAFQRFAVKTNRTLESLSSKGNVLNQSRLNPPLFFLTR

SEQ ID NO: 126205 - protein, 67 aa, Setaria italica
  Transcript Sequence Number=SeqID_60231
FLVAMSDQRSLFAALQAVKLVRTLVHQDDADRAIFAVVFLVPVWVLFIDVIPLMEPFSGILFWMSLN

SEQ ID NO: 126206 - protein, 64 aa, Setaria italica
  Transcript Sequence Number=SeqID_60232
DPDSYVVNEFLVEGLANNQTRAFQRFAVKTNRTLESLSSKAKEVREELSEQLKEARGQDDHFRR

SEQ ID NO: 126207 - protein, 110 aa, Setaria italica
  misc_feature (35)..(35): Xaa can be any naturally occurring amino acid
  Transcript Sequence Number=SeqID_60233
  Gene Ontology: Mol. function=transferase activity, transferring nitrogenous groups; Biological process=biosynthetic process
  Homolog annotation: Hit_ID=Q7X7S9; Match level="QueryCoverage=80%, HitCoverage=18%, E-value=7e-35, Identity=81%"; Hit description =Putative alanine aminotransferase
MVERDSKDSSPVFGGFITRTGDESFESFMVERDGXLSSLARRAKALEEAFNSLEGITCNKAEGAMYLFPRLHLPQKAIGAAQAAGTPPDAYYAKRLLRQDRASEVPLFQG

SEQ ID NO: 126208 - protein, 115 aa, Setaria italica
  misc_feature (19)..(19): Xaa can be any naturally occurring amino acid
  Transcript Sequence Number=SeqID_60234
  Gene Ontology: Mol. function=transferase activity, transferring nitrogenous groups; Cellular component=mitochondrial matrix; Biological process=biosynthetic process
  Homolog annotation: Hit_ID=Q7X7S9; Match level="QueryCoverage=98%, HitCoverage=23%, E-value=6e-51, Identity=84%"; Hit description =Putative alanine aminotransferase
VYQENIYVEDKQFHSFKKXARSLGYTDDDLPLASFQSVSKGYYGECGKRGGYMEITGFSPEVREQIYKVASVNLCSNVSGQILASLVMNPPKTGDESFESLSTMKDSKDSSLALL

SEQ ID NO: 126209 - protein, 40 aa, Setaria italica
  Transcript Sequence Number=SeqID_60235
QYRWQETRGVDEEGLLTNLLVSCHLYCSWRIIRSFRFSGS

SEQ ID NO: 126210 - protein, 66 aa, Setaria italica
  misc_feature (24)..(24): Xaa can be any naturally occurring amino acid
  Transcript Sequence Number=SeqID_60236
  Gene Ontology: Mol. function=protein kinase CK2 regulator activity; Cellular component=protein kinase CK2 complex; Biological process =regulation of transcription from RNA polymerase III promoter
  Homolog annotation: Hit_ID=Q84VF5; Match level="QueryCoverage=100%, HitCoverage=27%, E-value=2e-31, Identity=96%"; Hit description =Possible protein kinase CK2 regulatory subunit (Fragment)
  Pfam annotation: Domain name=CK_II_beta; Domain location=1-54; Score=- 51.9; E_value=1.3e-06; Accession=PF01214.10; Description=Casein kinase II regulatory subunit
SSTVKIYCPKCEDIYYPRSKYQGXMDGAYFGTTFPHLFLMTYEHLKPQKPSQRYVPRVFGFKLHKP

SEQ ID NO: 126211 - protein, 121 aa, Setaria italica
  misc_feature (105)..(105): Xaa can be any naturally occurring amino acid
  Transcript Sequence Number=SeqID_60237
  Gene Ontology: Mol. function=protein kinase CK2 regulator activity; Cellular component=protein kinase CK2 complex; Biological process =Wnt receptor signaling pathway
  Homolog annotation: Hit_ID=Q84VF5; Match level="QueryCoverage=98%, HitCoverage=48%, E-value=1e-62, Identity=97%"; Hit description =Possible protein kinase CK2 regulatory subunit (Fragment)
  Pfam annotation: Domain name=CK_II_beta; Domain location=2-109; Score= 162.1; E_value=1.6e-45; Accession=PF01214.10; Description=Casein kinase II regulatory subunit
YCLLLGLIHARYILTSKGLAAMLEKYKNYDFGRCPRVYCCGQPCLPVGQSDIHRSSTVKIYCPKCEDIYYPRSKYQGNIDGAYFGTTFPHLFLMTYEHLKPQKPXSQRYVPRVFGFKLHKP

SEQ ID NO: 126212 - protein, 46 aa, Setaria italica
  Transcript Sequence Number=SeqID_60238
  Gene Ontology: Mol. function=protein kinase CK2 regulator activity; Cellular component=protein kinase CK2 complex
  Homolog annotation: Hit_ID=Q84VF5; Match level="QueryCoverage=93%, HitCoverage=17%, E-value=1e-17, Identity=97%"; Hit description =Possible protein kinase CK2 regulatory subunit (Fragment)
PCSDIDGAYFGTTFPHLFLMTYEHLKPQKPSQRYVPRVFGFKLHKP

SEQ ID NO: 126213 - protein, 119 aa, Setaria italica
  misc_feature (10)..(10): Xaa can be any naturally occurring amino acid
  Transcript Sequence Number=SeqID_60239
  Gene Ontology: Mol. function=protein kinase CK2 regulator activity; Cellular component=protein kinase CK2 complex; Biological process =Wnt receptor signaling pathway
  Homolog annotation: Hit_ID=Q84VF5; Match level="QueryCoverage=100%, HitCoverage=47%, E-value=1e-57, Identity=92%"; Hit description =Possible protein kinase CK2 regulatory subunit (Fragment)
  Pfam annotation: Domain name=CK_II_beta; Domain location=1-107; Score= 137.0; E_value=5.8e-38; Accession=PF01214.10; Description=Casein kinase II regulatory subunit
LYGLIHARYXLLEPRQKELAAMLEKYKNYDFGRCPRVYCCGQPCLPVGQSDIHRSSTVKIYCPKCEDIYYPRSKYQDIDGAYFGTTFPHLFLMTYEHLKPQKPSQRYVPRVFGFKLHKP

SEQ ID NO: 126214 - protein, 91 aa, Setaria italica
  Transcript Sequence Number=SeqID_60240
  Gene Ontology: Mol. function=protein kinase CK2 regulator activity; Cellular component=protein kinase CK2 complex; Biological process =regulation of transcription from RNA polymerase III promoter
  Homolog annotation: Hit_ID=Q84VF5; Match level="QueryCoverage=100%, HitCoverage=37%, E-value=3e-48, Identity=97%"; Hit description =Possible protein kinase CK2 regulatory subunit (Fragment)
  Pfam annotation: Domain name=CK_II_beta; Domain location=1-79; Score =53.2; E_value=1.6e-14; Accession=PF01214.10; Description=Casein kinase II regulatory subunit
NFGRCPRVYCCGQPCLPVGQSDIHRSSTVKIYCPKCEDIYYPRSKYQGNMDGAYFGTTFPHLFLMTYEHLKPQKPSQRYVPRVFGFKLHKP

SEQ ID NO: 126215 - protein, 115 aa, Setaria italica
  Transcript Sequence Number=SeqID_60241
TILLMRVFVALQKMCVKLQPLRENPNQRPFCTKSDTKNGLQMFPYAPTPIHPQLYVQNTIKTVKTVHTVISNRYVFSTLIDQKLFSTLGSANSLLCYCGSKSCRILPFCYILLFS

SEQ ID NO: 126216 - protein, 46 aa, Setaria italica; identical to SEQ ID NO: 126212
  Transcript Sequence Number=SeqID_60242
  Gene Ontology: Mol. function=protein kinase CK2 regulator activity; Cellular component=protein kinase CK2 complex
  Homolog annotation: Hit_ID=Q84VF5; Match level="QueryCoverage=93%, HitCoverage=17%, E-value=1e-17, Identity=97%"; Hit description =Possible protein kinase CK2 regulatory subunit (Fragment)

SEQ ID NO: 126217 - protein, 76 aa, Setaria italica
  misc_feature (68)..(68): Xaa can be any naturally occurring amino acid
  Transcript Sequence Number=SeqID_60243
  Gene Ontology: Mol. function=protein kinase CK2 regulator activity; Cellular component=protein kinase CK2 complex; Biological process =regulation of transcription from RNA polymerase III promoter
  Homolog annotation: Hit_ID=Q84VF5; Match level="QueryCoverage=98%, HitCoverage=30%, E-value=3e-34, Identity=93%"; Hit description =Possible protein kinase CK2 regulatory subunit (Fragment)
  Pfam annotation: Domain name=CK_II_beta; Domain location=1-63; Score=- 21.6; E_value=6.8e-09; Accession=PF01214.10; Description=Casein kinase II regulatory subunit
WLDKSDIHRSSTVKIYCPKCEDIYYPRSKYQGNMDGAYFGTTFPHLFLMTYEHLKPQKPSQRYVPRVXFGFKLHKP

SEQ ID NO: 126218 - protein, 59 aa, Setaria italica
  misc_feature (17)..(17): Xaa can be any naturally occurring amino acid
  Transcript Sequence Number=SeqID_60244
  Gene Ontology: Mol. function=protein kinase CK2 regulator activity; Cellular component=protein kinase CK2 complex; Biological process =regulation of transcription from RNA polymerase III promoter
  Homolog annotation: Hit_ID=Q84VF5; Match level="QueryCoverage=100%, HitCoverage=24%, E-value=2e-27, Identity=96%"; Hit description =Possible protein kinase CK2 regulatory subunit (Fragment)
  Pfam annotation: Domain name=CK_II_beta; Domain location=1-47; Score=- 81.7; E_value=0.00022; Accession=PF01214.10; Description=Casein kinase II regulatory subunit
CPKCEDIYYPRSKYQGXMDGAYFGTTFPHLFLMTYEHLKPQKPSQRYVPRVFGFKLHKP

SEQ ID NO: 126219 - protein, 148 aa, Setaria italica
  misc_feature (8)..(8): Xaa can be any naturally occurring amino acid
  misc_feature (70)..(70): Xaa can be any naturally occurring amino acid
  misc_feature (73)..(73): Xaa can be any naturally occurring amino acid
  Transcript Sequence Number=SeqID_60245
  Gene Ontology: Mol. function=protein kinase CK2 regulator activity; Cellular component=protein kinase CK2 complex; Biological process =Wnt receptor signaling pathway
  Homolog annotation: Hit_ID=Q84VF5; Match level="QueryCoverage=66%, HitCoverage=40%, E-value=2e-49, Identity=94%"; Hit description =Possible protein kinase CK2 regulatory subunit (Fragment)
  Pfam annotation: Domain name=CK_II_beta; Domain location=1-137; Score= 174.3; E_value=3.6e-49; Accession=PF01214.10; Description=Casein kinase II regulatory subunit
SSQVPYYXDYALDLILDIESSHGDMFTEDKNELVESAAEMLYGLIHARYILTSKGLAAMLEKYKNYDFGXCPXVYCCGQPCLPVGQSDIHRSSTVKIYCPKCEDIYYPRSKYQGSILTILLLDYLINACVCCPPKKCVSNSNLFVRTQ

SEQ ID NO: 126220 - protein, 130 aa, Setaria italica
  Transcript Sequence Number=SeqID_60246
LDPTKKMCVKLQPLRENPNQRPFCTKSDTKNGLQMFPYAPTPIHPQLYVQTPLNSKTVHTVISNRYVFSTLIDQNCLVHWGLLTRFCAIVAPKLQNIAILLYSAIFLNLCSDIDGAYFGTTFPHLFLMTY

SEQ ID NO: 126221 - protein, 46 aa, Setaria italica; identical to SEQ ID NO: 126212
  Transcript Sequence Number=SeqID_60247
  Gene Ontology: Mol. function=protein kinase CK2 regulator activity; Cellular component=protein kinase CK2 complex
  Homolog annotation: Hit_ID=Q84VF5; Match level="QueryCoverage=93%, HitCoverage=17%, E-value=1e-17, Identity=97%"; Hit description =Possible protein kinase CK2 regulatory subunit (Fragment)

SEQ ID NO: 126222 - protein, 126 aa, Setaria italica
  Transcript Sequence Number=SeqID_60248
  Gene Ontology: Mol. function=protein kinase CK2 regulator activity; Cellular component=protein kinase CK2 complex
  Homolog annotation: Hit_ID=Q84VF5; Match level="QueryCoverage=34%, HitCoverage=18%, E-value=4e-19, Identity=97%"; Hit description =Possible protein kinase CK2 regulatory subunit (Fragment)
  Pfam annotation: Domain name=CK_II_beta; Domain location=1-81; Score=- 64.2; E_value=1.1e-05; Accession=PF01214.10; Description=Casein kinase II regulatory subunit
EENNKETNRTLGTVAQRVYCCGQPCLPVGQSDIHRSSTVKIYCPKCEDIYYPRSKYQGSILTILLLDYLINACVCCPPKKCVSNSNLFVRTQTKGHFVLNLTLRMGCKCSHMHQRPLHHSSMSKHH

SEQ ID NO: 126223 - protein, 144 aa, Setaria italica
  misc_feature (20)..(20): Xaa can be any naturally occurring amino acid
  misc_feature (36)..(36): Xaa can be any naturally occurring amino acid
  Transcript Sequence Number=SeqID_60249
  Gene Ontology: Mol. function=protein kinase CK2 regulator activity; Cellular component=protein kinase CK2 complex; Biological process =Wnt receptor signaling pathway
  Homolog annotation: Hit_ID=Q84VF5; Match level="QueryCoverage=56%, HitCoverage=33%, E-value=2e-38, Identity=95%"; Hit description =Possible protein kinase CK2 regulatory subunit (Fragment)
  Pfam annotation: Domain name=CK_II_beta; Domain location=1-102; Score= 69.8; E_value=1e-17; Accession=PF01214.10; Description=Casein kinase II regulatory subunit
ESAAEMLYGLIHARYILTSXGLAAMLEKYKNYDFGXPRVYCCGQPCLPVGQSDIHRSSTVKIYCPKCEDIYYPRSKYQGSILTILLLDYLINACVCCPPKKCVSNSNLFVRTQTKGHFVLNLTLRMGCKCSHMHQRPFTHSSMS

SEQ ID NO: 126224 - protein, 107 aa, Setaria italica
  misc_feature (96)..(96): Xaa can be any naturally occurring amino acid
  Transcript Sequence Number=SeqID_60250
  Gene Ontology: Mol. function=protein kinase CK2 regulator activity; Cellular component=protein kinase CK2 complex; Biological process =Wnt receptor signaling pathway
  Homolog annotation: Hit_ID=Q84VF5; Match level="QueryCoverage=98%, HitCoverage=42%, E-value=8e-53, Identity=96%"; Hit description =Possible protein kinase CK2 regulatory subunit (Fragment)
  Pfam annotation: Domain name=CK_II_beta; Domain location=2-107; Score= 154.0; E_value=4.6e-43; Accession=PF01214.10; Description=Casein kinase II regulatory subunit
SWLVIQLAEMLYGLIHARYILTSKGLAAMLEKYKNYDFGRCPRVYCCGQPCLPVGQSDIHRSSTVKIYCPKCEDIYYPRSKYQGNIDGAYFGTTFXPHLFLMTYEHL

SEQ ID NO: 126225 - protein, 124 aa, Setaria italica
  misc_feature (66)..(66): Xaa can be any naturally occurring amino acid
  Transcript Sequence Number=SeqID_60251
  Gene Ontology: Mol. function=protein kinase CK2 regulator activity; Cellular component=protein kinase CK2 complex; Biological process =Wnt receptor signaling pathway
  Homolog annotation: Hit_ID=Q84VF5; Match level="QueryCoverage=78%, HitCoverage=39%, E-value=2e-48, Identity=96%"; Hit description =Possible protein kinase CK2 regulatory subunit (Fragment)
  Pfam annotation: Domain name=CK_II_beta; Domain location=1-124; Score= 117.7; E_value=3.9e-32; Accession=PF01214.10; Description=Casein kinase II regulatory subunit
EQYEVQSHGDMFTEEQNELVESAAEMLYGLIHARYILTSKGLAAMLEKYKNYDFGRCPRVYCCGQXKCLPVGQSDIHRSSTVKIYCPKCEDIYYPRSKYQGSILTILLLDYLINACVCCPPKKC

SEQ ID NO: 126226 - protein, 82 aa, Setaria italica
  Transcript Sequence Number=SeqID_60252
  Gene Ontology: Mol. function=protein kinase CK2 regulator activity; Cellular component=protein kinase CK2 complex; Biological process =Wnt receptor signaling pathway
  Homolog annotation: Hit_ID=B6T9Z0; Match level="QueryCoverage=89%, HitCoverage=26%, E-value=3e-36, Identity=90%"; Hit description =Casein kinase II subunit beta-4
  Pfam annotation: Domain name=CK_II_beta; Domain location=15-82; Score= -7.1; E_value=5.5e-10; Accession=PF01214.10; Description=Casein kinase II regulatory subunit
YCLVGLLVIGEDTSWISWYCNLRGNEFFCEVDDDYIQDDFNLCGLSSQVPYYDYALDLILDIESSHGDMFTEEQNELVESAA

SEQ ID NO: 126227 - protein, 87 aa, Setaria italica
  Transcript Sequence Number=SeqID_60253
KIYCPKCEDIYYPRSKYQGSILTILLLDYLINACVCCPPKKCVSNSNLFVRTQTKGHFVLNLTLRMGCKCSHMHQRPFTHSSMSKHH

SEQ ID NO: 126228 - protein, 120 aa, Setaria italica
  Transcript Sequence Number=SeqID_60254
  Gene Ontology: Mol. function=protein kinase CK2 regulator activity; Cellular component=protein kinase CK2 complex; Biological process =Wnt receptor signaling pathway
  Homolog annotation: Hit_ID=Q84VF5; Match level="QueryCoverage=76%, HitCoverage=37%, E-value=2e-48, Identity=98%"; Hit description =Possible protein kinase CK2 regulatory subunit (Fragment)
  Pfam annotation: Domain name=CK_II_beta; Domain location=1-116; Score= 128.3; E_value=2.5e-35; Accession=PF01214.10; Description=Casein kinase II regulatory subunit
MFTEEQNELVESAAEMLYGLIHARYILTSKGLAAMLEKYKNYDFGRCPRVYCCGQPCLPVGQSDIHRSSTVKIYCPKCEDIYYPRSKYQGSILTILLLDYLINACVCCPPKNVCQTPTSS

SEQ ID NO: 126229 - protein, 56 aa, Setaria italica
  Transcript Sequence Number=SeqID_60255
  Subcellular localization annotation: CTP_CleavageSite=48; ConfidenceScore=5.52e-01
SASGPTPLPPAYTSLPSPSPSPLSNSQSELSSPSPPPLPSRSPQEIPRCRPRPPPP

SEQ ID NO: 126230 - protein, 70 aa, Setaria italica
  misc_feature (43)..(43): Xaa can be any naturally occurring amino acid
  Transcript Sequence Number=SeqID_60256
LIDQNCLVHWGLLTRFCAIVAPKLQNIAILLYSAIFLTLFRHXWCILWDDIPPSVPDDVRAPQAPEALTA

SEQ ID NO: 126231 - protein, 79 aa, Setaria italica
  misc_feature (49)..(49): Xaa can be any naturally occurring amino acid
  Transcript Sequence Number=SeqID_60257
IAFFLTLIDQNCLVHWGLLTRFCAIVAPKLQNIAILLYSAIFLTLFRHXWCILWDDIPPSVPDDVRAPQAPEALTALCS

SEQ ID NO: 126232 - protein, 77 aa, Setaria italica
  misc_feature (47)..(47): Xaa can be any naturally occurring amino acid
  Transcript Sequence Number=SeqID_60258
FFLTLIDQNCLVHWGLLTRFCAIVAPKLQNIAILLYSAIFLTLFRHXWCILWDDIPPSVPDDVRAPQAPRKTLQQDD

SEQ ID NO: 126233 - protein, 94 aa, Setaria italica
  Transcript Sequence Number=SeqID_60259
  Gene Ontology: Mol. function=protein kinase CK2 regulator activity; Cellular component=protein kinase CK2 complex
  Homolog annotation: Hit_ID=Q84VF5; Match level="QueryCoverage=41%, HitCoverage=15%, E-value=2e-15, Identity=97%"; Hit description =Possible protein kinase CK2 regulatory subunit (Fragment)
  Pfam annotation: Domain name=CK_II_beta; Domain location=1-60; Score=- 105.1; E_value=0.013; Accession=PF01214.10; Description=Casein kinase II regulatory subunit
GQPCLPVGQSDIHRSSTVKIYCPKCEDIYYPRSKYQGSILTILLLDYLINACVCCPPKKMCVKLQPLRENPNQRPFCTKSDTKNGLQMFHMHLT

SEQ ID NO: 126234 - protein, 67 aa, Setaria italica
  misc_feature (18)..(18): Xaa can be any naturally occurring amino acid
  Transcript Sequence Number=SeqID_60260
  Gene Ontology: Mol. function=protein kinase CK2 regulator activity; Cellular component=protein kinase CK2 complex
  Homolog annotation: Hit_ID=Q84VF5; Match level="QueryCoverage=98%, HitCoverage=27%, E-value=1e-28, Identity=90%"; Hit description =Possible protein kinase CK2 regulatory subunit (Fragment)
  Pfam annotation: Domain name=CK_II_beta; Domain location=1-66; Score=- 13.8; E_value=1.8e-09; Accession=PF01214.10; Description=Casein kinase II regulatory subunit
LAAMLEKYKNYDFGRCPXVYCCGQPCLPVGQSDIHRSSTVKIYCPKCEDIYYPRSKYQGSILTILFI

SEQ ID NO: 126235 - protein, 83 aa, Setaria italica
  Transcript Sequence Number=SeqID_60261
  Gene Ontology: Mol. function=protein kinase CK2 regulator activity; Cellular component=protein kinase CK2 complex
  Homolog annotation: Hit_ID=Q84VF5; Match level="QueryCoverage=66%, HitCoverage=22%, E-value=6e-26, Identity=98%"; Hit description =Possible protein kinase CK2 regulatory subunit (Fragment)
  Pfam annotation: Domain name=CK_II_beta; Domain location=1-79; Score=- 30.5; E_value=3.2e-08; Accession=PF01214.10; Description=Casein kinase II regulatory subunit
KYKNYDFGRCPRVYCCGQPCLPVGQSDIHRSSTVKIYCPKCEDIYYPRSKYQGSILTILLLDYLINACVCCPPKNVCQTPTSS

SEQ ID NO: 126236 - protein, 76 aa, Setaria italica
  Transcript Sequence Number=SeqID_60262
  Gene Ontology: Mol. function=protein kinase CK2 regulator activity; Cellular component=protein kinase CK2 complex; Biological process =Wnt receptor signaling pathway
  Homolog annotation: Hit_ID=B9SKF5; Match level="QueryCoverage=75%, HitCoverage=16%, E-value=1e-25, Identity=96%"; Hit description =Casein kinase II beta chain, putative
  Pfam annotation: Domain name=CK_II_beta; Domain location=16-76; Score= -37.6; E_value=1.1e-07; Accession=PF01214.10; Description=Casein kinase II regulatory subunit
VFVYVTLLYLLLSTYFNLCGLSSQVPYYDYALDLILDIESSHGDMFTEEQNELVESAAEMLYGLIHARYILTSKGW

SEQ ID NO: 126237 - protein, 47 aa, Setaria italica
  Transcript Sequence Number=SeqID_60263
LELDNDFQREAPNSAHNHRRSWFTNQRTTAVRLQQHWMSLELHSNVG

SEQ ID NO: 126238 - protein, 75 aa, Setaria italica
  Transcript Sequence Number=SeqID_60264
  Gene Ontology: Mol. function=protein kinase CK2 regulator activity; Cellular component=protein kinase CK2 complex; Biological process =Wnt receptor signaling pathway
  Homolog annotation: Hit_ID=Q84VF5; Match level="QueryCoverage=97%, HitCoverage=29%, E-value=6e-37, Identity=100%"; Hit description =Possible protein kinase CK2 regulatory subunit (Fragment)
  Pfam annotation: Domain name=CK_II_beta; Domain location=2-75; Score =40.9; E_value=1.4e-13; Accession=PF01214.10; Description=Casein kinase II regulatory subunit
LVDMFTEEQNELVESAAEMLYGLIHARYILTSKGLAAMLEKYKNYDFGRCPRVYCCGQPCLPVGQSDIHRSSTVK

SEQ ID NO: 126239 - protein, 34 aa, Setaria italica
  Transcript Sequence Number=SeqID_60265
  Gene Ontology: Mol. function=protein kinase CK2 regulator activity; Cellular component=protein kinase CK2 complex
  Homolog annotation: Hit_ID=Q84VF5; Match level="QueryCoverage=100%, HitCoverage=13%, E-value=9e-14, Identity=100%"; Hit description =Possible protein kinase CK2 regulatory subunit (Fragment)
TFPHLFLMTYEHLKPQKPSQRYVPRVFGFKLHKP

SEQ ID NO: 126240 - protein, 34 aa, Setaria italica
  Transcript Sequence Number=SeqID_60266
  Gene Ontology: Mol. function=protein kinase CK2 regulator activity; Cellular component=protein kinase CK2 complex
  Homolog annotation: Hit_ID=Q84VF5; Match level="QueryCoverage=94%, HitCoverage=13%, E-value=3e-11, Identity=100%"; Hit description =Possible protein kinase CK2 regulatory subunit (Fragment)
HSPHLFLMTYEHLKPQKPSQRYVPRVFGFKLHKP

SEQ ID NO: 126241 - protein, 77 aa, Setaria italica
  misc_feature (60)..(60): Xaa can be any naturally occurring amino acid
  Transcript Sequence Number=SeqID_60267
  Gene Ontology: Mol. function=protein kinase CK2 regulator activity; Cellular component=protein kinase CK2 complex; Biological process =Wnt receptor signaling pathway
  Homolog annotation: Hit_ID=P40229; Match level="QueryCoverage=100%, HitCoverage=26%, E-value=8e-35, Identity=90%"; Hit description =Casein kinase II subunit beta'
  Pfam annotation: Domain name=CK_II_beta; Domain location=11-77; Score= -25.0; E_value=1.2e-08; Accession=PF01214.10; Description=Casein kinase II regulatory subunit
VSGSDGEDTSWISWYCNLRGNEFFCEVDDDYIQDDFNLCGLSSQVPYYDYALDLILDIEXQSHGDMFTEEQNELVES

SEQ ID NO: 126242 - protein, 45 aa, Setaria italica
  Transcript Sequence Number=SeqID_60268
RCGQFYCLMVFGHRAVGEWRWCIWEHLQPILSVRFSTKWPLVLGS

SEQ ID NO: 126243 - protein, 42 aa, Setaria italica
  Transcript Sequence Number=SeqID_60269
  Gene Ontology: Mol. function=protein kinase CK2 regulator activity; Cellular component=protein kinase CK2 complex
  Homolog annotation: Hit_ID=Q84VF5; Match level="QueryCoverage=95%, HitCoverage=16%, E-value=7e-12, Identity=82%"; Hit description =Possible protein kinase CK2 regulatory subunit (Fragment)
EDIYYPRSKYQGNIDGAYFGTTFPHLFLMTYEEHSAVRASGA

SEQ ID NO: 126244 - protein, 39 aa, Setaria italica
  Transcript Sequence Number=SeqID_60270
  Gene Ontology: Mol. function=protein kinase CK2 regulator activity; Cellular component=protein kinase CK2 complex
  Homolog annotation: Hit_ID=O80507; Match level="QueryCoverage=84%, HitCoverage=11%, E-value=5e-11, Identity=93%"; Hit description =Putative casein kinase II subunit beta-4
TDGYLPKCEDIYYPRSKYQGNIDGAYFGTTFPHLGLEVL

SEQ ID NO: 126245 - protein, 60 aa, Setaria italica
  Transcript Sequence Number=SeqID_60271
  Gene Ontology: Mol. function=protein kinase CK2 regulator activity; Cellular component=protein kinase CK2 complex; Biological process =Wnt receptor signaling pathway
  Homolog annotation: Hit_ID=B9SKF5; Match level="QueryCoverage=100%, HitCoverage=17%, E-value=6e-30, Identity=95%"; Hit description =Casein kinase II beta chain, putative
  Pfam annotation: Domain name=CK_II_beta; Domain location=1-60; Score=- 11.6; E_value=1.2e-09; Accession=PF01214.10; Description=Casein kinase II regulatory subunit
MFTEEQNELVESAAEMLYGLIHARYILTSKGLAAMLEKYKNYDFGRCPRVYCCGQPCLPV

SEQ ID NO: 126246 - protein, 56 aa, Setaria italica
  misc_feature (19)..(19): Xaa can be any naturally occurring amino acid
  Transcript Sequence Number=SeqID_60272
  Gene Ontology: Mol. function=protein kinase CK2 regulator activity; Cellular component=protein kinase CK2 complex
  Homolog annotation: Hit_ID=Q84VF5; Match level="QueryCoverage=100%, HitCoverage=20%, E-value=1e-20, Identity=91%"; Hit description =Possible protein kinase CK2 regulatory subunit (Fragment)
  Pfam annotation: Domain name=CK_II_beta; Domain location=1-56; Score=- 93.4; E_value=0.0017; Accession=PF01214.10; Description=Casein kinase II regulatory subunit
DYALDLILDIESSHVMYLXGDMFTEEQNELVESAAEMLYGLIHARYILTSKGLAAM

SEQ ID NO: 126247 - protein, 46 aa, Setaria italica
  Transcript Sequence Number=SeqID_60273
  Gene Ontology: Mol. function=protein kinase CK2 regulator activity; Cellular component=protein kinase CK2 complex; Biological process =embryonic development ending in birth or egg hatching
  Homolog annotation: Hit_ID=P40228; Match level="QueryCoverage=95%, HitCoverage=15%, E-value=4e-18, Identity=93%"; Hit description =Casein kinase II subunit beta
  Pfam annotation: Domain name=CK_II_beta; Domain location=1-46; Score=- 71.4; E_value=3.7e-05; Accession=PF01214.10; Description=Casein kinase II regulatory subunit
KIELVESAAEMLYGLIHARYILTSKGLAAMLEKYKNYDFGQCPRVY

SEQ ID NO: 126248 - protein, 41 aa, Setaria italica
  misc_feature (13)..(13): Xaa can be any naturally occurring amino acid
  Transcript Sequence Number=SeqID_60274
  Gene Ontology: Mol. function=sequence-specific DNA binding; Cellular component=nucleus; Biological process=regulation of transcription, DNA-dependent
  Homolog annotation: Hit_ID=Q2QM96; Match level="QueryCoverage=100%, HitCoverage=4%, E-value=2e-13, Identity=85%"; Hit description =Homeobox-leucine zipper protein HOX33
VDDEGRKLLFSEXPKIMQQGFAYLPGGVCRSSMGRQASYEQ

SEQ ID NO: 126249 - protein, 71 aa, Setaria italica
  Transcript Sequence Number=SeqID_60275
  Gene Ontology: Mol. function=sequence-specific DNA binding; Cellular component=nucleus; Biological process=regulation of transcription, DNA-dependent
  Homolog annotation: Hit_ID=Q2QM96; Match level="QueryCoverage=83%, HitCoverage=6%, E-value=3e-22, Identity=86%"; Hit description =Homeobox-leucine zipper protein HOX33
LALLLPASAVLEPDLDLLRPCDGGGSMIYIVDHVDLNAKSVPEVLRPLYESPKILAQKMTAAALRHIRQIA

SEQ ID NO: 126250 - protein, 74 aa, Setaria italica
  Transcript Sequence Number=SeqID_60276
  Gene Ontology: Mol. function=sequence-specific DNA binding; Cellular component=nucleus; Biological process=regulation of transcription, DNA-dependent
  Homolog annotation: Hit_ID=Q6AST1; Match level="QueryCoverage=81%, HitCoverage=6%, E-value=5e-25, Identity=91%"; Hit description =Homeobox-leucine zipper protein HOX32
YPLCALPFPCCVSQSVGIIAVSHNCSGVAARACGLVSLEPTKVAEILKDRASWYRDCRHVEILHVIPTGNGGTI

SEQ ID NO: 126251 - protein, 50 aa, Setaria italica
  Transcript Sequence Number=SeqID_60277
  Gene Ontology: Mol. function=sequence-specific DNA binding; Cellular component=nucleus; Biological process=regulation of transcription, DNA-dependent
  Homolog annotation: Hit_ID=Q6AST1; Match level="QueryCoverage=90%, HitCoverage=5%, E-value=5e-16, Identity=80%"; Hit description =Homeobox-leucine zipper protein HOX32
SLAHVKTFRFHTGAELLRADTQCTDASLKALWQHSDSIMCCSLKAAPVFT

SEQ ID NO: 126252 - protein, 41 aa, Setaria italica
  Transcript Sequence Number=SeqID_60278
  Gene Ontology: Mol. function=sequence-specific DNA binding; Cellular component=nucleus
  Homolog annotation: Hit_ID=Q6AST1; Match level="QueryCoverage=100%, HitCoverage=4%, E-value=4e-13, Identity=85%"; Hit description =Homeobox-leucine zipper protein HOX32
VSRLVYDNGYMKNQLHSPSVATTDTSCESVVTSGQQYQQQN

SEQ ID NO: 126253 - protein, 117 aa, Setaria italica
  Transcript Sequence Number=SeqID_60279
  Gene Ontology: Mol. function=metal ion binding; Cellular component =integral to membrane
  Homolog annotation: Hit_ID=A0FK62; Match level="QueryCoverage=54%, HitCoverage=21%, E-value=5e-22, Identity=79%"; Hit description=PHD1
  Pfam annotation: Domain name=C1_3; Domain location=44-74; Score=16.9; E_value=0.006; Accession=PF07649.4; Description=C1-like domain
  Pfam annotation: Domain name=PHD; Domain location=45-95; Score=52.3; E_value=1.8e-12; Accession=PF00628.21; Description=PHD-finger
  Pfam module annotation: Pfam domain module=C1_3::PHD; Domain location= 44-74::45-95
KVKQPKPPQPQVKAEDPAPAEEGPAAEEEDDGGSGASEGEHGETLCGACGESYGPDEFWICCDICEKWFHGKCVKITAAKAEHIKQYKCPSCTGGGGGGNSSNKRARRPKGAWPASG

SEQ ID NO: 126254 - protein, 48 aa, Setaria italica
  misc_feature (30)..(30): Xaa can be any naturally occurring amino acid
  Transcript Sequence Number=SeqID_60280
LACRKRLFTMINNLPTVYEVVTGTAKKEPXEKTPKNSNKSSKSGSKPS

SEQ ID NO: 126255 - protein, 56 aa, Setaria italica
  misc_feature (46)..(46): Xaa can be any naturally occurring amino acid
  Transcript Sequence Number=SeqID_60281
MLCPCLHGNKEKENLCLYGLPNETWEVNLPAEEVPPELPEPALGIXNFARDGMNEK

SEQ ID NO: 126256 - protein, 60 aa, Setaria italica
  Transcript Sequence Number=SeqID_60282
KLSTGYMSYLHSSNSFPFGAELWISAGAKHLGILQPNLVVFFCFAFGCCIFSIIHQCKTV

SEQ ID NO: 126257 - protein, 142 aa, Setaria italica
  misc_feature (98)..(98): Xaa can be any naturally occurring amino acid
  Transcript Sequence Number=SeqID_60283
  Gene Ontology: Cellular component=nucleus; Biological process=inner cell mass cell differentiation
  Homolog annotation: Hit_ID=Q2R1T0; Match level="QueryCoverage=82%, HitCoverage=23%, E-value=1e-57, Identity=96%"; Hit description =Notchless, putative, expressed
  Pfam annotation: Domain name=WD40; Domain location=103-141; Score =44.3; E_value=4.8e-10; Accession=PF00400.24; Description=WD domain, G-beta repeat
  Pfam annotation: Domain name=WD40; Domain location=17-55; Score=38.2; E_value=3.4e-08; Accession=PF00400.24; Description=WD domain, G-beta repeat
  Pfam annotation: Domain name=WD40; Domain location=59-95; Score=19.4; E_value=0.015; Accession=PF00400.24; Description=WD domain, G-beta repeat
  Pfam module annotation: Pfam domain module=WD40::WD40::WD40; Domain location=103-141::17-55::59-95
SYCFLLGNLTYLVKLTLKSSSLYLVHQKLVNHVYFSPDGQWLASASFDKSVKLWNGITGKFVAAFRGHVADVYQISWSADSRLLLSGSKDSTPKRFWXDIRTHKLKQDLPGHADEVYAVDWSPDGEKVASGGKDRVLKLWMN

SEQ ID NO: 126258 - protein, 91 aa, Setaria italica
  Transcript Sequence Number=SeqID_60284
LAIPYLEIPLLMASLTIVCAHLSSPKMFIGRPNEKNACFSVLNEIRTKKFTEIIMITITFMMYSVWILLSKLFVDIAYNISVASRFVSCAR

SEQ ID NO: 126259 - protein, 39 aa, Setaria italica
  Transcript Sequence Number=SeqID_60285
LDRSIHVEYIMKILGLDKCAHTMVGDAMRRGISGGEKRD

SEQ ID NO: 126260 - protein, 95 aa, Setaria italica
  Transcript Sequence Number=SeqID_60286
KAPGSFHFDEGLLDNRTYFYCPGRVTYVCFTSGYIAVETVFDGVPTWKGMVGTCFACRSDRTCCCDGMWWLSHFSLLDHVIPDCLLHQSHETSSK

SEQ ID NO: 126261 - protein, 145 aa, Setaria italica
  misc_feature (72)..(72): Xaa can be any naturally occurring amino acid
  misc_feature (92)..(92): Xaa can be any naturally occurring amino acid
  Transcript Sequence Number=SeqID_60287
  Gene Ontology: Mol. function=nucleic acid binding
  Homolog annotation: Hit_ID=B9SAD4; Match level="QueryCoverage=93%, HitCoverage=33%, E-value=2e-39, Identity=60%"; Hit description =Nuclear acid binding protein, putative
  Pfam annotation: Domain name=MPPN; Domain location=20-106; Score= -28.2; E_value=0.089; Accession=PF05172.5; Description=MPPN (rrm -like) domain
  Pfam annotation: Domain name=RRM_1; Domain location=29-90; Score =62.8; E_value=1.3e-15; Accession=PF00076.14; Description=RNA recognition motif. (a.k.a. RRM, RBD, o
  Pfam module annotation: Pfam domain module=MPPN::RRM_1; Domain location=20-106::29-90
IGLLFRSSAATYPNTQGTDSDNDPNNTTVFVGGLDPSVTDEVLRQTFSPYGELLYVKIPVGKRCGFVQYSNXEEAIRVLNGTQLGGQSVRLXWGRSPANKQPQQEQNQWSSGYYGYPQGYDPYGYARPPQDPAMYAYTAYPGYGN

SEQ ID NO: 126262 - protein, 61 aa, Setaria italica
  Transcript Sequence Number=SeqID_60288
TNKQPQQEQNQWSSGYYGYPQGYDPYGYARPPQDPAMYAYTAYPGYGNYQQQPPQQPPPQQ

SEQ ID NO: 126263 - protein, 88 aa, Setaria italica
  misc_feature (12)..(12): Xaa can be any naturally occurring amino acid
  Transcript Sequence Number=SeqID_60289
  Gene Ontology: Mol. function=nucleic acid binding; Cellular component= nucleus; Biological process=mRNA processing
  Homolog annotation: Hit_ID=B6TZW1; Match level="QueryCoverage=77%, HitCoverage=24%, E-value=8e-32, Identity=94%"; Hit description=Pre -mRNA-splicing factor SF2
  Pfam annotation: Domain name=RRM_1; Domain location=33-87; Score=6.9; E_value=0.045; Accession=PF00076.14; Description=RNA recognition motif. (a.k.a. RRM, RBD, o
  Subcellular localization annotation: CTP_CleavageSite=39; ConfidenceScore=5.12e-01
ELAHGGRGPSFXRSSSHNSVGRRGATRRSDYRVMVTGLPSSASWQDLKDHMRRAGDVCFSDVYREAGATIGIADYTNYEDMKHAIRKL

SEQ ID NO: 126264 - protein, 89 aa, Setaria italica
  Transcript Sequence Number=SeqID_60290
  Subcellular localization annotation: CTP_CleavageSite=48; ConfidenceScore=5.84e-01
LEGSNDARRSRSRSRGRSHSRSKSRSRSRGRSYSRSRSHSYSRSRSPRSRSASQSRSPVKARLGPCDDLGIALLGYWNIENMRMVWNVG

SEQ ID NO: 126265 - protein, 58 aa, Setaria italica
  misc_feature (21)..(21): Xaa can be any naturally occurring amino acid
  Transcript Sequence Number=SeqID_60291
  Gene Ontology: Mol. function=protein binding; Cellular component =photosystem I reaction center; Biological process=photosynthesis
  Homolog annotation: Hit_ID=B6SKI1; Match level="QueryCoverage=94%, HitCoverage=26%, E-value=3e-21, Identity=89%"; Hit description =Photosystem I reaction center subunit II
MDGAATQEAPKGFVPPQLDPXTPSPIFGGSTGGLLRKAQVEEFYVITWTSPKEQVFEI

SEQ ID NO: 126266 - protein, 92 aa, Setaria italica
  Transcript Sequence Number=SeqID_60292
  Gene Ontology: Mol. function=protein binding; Cellular component =photosystem I reaction center; Biological process=photosynthesis
  Homolog annotation: Hit_ID=A5Z2K3; Match level="QueryCoverage=85%, HitCoverage=37%, E-value=1e-39, Identity=98%"; Hit description =Photosystem I subunit PsaD
  Pfam annotation: Domain name=PsaD; Domain location=1-92; Score=94.6; E_value=3.5e-25; Accession=PF02531.8; Description=PsaD
YFVSVYGFGSFRPIMREGPNLLKLARKEQCLALGTRLRSKYKINYQFYRVFPNGEVQYLHPKDGVYPEKVNAGRQGVGQNFRSIGKNVSPIE

SEQ ID NO: 126267 - protein, 89 aa, Setaria italica
  Transcript Sequence Number=SeqID_60293
  Gene Ontology: Mol. function=protein binding; Cellular component =photosystem I reaction center; Biological process=photosynthesis
  Homolog annotation: Hit_ID=P36213; Match level="QueryCoverage=74%, HitCoverage=32%, E-value=3e-31, Identity=98%"; Hit description =Photosystem I reaction center subunit II, chloroplastic
  Pfam annotation: Domain name=PsaD; Domain location=18-89; Score=61.8; E_value=2.6e-15; Accession=PF02531.8; Description=PsaD
AAGARTPWRRPRRRPRGQAAGARTPSPIFGGSTGGLLRKAQVEEFYVITWTSPKEQVFEMPTGGAAIMREGPNLLKLARKEQCLALGTR

SEQ ID NO: 126268 - protein, 91 aa, Setaria italica
  misc_feature (68)..(68): Xaa can be any naturally occurring amino acid
  Transcript Sequence Number=SeqID_60294
  Gene Ontology: Mol. function=protein binding; Cellular component =photosystem I reaction center; Biological process=photosynthesis
  Homolog annotation: Hit_ID=B6SKI1; Match level="QueryCoverage=72%, HitCoverage=33%, E-value=2e-26, Identity=89%"; Hit description =Photosystem I reaction center subunit II
  Pfam annotation: Domain name=PsaD; Domain location=35-91; Score=-6.2; E_value=0.1; Accession=PF02531.8; Description=PsaD
LKRREVRRGGERRGWWWRGCTAAEAEEAPKGFVPPQLDPNTPSPIFGGSTGGLLRKAQVEEFYVITWXSPKEQVFEMPTGGAAIMAGRGPT

SEQ ID NO: 126269 - protein, 45 aa, Setaria italica
  Transcript Sequence Number=SeqID_60295
  Gene Ontology: Mol. function=protein binding; Cellular component =photosystem I reaction center; Biological process=photosynthesis
  Homolog annotation: Hit_ID=Q9S7H1; Match level="QueryCoverage=100%, HitCoverage=21%, E-value=3e-17, Identity=93%"; Hit description =Photosystem I reaction center subunit II-1, chloroplastic
NSSTEQVFEMPTGGAAIMREGPNLLKLARKEQCLALGTRLRSKYK

SEQ ID NO: 126270 - protein, 113 aa, Setaria italica
  misc_feature (73)..(73): Xaa can be any naturally occurring amino acid
  Transcript Sequence Number=SeqID_60296
  Gene Ontology: Mol. function=carbohydrate binding; Cellular component= plasma membrane
  Homolog annotation: Hit_ID=B9RNC2; Match level="QueryCoverage=96%, HitCoverage=9%, E-value=1e-28, Identity=56%"; Hit description =Carboxypeptidase regulatory region-containingprotein, putative
LLKFVSLSKDGYHLKQTGLYTFACQKLGQISVQIYGENLELLPSVLLSLSGEEGYRNNSISGSGGTFIFDNLXPGSFYLRPLLKEYKFNPSAVAIDLNSGESREAEFRATRVA

SEQ ID NO: 126271 - protein, 77 aa, Setaria italica
  Transcript Sequence Number=SeqID_60297
  Gene Ontology: Mol. function=carbohydrate binding; Cellular component= plasma membrane
  Homolog annotation: Hit_ID=B9RNC2; Match level="QueryCoverage=93%, HitCoverage=6%, E-value=2e-14, Identity=49%"; Hit description =Carboxypeptidase regulatory region-containingprotein, putative
LFHGKVLCKEECNQNVLVSLVRLAGGVEQEKKTTTLEQDNVNFVFTKVFPGKYRIEVRHSSSEGSVKDVWCWDQNAL

SEQ ID NO: 126272 - protein, 41 aa, Setaria italica
  Transcript Sequence Number=SeqID_60298
  Gene Ontology: Mol. function=carbohydrate binding; Cellular component= plasma membrane
VGYWRNFIFDNLFPGSFYLRPLLKEYKFNPSAVAIDLNSGE

SEQ ID NO: 126273 - protein, 52 aa, Setaria italica
  Transcript Sequence Number=SeqID_60299
RNYLPRFRGCTDQKGATEEHNKKKSVNGKLDLILVVSFLLLQRKLRALSGAC

SEQ ID NO: 126274 - protein, 88 aa, Setaria italica
  Transcript Sequence Number=SeqID_60300
  Gene Ontology: Mol. function=4-alpha-glucanotransferase activity; Cellular component=chloroplast; Biological process=carbohydrate metabolic process
  Homolog annotation: Hit_ID=Q1ALB2; Match level="QueryCoverage=75%, HitCoverage=11%, E-value=1e-31, Identity=92%"; Hit description =Disproportionating enzyme
MASHFVSGVPPDAFSETGQLWNSPLYDWRAMEADGFSWWIKRIKRALDLYDEFRIDHFRGLAGFWAVPSGKLNTSGHEALQIKYLYCK

SEQ ID NO: 126275 - protein, 133 aa, Setaria italica
  Transcript Sequence Number=SeqID_60301
VLVLVGFRRSIVFRQHFELQGAERVRMLPAHEFCKQGFVLGKASEAGFGNEMYKILTAGALSVMLNRSLIIGQTRGLYPFWEYISYTNQSFTIHEIKHLWRKHHCARTYGRDLNIRVDIFENPAETNVLCSDW

SEQ ID NO: 126276 - protein, 40 aa, Setaria italica
  Transcript Sequence Number=SeqID_60302
KFIVTTIVKSSYKTCIVVCQTFPNLFFKMDSQCGIIVVTN

SEQ ID NO: 126277 - protein, 71 aa, Setaria italica
  Transcript Sequence Number=SeqID_60303
NGFPTYHTYYFLLLSPPNSSIIFSRLTKQILQLRRLLCEIYCFDEYPQAPQVVLPDSLCQAGLLEVPEGYF

SEQ ID NO: 126278 - protein, 80 aa, Setaria italica
  Transcript Sequence Number=SeqID_60304
DYVLRIESATCVLSGERDTQDTPLKDLEHQRTSHVGRIPSWSNAQWSAPWSAMPPRMSSIAVEMKEEQQFKSLEEIRAKR

SEQ ID NO: 126279 - protein, 65 aa, Setaria italica
  Transcript Sequence Number=SeqID_60305
KIRGMKYELSGEILIYLRALRLGAAADGVPDLKCPVQRPLPLTIPIFPQLCTAPRSEAMTSSNIK

SEQ ID NO: 126280 - protein, 136 aa, Setaria italica
  Transcript Sequence Number=SeqID_60306
  Gene Ontology: Mol. function=cinnamoyl-CoA reductase activity; Biological process=cellular metabolic process
  Homolog annotation: Hit_ID=O82055; Match level="QueryCoverage=100%, HitCoverage=36%, E-value=3e-55, Identity=79%"; Hit description =Cinnamoyl-CoA reductase
DAARQRGVDLVVVNPVLVVGPLLQPTVNASIAHILKYLDGSARTFANAVQAYVDVRDVAAAHLAVFESPAASGRHLCAERVLHREDVVRILAKLFPEYPVPTRCSDEENPRKQPYRFSNQKLRDLGLEFRPVSQSL

SEQ ID NO: 126281 - protein, 55 aa, Setaria italica
  Transcript Sequence Number=SeqID_60307
RTRSAVPRRRNHRRGGGQFLNPPLLATPRFRHERYSYCSRWSSSSAEAGNTARRW

SEQ ID NO: 126282 - protein, 92 aa, Setaria italica
  Transcript Sequence Number=SeqID_60308
NTRSTSVVIPGFLAPKGNWLSSIQSVLCIYYTITIKTDEAKNSDVLQCLESNCPFYDVMYHGADERMTWKPDEQLHQINHCTEKSVKDYESR

SEQ ID NO: 126283 - protein, 80 aa, Setaria italica
  Transcript Sequence Number=SeqID_60309
IEDVLKILWTCPRQLQSSQNNSFTVEGSISICPAGLLITKYRHSEYDGQGSLVHLGDIVSMPFTRTARNLVVPSAAASSL

SEQ ID NO: 126284 - protein, 102 aa, Setaria italica
  misc_feature (11)..(11): Xaa can be any naturally occurring amino acid
  Transcript Sequence Number=SeqID_60310
  Gene Ontology: Mol. function=phosphoprotein phosphatase activity; Cellular component=nucleoplasm; Biological process=protein amino acid dephosphorylation
  Homolog annotation: Hit_ID=B6TDT2; Match level="QueryCoverage=93%, HitCoverage=25%, E-value=2e-48, Identity=93%"; Hit description =Serine/threonine protein phosphatase
VPDTGLLCDLXWSDPSNEAQGWAMNDRGVSYTFGPDKVAEFLEKHDLDLICRAHQVVEDGYEFFANRQLVTIFSAPNYCGEFDNAGAMMSVDETLNVRLTFT

SEQ ID NO: 126285 - protein, 69 aa, Setaria italica
  Transcript Sequence Number=SeqID_60311
  Gene Ontology: Mol. function=phosphoprotein phosphatase activity; Cellular component=cytoplasm
  Homolog annotation: Hit_ID=A0DN20; Match level="QueryCoverage=98%, HitCoverage=5%, E-value=1e-28, Identity=82%"; Hit description =Serine/threonine protein phosphatase
SGDVHGQFSDLLRLFDYGGYPPQSNYLFLGDYVDRGKQSLETICLLLAYKVKYPDELFPSKGGNHECAS

SEQ ID NO: 126286 - protein, 58 aa, Setaria italica
  Transcript Sequence Number=SeqID_60312
  Gene Ontology: Mol. function=phosphoprotein phosphatase activity; Cellular component=cytoplasm; Biological process=carbohydrate metabolic process
  Homolog annotation: Hit_ID=C0ILP6; Match level="QueryCoverage=94%, HitCoverage=17%, E-value=2e-18, Identity=79%"; Hit description =Serine/threonine protein phosphatase
ANRQLVTIFSAPNYCGEFDNAGAMMSVDETLMCSFQILKPARKILPLFITACSPSGHC

SEQ ID NO: 126287 - protein, 76 aa, Setaria italica
  Transcript Sequence Number=SeqID_60313
  Gene Ontology: Cellular component=plasma membrane; Biological process= response to stress
  Homolog annotation: Hit_ID=B6TYX3; Match level="QueryCoverage=94%, HitCoverage=43%, E-value=1e-29, Identity=87%"; Hit description=USP family protein
MKNYGVKTDAEVLDMIDTAARQKQLKVVAKLYWGDAREKLCDGVEELKIDSLVMGSRGLGPIQRILLGSVTDTCSA

SEQ ID NO: 126288 - protein, 89 aa, Setaria italica
  Transcript Sequence Number=SeqID_60314
  Gene Ontology: Cellular component=plasma membrane; Biological process= response to stress
  Homolog annotation: Hit_ID=B6TYX3; Match level="QueryCoverage=100%, HitCoverage=54%, E-value=1e-40, Identity=91%"; Hit description=USP family protein
  Pfam annotation: Domain name=Usp; Domain location=2-87; Score=24.2; E_ value=0.00053; Accession=PF00582.18; Description=Universal stress protein family
VMKNYGVKTDAEVLDMIDTAARQKQLKVVAKLYWGDAREKLCDGVEELKIDSLVMGSRGLGPIQRILLGSVTNYVLSNASCPVTVVKGK

SEQ ID NO: 126289 - protein, 55 aa, Setaria italica
  Transcript Sequence Number=SeqID_60315
  Homolog annotation: Hit_ID=B6TYX3; Match level="QueryCoverage=87%, HitCoverage=29%, E-value=1e-09, Identity=66%"; Hit description=USP family protein
KNYGVKTDAEVLDMIDTAARQKQLKVVAKLYWGDAIAELLPGVAPVQLGHHLELL

SEQ ID NO: 126290 - protein, 60 aa, Setaria italica
  Transcript Sequence Number=SeqID_60316
  Gene Ontology: Mol. function=aspartic-type endopeptidase activity; Cellular component=chromatin; Biological process=DNA integration
  Homolog annotation: Hit_ID=Q688L2; Match level="QueryCoverage=100%, HitCoverage=3%, E-value=9e-18, Identity=63%"; Hit description =Putative polyprotein
  Subcellular localization annotation: CTP_CleavageSite=24; ConfidenceScore=5.33e-01
DNTTSRAFFLSHGVHLRMSCPYTSSQNGKAERMIRTTNDTMRSLLFQSSLPAPFWAESLH

SEQ ID NO: 126291 - protein, 63 aa, Setaria italica
  Transcript Sequence Number=SeqID_60317
  Subcellular localization annotation: CTP_CleavageSite=56; ConfidenceScore=5.48e-01
LPPPTLDLSSLFPTDPVDQPPLPFCPAGTAPPWFSSGSTSTGTVPDPAPSTGSTVPASGAASS

SEQ ID NO: 126292 - protein, 66 aa, Setaria italica
  Transcript Sequence Number=SeqID_60318
MGVRREPHCTSWFCVTDTAFQCEVFEDAVIVDWRQCLSEPDGSYHHFEWAIGTDEGESDIFGFEDW

SEQ ID NO: 126293 - protein, 82 aa, Setaria italica
  misc_feature (41)..(41): Xaa can be any naturally occurring amino acid
  Transcript Sequence Number=SeqID_60319
  Homolog annotation: Hit_ID=Q01K95; Match level="QueryCoverage=75%, HitCoverage=2%, E-value=7e-20, Identity=77%"; Hit description =OSIGBa0148A10.3 protein
LTLLLNYLSSLLLRLNFILLKSGQFEGTPAFSPLIICVLQXCLRLLDLESGSMKLHEKSTISLYVCNTIHLIMQSQADVHLL

SEQ ID NO: 126294 - protein, 79 aa, Setaria italica
  misc_feature (1)..(19): Xaa can be any naturally occurring amino acid
  Transcript Sequence Number=SeqID_60320
XXXXXXXXXXXXXXXXXXXYKSSVQHRILQKTEGEIALKSSIVNTGGGIGLDTGYRHTTYSETSTYAIHVFGRIHEENL

SEQ ID NO: 126295 - protein, 35 aa, Setaria italica
  Transcript Sequence Number=SeqID_60321
DFMVLSATSRLHNPMVCPFSYIIMKFCVVFIYSPN

SEQ ID NO: 126296 - protein, 78 aa, Setaria italica
  Transcript Sequence Number=SeqID_60322
STCPTLPVAIQHADGCPFVSLFSLRRIPMTHMEYLLLYGCGLSQHRQDPIPSVGNPIQSSRSHHPGTSHSHHHPASSP

SEQ ID NO: 126297 - protein, 61 aa, Setaria italica
  Transcript Sequence Number=SeqID_60323
LIAERTFYAEAYFGIWIQTLNSTTNDLYLIKQIQFSLVFVKYGNCRLQEMQETLQGTYILL

SEQ ID NO: 126298 - protein, 69 aa, Setaria italica
  Transcript Sequence Number=SeqID_60324
  Subcellular localization annotation: CTP_CleavageSite=49; ConfidenceScore=5.08e-01
SKQIRTYCSLQFRKHVYVVFINVSFQNSDTISCGSQEKLRKTGPRGLVRSLARPSLVSLLNLSQTLRPK

SEQ ID NO: 126299 - protein, 82 aa, Setaria italica
  misc_feature (37)..(37): Xaa can be any naturally occurring amino acid
  Transcript Sequence Number=SeqID_60325
  Gene Ontology: Mol. function=heat shock protein binding
  Homolog annotation: Hit_ID=B9RLW4; Match level="QueryCoverage=81%, HitCoverage=9%, E-value=2e-15, Identity=59%"; Hit description=Heat shock protein binding protein, putative
PRPKLSTSLFGQPSESIAFVLWREDESQIWWNSLGVXESAPALVFLKGPGTKPVVHHGTFSKSEFTEMMEEHKHHELRQLRS

SEQ ID NO: 126300 - protein, 48 aa, Setaria italica
  Transcript Sequence Number=SeqID_60326
MAEPGLEGSQPVDLSKHPSGIVPTDQAELLAYDVEEEEEEGRRRRCCE

SEQ ID NO: 126301 - protein, 50 aa, Setaria italica
  Transcript Sequence Number=SeqID_60327
  Gene Ontology: Mol. function=hydrolase activity
CLRESLFRFKHIFSLNEQSRYEKEFGSRNYQFSAGKVDFVVIDAQTLDGY

SEQ ID NO: 126302 - protein, 62 aa, Setaria italica
  Transcript Sequence Number=SeqID_60328
  Homolog annotation: Hit_ID=Q94LQ9; Match level="QueryCoverage=96%, HitCoverage=2%, E-value=2e-24, Identity=80%"; Hit description =Putative transcription regulatory protein
MQAPSTNWVRVMEYLDHDGFNIPDEAAFYLLMSIYARACKDPFPLHAVCGSLWKNAAGQISF

SEQ ID NO: 126303 - protein, 132 aa, Setaria italica
  misc_feature (12)..(12): Xaa can be any naturally occurring amino acid
  misc_feature (34)..(34): Xaa can be any naturally occurring amino acid
  Transcript Sequence Number=SeqID_60329
  Gene Ontology: Mol. function=P-P-bond-hydrolysis-driven protein transmembrane transporter activity; Cellular component=mitochondrial inner membrane presequence translocase complex; Biological process =intracellular protein transport
  Homolog annotation: Hit_ID=B9SF39; Match level="QueryCoverage=81%, HitCoverage=22%, E-value=2e-33, Identity=60%"; Hit description =Mitochondrial import inner membrane translocase subunit tim44, putative
RKKKHQARHASXAKVEKSTRTDLVITPTKKSVLXGEKWEAFKDKIRGHPVYKRVDEYTKPVVTKGQEVAEDVRERWETSDNPVVQKIQDLNESLLEETTAAVTFREIRQRDPSFSLTDFVSNTSASEMCRIL

SEQ ID NO: 126304 - protein, 92 aa, Setaria italica
  misc_feature (50)..(50): Xaa can be any naturally occurring amino acid
  Transcript Sequence Number=SeqID_60330
  Gene Ontology: Mol. function=P-P-bond-hydrolysis-driven protein transmembrane transporter activity; Cellular component=mitochondrial inner membrane presequence translocase complex; Biological process =intracellular protein transport
  Homolog annotation: Hit_ID=B9SF39; Match level="QueryCoverage=76%, HitCoverage=14%, E-value=2e-18, Identity=60%"; Hit description =Mitochondrial import inner membrane translocase subunit tim44, putative
  Subcellular localization annotation: CTP_CleavageSite=23; ConfidenceScore=5.00e-01
IHSRKSLSSTSSRKKKHQARHASAKVEKSTRTDLVITPTKKSVLGEKWEXFKDKIRGHPVYKRVDEYTKPVVTKGQEVAEDVRERWETSDNP

SEQ ID NO: 126305 - protein, 63 aa, Setaria italica
  Transcript Sequence Number=SeqID_60331
  Homolog annotation: Hit_ID=B5TV63; Match level="QueryCoverage=100%, HitCoverage=13%, E-value=1e-15, Identity=57%"; Hit description =Senescence-related protein
EEYGGKVARAIATGAEHLAKGILWCGEVTVDRLRWGNEVLRKRMQPGDANAEVSPEMLRRIKR

SEQ ID NO: 126306 - protein, 46 aa, Setaria italica
  Transcript Sequence Number=SeqID_60332
CTGKICDAVEVSGKNVLSTSSTVTTGLVSHKYCAILYRKFISYNQE

SEQ ID NO: 126307 - protein, 58 aa, Setaria italica
  Transcript Sequence Number=SeqID_60333
MWSGRGRGGRENLEFNFRWTRRSLAVVGLFGLAVPILVYKGIVREFHMQDEDAGRPYR

SEQ ID NO: 126308 - protein, 84 aa, Setaria italica
  Transcript Sequence Number=SeqID_60334
  Gene Ontology: Mol. function=transition metal ion binding; Cellular component=ER-Golgi intermediate compartment membrane
  Homolog annotation: Hit_ID=B6TDW5; Match level="QueryCoverage=71%, HitCoverage=13%, E-value=3e-23, Identity=90%"; Hit description =Transmembrane protein 49
MLSVRKKPKLGSIKSGCYSAIFFGSSSIKLFDLLPQIQLEAVLWGIGTALGELPPYFISRAARLSGSESKAVKELDAATSKEDG

SEQ ID NO: 126309 - protein, 47 aa, Setaria italica
  Transcript Sequence Number=SeqID_60335
GNRKKVTNKGRIAAAAEQGYTGAKYLPAIPTERIAKVFASSPEAEAQ

SEQ ID NO: 126310 - protein, 136 aa, Setaria italica
  Transcript Sequence Number=SeqID_60336
  Gene Ontology: Mol. function=hydroxymethyl-, formyl- and related transferase activity; Cellular component=chloroplast; Biological process='de novo' IMP biosynthetic process
  Homolog annotation: Hit_ID=P52423; Match level="QueryCoverage=88%, HitCoverage=38%, E-value=5e-43, Identity=68%"; Hit description =Phosphoribosylglycinamide formyltransferase, chloroplastic
  Pfam annotation: Domain name=Formyl_trans_N; Domain location=1-135; Score=41.7; E_value=7.4e-10; Accession=PF00551.11; Description =Formyl transferase
TGTNTNEAALGGTVHGDVVALVTDKPGCGGAEHARSNGIPVVVFPKSKSAPEGISVAELLDTLRGYGVDFVLLAGYLKLIPAELIQEYPRSILNIHPSLLPAFGGKGFYGSKVHKAVIASGARENISTKSCACVCR

SEQ ID NO: 126311 - protein, 83 aa, Setaria italica
  Transcript Sequence Number=SeqID_60337
  Gene Ontology: Mol. function=hydroxymethyl-, formyl- and related transferase activity; Cellular component=chloroplast; Biological process='de novo' IMP biosynthetic process
  Homolog annotation: Hit_ID=P52423; Match level="QueryCoverage=83%, HitCoverage=22%, E-value=6e-22, Identity=71%"; Hit description =Phosphoribosylglycinamide formyltransferase, chloroplastic
KSAPEGISVAELLDTLRGYGVDFVLLAGYFKLIPAELIQEYPRSILNIHPSLLPAFGGKGFYGSKVHKAAETRNRGRQGTQGI

SEQ ID NO: 126312 - protein, 157 aa, Setaria italica
  misc_feature (71)..(71): Xaa can be any naturally occurring amino acid
  misc_feature (144)..(144): Xaa can be any naturally occurring amino acid
  Transcript Sequence Number=SeqID_60338
  Homolog annotation: Hit_ID=Q3KLP1; Match level="QueryCoverage=85%, HitCoverage=59%, E-value=5e-19, Identity=38%"; Hit description =UPF0082 protein CTA_0499
  Pfam annotation: Domain name=DUF28; Domain location=1-156; Score =21.8; E_value=1.2e-13; Accession=PF01709.12; Description=Domain of unknown function DUF28
QNLKKMKRNSKIGKEIVSAIKKGGPSPSSNTALAAILEKARELDIPKEILERNIKRASEKDQDTYTEKVYXGMIVEVLTDKITRSVADIRNVVKDCGAKLADPGSVTFRFRQARVVNIKVTDAGKDQLLSIALDAGADDVLEPXDDDDDSRRRNRKV

SEQ ID NO: 126313 - protein, 63 aa, Setaria italica
  Transcript Sequence Number=SeqID_60339
  Subcellular localization annotation: CTP_CleavageSite=48; ConfidenceScore=5.09e-01
VRPRANDVSLDTGKARSRVADTVVDSVPFSLLTLDSRRVLRRAGLPVVVMELNIRQRIRCRLT

SEQ ID NO: 126314 - protein, 83 aa, Setaria italica
  misc_feature (51)..(51): Xaa can be any naturally occurring amino acid
  Transcript Sequence Number=SeqID_60340
GRERGKAGGKGEAAAAAVEGGRKCFLWGGREEQIEFIREKVTEEGKREDLXKKGKAPEQVVLDEAAFLMDLACVDGNWDDVVD

SEQ ID NO: 126315 - protein, 93 aa, Setaria italica
  misc_feature (51)..(51): Xaa can be any naturally occurring amino acid
  Transcript Sequence Number=SeqID_60341
PVSRAAFASVLLGRRAVGASLVAARCASSAASPAAAVTAYGEKELVYYLGXAKRGLIPVVVPLSESPAGNLTSLLRWPTAPTGMEMPVVEVGK

SEQ ID NO: 126316 - protein, 82 aa, Setaria italica
  misc_feature (30)..(30): Xaa can be any naturally occurring amino acid
  Transcript Sequence Number=SeqID_60342
GTSEAKDSARVALKSPWWTLGCSYELFDEXEAAELAGWEDEQIEFIREKVTEEGKREDLKKGKAPEQVVLDEAAFLMDLACV

SEQ ID NO: 126317 - protein, 49 aa, Setaria italica
  Transcript Sequence Number=SeqID_60343
QNQHHQFCLHNSCSARVALKSPWWTLGCSYEEAAELAGWEDEQIEFIRE

SEQ ID NO: 126318 - protein, 43 aa, Setaria italica
  Transcript Sequence Number=SeqID_60344
YLDWNWIKHEEKFAEQARAAKAEEAERSVFSFINSHLVNLQAY

SEQ ID NO: 126319 - protein, 74 aa, Setaria italica
  Transcript Sequence Number=SeqID_60345
FQSSTVPIDWISNGNPIWLFQIKNYEFDMLGMMAVVTCKYTIKNRNSILETQILLLFVGNKSSQIAWLHWLVAC

SEQ ID NO: 126320 - protein, 62 aa, Setaria italica
  Transcript Sequence Number=SeqID_60346
  Subcellular localization annotation: CTP_CleavageSite=46; ConfidenceScore=5.41e-01
DHRPGILGFRTFCDSRTSATEGTPAPKRAQSADRRRPSTPSTPTSRVSTPSTPTPRSITPVR

SEQ ID NO: 126321 - protein, 128 aa, Setaria italica
  misc_feature (48)..(48): Xaa can be any naturally occurring amino acid
  Transcript Sequence Number=SeqID_60347
  Gene Ontology: Mol. function=nutrient reservoir activity; Cellular component=extracellular region
  Homolog annotation: Hit_ID=Q942A8; Match level="QueryCoverage=78%, HitCoverage=49%, E-value=2e-35, Identity=69%"; Hit description =Germin-like protein 1-3
MAHKLPSTLIAAFAVLLALAAPLVVVAGDPDMLQDICVADYHSLKGQXENVTAHDFSSGLLAKPGNTTDNAAGSAVTAANVEMVPGLNTLGVSMARIDFAPWGVNPPHTHPRATEIIFVLRGSLHVGF

SEQ ID NO: 126322 - protein, 86 aa, Setaria italica
  misc_feature (66)..(66): Xaa can be any naturally occurring amino acid
  Transcript Sequence Number=SeqID_60348
  Gene Ontology: Mol. function=translation initiation factor activity; Cellular component=intracellular; Biological process=translational initiation
  Homolog annotation: Hit_ID=Q69IM0; Match level="QueryCoverage=87%, HitCoverage=10%, E-value=3e-32, Identity=89%"; Hit description =Translation initiation factor IF-2
NHAARNFHAGVYMLAWSRKKEDVVGLKAPKKEKRVKRENRTQPPVEAPYVAPKPKIATKSPDKTVXIFDGMTLLDLSKRPVHILVL

SEQ ID NO: 126323 - protein, 56 aa, Setaria italica
  Transcript Sequence Number=SeqID_60349
SLEVVRSDRAVFQMIHYQVFEVSLFCVKILYLTENIANPPEYISARLRAKRWIVPV

SEQ ID NO: 126324 - protein, 86 aa, Setaria italica
  Transcript Sequence Number=SeqID_60350
  Homolog annotation: Hit_ID=B6T5F9; Match level="QueryCoverage=87%, HitCoverage=22%, E-value=2e-36, Identity=85%"; Hit description =Histone mRNA exonuclease 1
RKVLQEFEDWIGNHSLWKTEQGGSLNSAAFVTCGNWDLKTKIPEQCKVSKIKLPTYFMEWINLKDIYLNFYSRRSNSYEKIIGACI

SEQ ID NO: 126325 - protein, 70 aa, Setaria italica
  Transcript Sequence Number=SeqID_60351
  Subcellular localization annotation: CTP_CleavageSite=36; ConfidenceScore=5.82e-01
GFRPFFPSSPVLPSPSFPCLPNSFLRPFSSSASPLRSSRRRSSPIAAAFSHAVREGQVMEAPIPISRRPW

SEQ ID NO: 126326 - protein, 51 aa, Setaria italica
  Transcript Sequence Number=SeqID_60352
MGGQRRRGRGRKFGGERRVLSGYEERRIRSYRLQLQKRLEMAQARKEELQK

SEQ ID NO: 126327 - protein, 32 aa, Setaria italica
  Transcript Sequence Number=SeqID_60353
FKQHDLMASCGSDSTNYSIMYHKLHDLHLQED

SEQ ID NO: 126328 - protein, 118 aa, Setaria italica
  misc_feature (71)..(71): Xaa can be any naturally occurring amino acid
  Transcript Sequence Number=SeqID_60354
FVLRSVEDAGDAVGQDEEDGGSMAADALLTLVNSEGQAAGSQNNAEHAVSKITDHHRVLSAMIEIVDPEFXKQMSRSGGGNDEPMSDAETDEGSEEVDTDDDSEEPMVEDSGWVRLKV

SEQ ID NO: 126329 - protein, 121 aa, Setaria italica
  Transcript Sequence Number=SeqID_60355
  Gene Ontology: Cellular component=vacuole
  Homolog annotation: Hit_ID=Q9LP35; Match level="QueryCoverage=77%, HitCoverage=25%, E-value=2e-29, Identity=61%"; Hit description =F28N24.24 protein
  Pfam annotation: Domain name=DUF231; Domain location=1-121; Score =74.3; E_value=4.5e-19; Accession=PF03005.7; Description=Arabidopsis proteins of unknown function
RKNKNKGKPELTTDLTTKGMTTWARWVDSNVDTSKTKVYFQGISPTHYNGAEWGEGSRNCAQQTQPIAGSAYPAGPVPAQAAVRAALSGMSKPVYLLDVTLLSQLRRDCHPSAYSGGHPGQ

SEQ ID NO: 126330 - protein, 66 aa, Setaria italica
  misc_feature (39)..(39): Xaa can be any naturally occurring amino acid
  Transcript Sequence Number=SeqID_60356
ENAKISRIQATEHSSGLVGNESRSCNDTSTSPCASSGQXEESYLHDEPLSPSRALRAAMLRSRFAG

SEQ ID NO: 126331 - protein, 112 aa, Setaria italica
  misc_feature (36)..(36): Xaa can be any naturally occurring amino acid
  Transcript Sequence Number=SeqID_60357
RGTKLSRKDYKQERQLLDHGKNIDSVKLQLEKREAXKKRQQEEKARIEAQVKAAEAAAQRKLEEEIRMKREQEREAARLALRMMKKTVDIDNSDFLKELENFSKTCQSNSPW

SEQ ID NO: 126332 - protein, 95 aa, Setaria italica
  misc_feature (75)..(75): Xaa can be any naturally occurring amino acid
  Transcript Sequence Number=SeqID_60358
  Subcellular localization annotation: CTP_CleavageSite=27; ConfidenceScore=5.02e-01
TDAISSKVKIKFSVRSSEQTSSKDIPVQAPGSKEGSLNHSLPTGYREASLNRSLPSTKENAKISRIQATEHSSGXSGNESRSCNDTSTSALCFLG

SEQ ID NO: 126333 - protein, 82 aa, Setaria italica
  misc_feature (35)..(35): Xaa can be any naturally occurring amino acid
  Transcript Sequence Number=SeqID_60359
  Subcellular localization annotation: CTP_CleavageSite=50; ConfidenceScore=5.26e-01
NIPVQAPGSKEGSLNHSLPTGYREASLNRSLPSTXGNESRSCNDTSTSPCASSGQGEESYLHDEPLSPSRALRAAMLRSRFA

SEQ ID NO: 126334 - protein, 122 aa, Setaria italica
  misc_feature (42)..(42): Xaa can be any naturally occurring amino acid
  Transcript Sequence Number=SeqID_60360
  Gene Ontology: Mol. function=ATPase activity, coupled to transmembrane movement of substances; Cellular component=integral to membrane; Biological process=transport
  Homolog annotation: Hit_ID=Q8RVT7; Match level="QueryCoverage=92%, HitCoverage=8%, E-value=5e-35, Identity=62%"; Hit description =Multidrug resistance protein 1 homolog
HPTPRGDNLAILVQCIVTVIAGFSIAFASDWKLTLIVICVIXVVGSQNYIQVKFLKGFSEDAKVVSEDASQVVTEAIGSIRTVASFCAEKRVITSYTQKCEASMKQGIRSGTVGGLWFLVFF

SEQ ID NO: 126335 - protein, 83 aa, Setaria italica
  misc_feature (27)..(27): Xaa can be any naturally occurring amino acid
  Transcript Sequence Number=SeqID_60361
  Gene Ontology: Mol. function=ATPase activity, coupled to transmembrane movement of substances; Cellular component=integral to membrane; Biological process=transport
  Homolog annotation: Hit_ID=Q8RVT7; Match level="QueryCoverage=96%, HitCoverage=58%, E-value=3e-20, Identity=55%"; Hit description =Multidrug resistance protein 1 homolog
FVFCLERFYDPDSGTISLDGAELKKLXLSWLRDQMGLVSQEPVLFNDTIHANIAYGKQGEVNEEEIIAAAKAANAHEFISRRR

SEQ ID NO: 126336 - protein, 78 aa, Setaria italica
  Transcript Sequence Number=SeqID_60362
  Homolog annotation: Hit_ID=B6SYE1; Match level="QueryCoverage=100%, HitCoverage=22%, E-value=6e-17, Identity=45%"; Hit description=Lipid binding protein
ISATSPPSVRISVGRIDATVDLDVTVNVLDFGKIVPVACMSVTVLRILLKNLFVPYVNSYLEQGFQLPIIKGFSVRDA

SEQ ID NO: 126337 - protein, 47 aa, Setaria italica
  misc_feature (38)..(38): Xaa can be any naturally occurring amino acid
  Transcript Sequence Number=SeqID_60363
TLKLEQSWQTPHCSSSGFQLPIIKGFSVRDAYILTSYXKMIVSCDVA

SEQ ID NO: 126338 - protein, 40 aa, Setaria italica
  Transcript Sequence Number=SeqID_60364
RVGIASSCSLLENLMSFPMLCVLCALCCQDERLITRKFTN

SEQ ID NO: 126339 - protein, 64 aa, Setaria italica
  Transcript Sequence Number=SeqID_60365
GKTAEQHGTFDEAQDEETARVGQELEEAQEGGPEPTWRLHWRQLPRPPPSQTRGQDSILPPKRL

SEQ ID NO: 126340 - protein, 52 aa, Setaria italica
  Transcript Sequence Number=SeqID_60366
  Gene Ontology: Mol. function=oligosaccharyl transferase activity; Cellular component=membrane; Biological process=protein amino acid glycosylation
LQDPSCRAVCFAVVAVLVALVASSPTKGWSGRSLSLLDPTYASKYIPIIASV

SEQ ID NO: 126341 - protein, 129 aa, Setaria italica
  misc_feature (21)..(21): Xaa can be any naturally occurring amino acid
  Transcript Sequence Number=SeqID_60367
  Gene Ontology: Mol. function=oligosaccharyl transferase activity; Cellular component=membrane; Biological process=protein amino acid glycosylation
  Homolog annotation: Hit_ID=Q6XL70; Match level="QueryCoverage=100%, HitCoverage=55%, E-value=1e-55, Identity=84%"; Hit description =Putative oligosaccharyl transferase STT3 protein (Fragment)
AAEAYSAPSIVLTSRSRDGVXHVFDDFREAYAWLSHNTDVDDKVASWWDYGYQTTAMANRTVIVDNNTWNNTHIATVGTAMSSPEKAAWEIFNSLDVKYVLVVFGGLVGYPSDDINKFLWMVRIGGGVF

SEQ ID NO: 126342 - protein, 68 aa, Setaria italica
  Transcript Sequence Number=SeqID_60368
  Gene Ontology: Mol. function=oligosaccharyl transferase activity; Cellular component=membrane; Biological process=protein amino acid glycosylation
  Homolog annotation: Hit_ID=Q6XL70; Match level="QueryCoverage=55%, HitCoverage=16%, E-value=5e-14, Identity=100%"; Hit description =Putative oligosaccharyl transferase STT3 protein (Fragment)
LSPCVPCLPPVACLSNRTVIVDNNTWNNTHIATVGTAMSSPEKAAWEIFNSLDVKYVLVVFGGLVGYP

SEQ ID NO: 126343 - protein, 65 aa, Setaria italica
  Transcript Sequence Number=SeqID_60369
  Gene Ontology: Mol. function=oligosaccharyl transferase activity; Cellular component=membrane; Biological process=protein amino acid glycosylation
KEAKGTGAGLMAAAILAMVPSYISRSVAGSYDNEAVAIFALIFTFYLYVKVMVLEMCFPFCFLLT

SEQ ID NO: 126344 - protein, 74 aa, Setaria italica
  Transcript Sequence Number=SeqID_60370
  Gene Ontology: Mol. function=oligosaccharyl transferase activity; Cellular component=membrane; Biological process=protein amino acid glycosylation
  Homolog annotation: Hit_ID=Q54NM9; Match level="QueryCoverage=95%, HitCoverage=9%, E-value=8e-20, Identity=63%"; Hit description =Dolichyl-diphosphooligosaccharide--protein glycosyltransferase subunit STT3
LVRSLSLLDPTYASKYIPIIASVSEHQPPTWPSYFMDINVLAFLIPAGIISCFLPLSDASSFMVLYLVTAVYFL

SEQ ID NO: 126345 - protein, 49 aa, Setaria italica
  Transcript Sequence Number=SeqID_60371
RRYSQVPSYISRSVAGSYDNEIILRDGQYRVDAQATPTMLNCLHVQALL

SEQ ID NO: 126346 - protein, 42 aa, Setaria italica
  Transcript Sequence Number=SeqID_60372
RQVGTAMSSPEKAAWEIFNSLDVKYVLVVFGGLVGYPSDDIN

SEQ ID NO: 126347 - protein, 106 aa, Setaria italica
  Transcript Sequence Number=SeqID_60373
LTRGLRSNFAWQIGLLESTVLVKSSFVEKILGTLASFSHSLSVVDLLLQLCSPHMARSCFCGSTLLDSIAGTATADASAVQGSQRGTAAGEESEIEMRRHGGSGGE

SEQ ID NO: 126348 - protein, 65 aa, Setaria italica
  misc_feature (26)..(26): Xaa can be any naturally occurring amino acid
  Transcript Sequence Number=SeqID_60374
MRSSLVPHAGTVVMLIAEYFKKAKLXPALRRKLYTIVQLLLSSMGVGMAVQLFQVVVSNYFLSDL

SEQ ID NO: 126349 - protein, 61 aa, Setaria italica
  Transcript Sequence Number=SeqID_60375
LVQHLLRTPHKANAIQVPSSPPALRANDNLSMMHSKFICCKLYISESLNAMAIDAIELVVL

SEQ ID NO: 126350 - protein, 74 aa, Setaria italica
  Transcript Sequence Number=SeqID_60376
  Gene Ontology: Mol. function=transferase activity; Biological process= metabolic process
  Homolog annotation: Hit_ID=B6UFR4; Match level="QueryCoverage=62%, HitCoverage=13%, E-value=9e-14, Identity=80%"; Hit description =Glutamate formiminotransferase
  Pfam annotation: Domain name=FTCD_N; Domain location=1-72; Score= -94.7; E_value=0.00047; Accession=PF07837.4; Description =Formiminotransferase domain, N-terminal
SAINLELHSGAHPRMGVNDDLSFHPLGQATMEDAASLAKQVASDIGNGFQGMLNVIGNNKNQPHKYLDPSAQFC

SEQ ID NO: 126351 - protein, 72 aa, Setaria italica
  Transcript Sequence Number=SeqID_60377
CMKINEDIPVVIPPTVRHLSVSTDYLPQLKSKYRLGRLRTLLVLGSSSLSSSHFPGGSVMGKASTCEVDLIT

SEQ ID NO: 126352 - protein, 115 aa, Setaria italica
  misc_feature (35)..(35): Xaa can be any naturally occurring amino acid
  Transcript Sequence Number=SeqID_60378
  Gene Ontology: Mol. function=nucleic acid binding; Cellular component= intracellular; Biological process=RNA processing
  Homolog annotation: Hit_ID=B9RE60; Match level="QueryCoverage=46%, HitCoverage=6%, E-value=2e-09, Identity=55%"; Hit description=RNA binding protein, putative
EGITEVESQGTANDPDIELSSMQRPVDLYKMKFLXNQPVDPLKTSEGANMALNRLVAEDFLESLGKELGLEVPPERPNVLSRPETLAAAGASGSPQYERITTALAEVKESQSSFG

SEQ ID NO: 126353 - protein, 79 aa, Setaria italica
  Transcript Sequence Number=SeqID_60379
RIMKIIHEYMTIQMRDDTGKSYGFANHGSLLNTGGDRKKKLTLNVHITTHHRNIKLYCLCQFLHLSSSVTTLSDVQTHR

SEQ ID NO: 126354 - protein, 71 aa, Setaria italica
  misc_feature (20)..(20): Xaa can be any naturally occurring amino acid
  Transcript Sequence Number=SeqID_60380
  Gene Ontology: Cellular component=endoplasmic reticulum
  Homolog annotation: Hit_ID=B9S1R9; Match level="QueryCoverage=100%, HitCoverage=12%, E-value=1e-23, Identity=67%"; Hit description =Reticulon3-A3, putative
QLKQIRTALAIASLLKRTLXDRMWFGHPGVMEGTMTRQPFLCPMDHVFEVHVMLKDFPKEEFGPHIDFREY

SEQ ID NO: 126355 - protein, 117 aa, Setaria italica
  misc_feature (87)..(87): Xaa can be any naturally occurring amino acid
  Transcript Sequence Number=SeqID_60381
QLVWLIDLFSPLNFKVKKDFSSDVGSAMEAIHSLSASESRYATADLTQLFKIACQEGKMAESQGRLLRVVLIYCRSSTKPHHQWPVXKPNNFTLDIIYLHDKPTADNCPQKVYDALV

SEQ ID NO: 126356 - protein, 59 aa, Setaria italica
  Transcript Sequence Number=SeqID_60382
YVTISSPSTPPPLYCSLPPLDPLQYSSNNRKEAAKRTEEEKRIKFLCEIGVFPNLPWGF

SEQ ID NO: 126357 - protein, 54 aa, Setaria italica
  Transcript Sequence Number=SeqID_60383
LCCCCFSGRTRTIPFDYIAFHQFGPLRTANNEIDIKALPQPLDQAIPCLFTGNI

SEQ ID NO: 126358 - protein, 47 aa, Setaria italica
  Transcript Sequence Number=SeqID_60384
KEEGEFLQKLKRLDAYPKVNEDFYKRTLSGGVVTLVAAVVMLLLFIS

SEQ ID NO: 126359 - protein, 44 aa, Setaria italica
  Transcript Sequence Number=SeqID_60385
AYPKVNEDFYKRTLSGGVVTLVAAVVMLLLFISETRSYFYPPLT

SEQ ID NO: 126360 - protein, 62 aa, Setaria italica
  misc_feature (14)..(14): Xaa can be any naturally occurring amino acid
  Transcript Sequence Number=SeqID_60386
  Gene Ontology: Cellular component=plasma membrane
  Homolog annotation: Hit_ID=Q10M68; Match level="QueryCoverage=100%, HitCoverage=15%, E-value=3e-16, Identity=64%"; Hit description =Serologically defined breast cancer antigen NY-BR-84, putative, expressed
LVVDTSRGERLRVXNFDVTFPSIPCTLLSVDTTDISGEQHHDIRHDIEEKKIRFTGNVMKQK

SEQ ID NO: 126361 - protein, 80 aa, Setaria italica
  Transcript Sequence Number=SeqID_60387
  Pfam annotation: Domain name=ABA_WDS; Domain location=1-76; Score =127.6; E_value=4e-35; Accession=PF02496.8; Description=ABAWDS induced protein
RGEKHHKHLEQLGGLGAIAAGAYAIHEKHKAKKDPENAHGHRVKEEAAAVAALGAAGFAFHEHHQKKQASRRLYEFIYSS

SEQ ID NO: 126362 - protein, 123 aa, Setaria italica
  misc_feature (12)..(12): Xaa can be any naturally occurring amino acid
  Transcript Sequence Number=SeqID_60388
  Gene Ontology: Mol. function=ATP-dependent helicase activity
  Homolog annotation: Hit_ID=Q6K7R9; Match level="QueryCoverage=89%, HitCoverage=13%, E-value=5e-53, Identity=96%"; Hit description=DEAD -box ATP-dependent RNA helicase 48
  Pfam annotation: Domain name=DEAD; Domain location=1-84; Score=-12.1; E_value=0.00032; Accession=PF00270.21; Description=DEADDEAH box helicase
QKRLESDPCQIXLVATPGRLLDHIENKSSFSVRLMGLKLLVLDEADHLLDLGFRKDIEKIADSLPRQRQTLLFSATIPKEVRRVSQLVLKRDHVFVDTVGLGAVETPTKVSYFLFNIRLSLPS

SEQ ID NO: 126363 - protein, 136 aa, Setaria italica
  misc_feature (14)..(14): Xaa can be any naturally occurring amino acid
  misc_feature (58)..(58): Xaa can be any naturally occurring amino acid
  Transcript Sequence Number=SeqID_60389
  Gene Ontology: Mol. function=ATP-dependent helicase activity
  Homolog annotation: Hit_ID=Q6K7R9; Match level="QueryCoverage=82%, HitCoverage=17%, E-value=3e-47, Identity=66%"; Hit description=DEAD -box ATP-dependent RNA helicase 48
  Pfam annotation: Domain name=Helicase_C; Domain location=27-96; Score= 4.2; E_value=0.02; Accession=PF00271.23; Description=Helicase conserved C-terminal domain
VQQSCLVVPHELHXHMVHHLLREHIDREVDYKVIVFCTTAMVTEFMYIMLRDLKLNVXDVSTRWVNYPDVTLVIQVGAPPDREHYIHRLGRTGREGKSGEGIILLAPWEEYFMNEIGDLPIEKYPAPDIDQEMKQK

SEQ ID NO: 126364 - protein, 101 aa, Setaria italica
  Transcript Sequence Number=SeqID_60390
  Gene Ontology: Mol. function=protein binding
  Homolog annotation: Hit_ID=B9SFP2; Match level="QueryCoverage=46%, HitCoverage=9%, E-value=7e-17, Identity=76%"; Hit description =Speckle-type POZ protein, putative
YPQIDLPRTPNPHAAASESGAPRPDPSDPCRIAAARGGTLRLPFLGPSETASTSVTKTVNGSHHFKIDGYSLSKGIGVGKYIASESFSVGGFDWAIYFYPD

SEQ ID NO: 126365 - protein, 54 aa, Setaria italica
  Transcript Sequence Number=SeqID_60391
CINNWLYITLFSGLGTFAACYIQFLSLVLMNAAICQACCMHHSFHEHISLIIIC

SEQ ID NO: 126366 - protein, 70 aa, Setaria italica
  misc_feature (19)..(19): Xaa can be any naturally occurring amino acid
  Transcript Sequence Number=SeqID_60392
  Gene Ontology: Mol. function=protein binding
  Homolog annotation: Hit_ID=B9RSS8; Match level="QueryCoverage=100%, HitCoverage=16%, E-value=1e-19, Identity=67%"; Hit description =Speckle-type POZ protein, putative
LKFVALPENLKAVMQTDGXFDYLQQSCPSLLTELLEYVAKVGEHAVTPCLYSTEVLDGGDANGRRVKPRI

SEQ ID NO: 126367 - protein, 70 aa, Setaria italica
  misc_feature (67)..(67): Xaa can be any naturally occurring amino acid
  Transcript Sequence Number=SeqID_60393
  Subcellular localization annotation: CTP_CleavageSite=48; ConfidenceScore=5.16e-01
LPGSASPPTRRARHPPGSSRPVRPTGRHSPLGSMEDSNLRGLVGEEIVMETGKAAGIGLAAGSVWGXTYF

SEQ ID NO: 126368 - protein, 64 aa, Setaria italica
  Transcript Sequence Number=SeqID_60394
  Gene Ontology: Mol. function=mismatched DNA binding; Biological process=mismatch repair
  Homolog annotation: Hit_ID=Q69MM0; Match level="QueryCoverage=100%, HitCoverage=4%, E-value=5e-16, Identity=71%"; Hit description=DNA mismatch repair protein-like
MQTIKRLPKSVHSSLRSSIVLSDLPRVVEELIYNSIDANASKIDIAINIRACYVKVEDDGCGIT

SEQ ID NO: 126369 - protein, 62 aa, Setaria italica
  Transcript Sequence Number=SeqID_60395
  Gene Ontology: Mol. function=transferase activity, transferring glycosyl groups; Biological process=metabolic process
VLWGTSACGFVCTLRLRQLRQRGYTPLKGPCTCDTVIDRSVAVESILLDDCLHDRCMHMNAF

SEQ ID NO: 126370 - protein, 82 aa, Setaria italica
  Transcript Sequence Number=SeqID_60396
TYAYWLLHIRIPHARRLSNHHAEVKGRGSRQSLRSQAFPFPTLTLLQEEIVVNGNEVSVDMYSTSRCSSTARAVEPYVNKNS

SEQ ID NO: 126371 - protein, 50 aa, Setaria italica
  Transcript Sequence Number=SeqID_60397
CPAVLQVLTVLHFIPCQNLAFIGALLFFLGMKNSIPRRRSKGRTAKTKTN

SEQ ID NO: 126372 - protein, 57 aa, Setaria italica
  Transcript Sequence Number=SeqID_60398
MQFIYLAFITPIVYDFYNYEMESAQFVQLFFKFSQVCGLLPCCLTYKRLISNSHSSC

SEQ ID NO: 126373 - protein, 85 aa, Setaria italica
  Transcript Sequence Number=SeqID_60399
  Subcellular localization annotation: CTP_CleavageSite=59; ConfidenceScore=5.62e-01
VACLRTTCSSSVLLPPPSLRFRGSRTRTDLAAARLNRRLNPASPFLRLPSSICERAAARCKLRDAGCKVRRERSSSCWFHSWEPT

SEQ ID NO: 126374 - protein, 68 aa, Setaria italica
  Transcript Sequence Number=SeqID_60400
  Gene Ontology: Mol. function=UDP-glucose 4-epimerase activity; Cellular component=integral to membrane; Biological process =galactose metabolic process
  Homolog annotation: Hit_ID=Q2LC82; Match level="QueryCoverage=75%, HitCoverage=15%, E-value=2e-22, Identity=98%"; Hit description=UDP-D- xylose epimerase 2 (Fragment)
EPLRYYHNITSNTLTVLEAMAAHNVNTLIYSSTCATYGEPDTMPIVETTPQYLKIMTAMFDFFDFVKS

SEQ ID NO: 126375 - protein, 131 aa, Setaria italica
  misc_feature (23)..(23): Xaa can be any naturally occurring amino acid
  misc_feature (36)..(36): Xaa can be any naturally occurring amino acid
  Transcript Sequence Number=SeqID_60401
  Homolog annotation: Hit_ID=Q2R069; Match level="QueryCoverage=98%, HitCoverage=20%, E-value=2e-34, Identity=62%"; Hit description=Kelch motif family protein, expressed
SMVPFYHRDKIALIAFGGNKKEXPCNKVEILVVLQXNEHSFSWRSAPEVDRVLYEYSPSNKELVDHLNKCAPLYSNSSVARHSLTSVIEHPPRSEPLSESLLKQPDLGTSPHGHLDQVEECSLAQKTRQEN

SEQ ID NO: 126376 - protein, 97 aa, Setaria italica
  Transcript Sequence Number=SeqID_60402
SKTRQKQIDDDRYDDGDDSSSCQESTPKGHRSTRTGAGIQNDMAQVGTMVTGGSNVRRIARCSSDVSQSHLYNTKIADLIRRNAMLEDQLVAALASK

SEQ ID NO: 126377 - protein, 29 aa, Setaria italica
  Transcript Sequence Number=SeqID_60403
IWDPAPPKVRPSPNGHSAKLPACKGHCLV

SEQ ID NO: 126378 - protein, 81 aa, Setaria italica
  Transcript Sequence Number=SeqID_60404
  Gene Ontology: Mol. function=acyltransferase activity; Biological process=metabolic process
  Homolog annotation: Hit_ID=B6TJY4; Match level="QueryCoverage=71%, HitCoverage=12%, E-value=7e-19, Identity=73%"; Hit description =Dihydrolipoyllysine-residue acetyltransferase component of pyruvatedehydrogenase complex
  Pfam annotation: Domain name=Biotin_lipoyl; Domain location=7-64; Score=20.6; E_value=2.2e-05; Accession=PF00364.14; Description =Biotin-requiring enzyme
PCNLCLTGVNFAELFILQGDQVDEFQPLCEVQSDKATIEITSRFKGKVHQIHFGPGDIVKIIYFHPLISHLKKSLQFLQVK

SEQ ID NO: 126379 - protein, 81 aa, Setaria italica
  misc_feature (20)..(20): Xaa can be any naturally occurring amino acid
  Transcript Sequence Number=SeqID_60405
  Gene Ontology: Mol. function=acyltransferase activity; Cellular component=nucleus; Biological process=metabolic process
  Homolog annotation: Hit_ID=B6TJY4; Match level="QueryCoverage=76%, HitCoverage=11%, E-value=2e-27, Identity=91%"; Hit description =Dihydrolipoyllysine-residue acetyltransferase component of pyruvatedehydrogenase complex
  Pfam annotation: Domain name=Biotin_lipoyl; Domain location=9-79; Score=45.1; E_value=2.8e-10; Accession=PF00364.14; Description =Biotin-requiring enzyme
AAAEAAELVEVPLAQTGEGXIAECELLRWFVNEGDQVDEFQPLCEVQSDKATIEITSRFKGKVHQIHFGPGDIVKIIYFHP

SEQ ID NO: 126380 - protein, 78 aa, Setaria italica
  Transcript Sequence Number=SeqID_60406
  Gene Ontology: Mol. function=acyltransferase activity; Cellular component=mitochondrial alpha-ketoglutarate dehydrogenase complex; Biological process=metabolic process
  Homolog annotation: Hit_ID=B6TJY4; Match level="QueryCoverage=80%, HitCoverage=12%, E-value=3e-28, Identity=98%"; Hit description =Dihydrolipoyllysine-residue acetyltransferase component of pyruvatedehydrogenase complex
  Pfam annotation: Domain name=2-oxoacid_dh; Domain location=1-78; Score=-148.7; E_value=0.0095; Accession=PF00198.15; Description=2 -oxoacid dehydrogenases acyltransferase (catalytic domain)
NRLSAADIEDGTITLSNIGAIGGKFGSPLLNLPEVAIIALGRIQKLPRFDDDENVYPSSIINVCLLQYVFHQTSKPAL

SEQ ID NO: 126381 - protein, 57 aa, Setaria italica
  Transcript Sequence Number=SeqID_60407
HQVSYWIIGICSKSSSGSSTRPFHSLPEDKLKWRHSGIATSHRKTIANCESLALYTN

SEQ ID NO: 126382 - protein, 99 aa, Setaria italica
  Transcript Sequence Number=SeqID_60408
  Gene Ontology: Mol. function=2 iron, 2 sulfur cluster binding; Biological process=oxidation reduction
  Homolog annotation: Hit_ID=O23888; Match level="QueryCoverage=98%, HitCoverage=7%, E-value=2e-44, Identity=88%"; Hit description =Aldehyde oxidase-2
TIPKQFNVELINSARDKKRVLSSKASGEPPLLLAASVHCAMREAIRATRKEFSVCTGPENSAVTFQMDVPATMPVVKELYGLDVVERYLQSLSAGPSTA

SEQ ID NO: 126383 - protein, 124 aa, Setaria italica
  misc_feature (14)..(14): Xaa can be any naturally occurring amino acid
  misc_feature (39)..(39): Xaa can be any naturally occurring amino acid
  misc_feature (91)..(91): Xaa can be any naturally occurring amino acid
  Transcript Sequence Number=SeqID_60409
  Gene Ontology: Mol. function=2 iron, 2 sulfur cluster binding; Biological process=oxidation reduction
  Homolog annotation: Hit_ID=O23888; Match level="QueryCoverage=95%, HitCoverage=8%, E-value=2e-56, Identity=86%"; Hit description =Aldehyde oxidase-2
ISLRSKAQFVQGVXLFTNEDYATNSDGLVIHDSTWTYRXPTVDTIPKQFNVEMFNSARDKKRVLSSKASGEPPLVLAASVHCAMREAIRAXARKEFSVCTGPANSATTFQMDVPATMPVVKELC

SEQ ID NO: 126384 - protein, 79 aa, Setaria italica
  Transcript Sequence Number=SeqID_60410
  Gene Ontology: Mol. function=2 iron, 2 sulfur cluster binding; Biological process=oxidation reduction
  Homolog annotation: Hit_ID=O23887; Match level="QueryCoverage=93%, HitCoverage=5%, E-value=1e-36, Identity=94%"; Hit description =Aldehyde oxidase
YEVNLRPTPGKVSIMNDGSIAVEVGGVEIGQGLWTKVKQMTAYGLGQLCQDGGECLLDKVRVIQADTLSMIQGGFYLVG

SEQ ID NO: 126385 - protein, 113 aa, Setaria italica
  misc_feature (56)..(56): Xaa can be any naturally occurring amino acid
  Transcript Sequence Number=SeqID_60411
  Gene Ontology: Mol. function=substrate-specific transmembrane transporter activity; Cellular component=integral to membrane; Biological process=transmembrane transport
  Homolog annotation: Hit_ID=B6U4F9; Match level="QueryCoverage=91%, HitCoverage=20%, E-value=4e-40, Identity=77%"; Hit description=Sugar transport protein 5
  Subcellular localization annotation: CTP_CleavageSite=72; ConfidenceScore=5.07e-01
MAKPDARMPPMFMCQVTMASIIGSHLGNGSKMPKGYAVAVLIATFVFSASFSWSWXALYWTVPGEIYPVEVRSAGQGAAVALNLGLNFLQAQFFLAMLCCFRYGAFLFYASWL

SEQ ID NO: 126386 - protein, 56 aa, Setaria italica
  Transcript Sequence Number=SeqID_60412
SELDLSYGMRYQDVKIPEAYERLILDTYVLLHPSAKFAFSAFSSLQVSEENFLPEP

SEQ ID NO: 126387 - protein, 71 aa, Setaria italica
  Transcript Sequence Number=SeqID_60413
  Gene Ontology: Mol. function=glucose-6-phosphate dehydrogenase activity; Cellular component=cytoplasm; Biological process =carbohydrate metabolic process
  Homolog annotation: Hit_ID=C0PFX0; Match level="QueryCoverage=83%, HitCoverage=11%, E-value=6e-25, Identity=91%"; Hit description =Glucose-6-phosphate 1-dehydrogenase
  Pfam annotation: Domain name=G6PD_N; Domain location=1-65; Score= -27.5; E_value=5.8e-07; Accession=PF00479.14; Description=Glucose-6 -phosphate dehydrogenase, NAD bindi
SFTSLENEWNSLPSSHAGWTRVIVEKPFGKDLDSAEELSAELGKLFEEEQLYRIDHYLGKELVQNLLVLRF

SEQ ID NO: 126388 - protein, 40 aa, Setaria italica
  Transcript Sequence Number=SeqID_60414
  Gene Ontology: Mol. function=glucose-6-phosphate dehydrogenase activity; Cellular component=cytoplasm; Biological process =carbohydrate metabolic process
  Homolog annotation: Hit_ID=Q9XJ53; Match level="QueryCoverage=95%, HitCoverage=15%, E-value=5e-14, Identity=100%"; Hit description =Glucose-6-phosphate 1-dehydrogenase (Fragment)
AMYMKLTVKKPGLEMATEQSELDLSYGMRYQDVKIPEALL

SEQ ID NO: 126389 - protein, 75 aa, Setaria italica
  Transcript Sequence Number=SeqID_60415
TSIMTQCGLGKGQEDDTRICTHKLCMLEHGLRELIFDLFLRICRRTACHCIKIGEMPNSHTIHTHPDLPVGFFKL

SEQ ID NO: 126390 - protein, 72 aa, Setaria italica
  Transcript Sequence Number=SeqID_60416
  Gene Ontology: Mol. function=nucleoside-triphosphatase activity; Cellular component=membrane; Biological process=transport
  Homolog annotation: Hit_ID=Q8GU83; Match level="QueryCoverage=77%, HitCoverage=3%, E-value=5e-21, Identity=89%"; Hit description=PDR -like ABC transporter
VAKFTSFNCGCFVSCLKTCLQSGEMIVGPSKALFMDEISTGLDSSTTFQIVSCLQQMAHISESTILVSLLQP

SEQ ID NO: 126391 - protein, 79 aa, Setaria italica
  Transcript Sequence Number=SeqID_60417
  Gene Ontology: Mol. function=heat shock protein binding
  Homolog annotation: Hit_ID=B6T323; Match level="QueryCoverage=84%, HitCoverage=50%, E-value=3e-28, Identity=89%"; Hit description =Mitochondrial import inner membrane translocase subunit TIM14
  Subcellular localization annotation: CTP_CleavageSite=33; ConfidenceScore=5.43e-01
HQQATPLIAGLSVAAAAMSGRYMIRTWQAFRTRAAMPRVRRFYPGGFQGEMNRREAALILGVRERATIGTKYSKVGLLL

SEQ ID NO: 126392 - protein, 53 aa, Setaria italica
  Transcript Sequence Number=SeqID_60418
  Gene Ontology: Mol. function=DNA-directed RNA polymerase activity; Biological process=transcription
  Homolog annotation: Hit_ID=C0JAC0; Match level="QueryCoverage=86%, HitCoverage=2%, E-value=3e-15, Identity=86%"; Hit description=DNA -directed RNA polymerase
PQHEIFHLVAPNRFRPSTSSSLGIMEHPQNVLLSKVQEANLALQHNSASSNHM

SEQ ID NO: 126393 - protein, 85 aa, Setaria italica
  Transcript Sequence Number=SeqID_60419
  Gene Ontology: Mol. function=serine-type carboxypeptidase activity; Biological process=proteolysis
  Homolog annotation: Hit_ID=B6T4S1; Match level="QueryCoverage=96%, HitCoverage=18%, E-value=8e-19, Identity=58%"; Hit description=SCPL33
NSHGTMAARRLHPRSSSSKRQQLTVAILLLFFQTLCCNAEAVGYSEQEGDRVRLLPGQPANPPVSQFAGYVTVNERNGRALFYWF

SEQ ID NO: 126394 - protein, 83 aa, Setaria italica
  Transcript Sequence Number=SeqID_60420
  Gene Ontology: Mol. function=serine-type carboxypeptidase activity; Biological process=proteolysis
  Homolog annotation: Hit_ID=B6T4S1; Match level="QueryCoverage=56%, HitCoverage=9%, E-value=2e-18, Identity=91%"; Hit description=SCPL33
MDSSPAANQRRRPLLTILVALSLLPVAVLAATRGEQEGDRVRFLPGQPASPPVSQFAGYVTVNERNGRALFYWFFEAQTSPEK

SEQ ID NO: 126395 - protein, 96 aa, Setaria italica
  misc_feature (79)..(79): Xaa can be any naturally occurring amino acid
  Transcript Sequence Number=SeqID_60421
  Gene Ontology: Mol. function=4 iron, 4 sulfur cluster binding; Cellular component=nucleus; Biological process=base-excision repair
  Homolog annotation: Hit_ID=B3W6G6; Match level="QueryCoverage=98%, HitCoverage=6%, E-value=1e-21, Identity=44%"; Hit description =Putative transcriptional activator DEMETER
EEFEERVPEDLCPYLLVIISCPNDYTVEGTVLIPCRTANRGKFPLNGTYFQANEVFADHSSSRHPITIPRECIGMLDRXIVYFGSSIHSIARGQTR

SEQ ID NO: 126396 - protein, 47 aa, Setaria italica
  misc_feature (20)..(20): Xaa can be any naturally occurring amino acid
  Transcript Sequence Number=SeqID_60422
  Gene Ontology: Mol. function=nucleic acid binding; Cellular component= nucleus; Biological process=mRNA processing
  Homolog annotation: Hit_ID=B9SN77; Match level="QueryCoverage=100%, HitCoverage=14%, E-value=2e-16, Identity=82%"; Hit description=U2 snrnp auxiliary factor, small subunit, putative
  Pfam annotation: Domain name=zf-CCCH; Domain location=13-36; Score =14.6; E_value=0.018; Accession=PF00642.16; Description=Zinc finger C- x8-C-x5-C-x3-H type (and similar)
MAEHLASIFGTEKDRVNCPXYFKIGACRHGDRCLPPAQQPSISPTLL

SEQ ID NO: 126397 - protein, 49 aa, Setaria italica
  Transcript Sequence Number=SeqID_60423
  Gene Ontology: Mol. function=small conjugating protein ligase activity; Cellular component=integral to membrane; Biological process=regulation of protein metabolic process
  Homolog annotation: Hit_ID=B6TT84; Match level="QueryCoverage=95%, HitCoverage=15%, E-value=2e-18, Identity=93%"; Hit description =Ubiquitinating enzyme
QIATAKYNRSNPAVKRILQEVKEMQSNPSPDFMALPLEEDIFEWQFAIL

SEQ ID NO: 126398 - protein, 61 aa, Setaria italica
  Transcript Sequence Number=SeqID_60424
FTLSADSFGEHADKADEGGSVSVSSDLTEPQSESGVAENTAEPPVAEVTNPHLPEASHREN

SEQ ID NO: 126399 - protein, 52 aa, Setaria italica
  Transcript Sequence Number=SeqID_60425
  Gene Ontology: Mol. function=phosphogluconate dehydrogenase (decarboxylating) activity
  Homolog annotation: Hit_ID=B9SWV4; Match level="QueryCoverage=98%, HitCoverage=23%, E-value=6e-17, Identity=80%"; Hit description =Fructose-bisphosphate aldolase, putative
MRFTDVAKAEEFIDETSIDALAVCIGNVHGKYPSSGPNLRLDLLKDLRGEPS

SEQ ID NO: 126400 - protein, 36 aa, Setaria italica
  Transcript Sequence Number=SeqID_60426
RKIRNGESLYIGNMNYHHKPLRNGKWAVTYEVKLDI

SEQ ID NO: 126401 - protein, 50 aa, Setaria italica
  misc_feature (20)..(20): Xaa can be any naturally occurring amino acid
  misc_feature (31)..(31): Xaa can be any naturally occurring amino acid
  Transcript Sequence Number=SeqID_60427
MKLFASEWNVVWFKVLPVDXLRIEFSCEFFXSSDLRDLGPGFIPLRDSFK

SEQ ID NO: 126402 - protein, 119 aa, Setaria italica
  misc_feature (79)..(79): Xaa can be any naturally occurring amino acid
  Transcript Sequence Number=SeqID_60428
  Homolog annotation: Hit_ID=Q5VPH4; Match level="QueryCoverage=72%, HitCoverage=23%, E-value=6e-39, Identity=91%"; Hit description =Putative RNA processing factor 1
  Subcellular localization annotation: CTP_CleavageSite=38; ConfidenceScore=5.06e-01
TLNSSASFPANNSWSSGRHTVSSGSLVLFAGNDADEFNAVLKQHIIPKVLITTCRFNSGRGPAFIEELMQVIPNSHYVXKRGTYELKKIVEYAQNRDFTSLIVVHTNRREPDAYYHGVT

SEQ ID NO: 126403 - protein, 55 aa, Setaria italica
  Transcript Sequence Number=SeqID_60429
PVDSSIRFPSALWLQRKQSEKCYVLREGGLTDLPKVQDPAVLVKLFGDQSGSCSW

SEQ ID NO: 126404 - protein, 94 aa, Setaria italica
  Transcript Sequence Number=SeqID_60430
GLLVILSRLIILFIILSVVVFLFIRRLVLFHYRFVDLHLRIRTNVSINILLRVHACVLLNNLTTPTPSVSIPTKQATTGRIRNQSHDTIIPVEL

SEQ ID NO: 126405 - protein, 88 aa, Setaria italica
  misc_feature (71)..(71): Xaa can be any naturally occurring amino acid
  Transcript Sequence Number=SeqID_60431
VAAWGSGNVDSTGYEAMSVAVAKAVALDMAPVLAMAPVVDTTKLSFRADYRVYSYKCVIGDVSLSRCLKNXLFECVCVTLKACLTLYM

SEQ ID NO: 126406 - protein, 87 aa, Setaria italica
  misc_feature (71)..(71): Xaa can be any naturally occurring amino acid
  Transcript Sequence Number=SeqID_60432
TAAGPRKLGYGPGGGGGGGGSGGGGGYGGSGYGSGSGYGEGGGSGGAAGGYGHGGGSGGGGGEGSGAGGSXGYGSGQGSGYGAGSGG

SEQ ID NO: 126407 - protein, 56 aa, Setaria italica
  misc_feature (10)..(10): Xaa can be any naturally occurring amino acid
  Transcript Sequence Number=SeqID_60433
  Gene Ontology: Mol. function=structural molecule activity; Cellular component=COPI vesicle coat; Biological process=intracellular protein transport
  Homolog annotation: Hit_ID=Q53PC7; Match level="QueryCoverage=87%, HitCoverage=5%, E-value=4e-23, Identity=95%"; Hit description =Coatomer subunit beta-1
RNMWAEFEWXNKVAVNTVIQDEKEFLNHIIKSTNMKCLTPPSALDGECGSEHCYSG

SEQ ID NO: 126408 - protein, 84 aa, Setaria italica
  misc_feature (36)..(36): Xaa can be any naturally occurring amino acid
  Transcript Sequence Number=SeqID_60434
  Gene Ontology: Mol. function=structural molecule activity; Cellular component=COPI vesicle coat; Biological process=intracellular protein transport
  Homolog annotation: Hit_ID=Q53PC7; Match level="QueryCoverage=95%, HitCoverage=8%, E-value=8e-35, Identity=91%"; Hit description =Coatomer subunit beta-1
FTIYLSSTNMKCLTPPSALDGECGFLAANLYAKSVXFGEDALVNISIEKQLDCKLSGYIRIRSKTQGIALSLGDKITLKQKGGS

SEQ ID NO: 126409 - protein, 58 aa, Setaria italica
  Transcript Sequence Number=SeqID_60435
  Gene Ontology: Mol. function=structural molecule activity; Cellular component=COPI vesicle coat; Biological process=intracellular protein transport
  Homolog annotation: Hit_ID=Q53PC7; Match level="QueryCoverage=96%, HitCoverage=5%, E-value=1e-25, Identity=94%"; Hit description =Coatomer subunit beta-1
VGGDYVRKIWLQSCRQSFAKMLAEKQFRETEEMKAKAQISHAQPDDLIDFYHLKSRRG

SEQ ID NO: 126410 - protein, 74 aa, Setaria italica
  misc_feature (65)..(65): Xaa can be any naturally occurring amino acid
  Transcript Sequence Number=SeqID_60436
  Gene Ontology: Mol. function=structural molecule activity; Cellular component=COPI vesicle coat; Biological process=intracellular protein transport
  Homolog annotation: Hit_ID=Q53PC7; Match level="QueryCoverage=98%, HitCoverage=7%, E-value=4e-35, Identity=97%"; Hit description =Coatomer subunit beta-1
LGFSDPVYAEAFVTVHHYDIVLDVTVINRTKETLQNLCLELATMGDLKLVDRPQNYTLAPESSKXIRANIKVSS

SEQ ID NO: 126411 - protein, 68 aa, Setaria italica
  Transcript Sequence Number=SeqID_60437
  Gene Ontology: Mol. function=electron carrier activity; Biological process=oxidation reduction
  Homolog annotation: Hit_ID=B6SYC8; Match level="QueryCoverage=100%, HitCoverage=13%, E-value=2e-21, Identity=80%"; Hit description =Cytochrome P450 CYP71Y10
LDGIISEHLEMMDSAGGAGEAEDLLDVLLKIQRDGSLQIPLDMDVLKAVIFDIFGAGSETSATTLEWA

SEQ ID NO: 126412 - protein, 111 aa, Setaria italica
  misc_feature (53)..(53): Xaa can be any naturally occurring amino acid
  misc_feature (71)..(71): Xaa can be any naturally occurring amino acid
  Transcript Sequence Number=SeqID_60438
  Gene Ontology: Mol. function=ATP-dependent helicase activity; Cellular component=nucleolus
  Homolog annotation: Hit_ID=B6SV06; Match level="QueryCoverage=59%, HitCoverage=10%, E-value=5e-29, Identity=93%"; Hit description =Nucleolar RNA helicase 2
PCRLLFIVVSIVLAHIPVQCPGTDSFYLHSFEFLTKNCYPPLSIQVVHYEIPXNTSELFVHRSGRTARAGXKGSAILIYTYEQTRAVRVIEQDIGCRFTELPKMAVADEAA

SEQ ID NO: 126413 - protein, 140 aa, Setaria italica
  misc_feature (112)..(112): Xaa can be any naturally occurring amino acid
  misc_feature (127)..(127): Xaa can be any naturally occurring amino acid
  Transcript Sequence Number=SeqID_60439
  Gene Ontology: Mol. function=ATP-dependent helicase activity; Cellular component=nucleolus
  Homolog annotation: Hit_ID=B6SV06; Match level="QueryCoverage=92%, HitCoverage=21%, E-value=3e-66, Identity=96%"; Hit description =Nucleolar RNA helicase 2
  Pfam annotation: Domain name=Helicase_C; Domain location=48-125; Score=114.2; E_value=4.4e-31; Accession=PF00271.23; Description =Helicase conserved C-terminal domain
FFFLLLPICPSDNFGKPSILGPLIKEHANGGKCIVFTQTKREADRLAYVMGRSYPCQALHGDISQNQRERTLSGFRDGRFNILVATDVAARGLDIPNVDLVVHYEIPNTSEXLFVHRSGRTARAGKXGSAILIYTYEQTR

SEQ ID NO: 126414 - protein, 54 aa, Setaria italica
  Transcript Sequence Number=SeqID_60440
RISNLGVGRCHSCYILMSFPPYELVKAIGAANFCFSWRKRHQNLGVGRCHSCYI

SEQ ID NO: 126415 - protein, 69 aa, Setaria italica
  Transcript Sequence Number=SeqID_60441
IEEERGNTSGHITTIVIPVLTFIMTAAITFTPTISFPVPPLVLVQCPIVNLERDREGNRGRERDPCAYF

SEQ ID NO: 126416 - protein, 62 aa, Setaria italica
  Transcript Sequence Number=SeqID_60442
HEWHLPTPRFLIFSFFSVCKEYLLITQLLLLVISCNCCCYLFVLITKVEQITAMWRRNWYSI

SEQ ID NO: 126417 - protein, 51 aa, Setaria italica
  Transcript Sequence Number=SeqID_60443
  Gene Ontology: Mol. function=positive transcription elongation factor activity; Cellular component=nucleus; Biological process=regulation of transcription, DNA-dependent
  Homolog annotation: Hit_ID=B6TR90; Match level="QueryCoverage=72%, HitCoverage=28%, E-value=9e-15, Identity=100%"; Hit description =Transcription elongation factor SPT4
  Pfam annotation: Domain name=Spt4; Domain location=8-51; Score=-17.6; E_value=0.00016; Accession=PF06093.5; Description=Transcription initiation protein Spt4
MALLTKIIHLRHSAGRFIPGCYTLAVSEELPEEYQGICQDNNVQYVPPKRV

SEQ ID NO: 126418 - protein, 93 aa, Setaria italica
  Transcript Sequence Number=SeqID_60444
  Homolog annotation: Hit_ID=A1AK91; Match level="QueryCoverage=88%, HitCoverage=43%, E-value=9e-12, Identity=40%"; Hit description=SOUL heme-binding protein
  Pfam annotation: Domain name=SOUL; Domain location=1-93; Score=-13.2; E_value=9.2e-07; Accession=PF04832.4; Description=SOUL heme-binding protein
TRPYQSNDQRTEGIAPRPTDERVVIREVPERKYGVARFSGVAAEKTVREKAEGLRAALEKDGYTVKGPFVLARYNPPFTLPPLRTNEVMIPVE

SEQ ID NO: 126419 - protein, 152 aa, Setaria italica
  misc_feature (141)..(141): Xaa can be any naturally occurring amino acid
  Transcript Sequence Number=SeqID_60445
  Gene Ontology: Mol. function=actin binding; Cellular component =cytoskeleton
  Homolog annotation: Hit_ID=Q5QNA6; Match level="QueryCoverage=86%, HitCoverage=9%, E-value=4e-36, Identity=71%"; Hit description=SCAR -like protein 2
TLQRRTSPKYTDLPMSSERPNADASVNDESTLNPIAEPSGTVFTDESQFENRSENGMNGLSKSSIFSSRQYSEKSSPPLEYMKISFHPMSAFEMSKLNLDFCDGNLHENSDDMMLPTFQLLSESSIPQPGSGSESEDDYFXESYSYSSYDDL

SEQ ID NO: 126420 - protein, 69 aa, Setaria italica
  Transcript Sequence Number=SeqID_60446
  Gene Ontology: Mol. function=actin binding; Cellular component =cytoskeleton
  Homolog annotation: Hit_ID=Q5QNA6; Match level="QueryCoverage=100%, HitCoverage=5%, E-value=1e-20, Identity=65%"; Hit description=SCAR -like protein 2
YSNSEVWDQEDGVGLEEHELYGDSNQIGSSTVPLSSYAGFEQMNLSGVKSTISLADIGDQNGLGTLESH

SEQ ID NO: 126421 - protein, 136 aa, Setaria italica
  misc_feature (133)..(133): Xaa can be any naturally occurring amino acid
  Transcript Sequence Number=SeqID_60447
  Gene Ontology: Mol. function=actin binding; Cellular component =cytoskeleton
  Homolog annotation: Hit_ID=Q5QNA6; Match level="QueryCoverage=100%, HitCoverage=10%, E-value=1e-37, Identity=72%"; Hit description=SCAR -like protein 2
TLQRRTSPKYTDLPMSSERPNADASVNDESTLNPIAEPSGTVFTDESQFENRSENGMNGLSKSSIFSSRQYSEKSSPPLEYMKISFHPMSAFEMSKLNLDFCDGNLHENSDDMMLPTFQLLSESSIPQPGSGXESE

SEQ ID NO: 126422 - protein, 134 aa, Setaria italica
  misc_feature (22)..(22): Xaa can be any naturally occurring amino acid
  misc_feature (38)..(38): Xaa can be any naturally occurring amino acid
  Transcript Sequence Number=SeqID_60448
  Gene Ontology: Mol. function=actin binding; Cellular component =cytoskeleton
  Homolog annotation: Hit_ID=Q5QNA6; Match level="QueryCoverage=85%, HitCoverage=8%, E-value=1e-13, Identity=39%"; Hit description=SCAR -like protein 2
YMDALNTLESETETEAESQTKXQVMPLPSFNAEAPQVXATDDIVSQHPDSSVADFTDTCQDSNISCTSERAVDFPHLSNADSPEISQLEFSEYTSVTTYKESSVVTKIHESSMEVLVEILMKFQSRNCKSIQPY

SEQ ID NO: 126423 - protein, 122 aa, Setaria italica
  misc_feature (14)..(14): Xaa can be any naturally occurring amino acid
  Transcript Sequence Number=SeqID_60449
  Gene Ontology: Mol. function=actin binding; Cellular component =cytoskeleton
  Homolog annotation: Hit_ID=Q5QNA6; Match level="QueryCoverage=94%, HitCoverage=8%, E-value=4e-15, Identity=45%"; Hit description=SCAR -like protein 2
ETETEAESQLKIKXDAITSLMLKAPQVGATDDIVSQHPDSSVADFTDTCQDSNISCTSERAVDFPHLSNADSPEISQLEFSEYTSVTTYKESSVVTKIHESSMEGACGDPYEISEPELQVHT

SEQ ID NO: 126424 - protein, 153 aa, Setaria italica
  misc_feature (88)..(88): Xaa can be any naturally occurring amino acid
  Transcript Sequence Number=SeqID_60450
  Gene Ontology: Mol. function=actin binding; Cellular component =cytoskeleton
  Homolog annotation: Hit_ID=Q5QNA6; Match level="QueryCoverage=88%, HitCoverage=10%, E-value=2e-38, Identity=67%"; Hit description=SCAR -like protein 2
  Subcellular localization annotation: CTP_CleavageSite=16; ConfidenceScore=5.15e-01
VCNSRCPTNTSTTSTGASEVSNSQGEPLKEPLENRFATQGIPTNTSTASTVVPSVKLWTNAGLFGLEPSKPPVFGAQDTPREDTPPGXEVPQPSHSTEFTELHCSKPIESAVVDVPNGNTSITSSFVGKLVGIRPGSTNLNGTGANQSRRTKK

SEQ ID NO: 126425 - protein, 153 aa, Setaria italica
  Transcript Sequence Number=SeqID_60451
  Gene Ontology: Mol. function=actin binding; Cellular component =cytoskeleton
  Homolog annotation: Hit_ID=Q5QNA6; Match level="QueryCoverage=100%, HitCoverage=11%, E-value=2e-27, Identity=52%"; Hit description=SCAR -like protein 2
  Subcellular localization annotation: CTP_CleavageSite=61; ConfidenceScore=5.03e-01
VGKLVGIRPGSTNLNGTGANQSAARIPDQVHSRTDGPSDFSSSSFEHNSMIGKQTSISELLESEESAENCTEMYSTNMRNDMHMVSASSFSSIAQRFLANTLQRRTSPKYTDLPMSSERPNADASVNDESTLNPIAEPSGTVFTDESQFENRS

SEQ ID NO: 126426 - protein, 153 aa, Setaria italica
  misc_feature (127)..(127): Xaa can be any naturally occurring amino acid
  Transcript Sequence Number=SeqID_60452
  Gene Ontology: Mol. function=actin binding; Cellular component =cytoskeleton
  Homolog annotation: Hit_ID=Q5QNA6; Match level="QueryCoverage=90%, HitCoverage=11%, E-value=5e-30, Identity=55%"; Hit description=SCAR -like protein 2
GTQGINPGEKHEELGDCGVSEVSQSWSEPRNEPSENRSATQDVPTNTSTTSTGASEVSNSQGEPLKEPLENRFATQGIPTNTSTASTVVPSVKLWTNAGLFGLEPSKPPVFGAQDTPREDTPPGFVXPQPSHSTEFTELHCSKPIESAVVDVP

SEQ ID NO: 126427 - protein, 120 aa, Setaria italica
  Transcript Sequence Number=SeqID_60453
  Gene Ontology: Mol. function=actin binding; Cellular component =cytoskeleton
  Homolog annotation: Hit_ID=Q5QNA6; Match level="QueryCoverage=70%, HitCoverage=6%, E-value=3e-09, Identity=47%"; Hit description=SCAR -like protein 2
MAPAAKSSPGDIANESWVVSESRSQDYPGEKHEELGDCGVSEVSQSWSEPRNEPSENRSATQDVPTNTSTTSTGASEVSNSQGEPLKEPLENRFATQGIPTNTSTASTVVPSVKLWTNAG

SEQ ID NO: 126428 - protein, 142 aa, Setaria italica
  misc_feature (76)..(76): Xaa can be any naturally occurring amino acid
  misc_feature (117)..(117): Xaa can be any naturally occurring amino acid
  Transcript Sequence Number=SeqID_60454
  Gene Ontology: Mol. function=actin binding; Cellular component =cytoskeleton
  Homolog annotation: Hit_ID=Q5QNA6; Match level="QueryCoverage=73%, HitCoverage=7%, E-value=6e-18, Identity=50%"; Hit description=SCAR -like protein 2
MAPAAKSSPGDIANESWVVSESRSQDYPGEKHEELGDCGVSEVSQSWSEPRNEPSENRSATQDVPTNTSTTSTGAXVKCLNSQGEPLKEPLENRFATQGIPTNTSTASTVVPSVKTXWQNAGLFGLEPSKPPVFGAQDTPRE

SEQ ID NO: 126429 - protein, 127 aa, Setaria italica
  misc_feature (120)..(120): Xaa can be any naturally occurring amino acid
  Transcript Sequence Number=SeqID_60455
  Gene Ontology: Mol. function=actin binding; Cellular component =cytoskeleton
  Homolog annotation: Hit_ID=Q5QNA6; Match level="QueryCoverage=90%, HitCoverage=8%, E-value=1e-22, Identity=66%"; Hit description=SCAR -like protein 2
TSISELLESEESAENCTEMYSTNMRNDMHMVSASSFSSIAQRFLANTLQRRTSPKYTDLPMSSERPNADASVNDESTLNPIAEPSGTVFTDESQFENRSENGMNGLSKSSIFSSRQYSEXSSPPLEY

SEQ ID NO: 126430 - protein, 149 aa, Setaria italica
  Transcript Sequence Number=SeqID_60456
  Gene Ontology: Mol. function=actin binding; Cellular component =cytoskeleton
  Homolog annotation: Hit_ID=Q5QNA6; Match level="QueryCoverage=97%, HitCoverage=11%, E-value=1e-30, Identity=55%"; Hit description=SCAR -like protein 2
GFEVPQPSHSTEFTELHCSKPIESAVVDVPNGNTSITSSFVGKLVGIRPGSTNLNGTGANQSAARIPDQVHSRTDGPSDFSSSSFEHNSMIGKQTSISELLESEESAENCTEMYSTNMRNDMHMVSASSFSSIAQRFLANTLQRRTSPK

SEQ ID NO: 126431 - protein, 145 aa, Setaria italica
  Transcript Sequence Number=SeqID_60457
  Gene Ontology: Mol. function=actin binding; Cellular component =cytoskeleton
  Homolog annotation: Hit_ID=Q5QNA6; Match level="QueryCoverage=100%, HitCoverage=11%, E-value=2e-29, Identity=62%"; Hit description=SCAR -like protein 2
SSSFEHNSMIGKQTSISELLESEESAENCTEMYSTNMRNDMHMVSASSFSSIAQRFLANTLQRRTSPKYTDLPMSSERPNADASVNDESTLNPIAEPSGTVFTDESQFENRSENGMNGLSKSSIFSSRQYSEKSSPPLEYMKISF

SEQ ID NO: 126432 - protein, 143 aa, Setaria italica
  Transcript Sequence Number=SeqID_60458
  Gene Ontology: Mol. function=actin binding; Cellular component =cytoskeleton
  Homolog annotation: Hit_ID=Q5QNA6; Match level="QueryCoverage=100%, HitCoverage=10%, E-value=4e-39, Identity=63%"; Hit description=SCAR -like protein 2
STVVPSVKLWTNAGLFGLEPSKPPVFGAQDTPREDTPPGFEVPQPSHSTEFTELHCSKPIESAVVDVPNGNTSITSSFVGKLVGIRPGSTNLNGTGANQSAARIPDQVHSRTDGPSDFSSSSFEHNSMIGKQTSISELLESEE

SEQ ID NO: 126433 - protein, 36 aa, Setaria italica
  Transcript Sequence Number=SeqID_60459
FILAYSTLGLYGCGNVRSFLHDVNLSLLFIYDSENN

SEQ ID NO: 126434 - protein, 147 aa, Setaria italica
  misc_feature (90)..(90): Xaa can be any naturally occurring amino acid
  Transcript Sequence Number=SeqID_60460
  Gene Ontology: Mol. function=actin binding; Cellular component =cytoskeleton
  Homolog annotation: Hit_ID=Q5QNA6; Match level="QueryCoverage=97%, HitCoverage=10%, E-value=6e-26, Identity=52%"; Hit description=SCAR -like protein 2
  Subcellular localization annotation: CTP_CleavageSite=5; ConfidenceScore=5.00e-01
GANQSAARIPDQVHSRTDGPSDFSSSSFEHNSMIGKQTSISELLESEESAENCTEMYSTNMRNDMHMVSASSFSSIAQRFLANTLQRRTXLPKYTDLPMSSERPNADASVNDESTLNPIAEPSGTVFTDESQFENRSENGMNGLSKS

SEQ ID NO: 126435 - protein, 114 aa, Setaria italica
  misc_feature (13)..(13): Xaa can be any naturally occurring amino acid
  misc_feature (22)..(22): Xaa can be any naturally occurring amino acid
  Transcript Sequence Number=SeqID_60461
  Gene Ontology: Mol. function=actin binding; Cellular component =cytoskeleton
  Homolog annotation: Hit_ID=Q5QNA6; Match level="QueryCoverage=99%, HitCoverage=8%, E-value=2e-20, Identity=66%"; Hit description=SCAR -like protein 2
  Subcellular localization annotation: CTP_CleavageSite=46; ConfidenceScore=5.44e-01
MRNDMHMVSASSXFSSIAQRFXLANTLQRRTSPKYTDLPMSSERPNADASVNDESTLNPIAEPSGTVFTDESQFENRSENGMNGLSKSSIFSSRQYSEKSSPPLEYMKYLFTPL

SEQ ID NO: 126436 - protein, 146 aa, Setaria italica
  misc_feature (93)..(93): Xaa can be any naturally occurring amino acid
  Transcript Sequence Number=SeqID_60462
  Gene Ontology: Mol. function=actin binding; Cellular component =cytoskeleton
  Homolog annotation: Hit_ID=Q5QNA6; Match level="QueryCoverage=95%, HitCoverage=10%, E-value=5e-31, Identity=57%"; Hit description=SCAR -like protein 2
  Subcellular localization annotation: CTP_CleavageSite=89; ConfidenceScore=5.09e-01
FTELHCSKPIESAVVDVPNGNTSITSSFVGKLVGIRPGSTNLNGTGANQSAARIPDQVHSRTDGPSDFSSSSFEHNSMIGKQTSISELLESEXSAENCTEMYSTNMRNDMHMVSASSFSSIAQRFLANTLQRRTSPKYTDLPYCLF

SEQ ID NO: 126437 - protein, 152 aa, Setaria italica
  Transcript Sequence Number=SeqID_60463
  Gene Ontology: Mol. function=actin binding; Cellular component =cytoskeleton
  Homolog annotation: Hit_ID=Q5QNA6; Match level="QueryCoverage=92%, HitCoverage=10%, E-value=7e-36, Identity=64%"; Hit description=SCAR -like protein 2
  Subcellular localization annotation: CTP_CleavageSite=3; ConfidenceScore=5.07e-01
NSRCSYNTSTTSTGASEVSNSQGEPLKEPLENRFATQGIPTNTSTASTVVPSVKTLDQNAGLFGLEPSKPPVFGAQDTPREDTPPGFEVPQPSHSTEFTELHCSKPIESAVVDVPNGNTSITSSFVGKLVGIRPGSTNLNGTGANQSAARIP

SEQ ID NO: 126438 - protein, 144 aa, Setaria italica
  misc_feature (117)..(117): Xaa can be any naturally occurring amino acid
  Transcript Sequence Number=SeqID_60464
  Gene Ontology: Mol. function=actin binding; Cellular component =cytoskeleton
  Homolog annotation: Hit_ID=Q5QNA6; Match level="QueryCoverage=75%, HitCoverage=8%, E-value=8e-22, Identity=53%"; Hit description=SCAR -like protein 2
MAPAAKSSPGDIANESWVVSESRSQDYPGEKHEELGDCGVSEVSQSWSEPRNEPSENRSATQDVPTNTSTTSTGASEVSNSQGEPLKEPLENRFATQGIPTNTSTASTVVPSVKLWXNAGLFGLEPSKPPVFGAQDTPREDTPP

SEQ ID NO: 126439 - protein, 131 aa, Setaria italica
  Transcript Sequence Number=SeqID_60465
LLKEQLIFPHLSNADSPEISQLEFSEYTSVTTYKESSVVTKIHESSMEGACGDPYEISEPELQVHTAIPPNGRSPVHNQIPESKAEDGLGDTPEIPEPEVTYMVIPSNEESAVANQNLESNVSKITWLYFT

SEQ ID NO: 126440 - protein, 131 aa, Setaria italica
  Transcript Sequence Number=SeqID_60466
PPNLSNADSPEISQLEFSEYTSVTTYKESSVVTKIHESSMEGACGDPYEISEPELQVHTAIPPNGRSPVHNQIPESKAEDGLGDTPEIPEPEVTYMVIPSNEESAVANQNLESNVENTGDFDDATDDVVSG

SEQ ID NO: 126441 - protein, 138 aa, Setaria italica
  Transcript Sequence Number=SeqID_60467
SVTTYKESSVVTKIHESSMEGACGDPYEISEPELQVHTAIPPNGRSPVHNQIPESKAEDGLGDTPEIPEPEVTYMVIPSNEESAVANQNLESNVENTGDFTDDATDDVVSGPTISNVVIDEEAFEMAPAAKSSPGDIA

SEQ ID NO: 126442 - protein, 125 aa, Setaria italica
  Transcript Sequence Number=SeqID_60468
HESSMEGACGDPYEISEPELQVHTAIPPNGRSPVHNQIPESKAEDGLGDTPEIPEPEVTYMVIPSNEESAVANQNLESNVENTGDFTDDATDDVVSGPTISNVVIDEEAFEMAPAAKSSPGDIAN

SEQ ID NO: 126443 - protein, 108 aa, Setaria italica
  Transcript Sequence Number=SeqID_60469
MAPAAKSSPGDIANESWVVSESRSQDYPGEKHEELGDCGVSEVSQSWSEPRNEPSENRSATQDVPTNTSTTSTGASEVSNSQGEPLKEPLENRFATQGIPTNTSTAST

SEQ ID NO: 126444 - protein, 123 aa, Setaria italica
  Transcript Sequence Number=SeqID_60470
HESSMEGACGDPYEISEPELQVHTAIPPNGRSPVHNQIPESKAEDGLGDTPEIPEPEVTYMVIPSNEESAVANQNLESNVENTGDFTDDATDDVVSGPTISNVVIDEEAFEMAPAAKSSPGDI

SEQ ID NO: 126445 - protein, 117 aa, Setaria italica
  Transcript Sequence Number=SeqID_60471
TPNLSNKIDKNSPEISQLEFSEYTSVTTYKESSVVTKIHESSMEGACGDPYEISEPELQVHTAIPPNGRSPVHNQIPESKAEDGLGDTPEIPEPEVTYMVIPSNEESAVANQTLKAT

SEQ ID NO: 126446 - protein, 113 aa, Setaria italica
  Transcript Sequence Number=SeqID_60472
LPILLTLCQDSNISCTSERAVDFPHLSNADSPEISQLEFSEYTSVTTYKESSVVTKIHESSMEGACGDPYEISEPELQVHTAIPPNGRSPVHNQIPESKAEDGLWRLLPCSIS

SEQ ID NO: 126447 - protein, 89 aa, Setaria italica
  misc_feature (77)..(77): Xaa can be any naturally occurring amino acid
  Transcript Sequence Number=SeqID_60473
EILMKFQSRNCKSIQPYLPMEDPLFTIKYLRVRQKMVLETLLRFQNQRSPIWLFRPMRVCCCQPNLESNVENTGDFXDDATDDVVSGPT

SEQ ID NO: 126448 - protein, 125 aa, Setaria italica
  Transcript Sequence Number=SeqID_60474
  Gene Ontology: Mol. function=actin binding; Cellular component =cytoskeleton
  Homolog annotation: Hit_ID=Q5QNA6; Match level="QueryCoverage=94%, HitCoverage=9%, E-value=7e-20, Identity=52%"; Hit description=SCAR -like protein 2
  Subcellular localization annotation: CTP_CleavageSite=94; ConfidenceScore=5.03e-01
FLNLNFTELHCSKPIESAVVDVPNGNTSITSSFVGKLVGIRPGSTNLNGTGANQSAARIPDQVHSRTDGPSDFSSSSFEHNSMIGKQTSISELLESEESAENCTEMYSTNMRNDMHMVSASSFSS

SEQ ID NO: 126449 - protein, 110 aa, Setaria italica
  Transcript Sequence Number=SeqID_60475
  Gene Ontology: Mol. function=actin binding; Cellular component =cytoskeleton
  Homolog annotation: Hit_ID=Q5QNA6; Match level="QueryCoverage=99%, HitCoverage=8%, E-value=9e-25, Identity=70%"; Hit description=SCAR -like protein 2
  Subcellular localization annotation: CTP_CleavageSite=44; ConfidenceScore=5.41e-01
MRNDMHMVSASSFSSIAQRFLANTLQRRTSPKYTDLPMSSERPNADASVNDESTLNPIAEPSGTVFTDESQFENRSENGMNGLSKSSIFSSRQYSEKSSPPLEYMKISFH

SEQ ID NO: 126450 - protein, 115 aa, Setaria italica
  misc_feature (63)..(63): Xaa can be any naturally occurring amino acid
  Transcript Sequence Number=SeqID_60476
  Gene Ontology: Mol. function=actin binding; Cellular component =cytoskeleton
  Homolog annotation: Hit_ID=Q5QNA6; Match level="QueryCoverage=94%, HitCoverage=8%, E-value=8e-26, Identity=71%"; Hit description=SCAR -like protein 2
  Subcellular localization annotation: CTP_CleavageSite=49; ConfidenceScore=5.52e-01
MYSTNMRNDMHMVSASSFSSIAQRFLANTLQRRTSPKYTDLPMSSERPNADASVNDESTPKSXAEPSGTVFTDESQFENRSENGMNGLSKSSIFSSRQYSEKSSPPLEYMKISFH

SEQ ID NO: 126451 - protein, 145 aa, Setaria italica
  Transcript Sequence Number=SeqID_60477
  Gene Ontology: Mol. function=actin binding; Cellular component =cytoskeleton
  Homolog annotation: Hit_ID=Q5QNA6; Match level="QueryCoverage=100%, HitCoverage=11%, E-value=6e-28, Identity=52%"; Hit description=SCAR -like protein 2
PPVFGAQDTPREDTPPGFEVPQPSHSTEFTELHCSKPIESAVVDVPNGNTSITSSFVGKLVGIRPGSTNLNGTGANQSAARIPDQVHSRTDGPSDFSSSSFEHNSMIGKQTSISELLESEESAENCTEMYSTNMRNDMHMVSASS

SEQ ID NO: 126452 - protein, 127 aa, Setaria italica
  misc_feature (27)..(27): Xaa can be any naturally occurring amino acid
  misc_feature (73)..(73): Xaa can be any naturally occurring amino acid
  Transcript Sequence Number=SeqID_60478
  Gene Ontology: Mol. function=actin binding; Cellular component =cytoskeleton
  Homolog annotation: Hit_ID=Q5QNA6; Match level="QueryCoverage=91%, HitCoverage=8%, E-value=8e-21, Identity=54%"; Hit description=SCAR -like protein 2
  Subcellular localization annotation: CTP_CleavageSite=31; ConfidenceScore=5.37e-01
GNTSITSSFVGKLVGIRPGSTNLNGTXANQSAARIPDQVHSRTDGPSDFSSSSFEHNSMIGKQTSISELLESXEESAENCTEMYSTNMRNDMHMVSASSFSSIAQRFLANTLQRRTFSQIITVFFPY

SEQ ID NO: 126453 - protein, 138 aa, Setaria italica
  misc_feature (118)..(118): Xaa can be any naturally occurring amino acid
  Transcript Sequence Number=SeqID_60479
  Gene Ontology: Mol. function=actin binding; Cellular component =cytoskeleton
  Homolog annotation: Hit_ID=Q5QNA6; Match level="QueryCoverage=76%, HitCoverage=8%, E-value=8e-21, Identity=53%"; Hit description=SCAR -like protein 2
LLKSSPGDIANESWVVSESRSQDYPGEKHEELGDCGVSEVSQSWSEPRNEPSENRSATQDVPTNTSTTSTGASEVSNSQGEPLKEPLENRFATQGIPTNTSTASTVVPSVKLWTNAGXFGLEPSKPPVFGAQDTPRED

SEQ ID NO: 126454 - protein, 69 aa, Setaria italica
  Transcript Sequence Number=SeqID_60480
  Subcellular localization annotation: CTP_CleavageSite=54; ConfidenceScore=5.15e-01
MNHQRIGLQLKMFLTNTSTTSTGASEVSNSQGEPLKEPLENRFATQGIPTNTSTASTVVPSVKLWTNAG

SEQ ID NO: 126455 - protein, 110 aa, Setaria italica
  Transcript Sequence Number=SeqID_60481
SSPGDIANESWVVSESRSQDYPGEKHEELGDCGVSEVSQSWSEPRNEPSENRSATQDVPTNTSTTSTGASEVSNSQGEPLKEPLENRFATQGIPTNTSTASTVVPSVKTL

SEQ ID NO: 126456 - protein, 143 aa, Setaria italica
  Transcript Sequence Number=SeqID_60482
  Gene Ontology: Mol. function=actin binding; Cellular component =cytoskeleton
  Homolog annotation: Hit_ID=Q5QNA6; Match level="QueryCoverage=95%, HitCoverage=10%, E-value=4e-29, Identity=54%"; Hit description=SCAR -like protein 2
EKHEELGDCGVSEVSQSWSEPRNEPSENRSATQDVPTNTSTTSTGASEVSNSQGEPLKEPLENRFATQGIPTNTSTASTVVPSVKLWTNAGLFGLEPSKPPVFGAQDTPREDTPPGFEVPQPSHSTEFTELHCSKPIESAVVD

SEQ ID NO: 126457 - protein, 137 aa, Setaria italica
  Transcript Sequence Number=SeqID_60483
  Gene Ontology: Mol. function=actin binding; Cellular component =cytoskeleton
  Homolog annotation: Hit_ID=Q5QNA6; Match level="QueryCoverage=99%, HitCoverage=10%, E-value=2e-23, Identity=51%"; Hit description=SCAR -like protein 2
TPREDTPPGFEVPQPSHSTEFTELHCSKPIESAVVDVPNGNTSITSSFVGKLVGIRPGSTNLNGTGANQSAARIPDQVHSRTDGPSDFSSSSFEHNSMIGKQTSISELLESEESAENCTEMYSTNMRNDMHMVSASS

SEQ ID NO: 126458 - protein, 98 aa, Setaria italica
  Transcript Sequence Number=SeqID_60484
  Gene Ontology: Mol. function=actin binding; Cellular component =cytoskeleton
  Homolog annotation: Hit_ID=Q5QNA6; Match level="QueryCoverage=80%, HitCoverage=6%, E-value=6e-17, Identity=63%"; Hit description=SCAR -like protein 2
VHSRTDGPSDFSSSSFEHNSMIGKQTSISELLESEESAENCTEMYSTNMRNDMHMVSASSFSSIAQRFLANTLQRRTSPKYTDLPMSSERPNADASVN

SEQ ID NO: 126459 - protein, 133 aa, Setaria italica
  Transcript Sequence Number=SeqID_60485
  Gene Ontology: Mol. function=actin binding; Cellular component =cytoskeleton
  Homolog annotation: Hit_ID=Q5QNA6; Match level="QueryCoverage=100%, HitCoverage=9%, E-value=3e-38, Identity=66%"; Hit description=SCAR -like protein 2
SNSQGEPLKEPLENRFATQGIPTNTSTASTVVPSVKLWTNAGLFGLEPSKPPVFGAQDTPREDTPPGFEVPQPSHSTEFTELHCSKPIESAVVDVPNGNTSITSSFVGKLVGIRPGSTNLNGTGANQSAARIP

SEQ ID NO: 126460 - protein, 114 aa, Setaria italica
  Transcript Sequence Number=SeqID_60486
  Gene Ontology: Mol. function=actin binding; Cellular component =cytoskeleton
  Homolog annotation: Hit_ID=Q5QNA6; Match level="QueryCoverage=100%, HitCoverage=8%, E-value=7e-21, Identity=52%"; Hit description=SCAR -like protein 2
  Subcellular localization annotation: CTP_CleavageSite=70; ConfidenceScore=5.38e-01
GNTSITSSFVGKLVGIRPGSTNLNGTGANQSAARIPDQVHSRTDGPSDFSSSSFEHNSMIGKQTSISELLESEESAENCTEMYSTNMRNDMHMVSASSFSSIAQRFLANTLQKK

SEQ ID NO: 126461 - protein, 130 aa, Setaria italica
  Transcript Sequence Number=SeqID_60487
  Gene Ontology: Mol. function=actin binding; Cellular component =cytoskeleton
  Homolog annotation: Hit_ID=Q5QNA6; Match level="QueryCoverage=100%, HitCoverage=10%, E-value=8e-21, Identity=50%"; Hit description=SCAR -like protein 2
PGFEVPQPSHSTEFTELHCSKPIESAVVDVPNGNTSITSSFVGKLVGIRPGSTNLNGTGANQSAARIPDQVHSRTDGPSDFSSSSFEHNSMIGKQTSISELLESEESAENCTEMYSTNMRNDMHMVSASS

SEQ ID NO: 126462 - protein, 125 aa, Setaria italica
  misc_feature (114)..(114): Xaa can be any naturally occurring amino acid
  Transcript Sequence Number=SeqID_60488
  Gene Ontology: Mol. function=actin binding; Cellular component =cytoskeleton
  Homolog annotation: Hit_ID=Q5QNA6; Match level="QueryCoverage=100%, HitCoverage=9%, E-value=3e-23, Identity=55%"; Hit description=SCAR -like protein 2
  Subcellular localization annotation: CTP_CleavageSite=62; ConfidenceScore=5.02e-01
FVGKLVGIRPGSTNLNGTGANQSAARIPDQVHSRTDGPSDFSSSSFEHNSMIGKQTSISELLESEESAENCTEMYSTNMRNDMHMVSASSFSSIAQRFLANTLQRRTSPKYTDXLPMSSERPNAD

SEQ ID NO: 126463 - protein, 136 aa, Setaria italica
  misc_feature (35)..(35): Xaa can be any naturally occurring amino acid
  misc_feature (59)..(59): Xaa can be any naturally occurring amino acid
  Transcript Sequence Number=SeqID_60489
  Gene Ontology: Mol. function=actin binding; Cellular component =cytoskeleton
  Homolog annotation: Hit_ID=Q5QNA6; Match level="QueryCoverage=100%, HitCoverage=10%, E-value=1e-30, Identity=59%"; Hit description=SCAR -like protein 2
  Subcellular localization annotation: CTP_CleavageSite=42; ConfidenceScore=5.21e-01
PIESAVVDVPNGNTSITSSFVGKLVGIRPGLQTSXGTGANQSAARIPDQVHSRTDGPLXIFPSSSFEHNSMIGKQTSISELLESEESAENCTEMYSTNMRNDMHMVSASSFSSIAQRFLANTLQRRTSPKYTDLPI

SEQ ID NO: 126464 - protein, 83 aa, Setaria italica
  Transcript Sequence Number=SeqID_60490
  Gene Ontology: Mol. function=actin binding; Cellular component =cytoskeleton
  Homolog annotation: Hit_ID=Q5QNA6; Match level="QueryCoverage=100%, HitCoverage=6%, E-value=1e-12, Identity=66%"; Hit description=SCAR -like protein 2
MSSERPNADASVNDESTLNPIAEPSGTVFTDESQFENRSENGMNGLSKSSIFSSRQYSEKSSPPLEYMKISFHPMSAFEMSKL

SEQ ID NO: 126465 - protein, 101 aa, Setaria italica
  misc_feature (93)..(93): Xaa can be any naturally occurring amino acid
  Transcript Sequence Number=SeqID_60491
  Gene Ontology: Mol. function=actin binding; Cellular component =cytoskeleton
  Homolog annotation: Hit_ID=Q5QNA6; Match level="QueryCoverage=99%, HitCoverage=7%, E-value=4e-19, Identity=67%"; Hit description=SCAR -like protein 2
FQRRTSPKYTDLPMSSERPNADASVNDESTLNPIAEPSGTVFTDESQFENRSENGMNGLSKSSIFSSRQYSEKSSPPLEYMKISFHPMSAFEXSKLNLVFL

SEQ ID NO: 126466 - protein, 94 aa, Setaria italica
  misc_feature (46)..(46): Xaa can be any naturally occurring amino acid
  Transcript Sequence Number=SeqID_60492
  Gene Ontology: Mol. function=actin binding; Cellular component =cytoskeleton
  Homolog annotation: Hit_ID=Q5QNA6; Match level="QueryCoverage=97%, HitCoverage=6%, E-value=1e-15, Identity=66%"; Hit description=SCAR -like protein 2
RLNTLQRRTSPKYTDLPMSSERPNADASVNDESTLNPIAEPSGNKXFTDESQFENRSENGMNGLSKSSIFSSRQYSEKSSPPLEYMKISFHPMS

SEQ ID NO: 126467 - protein, 111 aa, Setaria italica
  misc_feature (27)..(27): Xaa can be any naturally occurring amino acid
  misc_feature (62)..(62): Xaa can be any naturally occurring amino acid
  Transcript Sequence Number=SeqID_60493
  Gene Ontology: Mol. function=actin binding; Cellular component =cytoskeleton
  Homolog annotation: Hit_ID=Q5QNA6; Match level="QueryCoverage=100%, HitCoverage=8%, E-value=3e-16, Identity=51%"; Hit description=SCAR -like protein 2
  Subcellular localization annotation: CTP_CleavageSite=83; ConfidenceScore=5.31e-01
SKPIESAVVDVPNGNTSITSSFVGKLXGIRPGSTNLNGTGANQSAARIPDQVHSRTDGPSDXSSSSFEHNSMIGKQTSISELLESEESAENCTEMYSTNMRNDMHMVSASS

SEQ ID NO: 126468 - protein, 117 aa, Setaria italica
  Transcript Sequence Number=SeqID_60494
MAPAAKSSPGDIANESWVVSESRSQDYPGEKHEELGDCGVSEVSQSWSEPRNEPSENRSATQDVPTNTSTTSTGASEVSNSQGEPLKEPLENRFATQGIPTNTSTASTVVPSVKLWT

SEQ ID NO: 126469 - protein, 101 aa, Setaria italica
  Transcript Sequence Number=SeqID_60495
  Gene Ontology: Mol. function=actin binding; Cellular component =cytoskeleton
  Homolog annotation: Hit_ID=Q5QNA6; Match level="QueryCoverage=98%, HitCoverage=7%, E-value=5e-19, Identity=56%"; Hit description=SCAR -like protein 2
DCGVSEVSQSWSEPRNEPSENRSATQDVPTNTSTTSTGASEVSNSQGEPLKEPLENRFATQGIPTNTSTASTVVPSVKLWTNAGLFGLEPSKPPVFGAQDT

SEQ ID NO: 126470 - protein, 126 aa, Setaria italica
  Transcript Sequence Number=SeqID_60496
  Gene Ontology: Mol. function=actin binding; Cellular component =cytoskeleton
  Homolog annotation: Hit_ID=Q5QNA6; Match level="QueryCoverage=88%, HitCoverage=8%, E-value=3e-23, Identity=54%"; Hit description=SCAR -like protein 2
KVGLRIIPERSSEELGDCGVSEVSQSWSEPRNEPSENRSATQDVPTNTSTTSTGASEVSNSQGEPLKEPLENRFATQGIPTNTSTASTVVPSVKLWTNAGLFGLEPSKPPVFGAQDTPREDTPPGF

SEQ ID NO: 126471 - protein, 98 aa, Setaria italica
  misc_feature (59)..(59): Xaa can be any naturally occurring amino acid
  Transcript Sequence Number=SeqID_60497
MGCSESRSQDYPGEKHEELGDCGVSEVSQSWSEPRNEPSENRSATQDVPTNTSTTSTGXSEVSNSQGEPLKEPLENRFATQGIPTNTSTASTVVPSVK

SEQ ID NO: 126472 - protein, 40 aa, Setaria italica
  Transcript Sequence Number=SeqID_60498
MRNDMHMVSASSFSSIAQRFLANTLQRRTSQLIPTTSLLV

SEQ ID NO: 126473 - protein, 59 aa, Setaria italica
  Transcript Sequence Number=SeqID_60499
LQRRTSPKYTDLPMSSERPNADASVNDESTLNPIAEPSGTVFTDESQSIDGWKRLMIWT

SEQ ID NO: 126474 - protein, 31 aa, Setaria italica
  Transcript Sequence Number=SeqID_60500
WHHLIFSSKTRLSSVDQALDTKPSTVPHENG

SEQ ID NO: 126475 - protein, 101 aa, Setaria italica
  misc_feature (64)..(64): Xaa can be any naturally occurring amino acid
  misc_feature (82)..(82): Xaa can be any naturally occurring amino acid
  Transcript Sequence Number=SeqID_60501
  Gene Ontology: Mol. function=actin binding; Cellular component =cytoskeleton
  Homolog annotation: Hit_ID=Q5QNA6; Match level="QueryCoverage=97%, HitCoverage=7%, E-value=2e-13, Identity=52%"; Hit description=SCAR -like protein 2
  Subcellular localization annotation: CTP_CleavageSite=60; ConfidenceScore=5.32e-01
SKPIESAVVDVPNGNTSITSSFVGKLVGIRPGSTNLNGTGANQSAARIPDQVHSRTDGPSDFSXSSFEHNSMIGKQTSISEXLLESEESAENCTEMYSTNM

SEQ ID NO: 126476 - protein, 112 aa, Setaria italica
  Transcript Sequence Number=SeqID_60502
  Gene Ontology: Mol. function=actin binding; Cellular component =cytoskeleton
  Homolog annotation: Hit_ID=Q5QNA6; Match level="QueryCoverage=96%, HitCoverage=8%, E-value=4e-21, Identity=55%"; Hit description=SCAR -like protein 2
LRLYCGVSEVSQSWSEPRNEPSENRSRQTQDVPTNTSTTSTGASEVSNSQGEPLKEPLENRFATQGIPTNTSTASTVVPSVKLWTNAGLFGLEPSKPPVFGAQDTPREDTPP

SEQ ID NO: 126477 - protein, 80 aa, Setaria italica
  Transcript Sequence Number=SeqID_60503
ESRSQDYPGEKHEELGDCGVSEVSQSWSEPRNEPSENRSATQDVPTNTSTTSTGASEVSNSQGEPLKEPLENRFATQGIP

SEQ ID NO: 126478 - protein, 77 aa, Setaria italica
  Transcript Sequence Number=SeqID_60504
  Gene Ontology: Mol. function=actin binding; Cellular component =cytoskeleton
  Homolog annotation: Hit_ID=Q5QNA6; Match level="QueryCoverage=96%, HitCoverage=5%, E-value=5e-18, Identity=68%"; Hit description=SCAR -like protein 2
  Subcellular localization annotation: CTP_CleavageSite=46; ConfidenceScore=5.10e-01
FVGIPWVANTSTASTVVPSVKLWTNAGLFGLEPSKPPVFGAQDTPREDTPPGVEVPQPSHSTEFTELHCSKPIESAV

SEQ ID NO: 126479 - protein, 116 aa, Setaria italica
  Transcript Sequence Number=SeqID_60505
  Gene Ontology: Mol. function=actin binding; Cellular component =cytoskeleton
  Homolog annotation: Hit_ID=Q5QNA6; Match level="QueryCoverage=86%, HitCoverage=7%, E-value=3e-31, Identity=73%"; Hit description=SCAR -like protein 2
GTIGEQICNQGIPTNTSTASTVVPSVKLWTNAGLFGLEPSKPPVFGAQDTPREDTPPGFEVPQPSHSTEFTELHCSKPIESAVVDVPNGNTSITSSFVGKLVGIRPGSTNLNGTGA

SEQ ID NO: 126480 - protein, 87 aa, Setaria italica
  Transcript Sequence Number=SeqID_60506
  Gene Ontology: Mol. function=actin binding; Cellular component =cytoskeleton
  Homolog annotation: Hit_ID=Q5QNA6; Match level="QueryCoverage=91%, HitCoverage=5%, E-value=5e-24, Identity=75%"; Hit description=SCAR -like protein 2
TNAGLFGLEPSKPPVFGAQDTPREDTPPGFEVPQPSHSTEFTELHCSKPIESAVVDVPNGNTSITSSFVGKLVGIRPGSTNLNGCQQ

SEQ ID NO: 126481 - protein, 82 aa, Setaria italica
  Transcript Sequence Number=SeqID_60507
  Gene Ontology: Mol. function=actin binding; Cellular component =cytoskeleton
  Homolog annotation: Hit_ID=Q5QNA6; Match level="QueryCoverage=82%, HitCoverage=5%, E-value=3e-12, Identity=61%"; Hit description=SCAR -like protein 2
HSTEFTELHCSKPIESAVVDVPNGNTSITSSFVGKLVGIRPGSTNLNGTGANQSAARIPDQVHSRTDGPSDFSSSSFEHNSM

SEQ ID NO: 126482 - protein, 89 aa, Setaria italica
  Transcript Sequence Number=SeqID_60508
  Gene Ontology: Mol. function=actin binding; Cellular component =cytoskeleton
  Homolog annotation: Hit_ID=Q5QNA6; Match level="QueryCoverage=95%, HitCoverage=6%, E-value=8e-28, Identity=76%"; Hit description=SCAR -like protein 2
PSVKLWTNAGLFGLEPSKPPVFGAQDTPREDTPPGFEVPQPSHSTEFTELHCSKPIESAVVDVPNGNTSITSSFVGKLVGIRPGSTNLN

SEQ ID NO: 126483 - protein, 88 aa, Setaria italica
  misc_feature (5)..(5): Xaa can be any naturally occurring amino acid
  Transcript Sequence Number=SeqID_60509
  Gene Ontology: Mol. function=actin binding; Cellular component =cytoskeleton
  Homolog annotation: Hit_ID=Q5QNA6; Match level="QueryCoverage=95%, HitCoverage=6%, E-value=6e-27, Identity=75%"; Hit description=SCAR -like protein 2
VKLWXNAGLFGLEPSKPPVFGAQDTPREDTPPGFEVPQPSHSTEFTELHCSKPIESAVVDVPNGNTSITSSFVGKLVGIRPGSTNLNA

SEQ ID NO: 126484 - protein, 74 aa, Setaria italica
  Transcript Sequence Number=SeqID_60510
NQSAARIPDQVHSRTDGPSDFSSSSFEHNSMIGKQTSISELLESEESAENCTEMYSTNMRNDMHMVSASSFSSI

SEQ ID NO: 126485 - protein, 76 aa, Setaria italica
  Transcript Sequence Number=SeqID_60511
NQHEKMTCIWCLHQAFSSIAQRFLANTLSEKNFSQNIPIFLCHLRDQNADASVNDESTLNPIADPSGTVFTDESLV

SEQ ID NO: 126486 - protein, 58 aa, Setaria italica
  Transcript Sequence Number=SeqID_60512
SFLEYTSVTTYKESSVVTKIHESSMEGACGDPYEISEPELQVHTAIPPNGRSPVHNQI

SEQ ID NO: 126487 - protein, 76 aa, Setaria italica
  Transcript Sequence Number=SeqID_60513
LMTLFHSILIPLVAVFTDTCQDSNISCTSERAVDFPHLSNADSPEISQLEFSEYTSVTTYKESSVVTKIHESSMEG

SEQ ID NO: 126488 - protein, 61 aa, Setaria italica
  Transcript Sequence Number=SeqID_60514
STSSGATDDIVSQHPDSSVADFTDTCQDSNILALLKEQLIPHLSNADSPEISQLEFQNIHL

SEQ ID NO: 126489 - protein, 65 aa, Setaria italica
  Transcript Sequence Number=SeqID_60515
FHKDLHKPPSMLLSWYFSEQQMTSLYVVTDVYSENSSCEISGESAFDKWGEINCSFRSARNIRIL

SEQ ID NO: 126490 - protein, 77 aa, Setaria italica
  Transcript Sequence Number=SeqID_60516
  Subcellular localization annotation: CTP_CleavageSite=46; ConfidenceScore=5.14e-01
LRPTFRTTHDSLAISPGELLAAGAISKASSSITTLEMVGPDTTSSVASSVKSPVFSTLLSRFWLATADSSLDGNNHY

SEQ ID NO: 126491 - protein, 74 aa, Setaria italica
  Transcript Sequence Number=SeqID_60517
KITGDFTDDATDDVVSGPTISNVVIDEEAFEMAPAAKSSPGDIANESWVVSESRSQDYPGEKHEELGDCGVSEV

SEQ ID NO: 126492 - protein, 60 aa, Setaria italica
  misc_feature (29)..(29): Xaa can be any naturally occurring amino acid
  Transcript Sequence Number=SeqID_60518
GYNIISGIISKITSIFYVAFKVLVGNSRXFIGRNNHIGDLWFWNLRSVSKTIFLPLLSGI

SEQ ID NO: 126493 - protein, 68 aa, Setaria italica
  Transcript Sequence Number=SeqID_60519
IREKHEELGDCGVSEVSQSWSEPRNEPSENRSATQDVPTNTSTTSTGASEVSNSQGEPLKEPLENRFA

SEQ ID NO: 126494 - protein, 77 aa, Setaria italica
  Transcript Sequence Number=SeqID_60520
AAKSSPGDIANESWVVSESRSQDYPGEKHEELGDCGVSEVSQSWSEPRNEPSENRSATQDVPTNTSTTSTGASEVSN

SEQ ID NO: 126495 - protein, 56 aa, Setaria italica
  Transcript Sequence Number=SeqID_60521
HLVPHASLRDNPETYFQKQPMIQLAISPGELLAAGAISKASSSITTLEMVGPDTTS

SEQ ID NO: 126496 - protein, 69 aa, Setaria italica
  Transcript Sequence Number=SeqID_60522
  Subcellular localization annotation: CTP_CleavageSite=48; ConfidenceScore=5.15e-01
ILRPTFRNKPNDSLAISPGELLAAGAISKASSSITTLEMVGPDTTSSVASSVKSPVFSTLLSRFWLATA

SEQ ID NO: 126497 - protein, 48 aa, Setaria italica
  Transcript Sequence Number=SeqID_60523
CHYLPLMLKHLKWGQLMTLFHSILIPLLPILLTHVKILIFLALLKEQL

SEQ ID NO: 126498 - protein, 63 aa, Setaria italica
  Transcript Sequence Number=SeqID_60524
  Gene Ontology: Mol. function=actin binding; Cellular component =cytoskeleton
  Homolog annotation: Hit_ID=Q5QNA6; Match level="QueryCoverage=90%, HitCoverage=4%, E-value=1e-12, Identity=73%"; Hit description=SCAR -like protein 2
  Subcellular localization annotation: CTP_CleavageSite=23; ConfidenceScore=5.29e-01
KSRLKNCTEMYSTNMRNDMHMVSASSFSSIAQRFLANTLQRRTSPKYTDLPMSSERPNADASV

SEQ ID NO: 126499 - protein, 68 aa, Setaria italica
  misc_feature (18)..(18): Xaa can be any naturally occurring amino acid
  Transcript Sequence Number=SeqID_60525
  Gene Ontology: Mol. function=actin binding; Cellular component =cytoskeleton
  Homolog annotation: Hit_ID=Q5QNA6; Match level="QueryCoverage=95%, HitCoverage=5%, E-value=1e-13, Identity=67%"; Hit description=SCAR -like protein 2
KQTSISELLESEESAENXTEMYSTNMRNDMHMVSASSFSSIAQRFLANTLQRRTSPKYTDLPMSSRRR

SEQ ID NO: 126500 - protein, 34 aa, Setaria italica
  Transcript Sequence Number=SeqID_60526
TEEDTPPGVEVPQPSHSTEFTELHCSKPIESAVV

SEQ ID NO: 126501 - protein, 75 aa, Setaria italica
  Transcript Sequence Number=SeqID_60527
AKSPYFPVAGIEKDSVLQQLISKCGGLPKVIVAIADILAQAFNWTEKASILNGSFVPNLETSPEFCCLHGLFSWM

SEQ ID NO: 126502 - protein, 35 aa, Setaria italica
  Transcript Sequence Number=SeqID_60528
QLLQVTGRGLVGHDLNHLPADLTHGTYFRGTITMS

SEQ ID NO: 126503 - protein, 136 aa, Setaria italica
  Transcript Sequence Number=SeqID_60529
TTNDWKAASSREQRVDRSDKRDSTRDKLSDWEESNGGSGRSSRRGRSASPDEHRHRGRHESHPSPRVPRSGTRTEVSGDIWPFTLNLCFSISTWLCMIVFRYNWQIYCLHPNKYKFRKLISMPSILNYYNCRLCNQ

SEQ ID NO: 126504 - protein, 119 aa, Setaria italica
  Transcript Sequence Number=SeqID_60530
GGRLDRDDWKAASSREQRVDRSDKRDSTREKLSDWEESNGGSGRSSRRGRSASPDEHRHRGRHESHPSPRVPRSGTRTEDINSRGGEASRSGDPDALATLLVSSASFPRTNYKRNRTFR

SEQ ID NO: 126505 - protein, 120 aa, Setaria italica
  misc_feature (26)..(26): Xaa can be any naturally occurring amino acid
  Transcript Sequence Number=SeqID_60531
  Gene Ontology: Mol. function=G-protein coupled receptor activity; Cellular component=integral to membrane; Biological process=G -protein coupled receptor protein signaling pathway
  Homolog annotation: Hit_ID=B6SHE2; Match level="QueryCoverage=98%, HitCoverage=36%, E-value=2e-59, Identity=93%"; Hit description=G protein-coupled receptor
LCYLLFRELRKFSFKLVFYLAVSDMXFCSLFTILGDPSNAFYCFAHDYSAHFFCVASFLWTTTIAFTLHRTVVKHKTDVEEFGSIFHLYVWGTSLATTVLRSIGSDYGRPGSWCWIPSLR

SEQ ID NO: 126506 - protein, 66 aa, Setaria italica
  Transcript Sequence Number=SeqID_60532
  Gene Ontology: Mol. function=G-protein coupled receptor activity; Cellular component=integral to membrane; Biological process=G -protein coupled receptor protein signaling pathway
  Homolog annotation: Hit_ID=B6SHE2; Match level="QueryCoverage=68%, HitCoverage=14%, E-value=8e-19, Identity=97%"; Hit description=G protein-coupled receptor
IRYVLVVKYFSNYVYFLCYRDPSNAFYCFAHDYSAHFFCVASFLWTTTIAFTLHRTVVKHKTDVEE

SEQ ID NO: 126507 - protein, 52 aa, Setaria italica
  Transcript Sequence Number=SeqID_60533
  Gene Ontology: Mol. function=phosphatidate cytidylyltransferase activity; Cellular component=integral to membrane; Biological process=phospholipid biosynthetic process
  Homolog annotation: Hit_ID=B4FI16; Match level="QueryCoverage=69%, HitCoverage=9%, E-value=2e-11, Identity=83%"; Hit description =Phosphatidate cytidylyltransferase
GLDVEVGNRGPAQASEQANAKGNRANGQPLLVNDQNKYRSMLIRTYSTVWMI

SEQ ID NO: 126508 - protein, 34 aa, Setaria italica
  Transcript Sequence Number=SeqID_60534
  Gene Ontology: Mol. function=phosphatidate cytidylyltransferase activity; Cellular component=integral to membrane; Biological process=phospholipid biosynthetic process
  Homolog annotation: Hit_ID=B4FI16; Match level="QueryCoverage=100%, HitCoverage=8%, E-value=9e-12, Identity=91%"; Hit description =Phosphatidate cytidylyltransferase
ATADGNRANGQPLLVNDQNKYRSMLIRTYSTVWM

SEQ ID NO: 126509 - protein, 36 aa, Setaria italica
  Transcript Sequence Number=SeqID_60535
  Gene Ontology: Mol. function=phosphatidate cytidylyltransferase activity; Cellular component=integral to membrane; Biological process=phospholipid biosynthetic process
  Homolog annotation: Hit_ID=B4FI16; Match level="QueryCoverage=100%, HitCoverage=9%, E-value=1e-10, Identity=86%"; Hit description =Phosphatidate cytidylyltransferase
VEIILDQIIRNLTYEEQKYLYQQLGEIFHERQLMQS

SEQ ID NO: 126510 - protein, 81 aa, Setaria italica
  Transcript Sequence Number=SeqID_60536
ISKNTIFEVPFSQYKRCRNDDMGVELALSVWITAEGSVSGPATRTRFDFGVSVMQRDTSSSDVSASHTGRVRRRRQPSEAT

SEQ ID NO: 126511 - protein, 41 aa, Setaria italica
  Transcript Sequence Number=SeqID_60537
  Gene Ontology: Mol. function=phosphatidate cytidylyltransferase activity; Cellular component=integral to membrane; Biological process=phospholipid biosynthetic process
  Homolog annotation: Hit_ID=B4FI16; Match level="QueryCoverage=100%, HitCoverage=10%, E-value=5e-15, Identity=90%"; Hit description =Phosphatidate cytidylyltransferase
MQRDTSSSDVSASHTGRVRRRRQPSEATADGNRANGQPLLV

SEQ ID NO: 126512 - protein, 81 aa, Setaria italica
  Transcript Sequence Number=SeqID_60538
IEHIKLSKKQYRLHYSEEQRYSIAITASSSSKKQAVNHDKSTPLHSTAPPHLPLTAAAAFVCPPVWSCPSVGLSFLCPYGS

SEQ ID NO: 126513 - protein, 59 aa, Setaria italica
  Transcript Sequence Number=SeqID_60539
CTFSTLIAHEVDGVNVKVRKSYGNAADKFFFTYFWQCHNSYSACGLGSDGTDRLVDLTY

SEQ ID NO: 126514 - protein, 84 aa, Setaria italica
  misc_feature (76)..(84): Xaa can be any naturally occurring amino acid
  Transcript Sequence Number=SeqID_60540
FCCCVIDDVYGSIVKNLSVVVGLLHSSTTIFFFILGIHFVNCPANSVRGDKISVTDCHNGKMLEKIKSKLLLLLLXXXXXXXXX

SEQ ID NO: 126515 - protein, 64 aa, Setaria italica
  Transcript Sequence Number=SeqID_60541
  Gene Ontology: Mol. function=nucleic acid binding; Cellular component= nucleus; Biological process=DNA replication
  Homolog annotation: Hit_ID=B6SL03; Match level="QueryCoverage=93%, HitCoverage=9%, E-value=7e-22, Identity=80%"; Hit description =Replication protein A 70 kDa DNA-binding subunit
LPDLPEVHNLKSWYDNEGKGTSMAPIGADMGAARAGGLRSMYSDRVLLSHITSDPNMGQEKVQS

SEQ ID NO: 126516 - protein, 66 aa, Setaria italica
  Transcript Sequence Number=SeqID_60542
  Gene Ontology: Mol. function=catalytic activity; Biological process =metabolic process
  Homolog annotation: Hit_ID=B6UAJ5; Match level="QueryCoverage=98%, HitCoverage=21%, E-value=3e-18, Identity=73%"; Hit description =Methylglutaconyl-CoA hydratase
EVGEYARSLRSTFSSFEALPIPTIAVIEGAALGGGLELALSCDLRICGENAELGLPETGLAIIPGM

SEQ ID NO: 126517 - protein, 45 aa, Setaria italica
  Transcript Sequence Number=SeqID_60543
VLKPFVLESNALCRLHNHVPRYNGKACFWSSSLSFLFYFPLVLTF

SEQ ID NO: 126518 - protein, 73 aa, Setaria italica
  Transcript Sequence Number=SeqID_60544
NFYESICSLEKFGMAEFGISNVMLSHEDIINLGRVKLKNKQQVRHLFPLLHVSWILYCMLVQSVYTPLQSMYG

SEQ ID NO: 126519 - protein, 97 aa, Setaria italica
  misc_feature (12)..(12): Xaa can be any naturally occurring amino acid
  Transcript Sequence Number=SeqID_60545
SWRAWSCNCLPXRGNFLLGSSFSRVQMFSLEGNFLFHKLIMTSDSLDHCRKISMYVALSGNGNGEPWFKIVIEVTLQDLNKNKVKNLKIRNLTKKIK

SEQ ID NO: 126520 - protein, 47 aa, Setaria italica
  Transcript Sequence Number=SeqID_60546
  Subcellular localization annotation: CTP_CleavageSite=31; ConfidenceScore=5.10e-01
TPTDSQRQMRPLKAQTQKISQFRYTSLTSTRASCLDTATALSLPFEQ

SEQ ID NO: 126521 - protein, 66 aa, Setaria italica
  Transcript Sequence Number=SeqID_60547
  Gene Ontology: Mol. function=protein serine/threonine phosphatase activity; Cellular component=protein serine/threonine phosphatase complex; Biological process=protein amino acid dephosphorylation
  Homolog annotation: Hit_ID=B6TZR2; Match level="QueryCoverage=48%, HitCoverage=8%, E-value=2e-11, Identity=93%"; Hit description =Protein phosphatase 2C
GTFVGVYDGHGGPETARYINDHLFNHLRSKASTSAEVHALDQITIKLCYLFYDRYIQFFDMQVCIS

SEQ ID NO: 126522 - protein, 66 aa, Setaria italica
  misc_feature (25)..(25): Xaa can be any naturally occurring amino acid
  Transcript Sequence Number=SeqID_60548
  Gene Ontology: Mol. function=protein serine/threonine phosphatase activity; Cellular component=protein serine/threonine phosphatase complex; Biological process=protein amino acid dephosphorylation
  Homolog annotation: Hit_ID=Q7XCJ7-2; Match level="QueryCoverage=89%, HitCoverage=17%, E-value=9e-24, Identity=93%"; Hit description =Isoform 2 of Probable protein phosphatase 2C 72
TLYVANLGDSRAVLGRLVKGTGEVXLAMQLSAEHNASFEEVRRELQASHPDDPHIVVLKTTNRLRT

SEQ ID NO: 126523 - protein, 51 aa, Setaria italica
  Transcript Sequence Number=SeqID_60549
  Subcellular localization annotation: CTP_CleavageSite=41; ConfidenceScore=5.06e-01
QSVLIARYKIRLFLAFFFSFFLPFRFTHGISGGCTFSGSTCDNSSFALFVV

SEQ ID NO: 126524 - protein, 79 aa, Setaria italica
  misc_feature (34)..(34): Xaa can be any naturally occurring amino acid
  Transcript Sequence Number=SeqID_60550
  Gene Ontology: Mol. function=voltage-gated potassium channel activity; Cellular component=voltage-gated potassium channel complex; Biological process=potassium ion transport
  Homolog annotation: Hit_ID=B6TKK7; Match level="QueryCoverage=100%, HitCoverage=27%, E-value=3e-35, Identity=85%"; Hit description =Potassium channel tetramerisation domain-containing protein 9
RDGKHFRHVLNWLRDGAIPVLSESEYQQLLREAXGLADYINERLGWKKVDSSEAELTRKDVIKCIQAQRVRFRGVNLSG

SEQ ID NO: 126525 - protein, 86 aa, Setaria italica
  misc_feature (56)..(56): Xaa can be any naturally occurring amino acid
  Transcript Sequence Number=SeqID_60551
  Gene Ontology: Mol. function=aspartate-tRNA ligase activity; Cellular component=cytoplasm; Biological process=tRNA aminoacylation for protein translation
  Homolog annotation: Hit_ID=Q8H104; Match level="QueryCoverage=82%, HitCoverage=13%, E-value=5e-18, Identity=65%"; Hit description =Putative aspartate-tRNA ligase
SPVCLGAQFIRGEEIISGAQRIHTPELLAKRATECGIDVSTISAYIESFSYGAPPXGSRGNIEVFLMLFRAQNSITTLSRPTPKPP

SEQ ID NO: 126526 - protein, 93 aa, Setaria italica
  misc_feature (14)..(14): Xaa can be any naturally occurring amino acid
  Transcript Sequence Number=SeqID_60552
  Gene Ontology: Mol. function=aspartate-tRNA ligase activity; Cellular component=cytoplasm; Biological process=tRNA aminoacylation for protein translation
  Homolog annotation: Hit_ID=B9SBT1; Match level="QueryCoverage=77%, HitCoverage=13%, E-value=4e-28, Identity=80%"; Hit description =Aspartyl-tRNA synthetase, putative
ILYRYPLAVRPFYXTMPCYDNPAYTNSFDVFIRGEEIISGAQRIHTPELLAKRATECGIDVSTISAYIESFRLTVDNLPTIGRFTGLGPRKKK

SEQ ID NO: 126527 - protein, 43 aa, Setaria italica
  Transcript Sequence Number=SeqID_60553
  Gene Ontology: Mol. function=aspartate-tRNA ligase activity; Cellular component=cytoplasm
  Homolog annotation: Hit_ID=B9SBT1; Match level="QueryCoverage=100%, HitCoverage=7%, E-value=2e-10, Identity=72%"; Hit description =Aspartyl-tRNA synthetase, putative
PINLEDAARSEAEFEKAEQAGEKLVRVGQDTRLNYRAIDLRTP

SEQ ID NO: 126528 - protein, 78 aa, Setaria italica
  misc_feature (41)..(41): Xaa can be any naturally occurring amino acid
  Transcript Sequence Number=SeqID_60554
  Gene Ontology: Mol. function=aspartate-tRNA ligase activity; Cellular component=cytoplasm; Biological process=tRNA aminoacylation for protein translation
  Homolog annotation: Hit_ID=B9SBT1; Match level="QueryCoverage=100%, HitCoverage=13%, E-value=9e-22, Identity=66%"; Hit description =Aspartyl-tRNA synthetase, putative
RCYFVGLVPCCFRAENSNTHRHLCEFVGLDAEMEIKEHYFXEVCDIIDGLFVSIFKHLTENCKKELETINRQYPFEPL

SEQ ID NO: 126529 - protein, 67 aa, Setaria italica
  Transcript Sequence Number=SeqID_60555
PIPCVPCLSPFACLRDDVALLANMVEDLSMETGDEKEDDEMEMDDADMVGGGAASFKEKIMGILQQG

SEQ ID NO: 126530 - protein, 77 aa, Setaria italica
  Transcript Sequence Number=SeqID_60556
  Gene Ontology: Mol. function=rRNA (adenine-N6,N6-)-dimethyltransferase activity; Cellular component=nucleus; Biological process=rRNA modification
  Homolog annotation: Hit_ID=B6TPK7; Match level="QueryCoverage=76%, HitCoverage=16%, E-value=1e-24, Identity=93%"; Hit description =Dimethyladenosine transferase
  Subcellular localization annotation: CTP_CleavageSite=59; ConfidenceScore=5.50e-01
PIPCVPCLSSVACLSLSVNVQLLSRVSHLLRVPRNNFRPPPKVDSSVVRIEPTKPLPSVSFKEWDGLVRICFNRKNK

SEQ ID NO: 126531 - protein, 80 aa, Setaria italica
  Transcript Sequence Number=SeqID_60557
  Gene Ontology: Biological process=DNA repair
  Homolog annotation: Hit_ID=Q9LPM1; Match level="QueryCoverage=98%, HitCoverage=18%, E-value=2e-11, Identity=48%"; Hit description =F2J10.13 protein
ETPEQRQRKSISCERTFTATSDSSLLFDKLANLAENLTDDLQKEGLKGKTLTLKLKTADFEVRTRAVTTRGYINSKEDIL

SEQ ID NO: 126532 - protein, 118 aa, Setaria italica
  Transcript Sequence Number=SeqID_60558
  Subcellular localization annotation: CTP_CleavageSite=80; ConfidenceScore=5.58e-01
GGPPLGTAPPSASLGSSHARPPRAHPLAAHMRGPPPASCSSAAPSHLAPPAQPLKLLPVPTCFRSLARRTRKTEERWHPSGSERSARFGEIVSTRIYKEYSLLEPLQPTCTLNQTWVQ

SEQ ID NO: 126533 - protein, 69 aa, Setaria italica
  misc_feature (45)..(45): Xaa can be any naturally occurring amino acid
  Transcript Sequence Number=SeqID_60559
  Gene Ontology: Mol. function=omega peptidase activity; Cellular component=extracellular region; Biological process=glutamine metabolic process
  Homolog annotation: Hit_ID=B6UBJ6; Match level="QueryCoverage=100%, HitCoverage=28%, E-value=3e-26, Identity=64%"; Hit description=Gamma- glutamyl hydrolase
FRENGELSSFFRILTTSPDENGKVYVSTVQANKYPITCTQWHPEXQARKSPNRPPADKVLDNLIYNYSP

SEQ ID NO: 126534 - protein, 101 aa, Setaria italica
  Transcript Sequence Number=SeqID_60560
  Gene Ontology: Cellular component=cytoplasm
  Homolog annotation: Hit_ID=Q8H925; Match level="QueryCoverage=97%, HitCoverage=27%, E-value=2e-34, Identity=52%"; Hit description =Putative WD domain containing protein
  Pfam annotation: Domain name=WD40; Domain location=54-92; Score=43.6; E_value=7.9e-10; Accession=PF00400.24; Description=WD domain, G-beta repeat
VEVLPPWFHVPTGRLEHLVESAVTKQVASCIYHNLPDEITMLEDHKCHEQHIPSECAQILCGHNNEVWFVRFSNNGDYLASSSSDCTAIIWKIIADPSYCI

SEQ ID NO: 126535 - protein, 85 aa, Setaria italica
  misc_feature (43)..(43): Xaa can be any naturally occurring amino acid
  Transcript Sequence Number=SeqID_60561
  Gene Ontology: Mol. function=drug transporter activity; Cellular component=membrane; Biological process=multidrug transport
  Homolog annotation: Hit_ID=Q10A00; Match level="QueryCoverage=100%, HitCoverage=17%, E-value=7e-15, Identity=50%"; Hit description=MATE efflux family protein, expressed
SYLTNVSILAIYVRLSPACKNTWRGFAKEAFRDVICHAPSGIXSIPRAHSLEWWSFELLVLLSGLLPNPKLETSVLSICLNLGSL

SEQ ID NO: 126536 - protein, 89 aa, Setaria italica
  misc_feature (39)..(39): Xaa can be any naturally occurring amino acid
  Transcript Sequence Number=SeqID_60562
  Gene Ontology: Mol. function=1,3-beta-glucan synthase activity; Cellular component=1,3-beta-glucan synthase complex; Biological process=1,3-beta-glucan biosynthetic process
  Homolog annotation: Hit_ID=Q8S5U9; Match level="QueryCoverage=96%, HitCoverage=5%, E-value=1e-41, Identity=90%"; Hit description=1,3 -beta-glucan synthase component family protein, expressed
MYTRVRFHYGHPDVFDRLFHLTRGGVSKASKSINLSEDXFAGYNSTLRGGNVTHHEYVQVGKGRDVGLNQISKFEAKVQMENGEQTLSR

SEQ ID NO: 126537 - protein, 124 aa, Setaria italica
  misc_feature (30)..(30): Xaa can be any naturally occurring amino acid
  Transcript Sequence Number=SeqID_60563
  Gene Ontology: Mol. function=1,3-beta-glucan synthase activity; Cellular component=1,3-beta-glucan synthase complex; Biological process=1,3-beta-glucan biosynthetic process
  Homolog annotation: Hit_ID=Q8S5U9; Match level="QueryCoverage=96%, HitCoverage=7%, E-value=2e-57, Identity=89%"; Hit description=1,3 -beta-glucan synthase component family protein, expressed
FGQSYRSTIAYIFITSSMWFLVLTWLFAPXFQPSGFEWAKIVDDWSDWNKWISNRGGIGVSPDKSWESWWEVEQEHLKYSGTIGLLVEIILAVRFFIYQYGLVYHLRITRDKSILVYLISIGLR

SEQ ID NO: 126538 - protein, 129 aa, Setaria italica
  misc_feature (16)..(16): Xaa can be any naturally occurring amino acid
  misc_feature (28)..(28): Xaa can be any naturally occurring amino acid
  misc_feature (32)..(32): Xaa can be any naturally occurring amino acid
  misc_feature (46)..(46): Xaa can be any naturally occurring amino acid
  Transcript Sequence Number=SeqID_60564
  Gene Ontology: Mol. function=1,3-beta-glucan synthase activity; Cellular component=1,3-beta-glucan synthase complex; Biological process=1,3-beta-glucan biosynthetic process
  Homolog annotation: Hit_ID=Q8S5U9; Match level="QueryCoverage=84%, HitCoverage=6%, E-value=1e-33, Identity=72%"; Hit description=1,3 -beta-glucan synthase component family protein, expressed
VRGELLDFYSRSHFVXKGIELMILLIIXYQLXFGQSYRSTIAYIFXFTSSMWFLVLTWLFAPFLFNPSGFEWAKIVDDWSDWNKWIINRGGIGVSPDKSWESWRERERAGWNTRGTSAHRISLARGTTP

SEQ ID NO: 126539 - protein, 79 aa, Setaria italica
  misc_feature (21)..(21): Xaa can be any naturally occurring amino acid
  misc_feature (30)..(30): Xaa can be any naturally occurring amino acid
  misc_feature (32)..(32): Xaa can be any naturally occurring amino acid
  misc_feature (42)..(42): Xaa can be any naturally occurring amino acid
  Transcript Sequence Number=SeqID_60565
  Gene Ontology: Mol. function=1,3-beta-glucan synthase activity; Cellular component=1,3-beta-glucan synthase complex; Biological process=1,3-beta-glucan biosynthetic process
  Homolog annotation: Hit_ID=Q8S5U9; Match level="QueryCoverage=96%, HitCoverage=4%, E-value=4e-27, Identity=81%"; Hit description=1,3 -beta-glucan synthase component family protein, expressed
AYIFITSSMWFLVLTWLFAPXFNPSGFEWXKXVDDWSDWNKXWISNRGGDWCGLPDKSWESWWEVEQEHLKYSGTIRNF

SEQ ID NO: 126540 - protein, 90 aa, Setaria italica
  misc_feature (41)..(41): Xaa can be any naturally occurring amino acid
  misc_feature (60)..(60): Xaa can be any naturally occurring amino acid
  misc_feature (78)..(79): Xaa can be any naturally occurring amino acid
  Transcript Sequence Number=SeqID_60566
  Gene Ontology: Mol. function=1,3-beta-glucan synthase activity; Cellular component=1,3-beta-glucan synthase complex; Biological process=1,3-beta-glucan biosynthetic process
  Homolog annotation: Hit_ID=Q8S5U9; Match level="QueryCoverage=87%, HitCoverage=4%, E-value=1e-29, Identity=83%"; Hit description=1,3 -beta-glucan synthase component family protein, expressed
LGRLLFFASSVGLEEGLSHGRFIHNHPLQVALASQSLVQLXGFLMALPMMMEIGLERGFXKALSEFVMMNLQLATVFXXFSLGTKTHYYG

SEQ ID NO: 126541 - protein, 116 aa, Setaria italica
  Transcript Sequence Number=SeqID_60567
  Gene Ontology: Mol. function=1,3-beta-glucan synthase activity; Cellular component=1,3-beta-glucan synthase complex; Biological process=1,3-beta-glucan biosynthetic process
  Homolog annotation: Hit_ID=Q8S5U9; Match level="QueryCoverage=88%, HitCoverage=6%, E-value=7e-42, Identity=81%"; Hit description=1,3 -beta-glucan synthase component family protein, expressed
ILIVLIVFLHMALRDIFVCFLAFLPTGWGILLIAQACKPLARRVGLWGSVRALARAYEIIMGVLLFTPITILAWFPFVSEFQTRMLFNQASAEGTRQNLPRNYLGRNKKRKRYNTT

SEQ ID NO: 126542 - protein, 118 aa, Setaria italica
  Transcript Sequence Number=SeqID_60568
  Gene Ontology: Mol. function=1,3-beta-glucan synthase activity; Cellular component=1,3-beta-glucan synthase complex; Biological process=1,3-beta-glucan biosynthetic process
  Homolog annotation: Hit_ID=Q8S5U9; Match level="QueryCoverage=98%, HitCoverage=7%, E-value=1e-54, Identity=90%"; Hit description=1,3 -beta-glucan synthase component family protein, expressed
AVQSTRKGKQKGKVNFVELRSFWHIFRSFYRLWSFFILALQVMIILAWNGGSLANIFDYTVFKKILSIFITSAILNLGQATLDIIFNWKARRTMEFAVKLRYVLKFTMAALWVVLLPV

SEQ ID NO: 126543 - protein, 104 aa, Setaria italica
  misc_feature (16)..(16): Xaa can be any naturally occurring amino acid
  misc_feature (56)..(56): Xaa can be any naturally occurring amino acid
  misc_feature (61)..(61): Xaa can be any naturally occurring amino acid
  Transcript Sequence Number=SeqID_60569
  Gene Ontology: Mol. function=transferase activity, transferring glycosyl groups; Cellular component=1,3-beta-glucan synthase complex; Biological process=cell wall organization and biogenesis
  Homolog annotation: Hit_ID=UPI0001A7B147; Match level="QueryCoverage =91%, HitCoverage=4%, E-value=6e-38, Identity=74%"; Hit description =ATGSL12 (glucan synthase-like 12); 1,3-beta-glucan synthase/ transferase, transferring glycosyl groups
YIYHHMAFEMYGMLAXNVSALTGEYVKPAYGGEKEAFLRKVVTPIYHTIAKEAERXKREKXNHSEWRNYDDLNEYFWSADCFRLGWPMRADADFFLSTFQILPD

SEQ ID NO: 126544 - protein, 58 aa, Setaria italica
  misc_feature (45)..(45): Xaa can be any naturally occurring amino acid
  misc_feature (55)..(55): Xaa can be any naturally occurring amino acid
  Transcript Sequence Number=SeqID_60570
  Gene Ontology: Mol. function=1,3-beta-glucan synthase activity; Cellular component=1,3-beta-glucan synthase complex; Biological process=cell wall organization and biogenesis
  Homolog annotation: Hit_ID=Q8S5U9; Match level="QueryCoverage=91%, HitCoverage=3%, E-value=1e-21, Identity=92%"; Hit description=1,3 -beta-glucan synthase component family protein, expressed
YLLVLLNQDNYMEEALKMRNLLQEFLKEHGVRRPSILGVREHIFXGSVSSLAWFXSNQ

SEQ ID NO: 126545 - protein, 79 aa, Setaria italica
  Transcript Sequence Number=SeqID_60571
ITSHEIKYTTRQKYLGIFDFITSRTTTITSHEIKFLIFVSFIAILIVLIVFLHMALRDIFVCFLAFLPTGWGILLIAQA

SEQ ID NO: 126546 - protein, 63 aa, Setaria italica
  Transcript Sequence Number=SeqID_60572
TKKGNGNKYYVNKRIRFKPSCILLPVFQHAQAVNICQCIVYFCHYNIRSRFHIISPSFLPTPQ

SEQ ID NO: 126547 - protein, 72 aa, Setaria italica
  Transcript Sequence Number=SeqID_60573
  Gene Ontology: Mol. function=1,3-beta-glucan synthase activity; Cellular component=1,3-beta-glucan synthase complex; Biological process=1,3-beta-glucan biosynthetic process
  Homolog annotation: Hit_ID=Q8S5U9; Match level="QueryCoverage=83%, HitCoverage=3%, E-value=2e-14, Identity=65%"; Hit description=1,3 -beta-glucan synthase component family protein, expressed
VGRRRFSADFQLFFRLIKFLIFVSFIAILIVLIVFLHMALRDIFVCFLAFLPTGWGILLVCLLLFSGSFVFN

SEQ ID NO: 126548 - protein, 70 aa, Setaria italica
  Transcript Sequence Number=SeqID_60574
SKFLIFVSFIAILIVLIVFLHMALRDIFVCFLAFLPTGWGILLIAHKYISQGHMKKYYQETKKKKKKKKK

SEQ ID NO: 126549 - protein, 42 aa, Setaria italica
  Transcript Sequence Number=SeqID_60575
  Gene Ontology: Mol. function=transferase activity, transferring glycosyl groups; Cellular component=1,3-beta-glucan synthase complex; Biological process=cell wall organization and biogenesis
  Homolog annotation: Hit_ID=B9SQ55; Match level="QueryCoverage=73%, HitCoverage=1%, E-value=2e-09, Identity=90%"; Hit description =Transferase, transferring glycosyl groups, putative
VYDEQNHQLNPFHAKFAENYRLYSRSHFVKGIELMILLIIYQ

SEQ ID NO: 126550 - protein, 81 aa, Setaria italica
  Transcript Sequence Number=SeqID_60576
  Gene Ontology: Mol. function=binding
  Homolog annotation: Hit_ID=B9RTA1; Match level="QueryCoverage=60%, HitCoverage=9%, E-value=3e-14, Identity=79%"; Hit description =Chaperone binding protein, putative
ICDSILDNIIANYAPKATVYSKEFKITHKSPVKGGQYADAIKWLSWAVVLIEKSGKDADIVEVLSSRASSYKEVGEYKKAI

SEQ ID NO: 126551 - protein, 60 aa, Setaria italica
  misc_feature (60)..(60): Xaa can be any naturally occurring amino acid
  Transcript Sequence Number=SeqID_60577
  Gene Ontology: Mol. function=binding
GGGGRPSSSVVAPPLSPPPSGLTVSATKSKGMDSYKGGQYADAIKWLSWAVVLIEKSGKX

SEQ ID NO: 126552 - protein, 96 aa, Setaria italica
  Transcript Sequence Number=SeqID_60578
LLWINCTAMKKGRHVASGSPWDGIPGLLRRMTTDDALFFVNKRGRLLQFMVALRKFKWKDCHSPPDTKIAFIVDQEVFRRNIIFVGRPCDHRPCPW

SEQ ID NO: 126553 - protein, 58 aa, Setaria italica
  Transcript Sequence Number=SeqID_60579
CPFTNVQVALRKFKWKDCHSPPDTKIAFIVDQEVFRRNIIFVVGRNGRLCRTLILTVS

SEQ ID NO: 126554 - protein, 62 aa, Setaria italica
  Transcript Sequence Number=SeqID_60580
  Gene Ontology: Mol. function=lipoic acid binding; Cellular component =glycine cleavage complex; Biological process=glycine catabolic process
  Homolog annotation: Hit_ID=B6UHJ7; Match level="QueryCoverage=87%, HitCoverage=33%, E-value=5e-21, Identity=96%"; Hit description =Glycine cleavage system H protein 1
  Pfam annotation: Domain name=GCV_H; Domain location=1-62; Score=2.0; E_value=1.9e-08; Accession=PF01597.11; Description=Glycine cleavage H-protein
HLFLSFGFQDHLGDVVYVELPEVGISVSQGKNFGAVESVKATSDINSPVSGEVVEVNEKLSE

SEQ ID NO: 126555 - protein, 143 aa, Setaria italica
  misc_feature (125)..(125): Xaa can be any naturally occurring amino acid
  Transcript Sequence Number=SeqID_60581
  Gene Ontology: Mol. function=lipoic acid binding; Cellular component =glycine cleavage complex; Biological process=glycine catabolic process
  Homolog annotation: Hit_ID=B6UHJ7; Match level="QueryCoverage=87%, HitCoverage=76%, E-value=7e-60, Identity=92%"; Hit description =Glycine cleavage system H protein 1
  Pfam annotation: Domain name=GCV_H; Domain location=41-143; Score =172.3; E_value=1.4e-48; Accession=PF01597.11; Description=Glycine cleavage H-protein
TKARTSPATERKAAPSNQSRAAAYLRISTFPRAFSTVMKDLKYAHTHEWVKVEGDSATVGITDHAQDHLGDVVYVELPEVGISVSQGKNFGAVESVKATSDINSPVSGEVVEVNEKLSEEPGLVXNRQSPYDKGWIIKVKLSD

SEQ ID NO: 126556 - protein, 116 aa, Setaria italica
  misc_feature (29)..(29): Xaa can be any naturally occurring amino acid
  Transcript Sequence Number=SeqID_60582
  Gene Ontology: Mol. function=lipoic acid binding; Cellular component =glycine cleavage complex; Biological process=glycine catabolic process
  Homolog annotation: Hit_ID=B6UHJ7; Match level="QueryCoverage=98%, HitCoverage=71%, E-value=9e-54, Identity=92%"; Hit description =Glycine cleavage system H protein 1
  Pfam annotation: Domain name=GCV_H; Domain location=5-114; Score =195.7; E_value=1.2e-55; Accession=PF01597.11; Description=Glycine cleavage H-protein
LMKDLKYADTHEWVKVEGDSATVGITNHXQDHLGDVVYVELPEVDISVSQGKNFGAVESVKATSDINSPVSGEVVEVNEKLSEEPGLVNASPYDKGWIIKVKLSDSGELNSLMDVL

SEQ ID NO: 126557 - protein, 77 aa, Setaria italica
  Transcript Sequence Number=SeqID_60583
  Gene Ontology: Mol. function=methyltransferase activity; Cellular component=ribonucleoprotein complex; Biological process=snoRNA metabolic process
  Homolog annotation: Hit_ID=B6T4G7; Match level="QueryCoverage=87%, HitCoverage=21%, E-value=5e-32, Identity=100%"; Hit description =Fibrillarin-2
  Pfam annotation: Domain name=Fibrillarin; Domain location=2-77; Score= -34.1; E_value=7e-06; Accession=PF01269.9; Description=Fibrillarin
VNKQILGIRLPGTRVLYLGAASGTTVSHVSDIVGPDGLVYAVEFSHRSGRDLVNMAKKRTNVIPIIEDARHPARYRM

SEQ ID NO: 126558 - protein, 72 aa, Setaria italica
  Transcript Sequence Number=SeqID_60584
  Gene Ontology: Mol. function=RNA binding; Cellular component=nucleus; Biological process=rRNA processing
  Homolog annotation: Hit_ID=B6T4G7; Match level="QueryCoverage=72%, HitCoverage=16%, E-value=2e-20, Identity=86%"; Hit description =Fibrillarin-2
STMPAEAVFAAEVEKLKADQFKPSEQVTLEPFERDHACVVGGYRIPKKTTSTKPRLSLDSTKLLQTQHKVSI

SEQ ID NO: 126559 - protein, 50 aa, Setaria italica
  Transcript Sequence Number=SeqID_60585
MMVICKQISHKRLGGNEARIRFTSLVPPSSSSSGLSGKAARSVDIWNRRV

SEQ ID NO: 126560 - protein, 56 aa, Setaria italica
  Transcript Sequence Number=SeqID_60586
  Subcellular localization annotation: CTP_CleavageSite=7; ConfidenceScore=5.12e-01
PSCRAARSREISSKRRMISPILSLVPPSSSSSGLSGKAARSVDIWNRRVIFLILSL

SEQ ID NO: 126561 - protein, 48 aa, Setaria italica
  Transcript Sequence Number=SeqID_60587
  Gene Ontology: Mol. function=oxidoreductase activity; Biological process=oxidation reduction
  Homolog annotation: Hit_ID=Q8S412; Match level="QueryCoverage=91%, HitCoverage=10%, E-value=1e-14, Identity=84%"; Hit description =Cinnamyl alcohol dehydrogenase
MEQGGKPVLGWAARDASGHLSPYRFSRRVQRDGDVTIKVLFCGICHTD

SEQ ID NO: 126562 - protein, 48 aa, Setaria italica
  Transcript Sequence Number=SeqID_60588
  Gene Ontology: Mol. function=oxidoreductase activity; Biological process=oxidation reduction
  Homolog annotation: Hit_ID=Q8S412; Match level="QueryCoverage=91%, HitCoverage=12%, E-value=2e-11, Identity=70%"; Hit description =Cinnamyl alcohol dehydrogenase
MEQGGKPVLGWAARDASGHRLPVQRDGDVTIKVLFCGICHTDLHVIKE

SEQ ID NO: 126563 - protein, 129 aa, Setaria italica
  misc_feature (73)..(73): Xaa can be any naturally occurring amino acid
  Transcript Sequence Number=SeqID_60589
  Homolog annotation: Hit_ID=Q7XYY2; Match level="QueryCoverage=94%, HitCoverage=14%, E-value=9e-33, Identity=54%"; Hit description =Phytochrome and flowering time 1 protein
MAAAAAERQLVVAVEGTAALGPYWSTIVGDYVEKIVRSFCANEVPGQKLAGAPPELALVVFHTHGPYSAFWCXSRSGWTKDIDSFLSWLSGIPFSGGGFSEASTCEGLAEALMILQGTPNTTQSHPNHE

SEQ ID NO: 126564 - protein, 96 aa, Setaria italica
  Transcript Sequence Number=SeqID_60590
  Gene Ontology: Mol. function=cation transmembrane transporter activity; Cellular component=membrane; Biological process=cation transport
  Homolog annotation: Hit_ID=B6TZ73; Match level="QueryCoverage=84%, HitCoverage=19%, E-value=3e-40, Identity=92%"; Hit description=Metal tolerance protein C3
LISNLLFKFSCTCAIQDHYFDVITNVVGLVAAVLGDKFVWWIDPAGAVLLAVYTIVNWSKTVLENAVTLVGRCAPPEMLQMLTYLAMKHDTRVKRV

SEQ ID NO: 126565 - protein, 43 aa, Setaria italica
  Transcript Sequence Number=SeqID_60591
  Gene Ontology: Mol. function=cation transmembrane transporter activity; Cellular component=membrane; Biological process=cation transport
  Homolog annotation: Hit_ID=B6TZ73; Match level="QueryCoverage=83%, HitCoverage=8%, E-value=1e-11, Identity=91%"; Hit description=Metal tolerance protein C3
NEFFVNILGFQVLVKAIEQLVENKPGAKMTSEQLIWLYSIMLS

SEQ ID NO: 126566 - protein, 68 aa, Setaria italica
  Transcript Sequence Number=SeqID_60592
  Gene Ontology: Mol. function=threonine-type endopeptidase activity; Cellular component=proteasome core complex; Biological process =ubiquitin-dependent protein catabolic process
  Homolog annotation: Hit_ID=B4FI86; Match level="QueryCoverage=73%, HitCoverage=17%, E-value=3e-19, Identity=92%"; Hit description =Proteasome subunit beta type
HVQLHGHGVAGGVRCGDDGDGMYFSAEAPDVPSMVLPTCADFDGFQAATKDMVKNKKGTTTLAFIFDK

SEQ ID NO: 126567 - protein, 55 aa, Setaria italica
  Transcript Sequence Number=SeqID_60593
RGFLLPFLLRRSRPESSAPPGTKACREKLRRDRLNERCVSKFRLLANTSLVVYRC

SEQ ID NO: 126568 - protein, 31 aa, Setaria italica
  misc_feature (23)..(23): Xaa can be any naturally occurring amino acid
  Transcript Sequence Number=SeqID_60594
LQAEKSELRDEKTRLKAERERLXQMLKGVSA

SEQ ID NO: 126569 - protein, 56 aa, Setaria italica
  Transcript Sequence Number=SeqID_60595
  Gene Ontology: Mol. function=hydrolase activity
RDQLTCDVTIYHGRDDELLPVQCSYAVKAKVPDHLQALVDLAGAAADDVVEGVPRG

SEQ ID NO: 126570 - protein, 52 aa, Setaria italica
  Transcript Sequence Number=SeqID_60596
  Gene Ontology: Mol. function=protein binding; Cellular component =cytoplasm; Biological process=vesicle docking during exocytosis
  Homolog annotation: Hit_ID=B6SHD7; Match level="QueryCoverage=96%, HitCoverage=7%, E-value=5e-17, Identity=86%"; Hit description=SNARE -interacting protein KEULE
ITRDRLLIEMLRSTRKSSNSTWKVLIMDKLTVKIMSFSCKMADITEERVSCK

SEQ ID NO: 126571 - protein, 36 aa, Setaria italica
  Transcript Sequence Number=SeqID_60597
VHQKQVKKGSHMQRYLTINSKVFQVHLKVWKKSQIA

SEQ ID NO: 126572 - protein, 46 aa, Setaria italica
  Transcript Sequence Number=SeqID_60598
  Gene Ontology: Mol. function=oxidoreductase activity, acting on the CH-CH group of donors; Cellular component=mitochondrion; Biological process=metabolic process
  Homolog annotation: Hit_ID=Q0MX57; Match level="QueryCoverage=100%, HitCoverage=11%, E-value=2e-12, Identity=78%"; Hit description =Isovaleryl-CoA dehydrogenase
APEEYGGMGLGYMYHCIAMEEISRASGSVGLSYGAHSNLCINQLVR

SEQ ID NO: 126573 - protein, 44 aa, Setaria italica
  Transcript Sequence Number=SeqID_60599
NLRPQTQDPGIRFIISCYHSISYLRSLSQRNSQADVGNYNRLGQ

SEQ ID NO: 126574 - protein, 155 aa, Setaria italica
  misc_feature (76)..(76): Xaa can be any naturally occurring amino acid
  misc_feature (98)..(98): Xaa can be any naturally occurring amino acid
  Transcript Sequence Number=SeqID_60600
  Gene Ontology: Mol. function=protein serine/threonine kinase activity; Biological process=protein amino acid phosphorylation
  Homolog annotation: Hit_ID=Q6ZI44; Match level="QueryCoverage=100%, HitCoverage=33%, E-value=3e-55, Identity=71%"; Hit description =Serine/threonine-protein kinase SAPK6
VMLVGAYPFEDPDDPKNFRKTIGRIVSIQYQIPEYVHISQDCRQLLSRIFVANPAKVLLGSEPCKARAILLWVYHXVNAISSLFCFQRITIREIRNHXWFLKNLPRELTEAVQAKYYKKDNSAPTFSDQTVEDIMKIVEEARTPPQSSTPVLVCG

SEQ ID NO: 126575 - protein, 28 aa, Setaria italica
  Transcript Sequence Number=SeqID_60601
MERYELLKDIGSGNFGVARLMRNKETKE

SEQ ID NO: 126576 - protein, 75 aa, Setaria italica
  Transcript Sequence Number=SeqID_60602
STFSILNILSSYLMLANKEYLIHLRPYLGTLQQQKIVGIPIKLVQKLTASCFLKISSVCYVFRNWSTADVLNPFH

SEQ ID NO: 126577 - protein, 67 aa, Setaria italica
  Transcript Sequence Number=SeqID_60603
RLRLKRRGEQAYSQQHGEELRNKCLASGAQRIEWVKYITALSEVEVLPASSLDRANRQLRLIQAVHL

SEQ ID NO: 126578 - protein, 75 aa, Setaria italica
  Transcript Sequence Number=SeqID_60604
CTQSISLIQTEALLTQDQSATAASLKEKKRMRWRNRNAQRRILRMILNWKQDGMIPEHAKNLLQNKIKIIELCLQ

SEQ ID NO: 126579 - protein, 46 aa, Setaria italica
  Transcript Sequence Number=SeqID_60605
YAEHYFRLPEYSVLATTTHHLPNTTIPIYTASFYLQHNLGQHFYFQ

SEQ ID NO: 126580 - protein, 69 aa, Setaria italica
  Transcript Sequence Number=SeqID_60606
RIICTWVETESFDMMRTGTDYSFLSPPPRTNSSLFLYGLTSKEKKTKKHHRNKNTIIPFHAIQLIDCSN

SEQ ID NO: 126581 - protein, 134 aa, Setaria italica
  Transcript Sequence Number=SeqID_60607
  Gene Ontology: Mol. function=ribonuclease inhibitor activity; Biological process=regulation of RNA metabolic process
  Homolog annotation: Hit_ID=B6T0A4; Match level="QueryCoverage=100%, HitCoverage=79%, E-value=3e-67, Identity=93%"; Hit description =Regulator of ribonuclease activity A
  Pfam annotation: Domain name=Methyltransf_6; Domain location=11-134; Score=116.4; E_value=9.7e-32; Accession=PF03737.7; Description =Demethylmenaquinone methyltransferase
MASLPLATAEACDANAGLILNGDLYALQPIFRIYGRRQIFAGPVVTLKIFEDNVLLREFLEEKGHGRVLVVDAGGSMRCAVLGGNLAQLAQNNGWAGIVINGCIRDVDEINGCDVGVRALNSHPMKSNKKGVGE

SEQ ID NO: 126582 - protein, 67 aa, Setaria italica
  Transcript Sequence Number=SeqID_60608
  Gene Ontology: Mol. function=ferredoxin-NADP+ reductase activity; Cellular component=thylakoid membrane; Biological process=electron transport chain
  Homolog annotation: Hit_ID=B6TRH0; Match level="QueryCoverage=80%, HitCoverage=14%, E-value=1e-22, Identity=94%"; Hit description =Ferredoxin--NADP reductase
NCQDHNKLHGGHTSYLKQYPDNFRYDKALSREQTNRSGGKMYVQDKIEEYSDEIFKLLDNGAHIPFK

SEQ ID NO: 126583 - protein, 53 aa, Setaria italica
  Transcript Sequence Number=SeqID_60609
  Gene Ontology: Mol. function=nuclease activity; Cellular component =intracellular; Biological process=DNA repair
  Subcellular localization annotation: CTP_CleavageSite=37; ConfidenceScore=5.38e-01
MFLCFSLNLTVNFFSSKNTKFTAGCPSLPSQMKTVVCAMEDLQCSAEGPSSER

SEQ ID NO: 126584 - protein, 91 aa, Setaria italica
  Transcript Sequence Number=SeqID_60610
FLIVPARKVPRTQTNSWENPSKQARVTYKQKKKQELWFSPARPLHAGLFQCEGAEKRDASQSPSEEDFGGKRRASSATGTRGGDDVSAADC

SEQ ID NO: 126585 - protein, 68 aa, Setaria italica
  Transcript Sequence Number=SeqID_60611
HETSLLLQYQWITAILFHIINTGYSFAIETFDPLACMYMTHDISYFLDLSTVILFIGFVERVISTSFA

SEQ ID NO: 126586 - protein, 62 aa, Setaria italica
  Transcript Sequence Number=SeqID_60612
SPHEGFKRLVCNSSLTKCMCSLTEMCMHIFSLLPLSYHQQCILSIFLLAVPQWDDDDMTKIL

SEQ ID NO: 126587 - protein, 137 aa, Setaria italica
  Transcript Sequence Number=SeqID_60613
  Gene Ontology: Mol. function=receptor activity; Cellular component =membrane; Biological process=intracellular protein transport
  Homolog annotation: Hit_ID=Q307Y3; Match level="QueryCoverage=89%, HitCoverage=53%, E-value=1e-42, Identity=71%"; Hit description =Vesicle transport v-SNARE 11-like
  Pfam annotation: Domain name=V-SNARE; Domain location=47-137; Score= -11.0; E_value=0.017; Accession=PF05008.7; Description=Vesicle transport v-SNARE protein
GSRSGRHERGLEGYERQYCEASASLTRKCTAAAALQGEKLKQKAAEIKSGIDGAEALIRKMDLEARSLQPSVRAGLLAKIREYKSDLNNLKGALKRITSGNAQQGAREELLESGMADALGVSAEYKRIQRTRLQGTN

SEQ ID NO: 126588 - protein, 51 aa, Setaria italica
  Transcript Sequence Number=SeqID_60614
NLCVFLLCYLNIGTPYKHTTHKYGLNKRNRKYKRNTHRLQNADRIKEIQQD

SEQ ID NO: 126589 - protein, 113 aa, Setaria italica
  Transcript Sequence Number=SeqID_60615
  Gene Ontology: Mol. function=nucleotide binding; Cellular component =intracellular; Biological process=small GTPase mediated signal transduction
  Homolog annotation: Hit_ID=B6TE37; Match level="QueryCoverage=70%, HitCoverage=14%, E-value=6e-30, Identity=81%"; Hit description=tRNA modification GTPase trmE
  Pfam annotation: Domain name=TrmE_N; Domain location=2-66; Score =31.4; E_value=7.6e-11; Accession=PF10396.1; Description=GTP-binding protein TrmE N-terminus
MAASSDEGPGGAYGWAPRSYTREDVVELQCHGNDLCLRRVLRACLEAGARLADPGEFTLRAFLNGRLDLAQAENVSRLISAKSTAAADSALAGIQVISSWAYIDDNHLRLRIH

SEQ ID NO: 126590 - protein, 82 aa, Setaria italica
  misc_feature (16)..(16): Xaa can be any naturally occurring amino acid
  Transcript Sequence Number=SeqID_60616
  Gene Ontology: Mol. function=protein binding; Cellular component=cell wall; Biological process=carbohydrate metabolic process
  Homolog annotation: Hit_ID=Q67VC5; Match level="QueryCoverage=92%, HitCoverage=11%, E-value=2e-26, Identity=85%"; Hit description =DeliriumA-like
GAICLARSFKIINESXLTSLDLGFNEIRDDGAFALAQALKANEDLAVTSLNLGNNFFTKFGQVSLVCFHLSMIICESILNLI

SEQ ID NO: 126591 - protein, 98 aa, Setaria italica
  misc_feature (84)..(84): Xaa can be any naturally occurring amino acid
  Transcript Sequence Number=SeqID_60617
  Gene Ontology: Mol. function=nucleoside-triphosphatase activity; Cellular component=integral to membrane; Biological process=protein catabolic process
  Homolog annotation: Hit_ID=Q0DHL4; Match level="QueryCoverage=97%, HitCoverage=11%, E-value=2e-34, Identity=78%"; Hit description=Cell division protease ftsH homolog 8, mitochondrial
  Pfam annotation: Domain name=AAA; Domain location=1-98; Score=-12.6; E_value=0.00031; Accession=PF00004.21; Description=ATPase family associated with various cellular activities (AAA)
TKGHTRVRNLFQEARQCAPSIVFIDEIDAIGRARGRGGFSGRNDERESTLNQLLVEMDGFGTTSGVVVLAGTNRPDILDKGIIXKGPGRFDRQITIDK

SEQ ID NO: 126592 - protein, 81 aa, Setaria italica
  misc_feature (72)..(72): Xaa can be any naturally occurring amino acid
  Transcript Sequence Number=SeqID_60618
  Gene Ontology: Mol. function=nucleoside-triphosphatase activity; Cellular component=integral to membrane; Biological process=protein catabolic process
  Homolog annotation: Hit_ID=Q0DHL4; Match level="QueryCoverage=74%, HitCoverage=7%, E-value=1e-25, Identity=98%"; Hit description=Cell division protease ftsH homolog 8, mitochondrial
GFLSPDGSAVSEGKRRRGRGGFSGSNDERESTLNQLLVEMDGFGTTSGVVVLAGTNRPDILDKALLRPGRFXDRQITIDKP

SEQ ID NO: 126593 - protein, 42 aa, Setaria italica
  Transcript Sequence Number=SeqID_60619
QESTDEGGWNFQETASIRTCYSRHLWAPPSYPFGVVVLVILL

SEQ ID NO: 126594 - protein, 108 aa, Setaria italica
  Transcript Sequence Number=SeqID_60620
YTNKEINYCYYYYLPNSDAPNKCLFPNSSAKTQDIRSFDMFRNKNNTLRVQVEPTLVCVGEEVRAASSVALLGLIFTFGNISSFFAQRSFVNIFFAFFELTYCSFLSV

SEQ ID NO: 126595 - protein, 71 aa, Setaria italica
  Transcript Sequence Number=SeqID_60621
  Gene Ontology: Mol. function=phosphoprotein phosphatase activity; Biological process=actin cytoskeleton organization and biogenesis
  Homolog annotation: Hit_ID=Q6K8Z4; Match level="QueryCoverage=95%, HitCoverage=5%, E-value=2e-20, Identity=66%"; Hit description=Formin- like protein 7
VTSHVTTEPVIHQEKQGLGVEEFAKVLDIFNHLDWLDGKRDTVPHTTQLKISAVTDEPETFFDTREELESE

SEQ ID NO: 126596 - protein, 72 aa, Setaria italica
  misc_feature (43)..(43): Xaa can be any naturally occurring amino acid
  misc_feature (61)..(61): Xaa can be any naturally occurring amino acid
  misc_feature (66)..(66): Xaa can be any naturally occurring amino acid
  misc_feature (68)..(68): Xaa can be any naturally occurring amino acid
  Transcript Sequence Number=SeqID_60622
PKASVAGNLVMHQEPTWVLDDHIASSSPSNSANERQCIHIQNXWKSQHLTKMISQVHCQFXNLPGXRXWLFR

SEQ ID NO: 126597 - protein, 87 aa, Setaria italica
  misc_feature (59)..(59): Xaa can be any naturally occurring amino acid
  Transcript Sequence Number=SeqID_60623
  Gene Ontology: Mol. function=ubiquitin thiolesterase activity; Cellular component=intracellular; Biological process=ubiquitin -dependent protein catabolic process
  Homolog annotation: Hit_ID=B6T8R6; Match level="QueryCoverage=86%, HitCoverage=33%, E-value=4e-31, Identity=89%"; Hit description =Ubiquitin carboxyl-terminal hydrolase isozyme L3
  Pfam annotation: Domain name=Peptidase_C12; Domain location=4-83; Score=-43.1; E_value=0.0026; Accession=PF01088.13; Description =Ubiquitin carboxyl-terminal hydrolase, family 1
MGKRWLPLEANPDVMNQFMWGLGVPEDVGFCDVYGLDDEILAMVPQPVLAVILLYPPGXRSKESQASITSPVETKVSLNCMNVWLFR

SEQ ID NO: 126598 - protein, 73 aa, Setaria italica
  Transcript Sequence Number=SeqID_60624
  Gene Ontology: Mol. function=protein serine/threonine kinase activity; Cellular component=plasma membrane; Biological process =protein amino acid phosphorylation
  Homolog annotation: Hit_ID=Q8W3E7; Match level="QueryCoverage=75%, HitCoverage=10%, E-value=2e-24, Identity=96%"; Hit description =Putative kinase
TLNLDNEAIEPKVVHRDIKSSNILIDEEFNGKLSDFGLAKLLGAGKSHITTRVMGTFGYVLCLLFHFSSALLH

SEQ ID NO: 126599 - protein, 54 aa, Setaria italica
  Transcript Sequence Number=SeqID_60625
  Gene Ontology: Mol. function=hydrolase activity, hydrolyzing O -glycosyl compounds; Biological process=carbohydrate metabolic process
  Homolog annotation: Hit_ID=B9SVM8; Match level="QueryCoverage=85%, HitCoverage=7%, E-value=5e-11, Identity=65%"; Hit description=Alpha -galactosidase/alpha-n-acetylgalactosaminidase, putative
DNIDEWGRPFPDLQRFPSSRIDRGFSQIASKVHGMGLKFGIHLMKGKTISREWS

SEQ ID NO: 126600 - protein, 87 aa, Setaria italica
  misc_feature (11)..(11): Xaa can be any naturally occurring amino acid
  Transcript Sequence Number=SeqID_60626
  Gene Ontology: Mol. function=protein serine/threonine kinase activity; Biological process=protein amino acid phosphorylation
  Homolog annotation: Hit_ID=C4P7S3; Match level="QueryCoverage=100%, HitCoverage=17%, E-value=1e-41, Identity=98%"; Hit description=CBL -interacting protein kinase 16
SIMRMVRHPNXVVGIREVLASRSRVFVVMEYARGGELFAKVARGRLTEDHARRYFQQLVAAVGFCHRRGVAHRDLKPENLLLDEEGR

SEQ ID NO: 126601 - protein, 48 aa, Setaria italica
  Transcript Sequence Number=SeqID_60627
ANSTVLSFYDQFLERGLVTITNAFLPFSARRNISVCVPLFHFSFVFEI

SEQ ID NO: 126602 - protein, 76 aa, Setaria italica
  misc_feature (59)..(59): Xaa can be any naturally occurring amino acid
  Transcript Sequence Number=SeqID_60628
  Gene Ontology: Mol. function=zinc ion binding; Cellular component =membrane
  Homolog annotation: Hit_ID=Q75I10; Match level="QueryCoverage=60%, HitCoverage=6%, E-value=1e-19, Identity=95%"; Hit description =Putative mechanosensitive ion channel protein
LLSVQPFFHLIKTLSCPCFLIFLWQIIVADMRKVLAKNPHIEQQKLHRRVFFEKIDPKXQALMIYISCFVKHHVSR

SEQ ID NO: 126603 - protein, 57 aa, Setaria italica
  Transcript Sequence Number=SeqID_60629
  Homolog annotation: Hit_ID=Q75I10; Match level="QueryCoverage=75%, HitCoverage=6%, E-value=3e-11, Identity=69%"; Hit description =Putative mechanosensitive ion channel protein
  Subcellular localization annotation: CTP_CleavageSite=23; ConfidenceScore=5.01e-01
MFLLQNVSVTVTLWNSWDHNVLRSNYRPMLYTPHRYRSSGFRSFALPVPFQKIPLVK

SEQ ID NO: 126604 - protein, 68 aa, Setaria italica
  Transcript Sequence Number=SeqID_60630
  Homolog annotation: Hit_ID=Q75I10; Match level="QueryCoverage=89%, HitCoverage=9%, E-value=4e-21, Identity=72%"; Hit description =Putative mechanosensitive ion channel protein
  Subcellular localization annotation: CTP_CleavageSite=36; ConfidenceScore=5.20e-01
LLFSLQRQDCWGHNVLRSNYRPMLYTPHRYRSSGFRSFALPVPFQKIPLVKSASLALTRSCDKLLSNP

SEQ ID NO: 126605 - protein, 143 aa, Setaria italica
  misc_feature (43)..(43): Xaa can be any naturally occurring amino acid
  Transcript Sequence Number=SeqID_60631
  Gene Ontology: Mol. function=isomerase activity; Biological process =cellular biosynthetic process
  Homolog annotation: Hit_ID=Q9AYT7; Match level="QueryCoverage=99%, HitCoverage=38%, E-value=3e-52, Identity=75%"; Hit description=IDI2
DYIDVKDSADGWNAIRDMVVRGAPAIAIAAALALAVEVSGFRXFTGTPAGAASFVSKKLEYLVSSRPTAVNLSDAATKLQTLVSKTAETAKDAKAIFQVYIEAAETMLIDDVADNKAIGSHGAEFLQKQLGNSKNNLLVTKPN

SEQ ID NO: 126606 - protein, 67 aa, Setaria italica
  Transcript Sequence Number=SeqID_60632
  Gene Ontology: Mol. function=protein transporter activity; Cellular component=nuclear pore
  Homolog annotation: Hit_ID=Q7XDD1; Match level="QueryCoverage=98%, HitCoverage=7%, E-value=4e-29, Identity=84%"; Hit description =Importin-beta N-terminal domain containing protein
NISVGTNRYWPTLKSIFDQRAWDTRTMESICRSCKFAVRTCGRAMGTTIGAMLEEIQTLYQQHKQSC

SEQ ID NO: 126607 - protein, 59 aa, Setaria italica
  Transcript Sequence Number=SeqID_60633
  Gene Ontology: Mol. function=zinc ion binding; Cellular component =nucleus
  Homolog annotation: Hit_ID=Q7XCX5; Match level="QueryCoverage=98%, HitCoverage=3%, E-value=3e-20, Identity=77%"; Hit description=Plus-3 domain containing protein, expressed
EECKRLRQSMKFGLTTRLKVGDIYEKAKIFQSLRFKDWLENEKQRLSHLRDRASETGRS

SEQ ID NO: 126608 - protein, 61 aa, Setaria italica
  Transcript Sequence Number=SeqID_60634
  Gene Ontology: Mol. function=zinc ion binding; Cellular component =nucleus; Biological process=transcription initiation
  Homolog annotation: Hit_ID=Q7XCX5; Match level="QueryCoverage=98%, HitCoverage=5%, E-value=3e-20, Identity=61%"; Hit description=Plus-3 domain containing protein, expressed
LDKKEVITMDTISNQDFTEGDIYEKAKIFQSLRFKDWLENEKQRLSHLRDRASETGRRKEL

SEQ ID NO: 126609 - protein, 45 aa, Setaria italica
  Transcript Sequence Number=SeqID_60635
LSRTSGNSSATTGPGVPEEVKPKPSAASGPSLDGSTKASGWQPQG

SEQ ID NO: 126610 - protein, 80 aa, Setaria italica
  Transcript Sequence Number=SeqID_60636
HVCSSVKKGNCCSKEDSIFLMHAILKLCYELLGLRLLSAALNSFFIVFRTVGCFLDEYRSIYHSVQESDKDASHPLIIPA

SEQ ID NO: 126611 - protein, 56 aa, Setaria italica
  Transcript Sequence Number=SeqID_60637
GTHDMDHRKLGSNQMVLDMLITDLVLGQALAPYLTYLIFFVVKVTGELKSECTQKH

SEQ ID NO: 126612 - protein, 74 aa, Setaria italica
  misc_feature (16)..(16): Xaa can be any naturally occurring amino acid
  Transcript Sequence Number=SeqID_60638
TIFSSYHMLIDYLWLXKKFSLSEYFEPFIRSKYMMVRYFCASRMTRMIHQRKALMIQVMMTEFMFRSVSLKSLI

SEQ ID NO: 126613 - protein, 64 aa, Setaria italica
  Transcript Sequence Number=SeqID_60639
KDFVEKRTQIGEYFDKLITSDSAGPVLSLDQVNIKPFKWKTVKKLLKKEQNPLVAGKLLVCFFM

SEQ ID NO: 126614 - protein, 46 aa, Setaria italica
  Transcript Sequence Number=SeqID_60640
TEILNTGSDNIFIKDATEIGEKKVHNNQLNSVWFPLVLMAPFWIFP

SEQ ID NO: 126615 - protein, 124 aa, Setaria italica
  Transcript Sequence Number=SeqID_60641
  Gene Ontology: Mol. function=hormone activity; Cellular component =extracellular region; Biological process=intracellular protein transport
  Homolog annotation: Hit_ID=B9SEV1; Match level="QueryCoverage=89%, HitCoverage=23%, E-value=1e-38, Identity=66%"; Hit description=Rab3 gtpase-activating protein non-catalytic subunit, putative
LISLGRILLLDTHALVAVRLWKGYRDASCLFVEMLLNKDKASSSSMHTEYTKSDYCLCLAIHAPRKGIIEVWKMRTGSRLLTIPCPKGSRILQPSARLSSTYSYTPLEVYLFNKYFCTTLAVTI

SEQ ID NO: 126616 - protein, 66 aa, Setaria italica
  Transcript Sequence Number=SeqID_60642
  Homolog annotation: Hit_ID=B9SEV1; Match level="QueryCoverage=100%, HitCoverage=13%, E-value=1e-21, Identity=71%"; Hit description=Rab3 gtpase-activating protein non-catalytic subunit, putative
GYRDASCLFVEMLLNKDKASSSSMHTEYTKSDYCLCLAIHAPRKGIIEVWKMRTGSRLLTIPCPKG

SEQ ID NO: 126617 - protein, 105 aa, Setaria italica
  Transcript Sequence Number=SeqID_60643
FVASVLSLVREGSGKGASEQVVTSGAGITKFVKWKDNIRRFEELGTIPYIHMSCGFRRWTVHYQGTSASNDVDLSANGILRSNSINAKSGSGQDAPWMLLQRPCL

SEQ ID NO: 126618 - protein, 89 aa, Setaria italica
  Transcript Sequence Number=SeqID_60644
ILLMRKVGHGDVEGDDQGDSDDDDVTGEDAVILISAKPDSREVVERQIKKLKEFHRSPSKKGKDAQVKKDKGKQEEEKQDEDCVYFLVF

SEQ ID NO: 126619 - protein, 63 aa, Setaria italica
  misc_feature (2)..(2): Xaa can be any naturally occurring amino acid
  misc_feature (5)..(5): Xaa can be any naturally occurring amino acid
  Transcript Sequence Number=SeqID_60645
  Gene Ontology: Mol. function=oligosaccharyl transferase activity; Cellular component=membrane; Biological process=protein amino acid glycosylation
  Homolog annotation: Hit_ID=Q6XL70; Match level="QueryCoverage=100%, HitCoverage=27%, E-value=1e-27, Identity=93%"; Hit description =Putative oligosaccharyl transferase STT3 protein (Fragment)
HXGLXVFDDFREAYGWLRHNTDVDDKVASWWDYGYQTTAMANRTVIVDNNTWNNTHIATVGTA

SEQ ID NO: 126620 - protein, 96 aa, Setaria italica
  misc_feature (31)..(31): Xaa can be any naturally occurring amino acid
  Transcript Sequence Number=SeqID_60646
  Gene Ontology: Mol. function=ATPase activity, coupled to transmembrane movement of substances; Cellular component=integral to membrane; Biological process=transport
  Homolog annotation: Hit_ID=Q5SMN1; Match level="QueryCoverage=91%, HitCoverage=6%, E-value=2e-28, Identity=71%"; Hit description =Putative multidrug resistance-associated protein 7
GLIPAQAPTTTSFYLIILAVFGIINSLFTLXKGVSFAFGGLRAAIHIHASLLENIISAPVCFFDQNPSGRILNRLSSDLYTVDDSLPFILNIILLA

SEQ ID NO: 126621 - protein, 71 aa, Setaria italica
  Transcript Sequence Number=SeqID_60647
  Homolog annotation: Hit_ID=B6TGT3; Match level="QueryCoverage=88%, HitCoverage=55%, E-value=1e-19, Identity=74%"; Hit description =Mitochondrial import inner membrane translocase subunit TIM16
MTTYLIHPVSASLIANLIVMGSTILGRAMLQAYRKALDNANKTGVAHEAINNIRRASKSMTEQEARQILGV

SEQ ID NO: 126622 - protein, 46 aa, Setaria italica
  Transcript Sequence Number=SeqID_60648
TPKLLTNSTPVLGLLTILSCSINFRFILDNLHHLLRKKEKRSFIEE

SEQ ID NO: 126623 - protein, 90 aa, Setaria italica
  misc_feature (7)..(7): Xaa can be any naturally occurring amino acid
  Transcript Sequence Number=SeqID_60649
  Gene Ontology: Mol. function=phospholipase D activity; Cellular component=membrane; Biological process=phosphatidylcholine metabolic process
  Homolog annotation: Hit_ID=Q6AVR2; Match level="QueryCoverage=100%, HitCoverage=10%, E-value=3e-33, Identity=73%"; Hit description =Phospholipase D
GWSIYHXVKLVREPTKPLPGGTPATLGDLLKGKVREGVRVVVLLWDDKTSHDKFLFKTDGVMHTHDEETRKFFSHSGVHCILVPRYASTK

SEQ ID NO: 126624 - protein, 39 aa, Setaria italica
  misc_feature (2)..(2): Xaa can be any naturally occurring amino acid
  Transcript Sequence Number=SeqID_60650
YXTDFSGRGELSARQMHLAKFLRSLQKLADEVISFYFDH

SEQ ID NO: 126625 - protein, 47 aa, Setaria italica
  Transcript Sequence Number=SeqID_60651
FNSTPFELQDDSFVLKAMGLSGKEETDGTQAPVANGGILKGRVKHEH

SEQ ID NO: 126626 - protein, 46 aa, Setaria italica
  Transcript Sequence Number=SeqID_60652
SRSRPTKSSSSLPPCSKLMRVYGALMWSLGKVLNTPEVVRVYNGWM

SEQ ID NO: 126627 - protein, 82 aa, Setaria italica
  Transcript Sequence Number=SeqID_60653
LGGLVVFSGTAHLRVGLLIGPVQVVKSDEIRQHFVFTRFRHERRVSCGLIMFNQVNPKWIHHSWYQSRFSKTENTTGPNTLL

SEQ ID NO: 126628 - protein, 65 aa, Setaria italica
  Transcript Sequence Number=SeqID_60654
WLANIRKTLLIHVLQFRSFVRYDIHPERKYNIHASIYHDNYGFVSSRLCVVDPLRIYLVKHDLAA

SEQ ID NO: 126629 - protein, 70 aa, Setaria italica
  Transcript Sequence Number=SeqID_60655
APRRRLYELHPVPEDDGVAELLPSEAEAAQKSSSSLPPCSKLMRVYGALMWSLGKVLNTPEVVRVYNGWM

SEQ ID NO: 126630 - protein, 65 aa, Setaria italica
  Transcript Sequence Number=SeqID_60656
IVGNIIHHMRFYFQQRNKAEYGFKEVLKKGKQNSTTVILPFSILKVYFNNHRYMIMANPWDISCS

SEQ ID NO: 126631 - protein, 101 aa, Setaria italica
  misc_feature (85)..(85): Xaa can be any naturally occurring amino acid
  Transcript Sequence Number=SeqID_60657
  Gene Ontology: Mol. function=sequence-specific DNA binding; Cellular component=nucleus
  Homolog annotation: Hit_ID=B4FZE9; Match level="QueryCoverage=95%, HitCoverage=24%, E-value=4e-34, Identity=74%"; Hit description=GATA transcription factor 29
FILYLSGSSEEDLLYHSEAPVGSFETGSGSVLLRHPNSKSPDEESEASSIPADDKSHITSESYSGSASVVVHSGNKATVNLKAVXRGPLHIEDNARRFMIG

SEQ ID NO: 126632 - protein, 56 aa, Setaria italica
  Transcript Sequence Number=SeqID_60658
  Gene Ontology: Mol. function=sequence-specific DNA binding; Cellular component=nucleus; Biological process=regulation of transcription, DNA-dependent
  Homolog annotation: Hit_ID=B4FZE9; Match level="QueryCoverage=69%, HitCoverage=9%, E-value=2e-17, Identity=100%"; Hit description=GATA transcription factor 29
  Pfam annotation: Domain name=GATA; Domain location=7-37; Score=32.1; E_value=2.2e-06; Accession=PF00320.19; Description=GATA zinc finger
MPSTSLAQGTPLWRNGPPDKPVLCNACGSRWRTKGSLANYTPMHRKDDYLYCIVIC

SEQ ID NO: 126633 - protein, 90 aa, Setaria italica
  misc_feature (77)..(77): Xaa can be any naturally occurring amino acid
  Transcript Sequence Number=SeqID_60659
  Gene Ontology: Mol. function=sequence-specific DNA binding; Cellular component=nucleus
  Homolog annotation: Hit_ID=B4FZE9; Match level="QueryCoverage=54%, HitCoverage=11%, E-value=5e-17, Identity=85%"; Hit description=GATA transcription factor 29
  Subcellular localization annotation: CTP_CleavageSite=29; ConfidenceScore=5.31e-01
TSSNWVLFFLVLVVFLKVLGVLSCIPSSRSSSGSAISYSESCVPYGAVDASEMSGSAQSHAWESLVPSRKRSCATCXKPSPVEKLVKDLN

SEQ ID NO: 126634 - protein, 53 aa, Setaria italica
  Transcript Sequence Number=SeqID_60660
NVGCLDCSQFLKEVTTIYDCDMPPEGQRTNELNIEERGSNLFRDANINNNRVF

SEQ ID NO: 126635 - protein, 62 aa, Setaria italica
  Transcript Sequence Number=SeqID_60661
CRAFSFVLVAPNLLQQLVHDLCGSLHAPLISGVFMASSASEANAESRCSMGIPVEQLSSSIH

SEQ ID NO: 126636 - protein, 54 aa, Setaria italica
  Transcript Sequence Number=SeqID_60662
SIASNAQAFVAFDGRRCVYRRTPALFCGVVAALLALAGLALATAASGCFGRNAP

SEQ ID NO: 126637 - protein, 93 aa, Setaria italica
  Transcript Sequence Number=SeqID_60663
  Homolog annotation: Hit_ID=B6ST21; Match level="QueryCoverage=81%, HitCoverage=22%, E-value=9e-15, Identity=49%"; Hit description =Membrane protein
STKLPVSYLVTFYLPTSYSVYYHHHTGIINIFKGMSILSVDQKWKTAYIIAICILGAIALILEVVTWGIVLKRRKEDNKTYNGNGNGHLPLSM

SEQ ID NO: 126638 - protein, 41 aa, Setaria italica
  Transcript Sequence Number=SeqID_60664
  Gene Ontology: Cellular component=plasma membrane
  Homolog annotation: Hit_ID=B6ST21; Match level="QueryCoverage=80%, HitCoverage=8%, E-value=7e-12, Identity=81%"; Hit description =Membrane protein
FLCAFVFPIQIFALFLRPKKDHKYRFYWNVYHHSIGYTIII

SEQ ID NO: 126639 - protein, 57 aa, Setaria italica
  Transcript Sequence Number=SeqID_60665
LVHVAFFLGDALDEHVNTLLSLGTNRRHEPPSATNTFPVISLVDTPEVNFFKVRIPV

SEQ ID NO: 126640 - protein, 68 aa, Setaria italica
  misc_feature (25)..(25): Xaa can be any naturally occurring amino acid
  Transcript Sequence Number=SeqID_60666
  Pfam annotation: Domain name=zf-C3HC4; Domain location=17-54; Score =40.1; E_value=9.1e-09; Accession=PF00097.17; Description=Zinc finger, C3HC4 type (RING finger)
MHIGQVKEVPKEPKFTCPICMNELXEAASTVCGHIFCQKCIKAAIQAQKKCPTCRTCTRMTAPDYFRS

SEQ ID NO: 126641 - protein, 37 aa, Setaria italica
  Transcript Sequence Number=SeqID_60667
QLCMPMCGSLVAGGILLEAWLSCTVILPVSHNEASSS

SEQ ID NO: 126642 - protein, 48 aa, Setaria italica
  Transcript Sequence Number=SeqID_60668
RSRSSRERCVKAQVTALILVARSGGYSLLLNFSLTTRTLIWLCNHRTL

SEQ ID NO: 126643 - protein, 62 aa, Setaria italica
  misc_feature (29)..(29): Xaa can be any naturally occurring amino acid
  Transcript Sequence Number=SeqID_60669
  Gene Ontology: Mol. function=DNA-directed DNA polymerase activity; Biological process=DNA replication
  Homolog annotation: Hit_ID=B6T490; Match level="QueryCoverage=80%, HitCoverage=12%, E-value=1e-16, Identity=80%"; Hit description =Protein trpH
DILLKFAEEPSSANLGNIIKFGQLTNADXFSPINTGIDVVDFCLSSWSSNCIVLLVSIVCNW

SEQ ID NO: 126644 - protein, 84 aa, Setaria italica
  Transcript Sequence Number=SeqID_60670
TSDTQTSVKTQRYESDSNQCSTSVSRDVDEGVKRIANAVKWFLTRFNIKLKNVYVVFDPQTSLDSRLPETNRSLVFRIKELEFG

SEQ ID NO: 126645 - protein, 43 aa, Setaria italica
  Transcript Sequence Number=SeqID_60671
NIKLKNVYVVFDPQTSLDSRLPETNRSLGAYYPNWFEDQIQDL

SEQ ID NO: 126646 - protein, 58 aa, Setaria italica
  Transcript Sequence Number=SeqID_60672
  Gene Ontology: Mol. function=oxidoreductase activity
SVESWILLLLLHNSHCPRRTENLDTWYLGQETYIRVVDPNGGYNVTEMVAPDNMLYCG

SEQ ID NO: 126647 - protein, 82 aa, Setaria italica
  misc_feature (72)..(72): Xaa can be any naturally occurring amino acid
  Transcript Sequence Number=SeqID_60673
  Gene Ontology: Mol. function=zinc ion binding; Cellular component =intracellular
LVTKVSTCKLKVLKGKKLKVKLAVDSEESISDLSVSLELLNKNEGVTAPSSKNETTPLHEAAKSGNAQLTLXLLEQGLDPCI

SEQ ID NO: 126648 - protein, 47 aa, Setaria italica
  misc_feature (28)..(28): Xaa can be any naturally occurring amino acid
  Transcript Sequence Number=SeqID_60674
  Gene Ontology: Mol. function=zinc ion binding; Cellular component =intracellular
NRVKRLTCEPRDASHLRIVLLTSGGHFXAGCVFDGNSIVAHKNIFIG

SEQ ID NO: 126649 - protein, 45 aa, Setaria italica
  Transcript Sequence Number=SeqID_60675
SQQRPDQAKQEMKRNFAPSQQCTQSVTTLPNYITRSDNYNGTFVV

SEQ ID NO: 126650 - protein, 90 aa, Setaria italica
  misc_feature (63)..(63): Xaa can be any naturally occurring amino acid
  Transcript Sequence Number=SeqID_60676
  Gene Ontology: Mol. function=nucleic acid binding; Cellular component= ribonucleoprotein complex; Biological process=RNA processing
TGEAEKDEGGLIIKDHIITLEAVTGEAEKDYWSKIRGIQENYKDNRSYKGRAGKNYRGGKTSXQIGKDEGKKTLNAEKNSNKAQKVEAAA

SEQ ID NO: 126651 - protein, 88 aa, Setaria italica
  misc_feature (28)..(28): Xaa can be any naturally occurring amino acid
  Transcript Sequence Number=SeqID_60677
  Gene Ontology: Mol. function=nucleic acid binding; Cellular component= ribonucleoprotein complex; Biological process=RNA processing
EVNIKEATESEKCTGDALEDCEKRGDSXNSICSRDGNSVSGNVKNPISREDLKEALKKFGNVRVIIIHNFQDFAFVFITSVVVLFYYL

SEQ ID NO: 126652 - protein, 79 aa, Setaria italica
  misc_feature (38)..(38): Xaa can be any naturally occurring amino acid
  Transcript Sequence Number=SeqID_60678
  Gene Ontology: Mol. function=phosphoribosylamine-glycine ligase activity; Cellular component=chloroplast; Biological process=purine base biosynthetic process
  Homolog annotation: Hit_ID=B6SW54; Match level="QueryCoverage=100%, HitCoverage=18%, E-value=1e-33, Identity=81%"; Hit description =Phosphoribosylamine--glycine ligase
  Pfam annotation: Domain name=GARS_A; Domain location=20-79; Score= -75.1; E_value=1.9e-05; Accession=PF01071.11; Description =Phosphoribosylglycinamide synthetase,
LVKVGIPTFGPSSEAAALEGSKDFMKKLCDKYNIPTAXGAPIVVKADGLAAGKGVVVAMTLDEAFEAIDSMLVEGSFGS

SEQ ID NO: 126653 - protein, 54 aa, Setaria italica
  Transcript Sequence Number=SeqID_60679
  Pfam annotation: Domain name=WRKY; Domain location=8-47; Score=-7.3; E_value=0.0065; Accession=PF03106.7; Description=WRKY DNA -binding domain
SAGGGAAENDGHSWRKYGQKEILGAKNPRFVPVLSLIFFIAQSARVLLFGVRIL

SEQ ID NO: 126654 - protein, 64 aa, Setaria italica
  Transcript Sequence Number=SeqID_60680
  Gene Ontology: Mol. function=sequence-specific DNA binding; Cellular component=nucleus; Biological process=regulation of transcription, DNA-dependent
  Homolog annotation: Hit_ID=B2KJ72; Match level="QueryCoverage=79%, HitCoverage=17%, E-value=8e-17, Identity=76%"; Hit description=WRKY transcription factor 30 (Fragment)
  Pfam annotation: Domain name=WRKY; Domain location=28-60; Score=34.8; E_value=4.6e-08; Accession=PF03106.7; Description=WRKY DNA -binding domain
KTTKKRKTTEKVKNQVRVSSAAGGDIPADDGHSWRKYGQKEILGAKYPRSYYRCTHRHSQGCAA

SEQ ID NO: 126655 - protein, 39 aa, Setaria italica
  Transcript Sequence Number=SeqID_60681
  Gene Ontology: Mol. function=ER retention sequence binding; Cellular component=endoplasmic reticulum; Biological process=protein retention in ER lumen
  Homolog annotation: Hit_ID=Q65XC2; Match level="QueryCoverage=100%, HitCoverage=18%, E-value=8e-11, Identity=82%"; Hit description=ER lumen protein retaining receptor
HHSRWIPWLAGLVQTALYADFFYYYFLSWKNNVKLELPA

SEQ ID NO: 126656 - protein, 48 aa, Setaria italica
  Transcript Sequence Number=SeqID_60682
CETTNDLGRTLDLCFGMGQMRGFFLTPSLKFAPTGSRTQDLRSATRAT

SEQ ID NO: 126657 - protein, 40 aa, Setaria italica
  Transcript Sequence Number=SeqID_60683
LLVHSLYGTQDDTTPIISEPQLWALPSRNETIISFWRSEE

SEQ ID NO: 126658 - protein, 39 aa, Setaria italica
  Transcript Sequence Number=SeqID_60684
HADHPQEDEEKPDAYIDAVKVSFMLTVFVFIVVAIARIK

SEQ ID NO: 126659 - protein, 45 aa, Setaria italica
  Transcript Sequence Number=SeqID_60685
MGCLPCFGSAGEGAAKKGGARKDGLSDRRGGSDSKKDAVILREGN

SEQ ID NO: 126660 - protein, 56 aa, Setaria italica
  Transcript Sequence Number=SeqID_60686
ANKLLMKPITLAYGVAYYKQISNSWVAYGCLWGTKRCTLHLLPSLNAWLSSLSLND

SEQ ID NO: 126661 - protein, 85 aa, Setaria italica
  misc_feature (22)..(22): Xaa can be any naturally occurring amino acid
  Transcript Sequence Number=SeqID_60687
  Gene Ontology: Cellular component=integral to membrane
RRHGGELGAPGRCCGRRRSCWXGTEMVASLLITEISSPLLHLREMLKEFGVRDTDLNLLVDVLFAVTFSAARMGVGPYLTYVTVT

SEQ ID NO: 126662 - protein, 80 aa, Setaria italica
  misc_feature (65)..(65): Xaa can be any naturally occurring amino acid
  Transcript Sequence Number=SeqID_60688
  Gene Ontology: Mol. function=serine-type endopeptidase activity; Biological process=proteolysis
  Homolog annotation: Hit_ID=B6SVB6; Match level="QueryCoverage=90%, HitCoverage=9%, E-value=1e-29, Identity=84%"; Hit description =Acylamino-acid-releasing enzyme
MVHGTLLIVQVKAPLLMLLGGADLRVPASNGLQYARALRERGGGVKIMMFPEDIHEIIIPRSDFXENFLNIGVWFKKHME

SEQ ID NO: 126663 - protein, 110 aa, Setaria italica
  Transcript Sequence Number=SeqID_60689
  Gene Ontology: Mol. function=nucleotide binding; Cellular component =myosin complex; Biological process=signal transduction
  Homolog annotation: Hit_ID=Q94GQ9; Match level="QueryCoverage=87%, HitCoverage=11%, E-value=4e-51, Identity=96%"; Hit description =Putative myosin heavy chain, 3'-partial (Fragment)
DQFLDKNKDYVVAEHQALLNSSRCHFVANLFPPLPEETSKQSKFSSIGTRFKQQLQSLMETLSTTEPHYIRCVKPNTVLKPGIFENFNVLNQLRCGVCMWNLFYYVPLFQ

SEQ ID NO: 126664 - protein, 141 aa, Setaria italica
  misc_feature (25)..(25): Xaa can be any naturally occurring amino acid
  misc_feature (32)..(32): Xaa can be any naturally occurring amino acid
  misc_feature (51)..(51): Xaa can be any naturally occurring amino acid
  Transcript Sequence Number=SeqID_60690
  Gene Ontology: Mol. function=nucleotide binding; Cellular component =myosin complex
  Homolog annotation: Hit_ID=Q6UAL3; Match level="QueryCoverage=100%, HitCoverage=8%, E-value=8e-46, Identity=73%"; Hit description=Myosin heavy chain class XI E1 protein
LSQETLERESKVNQLQEMIERLETXLSSMESXNQVLRQQSLVVASADEDKXSKQIERLESKIAILESEIQLLRSNSVLAVQAIVTPEMNQTSVMENLVHKEIDNRHQLEEVKIANEQVAVPPVKNLSKQKSLTDRQQENHE

SEQ ID NO: 126665 - protein, 38 aa, Setaria italica
  Transcript Sequence Number=SeqID_60691
RNCLFRLESKIAILESEIQLLRSNSVLAVQAIVTPFDN

SEQ ID NO: 126666 - protein, 42 aa, Setaria italica
  Transcript Sequence Number=SeqID_60692
LIQRRIKTHLMRKEFIKLRKASIKSQKFWRDSMAPTQSLCCL

SEQ ID NO: 126667 - protein, 83 aa, Setaria italica
  misc_feature (54)..(54): Xaa can be any naturally occurring amino acid
  Transcript Sequence Number=SeqID_60693
  Gene Ontology: Mol. function=nucleic acid binding
  Homolog annotation: Hit_ID=Q337N7; Match level="QueryCoverage=81%, HitCoverage=4%, E-value=6e-17, Identity=58%"; Hit description=SNF2 domain-containing protein, putative, expressed
  Subcellular localization annotation: CTP_CleavageSite=70; ConfidenceScore=5.21e-01
PIPCVPCLSPVACLSVRDPERKSNMTAVPADPNVVRSVKAASRSRQPQQPKVTXNNQKKCNNLTHMLTLRSEGTKAGCTITCN

SEQ ID NO: 126668 - protein, 62 aa, Setaria italica
  misc_feature (50)..(50): Xaa can be any naturally occurring amino acid
  Transcript Sequence Number=SeqID_60694
PMRSLSLGKHVKDKNVANEITYALQVTFYVSCCCFIIVSSFYVAVRWLFXGYALWFQITSCF

SEQ ID NO: 126669 - protein, 66 aa, Setaria italica
  Transcript Sequence Number=SeqID_60695
  Gene Ontology: Mol. function=transcription regulator activity; Cellular component=nucleus
KLKFLGLRILLVCRQTGTLTRMEIFLSLVRLLEPNCDGGAAENANNMNKPLGLVHQPIIPATGRIP

SEQ ID NO: 126670 - protein, 47 aa, Setaria italica
  Transcript Sequence Number=SeqID_60696
FKVKIVIVKLQLLQFTDCCDCDFNRNIHAFCLRTVISKWTLMSQLRI

SEQ ID NO: 126671 - protein, 59 aa, Setaria italica
  Transcript Sequence Number=SeqID_60697
LSFLESCLLLFLSLYCYVLDASYHKLWSMTYDSKHHRHPHSINQSQRISFSPNKSLNPS

SEQ ID NO: 126672 - protein, 50 aa, Setaria italica
  Transcript Sequence Number=SeqID_60698
LYCISLSHQVHSSTVIRTKVDMILKSLVNILADGTSGTSHHEATRDDKSG

SEQ ID NO: 126673 - protein, 50 aa, Setaria italica
  Transcript Sequence Number=SeqID_60699
  Gene Ontology: Mol. function=sequence-specific DNA binding; Cellular component=nucleus; Biological process=regulation of transcription, DNA-dependent
  Homolog annotation: Hit_ID=Q45V73; Match level="QueryCoverage=92%, HitCoverage=20%, E-value=1e-15, Identity=91%"; Hit description=MADS10
LLSNLRNQVSQIPPAGKQAVAETENVIAEDGQSSESVMTALHSGSSQDND

SEQ ID NO: 126674 - protein, 102 aa, Setaria italica
  misc_feature (53)..(53): Xaa can be any naturally occurring amino acid
  Transcript Sequence Number=SeqID_60700
EVRHMADADWLFLAEVCNIRSVEQNLSGPKASISKIEMDNAPQHYRYLQRSAXKALQILRSIPAAARRTLPVLTNAQGDIVCIPVSTALRIARLSLELFYTQ

SEQ ID NO: 126675 - protein, 78 aa, Setaria italica
  Transcript Sequence Number=SeqID_60701
  Gene Ontology: Mol. function=ATP-dependent peptidase activity; Cellular component=integral to membrane; Biological process=ATP -dependent proteolysis
  Homolog annotation: Hit_ID=B9RS08; Match level="QueryCoverage=92%, HitCoverage=14%, E-value=3e-15, Identity=50%"; Hit description=ATP -dependent peptidase, putative
QVHFLLQTSIARRSDMVMLSSANAIGSLSFKEMITVHNATGLGLRGEPSKIYSWFPGYAWTIALCAACESNIGWLFRA

SEQ ID NO: 126676 - protein, 74 aa, Setaria italica
  misc_feature (21)..(21): Xaa can be any naturally occurring amino acid
  Transcript Sequence Number=SeqID_60702
  Gene Ontology: Mol. function=phosphoinositide phospholipase C activity; Cellular component=plasma membrane; Biological process =intracellular signaling cascade
  Homolog annotation: Hit_ID=B6SKE7; Match level="QueryCoverage=86%, HitCoverage=10%, E-value=1e-28, Identity=93%"; Hit description =Phospholipase C
YVKKPDFLLTTGPNGEVFDPXASLPVKKTLKVKVYMGDGWRMDFSKTHFDAFSPPDFYTRVKISILILAHGSCS

SEQ ID NO: 126677 - protein, 89 aa, Setaria italica
  Transcript Sequence Number=SeqID_60703
  Gene Ontology: Mol. function=phosphoinositide phospholipase C activity; Cellular component=plasma membrane; Biological process =intracellular signaling cascade
  Homolog annotation: Hit_ID=B6SKE7; Match level="QueryCoverage=88%, HitCoverage=13%, E-value=8e-33, Identity=81%"; Hit description =Phospholipase C
  Pfam annotation: Domain name=PI-PLC-X; Domain location=1-82; Score= -30.8; E_value=0.0034; Accession=PF00388.11; Description =Phosphatidylinositol-specific phospholipase C, X domain
GVSTKLRIIRCLKSIKEYAFCASNYPLVITLEDHLTADLQAKVAEMLTETFGDLLFIPSSDPMKEFPSPEALMKRIIISTNSLYSCGGL

SEQ ID NO: 126678 - protein, 81 aa, Setaria italica
  misc_feature (62)..(62): Xaa can be any naturally occurring amino acid
  Transcript Sequence Number=SeqID_60704
  Gene Ontology: Mol. function=phosphoinositide phospholipase C activity; Cellular component=plasma membrane; Biological process =intracellular signaling cascade
  Homolog annotation: Hit_ID=B6SKE7; Match level="QueryCoverage=100%, HitCoverage=16%, E-value=5e-35, Identity=77%"; Hit description =Phospholipase C
  Pfam annotation: Domain name=PI-PLC-X; Domain location=1-80; Score= -40.4; E_value=0.02; Accession=PF00388.11; Description=Phosphatidylino sitol-specific phospholipase C, X domain
DMWPNASKNNVDILHGGTLTAPVEMIRCLKSIKEYAFCASNYPLVITLEDHLTADLQAKVAXDPMKEFPSPEALMKRIIIS

SEQ ID NO: 126679 - protein, 117 aa, Setaria italica
  Transcript Sequence Number=SeqID_60705
  Gene Ontology: Mol. function=protein binding; Cellular component =cytoplasm; Biological process=regulation of transcription, DNA -dependent
  Homolog annotation: Hit_ID=B6TRI3; Match level="QueryCoverage=96%, HitCoverage=61%, E-value=5e-48, Identity=66%"; Hit description =Leucine-rich repeat-containing protein 40
  Pfam annotation: Domain name=LRR_1; Domain location=10-31; Score=8.5; E_value=7; Accession=PF00560.25; Description=Leucine Rich Repeat
  Pfam annotation: Domain name=LRR_1; Domain location=33-54; Score =17.5; E_value=0.057; Accession=PF00560.25; Description=Leucine Rich Repeat
  Pfam annotation: Domain name=LRR_1; Domain location=56-77; Score =16.0; E_value=0.16; Accession=PF00560.25; Description=Leucine Rich Repeat
  Pfam annotation: Domain name=LRR_1; Domain location=80-98; Score =10.3; E_value=3.2; Accession=PF00560.25; Description=Leucine Rich Repeat
  Pfam module annotation: Pfam domain module=LRR_1::LRR_1::LRR_1::LRR _1; Domain location=10-31::33-54::56-77::80-98
FLGRVSASPQLQELYLRRMKLHEFPNGLLGLKQLRILDLSQNNLTTVPEGIKNFTALIELDLSDNNITALPAELGLLEPNLQVLKLDGNPLRSIRRTLLERGTKAILKYLKEKLPAE

SEQ ID NO: 126680 - protein, 87 aa, Setaria italica
  Transcript Sequence Number=SeqID_60706
  Gene Ontology: Mol. function=protein binding; Cellular component =cytoplasm; Biological process=regulation of transcription, DNA -dependent
  Homolog annotation: Hit_ID=B6TRI3; Match level="QueryCoverage=91%, HitCoverage=13%, E-value=2e-34, Identity=93%"; Hit description =Leucine-rich repeat-containing protein 40
  Pfam annotation: Domain name=LRR_1; Domain location=26-47; Score =16.0; E_value=0.16; Accession=PF00560.25; Description=Leucine Rich Repeat
  Pfam annotation: Domain name=LRR_1; Domain location=3-24; Score=5.0; E_value=34; Accession=PF00560.25; Description=Leucine Rich Repeat
  Pfam annotation: Domain name=LRR_1; Domain location=50-68; Score =10.3; E_value=3.2; Accession=PF00560.25; Description=Leucine Rich Repeat
  Pfam module annotation: Pfam domain module=LRR_1::LRR_1::LRR_1; Domain location=26-47::3-24::50-68
KQDSGILDLSQNNLTTVPEGIKNFTALIELDLSDNNITALPAELGLLEPNLQVLKLDGNPLRSIRRTLLERGTKAILKYLKEKLLAE

SEQ ID NO: 126681 - protein, 62 aa, Setaria italica
  Transcript Sequence Number=SeqID_60707
  Pfam annotation: Domain name=LRR_1; Domain location=30-51; Score =17.1; E_value=0.073; Accession=PF00560.25; Description=Leucine Rich Repeat
CQYQLVLKTTSYFPYRAQLKEYPVGACNLKLSFLDLSNNSLSGLPAELGKMTTLRRLLLTGN

SEQ ID NO: 126682 - protein, 57 aa, Setaria italica
  Transcript Sequence Number=SeqID_60708
  Homolog annotation: Hit_ID=B6TRI3; Match level="QueryCoverage=50%, HitCoverage=4%, E-value=2e-09, Identity=100%"; Hit description =Leucine-rich repeat-containing protein 40
MSRRISFESAPIPADIGTLSKLGILDLHSNQLKEYPVGACNLKLSFLDLSNNSLSGL

SEQ ID NO: 126683 - protein, 142 aa, Setaria italica
  misc_feature (120)..(120): Xaa can be any naturally occurring amino acid
  misc_feature (131)..(131): Xaa can be any naturally occurring amino acid
  Transcript Sequence Number=SeqID_60709
LPINPPLESKPSSSQSMHFPESTVFEEPEQFEDPCYDPDAIALLGPVSESLDNFPLDMNCGFISSNVTKESHGKPSPIESPLSRSRMVDEKPIKQPHSSTTKGPGGFILPEASSEQGTWXQMWSTPLVQEXLGLQGPQSQWL

SEQ ID NO: 126684 - protein, 73 aa, Setaria italica
  Transcript Sequence Number=SeqID_60710
  Gene Ontology: Mol. function=protein serine/threonine kinase activity; Biological process=protein amino acid phosphorylation
  Homolog annotation: Hit_ID=B9S5G6; Match level="QueryCoverage=83%, HitCoverage=10%, E-value=1e-09, Identity=45%"; Hit description =Protein kinase, putative
MQYRAWPLVQSMAARMDHRPMEVSPSSDFVQIPADAADVWEVDPRLLKFERKLASGSFGDLYVQEVNCSNSYL

SEQ ID NO: 126685 - protein, 80 aa, Setaria italica
  misc_feature (38)..(38): Xaa can be any naturally occurring amino acid
  Transcript Sequence Number=SeqID_60711
RKREDKGSSKSNSDCEDIDRRLGREGDRKRDIDRKSDXGKREGYKPHYFEANNHSNKTGVMTAETGTYRWMAPEVIEHLP

SEQ ID NO: 126686 - protein, 87 aa, Setaria italica
  misc_feature (25)..(25): Xaa can be any naturally occurring amino acid
  Transcript Sequence Number=SeqID_60712
  Subcellular localization annotation: CTP_CleavageSite=38; ConfidenceScore=5.10e-01
HNGQSNLVLALHCLITMVVSFKVNXVYNPHACPSHSFCQSLASYRLRGPIFYRCPQTTPPLHSSLSFLPPPLSPSPHTRKQPLLTSP

SEQ ID NO: 126687 - protein, 73 aa, Setaria italica
  misc_feature (19)..(19): Xaa can be any naturally occurring amino acid
  Transcript Sequence Number=SeqID_60713
LGSTFRFPLYDQSSFYAVXFSLKDHTDCTSGHVGAGGLFSSTSPDVQSVWSFNENKPPAPTCAQGGDGIWFAS

SEQ ID NO: 126688 - protein, 56 aa, Setaria italica
  Transcript Sequence Number=SeqID_60714
  Subcellular localization annotation: CTP_CleavageSite=44; ConfidenceScore=5.04e-01
RQSTNQFNHSANLFNGGTNSSLSTGLNDSDPWLQKAVLRELFVRQSTNQYSGSYLF

SEQ ID NO: 126689 - protein, 112 aa, Setaria italica
  misc_feature (94)..(94): Xaa can be any naturally occurring amino acid
  misc_feature (101)..(101): Xaa can be any naturally occurring amino acid
  Transcript Sequence Number=SeqID_60715
  Gene Ontology: Mol. function=protein binding; Cellular component =chromosome; Biological process=regulation of transcription, DNA -dependent
  Homolog annotation: Hit_ID=Q8H6B1; Match level="QueryCoverage=84%, HitCoverage=8%, E-value=1e-42, Identity=87%"; Hit description=FACT complex subunit SPT16
CFFVINCLYYFVLFRQFFQSGGKYDLKPGASSNDDYLYYDSASVIICALGSKYSSYCSNVARTYLIDAIPTQSKAYETLLKAHEAAIEAVKPGXNQMSAVXQAAVKVIERDA

SEQ ID NO: 126690 - protein, 135 aa, Setaria italica
  misc_feature (42)..(42): Xaa can be any naturally occurring amino acid
  Transcript Sequence Number=SeqID_60716
  Gene Ontology: Mol. function=histone acetyltransferase activity; Cellular component=nucleus; Biological process=regulation of transcription, DNA-dependent
  Homolog annotation: Hit_ID=Q6YXY2; Match level="QueryCoverage=98%, HitCoverage=7%, E-value=1e-42, Identity=63%"; Hit description =Probable histone acetyltransferase HAC-like 1
HFQNCQRKDCSYRSCSRSKMVSHHYKTCVDEQCPVCSVVRKXLRQSTEQAAKQKALESRKLAQQNVTQRIMNGVEGDRMDVDPVSAEVFDDQPSVPKRLKMQPPSPSAPANDISLTSNPHVNPGFVLQETQPESL

SEQ ID NO: 126691 - protein, 68 aa, Setaria italica
  misc_feature (59)..(59): Xaa can be any naturally occurring amino acid
  Transcript Sequence Number=SeqID_60717
  Gene Ontology: Mol. function=histone acetyltransferase activity; Cellular component=nucleus; Biological process=regulation of transcription, DNA-dependent
  Homolog annotation: Hit_ID=Q6YXY2; Match level="QueryCoverage=92%, HitCoverage=3%, E-value=3e-22, Identity=84%"; Hit description =Probable histone acetyltransferase HAC-like 1
MNADGEEVKCGLRKPLPQSAVLGAKDLPRTVLSDHIEDRLFKRLKQEKQDRAAAAGKNXDEIPGAEGL

SEQ ID NO: 126692 - protein, 69 aa, Setaria italica
  Transcript Sequence Number=SeqID_60718
  Gene Ontology: Mol. function=histone acetyltransferase activity; Cellular component=nucleus; Biological process=regulation of transcription, DNA-dependent
  Homolog annotation: Hit_ID=Q6YXY2; Match level="QueryCoverage=88%, HitCoverage=3%, E-value=1e-11, Identity=60%"; Hit description =Probable histone acetyltransferase HAC-like 1
MILWVEGDRMDVDPVSAEVFDDQPSVPKRLKMQPPSPSAPANDISLTSNPHVNPGFVLQETQPELEHSN

SEQ ID NO: 126693 - protein, 71 aa, Setaria italica
  Transcript Sequence Number=SeqID_60719
  Gene Ontology: Mol. function=histone acetyltransferase activity; Cellular component=nucleus; Biological process=regulation of transcription, DNA-dependent
  Homolog annotation: Hit_ID=Q6YXY2; Match level="QueryCoverage=74%, HitCoverage=3%, E-value=4e-14, Identity=67%"; Hit description =Probable histone acetyltransferase HAC-like 1
FARKMWYMLQLHARACKDADCNVPRCRDLKEHLRRLQQQSDSRRRAAVNEMMRQRRRTESTTDKIEVSNER

SEQ ID NO: 126694 - protein, 55 aa, Setaria italica
  Transcript Sequence Number=SeqID_60720
  Pfam annotation: Domain name=bZIP_1; Domain location=1-55; Score=8.9; E_value=0.039; Accession=PF00170.13; Description=bZIP transcription factor
  Pfam annotation: Domain name=bZIP_2; Domain location=2-48; Score=8.4; E_value=0.067; Accession=PF07716.7; Description=Basic region leucine zipper
  Pfam module annotation: Pfam domain module=bZIP_1::bZIP_2; Domain location=1-55::2-48
QKDWANRQSAARSKERKMRYIAELERKVQTLQTEATTLSAQLALLQRDTTGLTTE

SEQ ID NO: 126695 - protein, 55 aa, Setaria italica
  Transcript Sequence Number=SeqID_60721
  Gene Ontology: Mol. function=transcription regulator activity; Cellular component=nucleus; Biological process=regulation of transcription
  Homolog annotation: Hit_ID=B6T6H6; Match level="QueryCoverage=80%, HitCoverage=11%, E-value=9e-14, Identity=86%"; Hit description=DNA binding protein
PVYLRCVSYLQQTNTSDMLDLAVDYIKDLQKQVKVLNESRANCTCSASKNPQYSG

SEQ ID NO: 126696 - protein, 32 aa, Setaria italica
  Transcript Sequence Number=SeqID_60722
  Homolog annotation: Hit_ID=B6T6H6; Match level="QueryCoverage=100%, HitCoverage=8%, E-value=2e-10, Identity=100%"; Hit description=DNA binding protein
MYGSPVSKDLNLPVQPPMASSGLLRYRSAPST

SEQ ID NO: 126697 - protein, 73 aa, Setaria italica
  Transcript Sequence Number=SeqID_60723
  Gene Ontology: Mol. function=metal ion binding
  Homolog annotation: Hit_ID=Q9XI13; Match level="QueryCoverage=65%, HitCoverage=5%, E-value=1e-10, Identity=52%"; Hit description=F8K7.7 protein
CYFSSNYLSVLFSSFQNQIWKNDVLVKSEKLQNGAVYAVKLSGKWFYTGGWDKVINIQVCLLALLIYMVFQEK

SEQ ID NO: 126698 - protein, 127 aa, Setaria italica
  Transcript Sequence Number=SeqID_60724
  Gene Ontology: Mol. function=metal ion binding
  Homolog annotation: Hit_ID=B9S2U6; Match level="QueryCoverage=80%, HitCoverage=5%, E-value=4e-27, Identity=53%"; Hit description =Protein translocase subunit secA
  Pfam annotation: Domain name=WD40; Domain location=18-54; Score=23.1; E_value=0.0012; Accession=PF00400.24; Description=WD domain, G-beta repeat
  Pfam annotation: Domain name=WD40; Domain location=62-98; Score=6.0; E_value=7.8; Accession=PF00400.24; Description=WD domain, G-beta repeat
  Pfam module annotation: Pfam domain module=WD40::WD40; Domain location=18-54::62-98
VLLGNLVYLLLLGWQRQICQGLVTGGHKSTVSCLAVASGILYSGSWDGTIRSWWLTDHTPLSVLEDDTAGSMAPVLSISTEANFVASSYENGYFKIWKNDVLVKSEKLQNGAVYAVKLSGKWFYTGG

SEQ ID NO: 126699 - protein, 77 aa, Setaria italica
  Transcript Sequence Number=SeqID_60725
SVSLDASQSLGVAVHALHPFQPSSLLQSKHREIDFQLDHAVLMQEHQPVGFVSESVLRSCACAHLRSYSILTHPSAT

SEQ ID NO: 126700 - protein, 60 aa, Setaria italica
  misc_feature (25)..(25): Xaa can be any naturally occurring amino acid
  Transcript Sequence Number=SeqID_60726
  Gene Ontology: Mol. function=cation transmembrane transporter activity; Cellular component=integral to membrane; Biological process=calcium ion transport
  Homolog annotation: Hit_ID=Q5KQN0; Match level="QueryCoverage=100%, HitCoverage=13%, E-value=4e-20, Identity=83%"; Hit description =Vacuolar cation/proton exchanger 2
GFFIEGVHGASDSLNLPVAFISVIXLLPIVGNAAEHASAIMFAMKDKLDITLGVAIGSST

SEQ ID NO: 126701 - protein, 45 aa, Setaria italica
  Transcript Sequence Number=SeqID_60727
  Gene Ontology: Mol. function=translation initiation factor activity; Biological process=translational initiation
  Homolog annotation: Hit_ID=B9RK73; Match level="QueryCoverage=97%, HitCoverage=22%, E-value=3e-15, Identity=86%"; Hit description =Density-regulated protein, putative
PTEKEQIDVQGDISYDIVEFITDTWPDVPESAIFFIEDGRKVPAA

SEQ ID NO: 126702 - protein, 78 aa, Setaria italica
  Transcript Sequence Number=SeqID_60728
  Subcellular localization annotation: CTP_CleavageSite=69; ConfidenceScore=5.70e-01
LSPRVPCLSPLRVSGRHLPPFPNGAVSAARSSRRAGPTNPGDRRRPRPMSRRRAYAGATPREWGGFRVPCAAVRLRPP

SEQ ID NO: 126703 - protein, 65 aa, Setaria italica
  Transcript Sequence Number=SeqID_60729
GTPTGCPKVYLRSCLVQEEMRGLRVVIFCFSSILVVLVLLSFVRPLFLQGLAVAHNCNFALSGVA

SEQ ID NO: 126704 - protein, 69 aa, Setaria italica
  Transcript Sequence Number=SeqID_60730
GAYGGLGMGGGSMYRMQQGGGGLPAGAFGEGGNYPLPGSGFRGQDPQGGMSPGPGGRAPPMYPNVPPYF

SEQ ID NO: 126705 - protein, 42 aa, Setaria italica
  Transcript Sequence Number=SeqID_60731
LHLSNIENWQCKLIPESRSEVATSQNMQDIHVNSAQPLTKYN

SEQ ID NO: 126706 - protein, 51 aa, Setaria italica
  Transcript Sequence Number=SeqID_60732
HDLVLTLVELLKFSCITNHIHENFRSSTKVKTKSCMMESTYTTAKDPEEKD

SEQ ID NO: 126707 - protein, 65 aa, Setaria italica
  misc_feature (12)..(12): Xaa can be any naturally occurring amino acid
  Transcript Sequence Number=SeqID_60733
  Gene Ontology: Cellular component=cell wall
DWNLIKWRKNFXNVVMIMHVSGPVDRTALEWRLLYGRIFKTVIILAEQSNAELAVERSTLSHAYK

SEQ ID NO: 126708 - protein, 83 aa, Setaria italica
  Transcript Sequence Number=SeqID_60734
  Gene Ontology: Cellular component=cell wall
GSLDLHHKIAVPMFFLAMDSPQNFDSDALAGTVFKTQLPANATFSTIYTAQAPAVFPVKVMNEIDFIKVIRLMSKGDPLLNRS

SEQ ID NO: 126709 - protein, 68 aa, Setaria italica
  Transcript Sequence Number=SeqID_60735
SSVTLSLMIHQYSVAVHFSAAVYWCIISDKVTDDTPIYSSREMNSYRMNRINEITTVMEKPPENTKLC

SEQ ID NO: 126710 - protein, 38 aa, Setaria italica
  Transcript Sequence Number=SeqID_60736
FFLQCSALIPVVLTLLSTQKSTPIFLKRLCYSKWALEG

SEQ ID NO: 126711 - protein, 29 aa, Setaria italica
  Transcript Sequence Number=SeqID_60737
LDYGYLFFNKIMAPNATVLKNRPYINRIK

SEQ ID NO: 126712 - protein, 53 aa, Setaria italica
  Transcript Sequence Number=SeqID_60738
CPDGFSGAPGRQMNDCDSRNQTTFVPDYCLARKRKNTEVSYALMAFPESRTSD

SEQ ID NO: 126713 - protein, 54 aa, Setaria italica
  Transcript Sequence Number=SeqID_60739
KDVELPDSLWSILKGIFIQHSNDLFIFAAQEHKNWSFRTMSIHPFWEKVVCLGS

SEQ ID NO: 126714 - protein, 118 aa, Setaria italica
  Transcript Sequence Number=SeqID_60740
  Gene Ontology: Mol. function=RNA binding
  Homolog annotation: Hit_ID=B6U2B4; Match level="QueryCoverage=90%, HitCoverage=20%, E-value=3e-51, Identity=94%"; Hit description =Nucleic acid binding protein
  Pfam annotation: Domain name=KH_1; Domain location=58-114; Score =40.4; E_value=7e-09; Accession=PF00013.21; Description=KH domain
RSLSRCSINYPVMVSAKDEPDAPVSPAMDGLLRVHKRITDSSDGESGQPQRSAGNIGPTRLLVPASQAGSLIGKQGATIKSIQDSSKSVVRIVENVPPVALNDDRVVEIQGEPLGVHK

SEQ ID NO: 126715 - protein, 78 aa, Setaria italica
  Transcript Sequence Number=SeqID_60741
  Gene Ontology: Cellular component=membrane
  Homolog annotation: Hit_ID=B9SX37; Match level="QueryCoverage=73%, HitCoverage=12%, E-value=5e-09, Identity=61%"; Hit description =Protein pecM, putative
LPREGLQKTSAGLGSVIIDSQPLTVAILASLLFGESIGAIGAGGLVLGVAGLLLLEVPALPCFELRETSTIPHFPRLL

SEQ ID NO: 126716 - protein, 87 aa, Setaria italica
  misc_feature (64)..(64): Xaa can be any naturally occurring amino acid
  Transcript Sequence Number=SeqID_60742
  Gene Ontology: Mol. function=fructose-bisphosphate aldolase activity; Cellular component=chloroplast; Biological process=metabolic process
  Homolog annotation: Hit_ID=Q19U50; Match level="QueryCoverage=96%, HitCoverage=39%, E-value=8e-37, Identity=89%"; Hit description =Plastid fructose bisphosphate aldolase (Fragment)
  Pfam annotation: Domain name=Glycolytic; Domain location=2-87; Score=- 194.2; E_value=0.0071; Accession=PF00274.11; Description=Fructose -bisphosphate aldolase class-I
MKLVKTAKTIASPGRGILAMDESNATCGKRLASIGLENTEANRQAYRTLLVTAPGLGNYISGAXFLFEETLYQSAVDGRRIVDILNC

SEQ ID NO: 126717 - protein, 86 aa, Setaria italica
  misc_feature (40)..(40): Xaa can be any naturally occurring amino acid
  Transcript Sequence Number=SeqID_60743
  Gene Ontology: Mol. function=fructose-bisphosphate aldolase activity; Cellular component=chloroplast; Biological process=metabolic process
  Homolog annotation: Hit_ID=Q40677; Match level="QueryCoverage=100%, HitCoverage=22%, E-value=3e-35, Identity=87%"; Hit description =Fructose-bisphosphate aldolase, chloroplastic
  Pfam annotation: Domain name=Glycolytic; Domain location=1-86; Score=- 186.3; E_value=0.0027; Accession=PF00274.11; Description=Fructose -bisphosphate aldolase class-I
LAMDESNATCGKRLASIGLENTEANRQAYRTLLVTAPEMXLPSPGAILFEETLYQSAVDGRRIVDILTEQGIVPGIKVDKGLVPLA

SEQ ID NO: 126718 - protein, 58 aa, Setaria italica
  Transcript Sequence Number=SeqID_60744
  Gene Ontology: Mol. function=fructose-bisphosphate aldolase activity; Cellular component=chloroplast; Biological process=metabolic process
  Homolog annotation: Hit_ID=A5BDH7; Match level="QueryCoverage=75%, HitCoverage=11%, E-value=4e-17, Identity=97%"; Hit description =Fructose-bisphosphate aldolase
RKRIASPGRGILAMDESNATCGKRLASIGLENTEANRQAYRTLLVGLRVLQLRHATRR

SEQ ID NO: 126719 - protein, 85 aa, Setaria italica
  Transcript Sequence Number=SeqID_60745
  Gene Ontology: Mol. function=transferase activity, transferring glycosyl groups; Biological process=metabolic process
  Homolog annotation: Hit_ID=C4MF44; Match level="QueryCoverage=95%, HitCoverage=16%, E-value=5e-26, Identity=66%"; Hit description=UDP -glycosyltransferase UGT98B4
KAHHFNGFCGFASLVRYIIVRDNLLEHVEDENELINFPGFPTPLQLTKERCPGSLYVCGLEQIRKNIYEEEIKSTGVVMNSFQEL

SEQ ID NO: 126720 - protein, 66 aa, Setaria italica
  Transcript Sequence Number=SeqID_60746
  Homolog annotation: Hit_ID=B1H0T3; Match level="QueryCoverage=80%, HitCoverage=23%, E-value=5e-21, Identity=90%"; Hit description =Putative iron-deficiency specific 4 protein
EEYIIRQKELQDRVARAAGQDSKEELMRVRKEIVDFHGEMVLLENYSALNYTGESSAARTHPAASR

SEQ ID NO: 126721 - protein, 44 aa, Setaria italica
  Transcript Sequence Number=SeqID_60747
NSFFVEKEEEYIILQLLLADDELQDRVARAAGQDSKEELMRVRK

SEQ ID NO: 126722 - protein, 58 aa, Setaria italica
  misc_feature (33)..(33): Xaa can be any naturally occurring amino acid
  Transcript Sequence Number=SeqID_60748
VNDLKVSAEVSMLLINTILTEIENGIYPKGSFXKIPKGSFLNVDVPTDAAHNKVNIHH

SEQ ID NO: 126723 - protein, 54 aa, Setaria italica
  Transcript Sequence Number=SeqID_60749
VISDGVEGEDMDHMSLANGYITVTPLGALSRTEPDAIPYFKACVSCLKSMWIYS

SEQ ID NO: 126724 - protein, 57 aa, Setaria italica
  Transcript Sequence Number=SeqID_60750
  Gene Ontology: Mol. function=acid-amino acid ligase activity; Cellular component=intracellular; Biological process=ubiquitin -dependent protein catabolic process
  Homolog annotation: Hit_ID=Q9AUK0; Match level="QueryCoverage=94%, HitCoverage=7%, E-value=4e-22, Identity=94%"; Hit description =Putative ubiquitin protein ligase
RGLSDLISPSWLSLFNANEFNQLLSGGLQDFDVDDLRNNTKYTGGYTVSSRTVKTTY

SEQ ID NO: 126725 - protein, 60 aa, Setaria italica
  Transcript Sequence Number=SeqID_60751
  Gene Ontology: Mol. function=zinc ion binding
LNSNTHDDTQPRIKSRVPKVNKPNTVTGQNVVDAATDKGNAAPKGTIPLSAPPFWICDAC

SEQ ID NO: 126726 - protein, 113 aa, Setaria italica
  misc_feature (68)..(68): Xaa can be any naturally occurring amino acid
  misc_feature (82)..(82): Xaa can be any naturally occurring amino acid
  Transcript Sequence Number=SeqID_60752
TDGTSSEEEDVTENHLALVNKDVKHQTMADLFQEVFDPSNLEVAMLPMRSTGAGYHGRMQQIMQMEKXRHAEFVRQFNIEQXVYLGDSKGLLFRLCQGSLEGKLTVCHCLSRK

SEQ ID NO: 126727 - protein, 53 aa, Setaria italica
  Transcript Sequence Number=SeqID_60753
DNGQQSSKFQKYYQNGVNKIIYGMCTSSDDICTSSSNFKRITKVVSCYSDTGS

SEQ ID NO: 126728 - protein, 107 aa, Setaria italica
  Transcript Sequence Number=SeqID_60754
  Gene Ontology: Mol. function=ATPase activity, coupled to transmembrane movement of substances; Cellular component=integral to membrane; Biological process=transport
  Homolog annotation: Hit_ID=B9I523; Match level="QueryCoverage=95%, HitCoverage=8%, E-value=7e-44, Identity=80%"; Hit description =Multidrug resistance protein ABC transporter family (Fragment)
LVFIKQIRYRQDAPFVLHGITCTFEGGDKIGIVGRTGSGKTTLIGALFRLVEPAEGKISVDSIDITTIGLYDLRSRLGIIPQDLTLFQGTIRYNLDPIGKFTDEEIW

SEQ ID NO: 126729 - protein, 41 aa, Setaria italica
  Transcript Sequence Number=SeqID_60755
PLPVRPTMPILSPTFECASGKTTLIGALFRLVEPAGGKIII

SEQ ID NO: 126730 - protein, 71 aa, Setaria italica
  Transcript Sequence Number=SeqID_60756
SNTAALNTASRSMAHDGSHSLELAAAPELDDDGHTPRTGTYKFSLILPTAGHALVVVAVLVLTAAMAAFLW

SEQ ID NO: 126731 - protein, 152 aa, Setaria italica
  misc_feature (41)..(41): Xaa can be any naturally occurring amino acid
  Transcript Sequence Number=SeqID_60757
  Gene Ontology: Cellular component=integral to membrane
  Homolog annotation: Hit_ID=B9N5L8; Match level="QueryCoverage=88%, HitCoverage=29%, E-value=3e-46, Identity=61%"; Hit description=Amino acid permease
DDGHTPRTGNLWTCFAHIITAVIGCGVLALSWSVAQLGWVXGGPVAMVCFAFVTYISAFLLSHCYRSPDLEKRQRNYTYMDAVRTHLGEKRTWLCGLLQYLNLYGTAIAYTITTATCLRAIKRANCYHNEGHGAPANDNNERRQLTNNRTKN

SEQ ID NO: 126732 - protein, 84 aa, Setaria italica
  Transcript Sequence Number=SeqID_60758
  Homolog annotation: Hit_ID=B9N5L7; Match level="QueryCoverage=64%, HitCoverage=12%, E-value=2e-17, Identity=75%"; Hit description=Amino acid permease (Fragment)
LCFLAGTRIELPLSISLKATKHLFGETPSTQDTLKSPPPESETMQKGNVIAVLATTFFYLGVGCFGYAAFGNAAPGNLLTGFGF

SEQ ID NO: 126733 - protein, 42 aa, Setaria italica
  Transcript Sequence Number=SeqID_60759
KERIKKTKDEKKAKKAEVAKSQKTQSKGGAAQKGPSCAASCT

SEQ ID NO: 126734 - protein, 64 aa, Setaria italica
  misc_feature (53)..(53): Xaa can be any naturally occurring amino acid
  Transcript Sequence Number=SeqID_60760
  Subcellular localization annotation: CTP_CleavageSite=31; ConfidenceScore=5.33e-01
ALQRLPPPPPSLGPLEPFWTAPLFCAFWDLATSAFFAFFSSLVFLMRSLISRXAASLASITDLR

SEQ ID NO: 126735 - protein, 102 aa, Setaria italica
  Transcript Sequence Number=SeqID_60761
  Gene Ontology: Mol. function=structural constituent of ribosome; Cellular component=ribonucleoprotein complex; Biological process =translation
  Homolog annotation: Hit_ID=P50888; Match level="QueryCoverage=39%, HitCoverage=24%, E-value=9e-14, Identity=97%"; Hit description=60S ribosomal protein L24
MLLERLLTSLLLDNFQSGTTKKPYSRSIVGATLEVIQKKRSEKPEVRDAAREAALREIKERIKKTKDEKKAKKAEVAKSQKTQSKGGAAQKGPKGPKIGRWR

SEQ ID NO: 126736 - protein, 43 aa, Setaria italica
  Transcript Sequence Number=SeqID_60762
SLDLGQVSLVSVVVTFPMRLACPECFGLFRELILLFSLLYSFV

SEQ ID NO: 126737 - protein, 57 aa, Setaria italica
  Transcript Sequence Number=SeqID_60763
YLLSISIVFPGPQHEIAPSVLLTSRTEAFLQFCWNSSNFQQHIKEGIYWQAALMFQS

SEQ ID NO: 126738 - protein, 83 aa, Setaria italica
  Transcript Sequence Number=SeqID_60764
  Gene Ontology: Mol. function=structural constituent of ribosome; Cellular component=intracellular; Biological process=translation
  Homolog annotation: Hit_ID=B6T147; Match level="QueryCoverage=40%, HitCoverage=34%, E-value=2e-12, Identity=100%"; Hit description=40S ribosomal protein S29
  Pfam annotation: Domain name=Ribosomal_S14; Domain location=31-83; Score=35.0; E_value=3.1e-07; Accession=PF00253.13; Description =Ribosomal protein S14pS29e
  Subcellular localization annotation: CTP_CleavageSite=22; ConfidenceScore=5.06e-01
AYGAETKRSSWWHSSIFAYPPLAAAASRPSLTSACCAPPISLAAIGSPCVCANPHGLIRKYGLMCCRQCFRSNAKDIGFIKYR

SEQ ID NO: 126739 - protein, 58 aa, Setaria italica
  Transcript Sequence Number=SeqID_60765
  Gene Ontology: Mol. function=structural constituent of ribosome; Cellular component=intracellular; Biological process=translation
  Homolog annotation: Hit_ID=Q2QQ34; Match level="QueryCoverage=58%, HitCoverage=33%, E-value=3e-12, Identity=97%"; Hit description=40S ribosomal protein S29, putative, expressed
  Pfam annotation: Domain name=Ribosomal_S14; Domain location=2-46; Score=30.2; E_value=8.3e-06; Accession=PF00253.13; Description =Ribosomal protein S14pS29e
MDAVVWFFDCSRVCANPHGLIRKYGLMCCRQCFRSNAKDIGFIKVCDRSFRAPASSNL

SEQ ID NO: 126740 - protein, 63 aa, Setaria italica
  Transcript Sequence Number=SeqID_60766
  Gene Ontology: Mol. function=structural constituent of ribosome; Cellular component=intracellular; Biological process=translation
  Homolog annotation: Hit_ID=Q2QQ34; Match level="QueryCoverage=87%, HitCoverage=53%, E-value=1e-25, Identity=98%"; Hit description=40S ribosomal protein S29, putative, expressed
  Pfam annotation: Domain name=Ribosomal_S14; Domain location=3-56; Score=78.0; E_value=3.5e-20; Accession=PF00253.13; Description =Ribosomal protein S14pS29e
MGHSNVWNSHPKNYGPGSRVCRVCANPHGLIRKYGLMCCRQCFRSNAKDIGFIKVCDRSFRAP

SEQ ID NO: 126741 - protein, 37 aa, Setaria italica
  Transcript Sequence Number=SeqID_60767
MIEVFWHALYGVYPAFVDALLSYCIPTYKSSFISTKL

SEQ ID NO: 126742 - protein, 51 aa, Setaria italica
  Transcript Sequence Number=SeqID_60768
  Subcellular localization annotation: CTP_CleavageSite=32; ConfidenceScore=5.22e-01
HRHTNSTITTTNTTIITPRPSKPLVQNFFIFRANENNPSSSSLRLPPPLYR

SEQ ID NO: 126743 - protein, 71 aa, Setaria italica
  Transcript Sequence Number=SeqID_60769
LIRAPILVMLWTSSSFQRYCIIRAAHCESQNKKNITTTVCLNQTRMSITTNSLNKKCFVPVCTVQIWETWA

SEQ ID NO: 126744 - protein, 72 aa, Setaria italica
  Transcript Sequence Number=SeqID_60770
  Subcellular localization annotation: CTP_CleavageSite=44; ConfidenceScore=5.61e-01
VTTSPPGRLKWLRCRTSSSSPPTRVLPHPSKRSPFVPSPSLTIPAIVSGYLVFVVLPRIGNSPPAECQKLGL

SEQ ID NO: 126745 - protein, 39 aa, Setaria italica
  Transcript Sequence Number=SeqID_60771
  Gene Ontology: Mol. function=structural constituent of ribosome; Cellular component=intracellular; Biological process=translation
  Homolog annotation: Hit_ID=Q2QQ34; Match level="QueryCoverage=87%, HitCoverage=33%, E-value=2e-10, Identity=88%"; Hit description=40S ribosomal protein S29, putative, expressed
  Pfam annotation: Domain name=Ribosomal_S14; Domain location=1-31; Score=9.7; E_value=0.035; Accession=PF00253.13; Description =Ribosomal protein S14pS29e
NPHGLIRKYGLMCCRQCFRSNAKDIGFIKVYYMSFKLHC

SEQ ID NO: 126746 - protein, 64 aa, Setaria italica
  Transcript Sequence Number=SeqID_60772
VLQKTQARLNLVLTKHLNYWIQLSPSTSPHMVHLTPADGVLMGSTCAATFAVGLLILLDDVWSD

SEQ ID NO: 126747 - protein, 98 aa, Setaria italica
  misc_feature (83)..(83): Xaa can be any naturally occurring amino acid
  Transcript Sequence Number=SeqID_60773
  Homolog annotation: Hit_ID=Q9LPN0; Match level="QueryCoverage=85%, HitCoverage=16%, E-value=3e-28, Identity=73%"; Hit description =F2J10.3 protein
MVHLFLLLFVLHGQLHSEHHEVVADLHQTSFLFSIPIDGPMSFSTSKVTVQWSLRFEFFTTPEGTDPARYEHPLLVEKREKGXEWVLPITVYAPPLRR

SEQ ID NO: 126748 - protein, 141 aa, Setaria italica
  misc_feature (29)..(29): Xaa can be any naturally occurring amino acid
  misc_feature (42)..(42): Xaa can be any naturally occurring amino acid
  Transcript Sequence Number=SeqID_60774
VSVRNSLSMQSLSSRLSTSEPFYNQVERXPNFPSYSPIPRLXVSEISDDHDGGLVSPQRKLNHLLPDHPSNGQRFSPDSDVGLPLTPKNVDPAGCKPSCPCSRSVIFHQFTSLLPIPPFLSFFLAAEGFTRGRSYNIRIDD

SEQ ID NO: 126749 - protein, 99 aa, Setaria italica
  Transcript Sequence Number=SeqID_60775
KRRCLEVSITLETSETINPRALHPSRRGSPTITKVSFYSFIRIWFEFELLRYPFSHIREIIYLFGVSNSLDENSFTIANSFAEHFVSSCLQLKVETFVF

SEQ ID NO: 126750 - protein, 89 aa, Setaria italica
  Transcript Sequence Number=SeqID_60776
  Subcellular localization annotation: CTP_CleavageSite=65; ConfidenceScore=5.59e-01
VLLISSKDEVSSISSYNPSKANPEFSLRNSLSMQSLSSRLSTSELFYNQLERPNFSSYSPIPRLSVSEISDDHVGASGSREEGEKGEAI

SEQ ID NO: 126751 - protein, 80 aa, Setaria italica
  Transcript Sequence Number=SeqID_60777
YLYKSTSEAEDKQAPHCTSSEQLTELSFDVSVAVRIKFLSCSEDVQIGPTLHILGTTEELSFDVSVAVRIIWHSLQLKGT

SEQ ID NO: 126752 - protein, 74 aa, Setaria italica
  Transcript Sequence Number=SeqID_60778
GMPNYSDCYTNIKRKFLSCSEDVQCGAYLYKSTSEAEDKQSKEIDHKLQCFCIKRAAFVTIRKLTKVLNLLGAT

SEQ ID NO: 126753 - protein, 58 aa, Setaria italica
  Transcript Sequence Number=SeqID_60779
FELLSYLFYITAYFEALEYFLVQAFSSMGIELLVLSDTLYVWSSQRFYHHLIGVSVSA

SEQ ID NO: 126754 - protein, 53 aa, Setaria italica
  Transcript Sequence Number=SeqID_60780
  Gene Ontology: Mol. function=catalytic activity; Cellular component =endoplasmic reticulum membrane; Biological process=metabolic process
  Homolog annotation: Hit_ID=B6T4Q4; Match level="QueryCoverage=98%, HitCoverage=18%, E-value=3e-22, Identity=94%"; Hit description=Delta- 7-sterol-C5
IHDCIHGKIWPVMGAGYHTIHHTTYRHNYGHYTIWMDWMFGTLREPVDILKNE

SEQ ID NO: 126755 - protein, 55 aa, Setaria italica
  Transcript Sequence Number=SeqID_60781
  Gene Ontology: Mol. function=catalytic activity; Cellular component =endoplasmic reticulum membrane; Biological process=metabolic process
  Homolog annotation: Hit_ID=B6T4Q4; Match level="QueryCoverage=92%, HitCoverage=18%, E-value=2e-20, Identity=92%"; Hit description=Delta- 7-sterol-C5
STWAHHIYNKENTLSPFAGLAFHPVDGILQAIPHVFALFIFPTHFRTHIALLFVD

SEQ ID NO: 126756 - protein, 99 aa, Setaria italica
  Transcript Sequence Number=SeqID_60782
  Gene Ontology: Mol. function=catalytic activity; Cellular component =endoplasmic reticulum membrane; Biological process=metabolic process
  Homolog annotation: Hit_ID=B6T4Q4; Match level="QueryCoverage=53%, HitCoverage=19%, E-value=1e-19, Identity=77%"; Hit description=Delta- 7-sterol-C5
WFYPVYCVRCSNTICNIITVLYSQNLCDYVYCYARFDLKLVFDADSVPTNEAMRKQIIVASKAMPLYCALPTVSEYMIESGWTRCFFNISEVGVPMYFI

SEQ ID NO: 126757 - protein, 40 aa, Setaria italica
  Transcript Sequence Number=SeqID_60783
CADHHSDIKCKTETIEIHLCLISIVSVLHFMSERTQGCTS

SEQ ID NO: 126758 - protein, 43 aa, Setaria italica
  Transcript Sequence Number=SeqID_60784
KAKVLEFYASAEPQHGAEDMYQLMDILVDEMRLEGYVPNLDLV

SEQ ID NO: 126759 - protein, 150 aa, Setaria italica
  Transcript Sequence Number=SeqID_60785
  Gene Ontology: Mol. function=DNA-directed RNA polymerase activity; Cellular component=nucleus; Biological process=transcription
  Homolog annotation: Hit_ID=Q70PF6; Match level="QueryCoverage=86%, HitCoverage=25%, E-value=8e-53, Identity=76%"; Hit description=DNA -directed RNA polymerase (Fragment)
  Pfam annotation: Domain name=RNA_pol_Rpb2_5; Domain location=25-76; Score=88.4; E_value=2.5e-23; Accession=PF04567.9; Description=RNA polymerase Rpb2, domain 5
MKVGMLIKKAHIRALQQRETPDEGWHELVSKGYIEYIDTEEEETTMISMTINDLINARHNPEEAYSETYTHCEIHPSLILGVCASIIPFPDHNQSPRNTYQSAMGKQAMGIYVTNYQLRMDTLAYVLYYPQKPAGNCLKCKCSIARVVTR

SEQ ID NO: 126760 - protein, 98 aa, Setaria italica
  Transcript Sequence Number=SeqID_60786
  Gene Ontology: Mol. function=DNA-directed RNA polymerase activity; Cellular component=nucleus; Biological process=transcription
  Homolog annotation: Hit_ID=Q1L6C0; Match level="QueryCoverage=77%, HitCoverage=14%, E-value=1e-30, Identity=83%"; Hit description=DNA -directed RNA polymerase (Fragment)
  Pfam annotation: Domain name=RNA_pol_Rpb2_4; Domain location=1-46; Score=58.1; E_value=3.4e-14; Accession=PF04566.5; Description=RNA polymerase Rpb2, domain 4
  Pfam annotation: Domain name=RNA_pol_Rpb2_5; Domain location=69-98; Score=26.2; E_value=0.00013; Accession=PF04567.9; Description=RNA polymerase Rpb2, domain 5
  Pfam module annotation: Pfam domain module=RNA_pol_Rpb2_4::RNA_pol _Rpb2_5; Domain location=1-46::69-98
VKTLRRLRRQIDVNTEVGVVRDIRLKELRLYTDYGRCSRPLFIVENQRLLIKKAHIRALQQRETPDEGWHELVSKGYIEYIDTEEEETTMISMTINDL

SEQ ID NO: 126761 - protein, 124 aa, Setaria italica
  misc_feature (119)..(119): Xaa can be any naturally occurring amino acid
  Transcript Sequence Number=SeqID_60787
  Gene Ontology: Mol. function=DNA-directed RNA polymerase activity; Cellular component=nucleus; Biological process=transcription
  Homolog annotation: Hit_ID=A2RQQ3; Match level="QueryCoverage=84%, HitCoverage=19%, E-value=1e-55, Identity=99%"; Hit description=DNA -directed RNA polymerase (Fragment)
  Pfam annotation: Domain name=RNA_pol_Rpb2_6; Domain location=22-124; Score=-158.3; E_value=1.1e-05; Accession=PF00562.20; Description=RNA polymerase Rpb2, domain 6
LERNLTTTISRRIPIPYFRILGVCASIIPFPDHNQSPRNTYQSAMGKQAMGIYVTNYQLRMDTLAYVLYYPQKPLVTTRAMEHLHFRQLPAGINAIVAISCYSGYNQEDSVIMNQSSIXDRGFF

SEQ ID NO: 126762 - protein, 60 aa, Setaria italica
  Transcript Sequence Number=SeqID_60788
  Gene Ontology: Mol. function=DNA-directed RNA polymerase activity; Cellular component=nucleus; Biological process=transcription
  Homolog annotation: Hit_ID=Q0DQ04; Match level="QueryCoverage=100%, HitCoverage=16%, E-value=3e-27, Identity=96%"; Hit description=DNA -directed RNA polymerase (Fragment)
GMRHGSYDKLDDDGLAPPGTRVSGEDVIIGKTSPIPQDDAQGQASRYSKRDHSTSLRHSE

SEQ ID NO: 126763 - protein, 74 aa, Setaria italica
  misc_feature (38)..(38): Xaa can be any naturally occurring amino acid
  Transcript Sequence Number=SeqID_60789
PRFSDHSNQHPCDFLPSLFVTVEISPSLHQNYYQVPTXITHGNREHGGGADRNRPEQVRAPSPHPQRWRRPRPV

SEQ ID NO: 126764 - protein, 34 aa, Setaria italica
  Transcript Sequence Number=SeqID_60790
  Gene Ontology: Mol. function=oxidoreductase activity, acting on the CH-CH group of donors; Cellular component=mitochondrial inner membrane; Biological process=electron transport chain
  Homolog annotation: Hit_ID=B6U124; Match level="QueryCoverage=88%, HitCoverage=4%, E-value=1e-11, Identity=100%"; Hit description =Succinate dehydrogenase flavoprotein subunit,mitochondrial
WLGDQDSIQYMCREAPKAVIELENYGLPFSSHFL

SEQ ID NO: 126765 - protein, 92 aa, Setaria italica
  Transcript Sequence Number=SeqID_60791
  Gene Ontology: Cellular component=cytoskeleton
  Homolog annotation: Hit_ID=Q2RB17; Match level="QueryCoverage=100%, HitCoverage=31%, E-value=3e-22, Identity=58%"; Hit description =Phagocytosis and cell motility protein ELMO1, putative, expressed
MASKAIKRRPCRTETDNTSEKRMETTISNSVTEPLLGNGPHEDKSKRYEPATRSGFWDGTRQDCLRWAHLLSIFIAQSARKIVNVLSEFGSL

SEQ ID NO: 126766 - protein, 60 aa, Setaria italica
  Transcript Sequence Number=SeqID_60792
GHTNWMYESCQYALANKNPRNNLEVQQLAHKTRQLPVKNYLMNHIHSETYLANRERSPPD

SEQ ID NO: 126767 - protein, 85 aa, Setaria italica
  misc_feature (10)..(10): Xaa can be any naturally occurring amino acid
  Transcript Sequence Number=SeqID_60793
  Gene Ontology: Cellular component=cytoskeleton; Biological process =phagocytosis
  Homolog annotation: Hit_ID=Q9SS63; Match level="QueryCoverage=75%, HitCoverage=35%, E-value=8e-25, Identity=75%"; Hit description =T12J13.11 protein
  Pfam annotation: Domain name=ELMO_CED12; Domain location=4-85; Score =15.2; E_value=3.1e-05; Accession=PF04727.5; Description=ELMOCED-12 family
LQVERLRLLXQRLDVPYDCSSVKHQDALKELWRLAYPDRQLPPLKSDLWKEMGWQNSDPSTDFRAGGFLSLENLIYFARNYPDSF

SEQ ID NO: 126768 - protein, 57 aa, Setaria italica
  Transcript Sequence Number=SeqID_60794
  Gene Ontology: Mol. function=serine-type carboxypeptidase activity; Cellular component=extracellular region; Biological process =proteolysis
  Homolog annotation: Hit_ID=Q67Y83-2; Match level="QueryCoverage=82%, HitCoverage=11%, E-value=3e-09, Identity=63%"; Hit description =Isoform 2 of Serine carboxypeptidase-like 51
LTTGVALGDSWISPEDFTLAYTPLLLSVSRLDDNAGDEANKKAETVKKQIGGRGRWA

SEQ ID NO: 126769 - protein, 77 aa, Setaria italica
  misc_feature (8)..(8): Xaa can be any naturally occurring amino acid
  Transcript Sequence Number=SeqID_60795
  Gene Ontology: Mol. function=serine-type carboxypeptidase activity; Cellular component=extracellular region; Biological process =proteolysis
  Homolog annotation: Hit_ID=B9SCM7; Match level="QueryCoverage=80%, HitCoverage=13%, E-value=2e-17, Identity=62%"; Hit description =Retinoid-inducible serine carboxypeptidase, putative
KLRIVPNXLKWVEVSQAVYNTLVNDFMKPRIDEIDELLSYGINVTVYNGQLDVICSTNGAEACRGNLCTVDRAKAPR

SEQ ID NO: 126770 - protein, 54 aa, Setaria italica
  Transcript Sequence Number=SeqID_60796
MAHYFIFDAFSLPVSDGTTDNLNEYIAMSVEDVADLESVVNDVYSNKHGVVVNE

SEQ ID NO: 126771 - protein, 106 aa, Setaria italica
  Transcript Sequence Number=SeqID_60797
KTSKAQDAAHDQESTNEQHEQEFKDVKEYTRSETETSSAKCSQNDEAEEVALAVSLPEEELQQGCKDEQPEPAARAEAGSAAGARRKALPTTRWRSSSMKARKRRK

SEQ ID NO: 126772 - protein, 95 aa, Setaria italica
  misc_feature (71)..(71): Xaa can be any naturally occurring amino acid
  Transcript Sequence Number=SeqID_60798
  Homolog annotation: Hit_ID=Q84VJ1; Match level="QueryCoverage=52%, HitCoverage=15%, E-value=8e-21, Identity=90%"; Hit description =Biostress-resistance-related protein (Fragment)
MHVAARNRLIQHIKLAIQQKKELLDLYQEFCIYLVTFGPASLIIAVKLGVGGFSMGAATALYSATCFAHGXYGNANPYPVNLSLAVGLSGWLPCA

SEQ ID NO: 126773 - protein, 107 aa, Setaria italica
  Transcript Sequence Number=SeqID_60799
CSSQLYLRILYDTLLRKSISIMLCPCPVEDYYSKTLDFGGSSIWQHLLKVFFYLFIVRTFQVTWRVRCYAVAYHHEIYFFSMKDFCRLRRNSFFVLQLFGGKTDAYL

SEQ ID NO: 126774 - protein, 126 aa, Setaria italica
  misc_feature (72)..(72): Xaa can be any naturally occurring amino acid
  Transcript Sequence Number=SeqID_60800
  Gene Ontology: Mol. function=sugar:hydrogen symporter activity; Cellular component=integral to membrane; Biological process =embryonic development ending in birth or egg hatching
  Homolog annotation: Hit_ID=B9RP33; Match level="QueryCoverage=89%, HitCoverage=31%, E-value=8e-37, Identity=69%"; Hit description=UDP -sugar transporter, putative
  Subcellular localization annotation: CTP_CleavageSite=3; ConfidenceScore=5.29e-01
QIVTPSVPSDSLFFVPFRILLRTTPLSLAYLLYMLASMESVRGVNVPMYTTLRRTTVVFTMTMEYFLAKARXHTPPIIGSVALIVFGAFIAGARDLSFDARGYAIVFVANITTAVYLATINRIGKS

SEQ ID NO: 126775 - protein, 132 aa, Setaria italica
  Transcript Sequence Number=SeqID_60801
  Gene Ontology: Mol. function=protein serine/threonine kinase activity; Cellular component=plasma membrane; Biological process =protein amino acid phosphorylation
  Homolog annotation: Hit_ID=B6TR03; Match level="QueryCoverage=87%, HitCoverage=23%, E-value=5e-63, Identity=99%"; Hit description =Protein kinase APK1A
VIYRDFKTSNILLDADYNAKLSDFGLAKDGPEGDKTHVSTRVMGTYGYAAPEYVMTGHLTSKSDVYSFGVVLLEMMTGRRSMDKNRPNGEHNLVEWARPYLGERRRFYKLVDPNLGIGKLTTNKKDDYKKER

SEQ ID NO: 126776 - protein, 82 aa, Setaria italica
  misc_feature (70)..(70): Xaa can be any naturally occurring amino acid
  Transcript Sequence Number=SeqID_60802
QHTRTHRKPVALGETRSSRTANGTARCEEDRGERCMTDLVSPGSGPGGRRERASTASGSAEANRSRRWGXSGFAREPKQRRL

SEQ ID NO: 126777 - protein, 139 aa, Setaria italica
  Transcript Sequence Number=SeqID_60803
  Gene Ontology: Mol. function=signal transducer activity; Cellular component=apical cortex; Biological process=G-protein coupled receptor protein signaling pathway
  Homolog annotation: Hit_ID=B6TWS6; Match level="QueryCoverage=97%, HitCoverage=34%, E-value=2e-69, Identity=92%"; Hit description =Guanine nucleotide-binding protein alpha-1 subunit
  Pfam annotation: Domain name=G-alpha; Domain location=1-139; Score= -162.7; E_value=8.2e-09; Accession=PF00503.12; Description=G-protein alpha subunit
VKCGQILYDGAKELAQVEPDSSKYVLSPDNQEIGEKLSEIGAKLDYPLLNKELVQDVRKLWQDPAIQETYSRGSILQVPDCAQYFMSNLDRLAEVDYVPTKEDVLHARVRTNGVVETQFSPLGESKRGGEVYRLYDVGG

SEQ ID NO: 126778 - protein, 83 aa, Setaria italica
  Transcript Sequence Number=SeqID_60804
  Gene Ontology: Mol. function=signal transducer activity; Biological process=G-protein coupled receptor protein signaling pathway
  Homolog annotation: Hit_ID=B6TWS6; Match level="QueryCoverage=85%, HitCoverage=18%, E-value=4e-31, Identity=88%"; Hit description =Guanine nucleotide-binding protein alpha-1 subunit
MFVYLYCNLSQLQEIGEKLSEIGAKLDYPLLNKELVQDVRKLWQDPAIQETYSRGSILQVPDCAQYFMSNLDRLAEVDYVPTK

SEQ ID NO: 126779 - protein, 136 aa, Setaria italica
  misc_feature (123)..(123): Xaa can be any naturally occurring amino acid
  Transcript Sequence Number=SeqID_60805
  Gene Ontology: Mol. function=nucleoside-triphosphatase activity; Cellular component=peroxisome; Biological process=peroxisome organization and biogenesis
  Homolog annotation: Hit_ID=B9RV01; Match level="QueryCoverage=82%, HitCoverage=9%, E-value=3e-38, Identity=60%"; Hit description =Peroxisome biogenesis factor, putative
MKQRFRNAVSSDPQVSQSSSSSDSLVRYLADIMDEYKDKTQNTCGYGPIAFMASVQSLQSLPQDLTSSGRFDFHIELPALAAPERTALLKHQVEEHELQCSGEVLSEIASKCEGYDAYDLEIXVDRAVHAAASRFV

SEQ ID NO: 126780 - protein, 111 aa, Setaria italica
  Transcript Sequence Number=SeqID_60806
  Gene Ontology: Mol. function=nucleoside-triphosphatase activity; Cellular component=peroxisome; Biological process=peroxisome organization and biogenesis
  Homolog annotation: Hit_ID=B9RV01; Match level="QueryCoverage=82%, HitCoverage=7%, E-value=5e-30, Identity=70%"; Hit description =Peroxisome biogenesis factor, putative
  Pfam annotation: Domain name=AAA; Domain location=1-108; Score=-2.0; E_value=3.7e-05; Accession=PF00004.21; Description=ATPase family associated with various cellular activities (AAA)
YIGSSEQSVRDFFANAVAAAPCLLFFDEFDSIAPQRGTHSAGVSDRVVNQFLTELDGVETLTGVFVFAATSKPDRVDRVFKIYRTTALDQKLVKKTFKLIDESMRRSREGT

SEQ ID NO: 126781 - protein, 102 aa, Setaria italica
  Transcript Sequence Number=SeqID_60807
  Gene Ontology: Mol. function=signal transducer activity; Biological process=G-protein coupled receptor protein signaling pathway
  Homolog annotation: Hit_ID=B6TWS6; Match level="QueryCoverage=86%, HitCoverage=22%, E-value=2e-41, Identity=90%"; Hit description =Guanine nucleotide-binding protein alpha-1 subunit
MRTYIRQLKYAILERILYDGAKELAQVEPDSSKYVLSPDNQEIGEKLSEIGAKLDYPLLNKELVQDVRKLWQDPAIQETYSRGSILQVPDCAQYFMSNLDRL

SEQ ID NO: 126782 - protein, 95 aa, Setaria italica
  misc_feature (9)..(9): Xaa can be any naturally occurring amino acid
  Transcript Sequence Number=SeqID_60808
  Gene Ontology: Mol. function=signal transducer activity; Biological process=G-protein coupled receptor protein signaling pathway
  Homolog annotation: Hit_ID=B6TWS6; Match level="QueryCoverage=91%, HitCoverage=22%, E-value=4e-41, Identity=94%"; Hit description =Guanine nucleotide-binding protein alpha-1 subunit
  Pfam annotation: Domain name=G-alpha; Domain location=1-92; Score= -251.3; E_value=0.0031; Accession=PF00503.12; Description=G-protein alpha subunit
LFEDETKNXMETKGLFDWVLKQRCFEKTSFMLFLNKFDIFERKIQKVPLSVCEWFKDYQPTVPGKQEVEHAYEFVKKKFEELYFQGSCSVNLEHF

SEQ ID NO: 126783 - protein, 71 aa, Setaria italica
  Transcript Sequence Number=SeqID_60809
RCNYLFYFCCQQRLRFTIAPVTCINWRENKLFMSYETLQVGEGRCWQRKENAGGARTISGVADAVACPSPT

SEQ ID NO: 126784 - protein, 43 aa, Setaria italica
  Transcript Sequence Number=SeqID_60810
ADYCVLSLWCSCSNCTCRSLSLKECKPTDPINLNSMIKELVYS

SEQ ID NO: 126785 - protein, 69 aa, Setaria italica
  Transcript Sequence Number=SeqID_60811
  Gene Ontology: Cellular component=exocyst
CITLDDDGVGDLDDFAAAAATADAADGAAAASFDLTPLYRAMHIHQTLALGERFKKYYLENRKLQLTSD

SEQ ID NO: 126786 - protein, 47 aa, Setaria italica
  Transcript Sequence Number=SeqID_60812
ILPLPVLRRVLVAVLAHVSERIVELFLNDSVKLDNPLRDVGKHCHKH

SEQ ID NO: 126787 - protein, 80 aa, Setaria italica
  misc_feature (51)..(51): Xaa can be any naturally occurring amino acid
  Transcript Sequence Number=SeqID_60813
  Gene Ontology: Cellular component=plasma membrane; Biological process= protein modification process
  Homolog annotation: Hit_ID=B6SQ65; Match level="QueryCoverage=60%, HitCoverage=39%, E-value=6e-19, Identity=97%"; Hit description =Ubiquitin-fusion protein
IFLSTFYLILLSLFVVFLPFLLNSTDKEKGPRTVNDLKLINAGKILENNKXTLSECKSPICDFSGMTTMHVVVTVDNRTY

SEQ ID NO: 126788 - protein, 61 aa, Setaria italica
  Transcript Sequence Number=SeqID_60814
  Gene Ontology: Mol. function=1-acylglycerol-3-phosphate O -acyltransferase activity; Cellular component=integral to membrane; Biological process=phospholipid biosynthetic process
  Homolog annotation: Hit_ID=Q41745; Match level="QueryCoverage=85%, HitCoverage=13%, E-value=2e-09, Identity=65%"; Hit description=1 -acyl-sn-glycerol-3-phosphate acyltransferase PLS1
  Subcellular localization annotation: CTP_CleavageSite=43; ConfidenceScore=5.19e-01
FHRTQLLSTWRGVAFTAAGMALVTGVMHVFIMFSQAERSSSARAARNRVKKNDEATVVWVC

SEQ ID NO: 126789 - protein, 108 aa, Setaria italica
  misc_feature (47)..(47): Xaa can be any naturally occurring amino acid
  Transcript Sequence Number=SeqID_60815
  Gene Ontology: Mol. function=1-acylglycerol-3-phosphate O -acyltransferase activity; Cellular component=integral to membrane; Biological process=phospholipid biosynthetic process
  Homolog annotation: Hit_ID=Q41745; Match level="QueryCoverage=97%, HitCoverage=28%, E-value=1e-53, Identity=97%"; Hit description=1 -acyl-sn-glycerol-3-phosphate acyltransferase PLS1
FIWSWSMWFAEYLFLERSWAKDEKTLKWGLQRLNDFPRPFWLALFVXGTRFTPAKLLAAQEYAASQGLPAPRNVLIPRTKGFVSAVSIMRDFVPAIYDTTVIVPKDSP

SEQ ID NO: 126790 - protein, 31 aa, Setaria italica
  Transcript Sequence Number=SeqID_60816
YLLLIQIPDIYTKKRAVSTLRLSERKVKKKQ

SEQ ID NO: 126791 - protein, 42 aa, Setaria italica
  Transcript Sequence Number=SeqID_60817
  Gene Ontology: Mol. function=1-acylglycerol-3-phosphate O -acyltransferase activity; Cellular component=integral to membrane; Biological process=phospholipid biosynthetic process
  Homolog annotation: Hit_ID=Q41745; Match level="QueryCoverage=100%, HitCoverage=11%, E-value=2e-13, Identity=92%"; Hit description=1 -acyl-sn-glycerol-3-phosphate acyltransferase PLS1
VEGTRFTPAKLLAAQEYAASQGLPAPRNVLIPRTKVSVYAVS

SEQ ID NO: 126792 - protein, 47 aa, Setaria italica
  Transcript Sequence Number=SeqID_60818
  Gene Ontology: Mol. function=1-acylglycerol-3-phosphate O -acyltransferase activity; Cellular component=integral to membrane; Biological process=phospholipid biosynthetic process
  Homolog annotation: Hit_ID=Q41745; Match level="QueryCoverage=97%, HitCoverage=12%, E-value=6e-09, Identity=67%"; Hit description=1 -acyl-sn-glycerol-3-phosphate acyltransferase PLS1
FAQLLSKKRYSANHMDQPIKWGLQRLNDFPRPFWLALFVEGTRFTPE

SEQ ID NO: 126793 - protein, 32 aa, Setaria italica
  Transcript Sequence Number=SeqID_60819
  Gene Ontology: Mol. function=nucleic acid binding
  Homolog annotation: Hit_ID=A8I426; Match level="QueryCoverage=93%, HitCoverage=2%, E-value=2e-10, Identity=93%"; Hit description =Required to maintain repression 1
TSHDQLKGMFLKIHYPPTESNIVFTYNQIAPV

SEQ ID NO: 126794 - protein, 60 aa, Setaria italica
  Transcript Sequence Number=SeqID_60820
KLVVKEPPRAVSEREDKLFLDQIDSLMEQNAEVDGDDDSEEEEDTGMGDVDLTNSGVTAY

SEQ ID NO: 126795 - protein, 92 aa, Setaria italica
  Transcript Sequence Number=SeqID_60821
  Gene Ontology: Mol. function=catalytic activity; Cellular component =phagocytic vesicle; Biological process=metabolic process
  Homolog annotation: Hit_ID=B6UBI2; Match level="QueryCoverage=57%, HitCoverage=10%, E-value=6e-23, Identity=92%"; Hit description =Peroxisomal-coenzyme A synthetase
RQVLPAVRHHVVLPDHQALAGDHRAVDLLAVLVVGDANVTAGYKGNPEANEAAFRFGWFHTGDIGVVDEEGYLHLVGRIKELINRGGEKISP

SEQ ID NO: 126796 - protein, 73 aa, Setaria italica
  misc_feature (67)..(67): Xaa can be any naturally occurring amino acid
  Transcript Sequence Number=SeqID_60822
  Homolog annotation: Hit_ID=B6UBI2; Match level="QueryCoverage=58%, HitCoverage=8%, E-value=1e-12, Identity=83%"; Hit description =Peroxisomal-coenzyme A synthetase
ERAGDARRHQGSERQGSSTAAASPSTRPSPVGQEMAILDEEGARVAAGKPGEVCVRGANVTAGYKGXPEANEA

SEQ ID NO: 126797 - protein, 69 aa, Setaria italica
  misc_feature (20)..(20): Xaa can be any naturally occurring amino acid
  Transcript Sequence Number=SeqID_60823
  Gene Ontology: Mol. function=signal transducer activity; Biological process=response to light stimulus
YRNDLIKRIGTQLDRASASXLLIPADSSDDAMYNVDVVTAILEEFMLHNKDVSEPKLQEDDDDTMDVAN

SEQ ID NO: 126798 - protein, 54 aa, Setaria italica
  Transcript Sequence Number=SeqID_60824
STSGGDASSLRSVSLAASKRGDSSGGKKKSKGGAVVNRNEPDEKKGRLGERLVG

SEQ ID NO: 126799 - protein, 79 aa, Setaria italica
  Transcript Sequence Number=SeqID_60825
MLSVNNAWSTTSLLMLLYLLFVQDVCVPLSRLAECISTSKQLLDASPLTWYAFLSFKYSNIFASSFSEALFHLTQEMAA

SEQ ID NO: 126800 - protein, 79 aa, Setaria italica
  Transcript Sequence Number=SeqID_60826
  Gene Ontology: Mol. function=oxidoreductase activity; Biological process=oxidation reduction
  Homolog annotation: Hit_ID=B9SDP2; Match level="QueryCoverage=68%, HitCoverage=9%, E-value=6e-25, Identity=90%"; Hit description=D -lactate dehydrogenase, putative
GFRYSFSSIHPTPGSTTTSISSICRDLVVEPGVGRIELNEYLKPYGLFFPLDPGPGATIGGMCATRCSGSLAVRYGTMR

SEQ ID NO: 126801 - protein, 33 aa, Setaria italica
  Transcript Sequence Number=SeqID_60827
  Gene Ontology: Mol. function=oxidoreductase activity
VSRVELLDEVQIRAINMANGKNLPEVPTLMFRI

SEQ ID NO: 126802 - protein, 105 aa, Setaria italica
  Transcript Sequence Number=SeqID_60828
  Subcellular localization annotation: CTP_CleavageSite=50; ConfidenceScore=5.28e-01
GRNVSPVSFSQSTEYALQHSQNQNPLDRICQENVSLPSQTNVPSNGLSPSSSYAASEVSSVSRCYSFEDSAEMHGSGTDMHFPRKVWKCCLPISDLLSVCKLLAT

SEQ ID NO: 126803 - protein, 55 aa, Setaria italica
  Transcript Sequence Number=SeqID_60829
AFQQFPYLTEGILASSRENGKILSNQTVSFESNQSPAPGAKFVSHKEQVALDSRT

SEQ ID NO: 126804 - protein, 42 aa, Setaria italica
  Transcript Sequence Number=SeqID_60830
LCAASFNRIRTAFLYGARKLGHILMLPPEVIPDEIYVFSKHV

SEQ ID NO: 126805 - protein, 47 aa, Setaria italica
  misc_feature (13)..(13): Xaa can be any naturally occurring amino acid
  misc_feature (24)..(24): Xaa can be any naturally occurring amino acid
  Transcript Sequence Number=SeqID_60831
  Gene Ontology: Mol. function=ARF GTPase activator activity; Cellular component=Golgi apparatus; Biological process=regulation of ARF GTPase activity
  Homolog annotation: Hit_ID=Q5W7F2; Match level="QueryCoverage=91%, HitCoverage=5%, E-value=3e-15, Identity=90%"; Hit description=ADP -ribosylation factor GTPase-activating protein AGD3
RGKVQTIRQGYLXKRSSNLRADWXRRFFVLDSRGMLYYYRKQLLGHL

SEQ ID NO: 126806 - protein, 71 aa, Setaria italica
  misc_feature (11)..(11): Xaa can be any naturally occurring amino acid
  Transcript Sequence Number=SeqID_60832
FSFATWLVKNXKSILDGQRVLELGSFGTGALAIFLRKSFGMDITTSDYDDKEIEENIAYNCRANNLDVLPH

SEQ ID NO: 126807 - protein, 48 aa, Setaria italica
  Transcript Sequence Number=SeqID_60833
PELQQYLPYLRGVDPDGGTIVFNLITRFFRRLDFLTLTKEGWSFLLAS

SEQ ID NO: 126808 - protein, 94 aa, Setaria italica
  Transcript Sequence Number=SeqID_60834
  Gene Ontology: Mol. function=hydrolase activity, acting on glycosyl bonds; Cellular component=vacuole; Biological process=cell wall organization and biogenesis
  Homolog annotation: Hit_ID=B6U0W6; Match level="QueryCoverage=97%, HitCoverage=19%, E-value=1e-39, Identity=81%"; Hit description =Polygalacturonase
QWSSVSGMYCNDLTPSVERPHSASITDFGAVGDGVTLNTKAFQNALFYLNSFANKGGAQLFVPAGRWLTGSFSLISHLTLSLDKEAVILGSPVR

SEQ ID NO: 126809 - protein, 68 aa, Setaria italica
  Transcript Sequence Number=SeqID_60835
  Subcellular localization annotation: CTP_CleavageSite=15; ConfidenceScore=5.06e-01
SKHDVFQVQTMSTLQCSTQVELKTTLSRRPLQESASNLLLVPTNIITDSRLYNRVDNVPLSSDLPKKW

SEQ ID NO: 126810 - protein, 31 aa, Setaria italica
  Transcript Sequence Number=SeqID_60836
AEVAPSLLARFAAFISLHWLMVDGDQSKSKK

SEQ ID NO: 126811 - protein, 83 aa, Setaria italica
  Transcript Sequence Number=SeqID_60837
PIEWGSCVPKQSILLTFYFSLIGNCKRHVERTAVPVENRPTANSSLLAFWTSGAPLLASPRSLVAVDDDDSLPLGVEAAVGFG

SEQ ID NO: 126812 - protein, 92 aa, Setaria italica
  Transcript Sequence Number=SeqID_60838
  Subcellular localization annotation: CTP_CleavageSite=41; ConfidenceScore=5.29e-01
LCPLYPNPTAASTPRGRSRRRRRRPGSAETPAKGHQKSRTRATSCSEPHSIGTSNGLFKDPHYQKSTFDQTSRAKPAKMDVPVMKYQNIILE

SEQ ID NO: 126813 - protein, 43 aa, Setaria italica
  Transcript Sequence Number=SeqID_60839
SEFRLPCSYSLDSSEAERDAVKAQNRKGYLLLRKHSLTKICIQ

SEQ ID NO: 126814 - protein, 48 aa, Setaria italica
  Transcript Sequence Number=SeqID_60840
KATAARSLQSHIVVGHLLEGLPTDDLLLYAIAASVLQKRKLIIESYTP

SEQ ID NO: 126815 - protein, 84 aa, Setaria italica
  misc_feature (68)..(68): Xaa can be any naturally occurring amino acid
  Transcript Sequence Number=SeqID_60841
GGRYEEEEEGYKKKPGGGSGYGGGRYEEEEDHRKKPSSAGYGGGRYEQEDDYQKKPTSGGYGGGGMSXRDGYNKKPTSGGYGGG

SEQ ID NO: 126816 - protein, 51 aa, Setaria italica
  Transcript Sequence Number=SeqID_60842
  Gene Ontology: Mol. function=metal ion binding; Cellular component =mitochondrial intermembrane space protein transporter complex; Biological process=protein import into mitochondrial inner membrane
  Homolog annotation: Hit_ID=B6T665; Match level="QueryCoverage=60%, HitCoverage=37%, E-value=4e-09, Identity=87%"; Hit description =Mitochondrial import inner membrane translocase subunit Tim10
IILYLLFLRSFVICVSIGCFGLAEKEMEYRVDLFNRLTQTCFAKCIEKRYT

SEQ ID NO: 126817 - protein, 96 aa, Setaria italica
  misc_feature (75)..(75): Xaa can be any naturally occurring amino acid
  Transcript Sequence Number=SeqID_60843
  Gene Ontology: Mol. function=nucleic acid binding
  Homolog annotation: Hit_ID=B9SPT6; Match level="QueryCoverage=98%, HitCoverage=23%, E-value=7e-27, Identity=59%"; Hit description =Nucleolysin tia-1, putative
  Pfam annotation: Domain name=RRM_1; Domain location=2-48; Score=16.4; E_value=0.006; Accession=PF00076.14; Description=RNA recognition motif. (a.k.a. RRM, RBD, o
MCSDARVMWDNKTGRSRGYGFVSFRNQQEAENAITEMTGKWLGSRQIRCNWATKNNSEEKPETDNHNAVVLTNGXSSNSATDASQDGGSKENQRTT

SEQ ID NO: 126818 - protein, 47 aa, Setaria italica
  Transcript Sequence Number=SeqID_60844
FLFCFNFLFCILWSMNMKFKYELAFPFLPHFLTRYYFPCWCRKLKML

SEQ ID NO: 126819 - protein, 147 aa, Setaria italica
  misc_feature (28)..(28): Xaa can be any naturally occurring amino acid
  misc_feature (106)..(106): Xaa can be any naturally occurring amino acid
  Transcript Sequence Number=SeqID_60845
  Gene Ontology: Mol. function=nucleic acid binding
  Homolog annotation: Hit_ID=B9RR73; Match level="QueryCoverage=76%, HitCoverage=31%, E-value=3e-50, Identity=81%"; Hit description =Nucleolysin tia-1, putative
  Pfam annotation: Domain name=RRM_1; Domain location=62-134; Score =21.7; E_value=0.0019; Accession=PF00076.14; Description=RNA recognition motif. (a.k.a. RRM, RBD, o
VERCKLIRKEKSSFGFVDYYDRRSAALXIMTLHGRHIYGQAIKVNWAYASTQREDTSGHFHIFVGDLSSEVNDATLYACFSAYPSCSDARVMWDNKTGRSRGYGFXVSFRNQQARTTQALPLWISQSFYLFCCVDQTQQFYYFVLLF

SEQ ID NO: 126820 - protein, 97 aa, Setaria italica
  Transcript Sequence Number=SeqID_60846
  Gene Ontology: Mol. function=nucleic acid binding
  Homolog annotation: Hit_ID=B9SPT6; Match level="QueryCoverage=91%, HitCoverage=21%, E-value=1e-22, Identity=60%"; Hit description =Nucleolysin tia-1, putative
NYVRKIYVVQQEKGFGFVRYSNHGEAALAIQMANGLVVRGKPIKCSWGTKPTPPGTASKPLPPPVAPYQPAVAMPGVPQGFTAAELLAYQRQLALSQ

SEQ ID NO: 126821 - protein, 48 aa, Setaria italica
  Transcript Sequence Number=SeqID_60847
HNLWTASVGHRLYSYATGVPRMDQTTPILKVLLLRFSCQPKMLRKKLF

SEQ ID NO: 126822 - protein, 139 aa, Setaria italica
  misc_feature (122)..(122): Xaa can be any naturally occurring amino acid
  misc_feature (131)..(131): Xaa can be any naturally occurring amino acid
  Transcript Sequence Number=SeqID_60848
  Gene Ontology: Cellular component=plasma membrane
  Homolog annotation: Hit_ID=Q9SRM6; Match level="QueryCoverage=76%, HitCoverage=20%, E-value=5e-12, Identity=39%"; Hit description =T19F11.12 protein
RTLALPDLAEESSLRALVKKQMQASSLTGSDEGDIDLIAETRAKEVSEFLQMLNTSSDGRSSKVHEVPQKEWKVKQDTDQLRVMYREGPEGTPFHTLLLEGFADGPIDVCTCVSWESALYKXWFPQYNLPXFRIDQSGC

SEQ ID NO: 126823 - protein, 112 aa, Setaria italica
  misc_feature (112)..(112): Xaa can be any naturally occurring amino acid
  Transcript Sequence Number=SeqID_60849
EDNRQLGILDTAIAVIRGDKTTNITTLQNLLSYDAASKGSTVSSRSSRANIRNADNLLNGGPATTQPQDSREIRQAYSLPSEKVSDRAEDAIDKGSLKNSTASTVTRTMSMX

SEQ ID NO: 126824 - protein, 62 aa, Setaria italica
  Transcript Sequence Number=SeqID_60850
STRIKLVNYSRYNAEQGIKRMVKAKTDQEAYLNELTNSVQPVPSTPSVAPHEPSKIARHRSV

SEQ ID NO: 126825 - protein, 148 aa, Setaria italica
  misc_feature (28)..(28): Xaa can be any naturally occurring amino acid
  Transcript Sequence Number=SeqID_60851
TPPSSGAAAEAGVEAEIKEAVPFIKLSXVASEAEKAEPDATRTEPEAERAVTVDTDVGTGDGAAAATAEEENPVAEAVSCDTEAPVDCTGDRDLFNLLMRTAIERFPDLHFYRFGRPVAVPGSPMECDLAWRFRPAADAIGNRPDQRN

SEQ ID NO: 126826 - protein, 146 aa, Setaria italica
  misc_feature (140)..(140): Xaa can be any naturally occurring amino acid
  Transcript Sequence Number=SeqID_60852
TELNERTTTRRTSNTCTLVVDSVGEYHSGVGAKRSGKRKGKKGKKGKREAPVTDFVPAKTQVRLDENAANNEAAGAVAEPVFVVGEAVNDSLPVVASESEFSRGRYLIYMGGGERCKSMNHFIWGFLCALGEAQFLNRTXVMDLNV

SEQ ID NO: 126827 - protein, 60 aa, Setaria italica
  misc_feature (8)..(8): Xaa can be any naturally occurring amino acid
  Transcript Sequence Number=SeqID_60853
NSEWFTEXKELSNGKPVEFDGYMRVAVDTEVFLRGKRHLETFNDLTRDCKDGVNTCPASS

SEQ ID NO: 126828 - protein, 68 aa, Setaria italica
  Transcript Sequence Number=SeqID_60854
QNTAAIRYHQLVVSAQVQLWPNLDRDTSPDSLLMTLNDKVGAGRYLYIATDEPDKSFFDPLKEKYKTR

SEQ ID NO: 126829 - protein, 84 aa, Setaria italica
  misc_feature (26)..(26): Xaa can be any naturally occurring amino acid
  misc_feature (70)..(70): Xaa can be any naturally occurring amino acid
  Transcript Sequence Number=SeqID_60855
  Gene Ontology: Mol. function=binding; Cellular component=nuclear pore; Biological process=intracellular protein transport
  Homolog annotation: Hit_ID=B6TJW5; Match level="QueryCoverage=100%, HitCoverage=17%, E-value=1e-31, Identity=80%"; Hit description =Importin alpha-1b subunit
  Pfam annotation: Domain name=Arm; Domain location=1-35; Score=21.1; E_ value=0.0045; Accession=PF00514.15; Description=Armadillobeta-catenin- like repeat
  Pfam annotation: Domain name=Arm; Domain location=38-79; Score=14.2; E_value=0.19; Accession=PF00514.15; Description=Armadillobeta -catenin-like repeat
  Pfam module annotation: Pfam domain module=Arm::Arm; Domain location =1-35::38-79
AVIDASIISPLIVLLKTSEADIKKEXAWALSNAASGASSEQIQYLVSRGCLEPLCSVLTYQDPDLVHACXLEGLENILQAGEAG

SEQ ID NO: 126830 - protein, 87 aa, Setaria italica
  misc_feature (23)..(23): Xaa can be any naturally occurring amino acid
  Transcript Sequence Number=SeqID_60856
  Homolog annotation: Hit_ID=UPI000034F426; Match level="QueryCoverage =74%, HitCoverage=8%, E-value=3e-20, Identity=67%"; Hit description =SIT4 phosphatase-associated family protein
STESNGPTIPSEEKAPPRIGNVXHMTRIANKLIQLGNSNSTIQAHLQENTEWVEWQTNVLVKRNEVENVYSLGLCWGDPKLITNLTN

SEQ ID NO: 126831 - protein, 68 aa, Setaria italica
  Transcript Sequence Number=SeqID_60857
TLQSSDDVCQEVVISSLRLGDDQDGSSLFTNSNWFTFDGERGINDRISDSVPSSSPNSEEISLETEEA

SEQ ID NO: 126832 - protein, 101 aa, Setaria italica
  Transcript Sequence Number=SeqID_60858
  Homolog annotation: Hit_ID=Q7XTT5; Match level="QueryCoverage=80%, HitCoverage=10%, E-value=5e-32, Identity=81%"; Hit description =OSJNBa0058K23.19 protein
NCICLVLSFSLLFGISSLKLHANAAEILCAVTRCAPPSLAAKICSPSFVGRLFHHALEESRPKSVLVHSLSVCISLLDPKRLASASYQAFRSNLSHGALVT

SEQ ID NO: 126833 - protein, 69 aa, Setaria italica
  Transcript Sequence Number=SeqID_60859
  Gene Ontology: Mol. function=receptor activity; Cellular component =endoplasmic reticulum; Biological process=intracellular protein transport
  Homolog annotation: Hit_ID=B6U1I6; Match level="QueryCoverage=100%, HitCoverage=31%, E-value=6e-17, Identity=69%"; Hit description=B -cell receptor-associated protein 31-like containing protein
EMKKLQREIAKLNESMKKLKFENEEHERKASAAEAHVNALQKQSEELLLEYDRLLEDNQILQTQLLSRG

SEQ ID NO: 126834 - protein, 68 aa, Setaria italica
  Transcript Sequence Number=SeqID_60860
  Homolog annotation: Hit_ID=B9SE13; Match level="QueryCoverage=73%, HitCoverage=19%, E-value=1e-11, Identity=60%"; Hit description =Protein YIPF1, putative
PGGNGGGYRPPGAPDGDVENQANWKGYFNVASYAPYFNVDTDVVVDRLISSVYPMDGFYRKIDANPDM

SEQ ID NO: 126835 - protein, 65 aa, Setaria italica
  Transcript Sequence Number=SeqID_60861
VLLLIPVEFLRWVIIALAGGVSSWFIALNLKECTEGADLMVLMNSARANCSTAALAIKTIRSAPS

SEQ ID NO: 126836 - protein, 78 aa, Setaria italica
  misc_feature (17)..(17): Xaa can be any naturally occurring amino acid
  misc_feature (25)..(25): Xaa can be any naturally occurring amino acid
  misc_feature (34)..(34): Xaa can be any naturally occurring amino acid
  Transcript Sequence Number=SeqID_60862
MSGGGGGSALLAFSPRXLSPSGWCXGWEWGELAXPRRFTGTPPSLGSGPRARDPELRVRDFPCSRWGFFSGRLLHDWW

SEQ ID NO: 126837 - protein, 154 aa, Setaria italica
  misc_feature (30)..(30): Xaa can be any naturally occurring amino acid
  misc_feature (64)..(64): Xaa can be any naturally occurring amino acid
  Transcript Sequence Number=SeqID_60863
SSSNYGEGLRVPGDQRQPQSLPSHLVEVLXFGDGQQSFGDNSGGYPKNSSTFTPSGVNTQGNPXQASGGQLLGRPAPSPGGTGTPNFENVSTPPMPYANSPRSGTNMMNTPSPQQQQQQQGVYGNMQAGAQNMQQGMVGLQNQGQNPNFPQQRQ

SEQ ID NO: 126838 - protein, 63 aa, Setaria italica
  Transcript Sequence Number=SeqID_60864
  Subcellular localization annotation: CTP_CleavageSite=54; ConfidenceScore=5.17e-01
MIVDQYGMAGGHPQRSHPSQMLTDQMFGMGSPQNSNMMGMQQQQQQQQQARGCNGNSAGQVLR

SEQ ID NO: 126839 - protein, 138 aa, Setaria italica
  Transcript Sequence Number=SeqID_60865
YKSVPTLDKAQAAKIQEQENLLRAAVNYGEGLRVPGDQRQPQSLPSHLVEVLSFGDGQQSFGDNSGGYPKNSSTFTPSGVNTQGNPVQASGGQLLGRPAPSPGGTGTPNFENVSTPPMPYANSPRSGTNMMNTPSTPS

SEQ ID NO: 126840 - protein, 97 aa, Setaria italica
  misc_feature (26)..(26): Xaa can be any naturally occurring amino acid
  misc_feature (80)..(80): Xaa can be any naturally occurring amino acid
  Transcript Sequence Number=SeqID_60866
  Gene Ontology: Mol. function=microtubule motor activity; Cellular component=microtubule associated complex; Biological process =microtubule-based movement
  Homolog annotation: Hit_ID=Q93XF3; Match level="QueryCoverage=88%, HitCoverage=9%, E-value=2e-39, Identity=94%"; Hit description =Kinesin heavy chain (Fragment)
  Subcellular localization annotation: CTP_CleavageSite=30; ConfidenceScore=5.11e-01
IVGWSRSSPCNTSLVSSAKKLQRERXMLCRQMQKRLTIQERESMYTKWGISLSSKRRRLQVARRLWTETKDLEHVRESAXLVARLIGLLEPGKALRE

SEQ ID NO: 126841 - protein, 99 aa, Setaria italica
  Transcript Sequence Number=SeqID_60867
  Gene Ontology: Mol. function=microtubule motor activity; Cellular component=microtubule associated complex; Biological process =microtubule-based movement
  Homolog annotation: Hit_ID=Q9LNT1; Match level="QueryCoverage=95%, HitCoverage=10%, E-value=2e-16, Identity=48%"; Hit description =T20H2.17 protein
  Subcellular localization annotation: CTP_CleavageSite=30; ConfidenceScore=5.31e-01
FDLQVPLSNFADAESLVSRGMLKRSTAATSANSKSSRSQCIITIRGHKSSDVDSGNSLSSAVLTIADLAGAERERKTGNQGSRLLESNFINNTSMVFGL

SEQ ID NO: 126842 - protein, 142 aa, Setaria italica
  Transcript Sequence Number=SeqID_60868
  Gene Ontology: Mol. function=metalloexopeptidase activity; Cellular component=exocyst; Biological process=cellular process
  Homolog annotation: Hit_ID=B6U0I0; Match level="QueryCoverage=95%, HitCoverage=21%, E-value=2e-70, Identity=93%"; Hit description=Xaa -Pro aminopeptidase 1
RDGAAVVQYLAWLDNQMQENYGASGYFSEIKGSHQKENLGTKLTEVSVSDKLEGFRATKEHFRGLSFPTISSVGPNAAVIHYKPEASTCSEMDAGKIYLCDSGAQYLDGTTDITRTVHFGKPSLHEKSCYTAVLEKVQQYDN

SEQ ID NO: 126843 - protein, 47 aa, Setaria italica
  Transcript Sequence Number=SeqID_60869
EKQTCIPSWEDDAREKATLLISQHVHRSAYGRRTHIMQHFSYRDLII

SEQ ID NO: 126844 - protein, 30 aa, Setaria italica
  Transcript Sequence Number=SeqID_60870
MQAPYQAKLIDTKLLTPVEIEWVNTYHSDC

SEQ ID NO: 126845 - protein, 67 aa, Setaria italica
  Transcript Sequence Number=SeqID_60871
  Gene Ontology: Mol. function=metalloexopeptidase activity
  Homolog annotation: Hit_ID=B6U0I0; Match level="QueryCoverage=70%, HitCoverage=7%, E-value=1e-16, Identity=91%"; Hit description=Xaa -Pro aminopeptidase 1
GGGGWWVGVLPWWWCRDGGRWKDRPPVEPRPVIVHPVEFAGRSVSEKIKELREKLVHEKASAIIITA

SEQ ID NO: 126846 - protein, 48 aa, Setaria italica
  Transcript Sequence Number=SeqID_60872
  Gene Ontology: Mol. function=sequence-specific DNA binding; Cellular component=intracellular
  Homolog annotation: Hit_ID=B6TCI2; Match level="QueryCoverage=77%, HitCoverage=21%, E-value=1e-11, Identity=89%"; Hit description=DNA polymerase epsilon subunit 3
KESKRQTINADDVLNALDEMDFPEFVEPLRTSLQEYRKCCSTEVTWST

SEQ ID NO: 126847 - protein, 42 aa, Setaria italica
  Transcript Sequence Number=SeqID_60873
  Gene Ontology: Mol. function=sequence-specific DNA binding; Cellular component=intracellular
  Homolog annotation: Hit_ID=B6TCI2; Match level="QueryCoverage=78%, HitCoverage=18%, E-value=6e-09, Identity=87%"; Hit description=DNA polymerase epsilon subunit 3
MMSSNALDEMDFPEFVEPLRTSLQEFRNKNADRRSEAKQKAK

SEQ ID NO: 126848 - protein, 101 aa, Setaria italica
  misc_feature (37)..(37): Xaa can be any naturally occurring amino acid
  misc_feature (71)..(71): Xaa can be any naturally occurring amino acid
  Transcript Sequence Number=SeqID_60874
  Gene Ontology: Mol. function=nucleic acid binding
  Homolog annotation: Hit_ID=B6SWC9; Match level="QueryCoverage=67%, HitCoverage=13%, E-value=4e-20, Identity=73%"; Hit description =Ubiquitin-protein ligase/ zinc ion binding protein
CSVLLDLSQHFSRASSSSQSDLSCVECPECHRDICIXNCGVPWHIMMGCDEYQSLPVEERDAGDLSLHRLXQNNRWRRCQRCRRNRIELNNKGLDLPIIEL

SEQ ID NO: 126849 - protein, 110 aa, Setaria italica
  Transcript Sequence Number=SeqID_60875
RCVVNACPLYDSIHACAWSLELLAPCSWLLTMQAGCVDLCWRACVAHSQQQKASTTLQLKKSATSRPLVKLLLVKLHCLFYKTVCRLITSANCLEDTEKRDLTFVIPENL

SEQ ID NO: 126850 - protein, 51 aa, Setaria italica
  Transcript Sequence Number=SeqID_60876
  Gene Ontology: Mol. function=oxidoreductase activity, acting on sulfur group of donors, disulfide as acceptor; Biological process =protein metabolic process
  Homolog annotation: Hit_ID=B4FGU9; Match level="QueryCoverage=90%, HitCoverage=18%, E-value=6e-13, Identity=80%"; Hit description =Peptide methionine sulfoxide reductase
ILLNQNISKEKEQAKDRSSVITTQIQPLGVFHPAEPEHQKFELKEEWLALQ

SEQ ID NO: 126851 - protein, 59 aa, Setaria italica
  Transcript Sequence Number=SeqID_60877
  Homolog annotation: Hit_ID=B4FWB9; Match level="QueryCoverage=100%, HitCoverage=9%, E-value=3e-23, Identity=89%"; Hit description=GRAM domain containing protein
INVTIYDWDIVWKSTILGSVTVPVESEGPSGPVWYTLDSTSGQVCLHIKAIKVHESSSR

SEQ ID NO: 126852 - protein, 87 aa, Setaria italica
  Transcript Sequence Number=SeqID_60878
  Homolog annotation: Hit_ID=B4FWB9; Match level="QueryCoverage=41%, HitCoverage=6%, E-value=7e-13, Identity=94%"; Hit description=GRAM domain containing protein
FSNGTFLCTAEQFFSILLSDDSSYITEYRTDRKDKDINAASLLLQTTLPLPKSRQWEAVGVWIQLSPTKLGHILLLFGPCPLTLDCQ

SEQ ID NO: 126853 - protein, 64 aa, Setaria italica
  misc_feature (50)..(50): Xaa can be any naturally occurring amino acid
  Transcript Sequence Number=SeqID_60879
  Homolog annotation: Hit_ID=B4FWB9; Match level="QueryCoverage=62%, HitCoverage=6%, E-value=2e-12, Identity=87%"; Hit description=GRAM domain containing protein
TKKETKRNLCPRTIRTCAVYKFASFWNRNHTFRALQRAVKNFQMMIEAEXKQERAQSALVHTVA

SEQ ID NO: 126854 - protein, 81 aa, Setaria italica
  Transcript Sequence Number=SeqID_60880
NHLKPLIDFLEYIGIPNPRIASVLLSFPPIILSDIENDIKPRIHEWEKVIYVRGVHWYLLDWCSLEYNTIILLSISKFTRL

SEQ ID NO: 126855 - protein, 69 aa, Setaria italica
  Transcript Sequence Number=SeqID_60881
  Gene Ontology: Mol. function=transcription factor activity; Cellular component=transcription factor complex; Biological process =regulation of transcription, DNA-dependent
  Homolog annotation: Hit_ID=Q84VF4; Match level="QueryCoverage=100%, HitCoverage=23%, E-value=8e-22, Identity=77%"; Hit description=DP protein
EEGDKSKKARKEKAGAQRIAGWGLREYSKIVSKKVETKGRTTYNEVADEICAELKLTLNGQEFDEKNIR

SEQ ID NO: 126856 - protein, 43 aa, Setaria italica
  Transcript Sequence Number=SeqID_60882
  Gene Ontology: Mol. function=transcription factor activity; Cellular component=transcription factor complex
  Homolog annotation: Hit_ID=Q84VF4; Match level="QueryCoverage=100%, HitCoverage=14%, E-value=2e-09, Identity=79%"; Hit description=DP protein
FDIAVSKKVETKGRTTYNEVADEICAELKLTLNGQEFDEKNIR

SEQ ID NO: 126857 - protein, 47 aa, Setaria italica
  Transcript Sequence Number=SeqID_60883
FLKVNMIVHAKNNVNQYLALQYMHCLLSISWPGLCLSCEEVKCILVL

SEQ ID NO: 126858 - protein, 105 aa, Setaria italica
  Transcript Sequence Number=SeqID_60884
  Gene Ontology: Mol. function=ubiquitin thiolesterase activity; Cellular component=intracellular; Biological process=ubiquitin -dependent protein catabolic process
  Homolog annotation: Hit_ID=Q6K6Z5; Match level="QueryCoverage=99%, HitCoverage=31%, E-value=1e-49, Identity=88%"; Hit description=(RAP Annotation release2) Peptidase C12
  Pfam annotation: Domain name=Peptidase_C12; Domain location=1-90; Score=-4.0; E_value=2e-06; Accession=PF01088.13; Description =Ubiquitin carboxyl-terminal hydrolase, family 1
EGLAIGNSESIRTAHNSFARPEPFISDEQRAATKDDDVYHFISYLPFEGVLYELDGLKEGPVNLGQCGGLDDLDWLQMVQPVIQERIERYSQSEIRFNLMAIIKK

SEQ ID NO: 126859 - protein, 78 aa, Setaria italica
  Transcript Sequence Number=SeqID_60885
  Gene Ontology: Mol. function=structural constituent of ribosome; Cellular component=ribonucleoprotein complex; Biological process =translation
  Homolog annotation: Hit_ID=Q6L510; Match level="QueryCoverage=57%, HitCoverage=39%, E-value=1e-14, Identity=93%"; Hit description=60S ribosomal protein L36
  Pfam annotation: Domain name=Ribosomal_L36e; Domain location=1-45; Score=-10.3; E_value=0.001; Accession=PF01158.10; Description =Ribosomal protein L36e
RITELLKVGKDKRALKVAKRKLGTHKRAKKKREEMANVVRKMRCGTFSLPFHTMLFHSVLFGCSYLYLIELLCCIMSV

SEQ ID NO: 126860 - protein, 64 aa, Setaria italica
  Transcript Sequence Number=SeqID_60886
LTTSWLLLEFICFCHAIIRKLLDDLSAIDMRLILVIDVNWNTIWSGTSMMVYPWEPHQLTQFTF

SEQ ID NO: 126861 - protein, 63 aa, Setaria italica
  Transcript Sequence Number=SeqID_60887
SGQLVIVADGSKVLEEPSDFLMLRLYIRLLNDGDTKNYIAASLQQEHQVPYSFHHVELGLKTN

SEQ ID NO: 126862 - protein, 86 aa, Setaria italica
  Transcript Sequence Number=SeqID_60888
SLRKLPKNISILAEFLESEKTEPALPFNPLAARAATISLSAFGPFGFGFFNGKGKRQNKKPNNLDQSHQKPKTPDQSSMKQKGVNP

SEQ ID NO: 126863 - protein, 96 aa, Setaria italica
  Transcript Sequence Number=SeqID_60889
CSCSETIAISFFLPLVYLIICILIIFPLFFSAKGVNPPSHEAFSEEWLENGQCPLARSYRAMSGVLPLVAKALQPPAGMKLKCPPAVVAIRAALAR

SEQ ID NO: 126864 - protein, 64 aa, Setaria italica
  Transcript Sequence Number=SeqID_60890
FFLVLSFLLNWFSYSKYFSLIRRYNFKWKYSSTKLHTRASAPTIITYHTAILVLTHLLFHSSRP

SEQ ID NO: 126865 - protein, 102 aa, Setaria italica
  Transcript Sequence Number=SeqID_60891
  Subcellular localization annotation: CTP_CleavageSite=61; ConfidenceScore=5.88e-01
TLAQPESPPFESSASTIFATSSAAPSVPFSQPFFTSSALLLVTATSLLSSGPNFSALLFLSEAANSPFTNGGGSSVAGVGFTSDIPVGHNLYLLQENAEKMS

SEQ ID NO: 126866 - protein, 35 aa, Setaria italica
  Transcript Sequence Number=SeqID_60892
FNFYRELNIDGANQSLRIIKNLIDAGSCQSYAAID

SEQ ID NO: 126867 - protein, 53 aa, Setaria italica
  Transcript Sequence Number=SeqID_60893
RQAPKMLRKEDHFCLLLQAPRCRMSCYDVHRHSKSNSVTMYLVNFRAKKLFPF

SEQ ID NO: 126868 - protein, 113 aa, Setaria italica
  misc_feature (92)..(92): Xaa can be any naturally occurring amino acid
  misc_feature (97)..(97): Xaa can be any naturally occurring amino acid
  Transcript Sequence Number=SeqID_60894
  Gene Ontology: Mol. function=transferase activity; Cellular component= endoplasmic reticulum membrane; Biological process=biosynthetic process
  Homolog annotation: Hit_ID=B6T9J5; Match level="QueryCoverage=93%, HitCoverage=22%, E-value=3e-49, Identity=90%"; Hit description=Beta -1,4-mannosyltransferase
LVLVLFKKGKQFVYPRLLFIITGKGPDRKKYENQIKRLKLRRVAFRTMWLAIEDYPLLLGSADLGVSLHTSSSGLDLPMKVVDMFGCGLPVXAASFXCIEELVKVTKMVLSFL

SEQ ID NO: 126869 - protein, 138 aa, Setaria italica
  misc_feature (101)..(101): Xaa can be any naturally occurring amino acid
  misc_feature (110)..(110): Xaa can be any naturally occurring amino acid
  misc_feature (113)..(113): Xaa can be any naturally occurring amino acid
  Transcript Sequence Number=SeqID_60895
  Gene Ontology: Mol. function=oxidoreductase activity, acting on NADH or NADPH; Cellular component=membrane; Biological process=ATP synthesis coupled electron transport
  Homolog annotation: Hit_ID=Q8W317; Match level="QueryCoverage=94%, HitCoverage=17%, E-value=2e-65, Identity=92%"; Hit description=NADH -ubiquinone oxidoreductase 75 kDa subunit
  Pfam annotation: Domain name=DUF1982; Domain location=85-133; Score =49.0; E_value=1.8e-11; Accession=PF09326.3; Description=Domain of unknown function (DUF1982)
VDKAVYRANVILPSSAFSEKEGTYENTEGCTQWTIPAVPTVGDARDDWKIIRALSEVAGAQLPYDSLSAVRDRISTVAPNLIHVDEKEPCTISAEVKPPVXKQQVSSTPXKTXIENFYMTDAITRASKIMAQIAVRPC

SEQ ID NO: 126870 - protein, 83 aa, Setaria italica
  Transcript Sequence Number=SeqID_60896
  Gene Ontology: Mol. function=oxidoreductase activity, acting on NADH or NADPH; Cellular component=membrane; Biological process=ATP synthesis coupled electron transport
  Homolog annotation: Hit_ID=Q8W317; Match level="QueryCoverage=83%, HitCoverage=9%, E-value=3e-31, Identity=92%"; Hit description=NADH -ubiquinone oxidoreductase 75 kDa subunit
  Pfam annotation: Domain name=DUF1982; Domain location=29-76; Score =71.9; E_value=2.4e-18; Accession=PF09326.3; Description=Domain of unknown function (DUF1982)
FGPSQLRDCRKAAERDRISTVAPNLIHVDEKEPCTISAEVKPPVKQQVSSTPFKTVIENFYMTDAITRASKIMAQCSATLLKK

SEQ ID NO: 126871 - protein, 122 aa, Setaria italica
  Transcript Sequence Number=SeqID_60897
  Gene Ontology: Mol. function=oxidoreductase activity, acting on NADH or NADPH; Cellular component=membrane; Biological process=ATP synthesis coupled electron transport
  Homolog annotation: Hit_ID=Q8W317; Match level="QueryCoverage=93%, HitCoverage=15%, E-value=9e-59, Identity=94%"; Hit description=NADH -ubiquinone oxidoreductase 75 kDa subunit
MRTINEEWISDKTRFCYDGLKRQRLNDPMIRGPDGRFKAVTWRDALAVVAEVLHQVKPEEITGVAGKLSDAESMMALKDFVNRMGSDKVLCEGNGPNPPADLRSNYLMNTGIAGLSKKVLSN

SEQ ID NO: 126872 - protein, 106 aa, Setaria italica
  Transcript Sequence Number=SeqID_60898
  Gene Ontology: Mol. function=oxidoreductase activity, acting on NADH or NADPH; Cellular component=membrane; Biological process=ATP synthesis coupled electron transport
  Homolog annotation: Hit_ID=Q8W317; Match level="QueryCoverage=100%, HitCoverage=14%, E-value=1e-53, Identity=91%"; Hit description=NADH -ubiquinone oxidoreductase 75 kDa subunit
DISLDKLPEDAFVVYQGHHGDKAVYRANVILPSSAFSEKEGTYENTEGCTQWTIPAVPTVGDARDDWKIIRALSEVAGAQLPYDSLSAVRDRISTVAPNLIHVDEK

SEQ ID NO: 126873 - protein, 92 aa, Setaria italica
  Transcript Sequence Number=SeqID_60899
  Gene Ontology: Mol. function=oxidoreductase activity, acting on NADH or NADPH; Cellular component=membrane; Biological process=ATP synthesis coupled electron transport
  Homolog annotation: Hit_ID=Q8W317; Match level="QueryCoverage=98%, HitCoverage=12%, E-value=4e-43, Identity=91%"; Hit description=NADH -ubiquinone oxidoreductase 75 kDa subunit
  Pfam annotation: Domain name=DUF1982; Domain location=38-85; Score =71.9; E_value=2.4e-18; Accession=PF09326.3; Description=Domain of unknown function (DUF1982)
ERIIRALSEVAGAQLPYDSLSAVRDRISTVAPNLIHVDEKEPCTISAEVKPPVKQQVSSTPFKTVIENFYMTDAITRASKIMAQCSATLLKK

SEQ ID NO: 126874 - protein, 104 aa, Setaria italica
  Transcript Sequence Number=SeqID_60900
  Gene Ontology: Mol. function=oxidoreductase activity, acting on NADH or NADPH; Cellular component=membrane; Biological process=ATP synthesis coupled electron transport
  Homolog annotation: Hit_ID=Q8W317; Match level="QueryCoverage=82%, HitCoverage=11%, E-value=2e-42, Identity=91%"; Hit description=NADH -ubiquinone oxidoreductase 75 kDa subunit
SKVGYIGPPADLNYDHEHLGTGPQTLVEIAEGRHPFCSVLQSAKNPVIIAGAGLFEREDQDALFSTIETVAKKFNVTRPDWNGLNVPYLSSYCLVVLKVTLVYL

SEQ ID NO: 126875 - protein, 108 aa, Setaria italica
  Transcript Sequence Number=SeqID_60901
  Gene Ontology: Mol. function=oxidoreductase activity, acting on NADH or NADPH; Cellular component=membrane; Biological process=ATP synthesis coupled electron transport
  Homolog annotation: Hit_ID=Q8W317; Match level="QueryCoverage=95%, HitCoverage=13%, E-value=4e-49, Identity=88%"; Hit description=NADH -ubiquinone oxidoreductase 75 kDa subunit
  Pfam annotation: Domain name=DUF1982; Domain location=62-104; Score =37.0; E_value=7.3e-08; Accession=PF09326.3; Description=Domain of unknown function (DUF1982)
VEHLKVCTQWTIPAVPTVGDARDDWKIIRALSEVAGAQLPYDSLSAVRDRISTVAPNLIHVDEKEPCTISAEVKPPVKQQVSSTPFKTVIENFYMTDAITRASRKKGN

SEQ ID NO: 126876 - protein, 86 aa, Setaria italica
  Transcript Sequence Number=SeqID_60902
  Gene Ontology: Mol. function=oxidoreductase activity, acting on NADH or NADPH; Cellular component=membrane; Biological process=ATP synthesis coupled electron transport
  Homolog annotation: Hit_ID=Q8W317; Match level="QueryCoverage=93%, HitCoverage=10%, E-value=2e-23, Identity=71%"; Hit description=NADH -ubiquinone oxidoreductase 75 kDa subunit
CSVLQSAKNPVIIAGAGLFEREDQDALFSTIETVAKKFNVTRPDWNGLNVLLLHAAQAAALDLGLVANPAESIKFSRKFLCYLVLG

SEQ ID NO: 126877 - protein, 71 aa, Setaria italica
  Transcript Sequence Number=SeqID_60903
  Gene Ontology: Mol. function=oxidoreductase activity, acting on NADH or NADPH; Cellular component=membrane; Biological process=ATP synthesis coupled electron transport
  Homolog annotation: Hit_ID=Q8W317; Match level="QueryCoverage=98%, HitCoverage=9%, E-value=2e-19, Identity=70%"; Hit description=NADH -ubiquinone oxidoreductase 75 kDa subunit
PVIIAGAGLFEREDQDALFSTIETVAKKFNVTRPDWNGLNVLLLHAAQAAALDLGLVANPAESIKSAKFLT

SEQ ID NO: 126878 - protein, 56 aa, Setaria italica
  Transcript Sequence Number=SeqID_60904
  Gene Ontology: Mol. function=oxidoreductase activity, acting on NADH or NADPH; Cellular component=membrane; Biological process=ATP synthesis coupled electron transport
  Homolog annotation: Hit_ID=A7PR42; Match level="QueryCoverage=82%, HitCoverage=6%, E-value=6e-16, Identity=84%"; Hit description=NADH -ubiquinone oxidoreductase 75 kDa subunit
GALTSKPFAFKARNWELKGTETIDVTDAVGSNIRVDSRYPFLIDVLIDTWNNTHNF

SEQ ID NO: 126879 - protein, 40 aa, Setaria italica
  Transcript Sequence Number=SeqID_60905
SGQLWTRIWAPWFISRNSMTSELSGNVIDICPVGALTSEL

SEQ ID NO: 126880 - protein, 77 aa, Setaria italica
  Transcript Sequence Number=SeqID_60906
  Gene Ontology: Mol. function=sulfotransferase activity
  Homolog annotation: Hit_ID=B6TEY8; Match level="QueryCoverage=80%, HitCoverage=18%, E-value=7e-18, Identity=68%"; Hit description =Flavonol sulfotransferase-like
GWRGRRPWAARRSGPHECVQILEYQIYAHGRVPDIGDLPDPRLFATHVPFAALPGSVAGGGCKVVYVCRDPKDTLVS

SEQ ID NO: 126881 - protein, 117 aa, Setaria italica
  Transcript Sequence Number=SeqID_60907
RFYFLISFYSWRSYQIKDGVNFVHFPFHHKPLCFHKFFGRYRGKLSCLMINDLDAGVGRFGTSSYKHIYFCCLIVVNVVRSVSMFIFQELGYFVCPVLSIPCHLASMFYNDQTFFFF

SEQ ID NO: 126882 - protein, 107 aa, Setaria italica
  Transcript Sequence Number=SeqID_60908
SSRKSKYDSDSEQEHDMKTKKKKSSHRDSEDDSGTDYDEKKEKKHSKKTHLGSDDDSETDRKKDKYSGDSETDSDARVEAKKKLEKSYHHDPKKDKQAQKLQKKKKE

SEQ ID NO: 126883 - protein, 49 aa, Setaria italica
  Transcript Sequence Number=SeqID_60909
VMAQILDRLVSSVVNIPRATLQSIIVQIFAEKLRSKVLRKDKYSGESVS

SEQ ID NO: 126884 - protein, 72 aa, Setaria italica
  Transcript Sequence Number=SeqID_60910
  Subcellular localization annotation: CTP_CleavageSite=45; ConfidenceScore=5.29e-01
YIRIGRRSGGAAGHRNIAPPLVKAPGPLPLRSAWTSSYYSFTTPMQSMGISPASWRSSCRIHRRNVPAWVLA

SEQ ID NO: 126885 - protein, 91 aa, Setaria italica
  Transcript Sequence Number=SeqID_60911
  Gene Ontology: Mol. function=exonuclease activity; Cellular component= intracellular
  Homolog annotation: Hit_ID=B6THB1; Match level="QueryCoverage=87%, HitCoverage=18%, E-value=6e-36, Identity=89%"; Hit description =Histone mRNA exonuclease 1
FTGWFVQIHLLWINLKVPFHEVYGDVRCNLKEAVQLAGLTWEGRAHCGLDDARNTARLLALMMHRGFKFSITNSLVWQPQPAPQSTTCQLS

SEQ ID NO: 126886 - protein, 125 aa, Setaria italica
  misc_feature (91)..(91): Xaa can be any naturally occurring amino acid
  Transcript Sequence Number=SeqID_60912
  Homolog annotation: Hit_ID=B6THB1; Match level="QueryCoverage=92%, HitCoverage=25%, E-value=3e-50, Identity=83%"; Hit description =Histone mRNA exonuclease 1
GCPSKSKLFEQRGGIEGFPENNEKRNDVVAVEKVWEASPIPTQVLSRPFYRQEFYAWPYIYSDYQMVRQPLPYGFDSQFYQVNRDHGFPIXENRVQYLPFKMLPKVTPIDAQLQEFQYFVVIDFE

SEQ ID NO: 126887 - protein, 55 aa, Setaria italica
  Transcript Sequence Number=SeqID_60913
QICSAKCSFGWPWLSRVGYTSTNLGFDFDFTADTSCQIQGHEFANTLKMWGAKCN

SEQ ID NO: 126888 - protein, 69 aa, Setaria italica
  Transcript Sequence Number=SeqID_60914
  Gene Ontology: Mol. function=exonuclease activity; Cellular component= intracellular
  Homolog annotation: Hit_ID=B6THB1; Match level="QueryCoverage=100%, HitCoverage=16%, E-value=3e-27, Identity=84%"; Hit description =Histone mRNA exonuclease 1
  Pfam annotation: Domain name=zf-GRF; Domain location=24-69; Score =17.0; E_value=0.0003; Accession=PF06839.4; Description=GRF zinc finger
PNEMLGSPVQVNPYAASAGKDRAMYCYCGVLSRWSVVRKPGPMQGRFFYGCGNWTATRRAICPYFAWAS

SEQ ID NO: 126889 - protein, 68 aa, Setaria italica
  misc_feature (8)..(8): Xaa can be any naturally occurring amino acid
  Transcript Sequence Number=SeqID_60915
  Homolog annotation: Hit_ID=B6THB1; Match level="QueryCoverage=82%, HitCoverage=13%, E-value=7e-20, Identity=79%"; Hit description =Histone mRNA exonuclease 1
MIDRERAXEEMQVNNEAPLGCLKPNIEQRGGIEGFPENNEKRNDVVAVEKVWEASPIPTQVLKTRTLT

SEQ ID NO: 126890 - protein, 86 aa, Setaria italica
  Transcript Sequence Number=SeqID_60916
  Homolog annotation: Hit_ID=B6THB1; Match level="QueryCoverage=100%, HitCoverage=19%, E-value=4e-43, Identity=95%"; Hit description =Histone mRNA exonuclease 1
QMVRQPLPYGFDSQFYQVNRDHGFPIENRVQYLPFKMLPQGHPHDAQLQEFQYFVVIDFEATCDKVNNPFPQEIIEFPSVLVNSAN

SEQ ID NO: 126891 - protein, 119 aa, Setaria italica
  misc_feature (81)..(81): Xaa can be any naturally occurring amino acid
  Transcript Sequence Number=SeqID_60917
  Homolog annotation: Hit_ID=B6THB1; Match level="QueryCoverage=93%, HitCoverage=24%, E-value=4e-53, Identity=87%"; Hit description =Histone mRNA exonuclease 1
FVRVFLVVTNEKRNDVVAVEKVWEASPIPTQVLSRPFYRQEFYAWPYIYSDYQMVRQPLPYGFDSQFYQVNRDHGFPIENXVQYLPFKMLPQGHPHDAQLQEFQYFVVIDFEATCDKVN

SEQ ID NO: 126892 - protein, 146 aa, Setaria italica
  misc_feature (125)..(125): Xaa can be any naturally occurring amino acid
  Transcript Sequence Number=SeqID_60918
  Gene Ontology: Mol. function=exonuclease activity; Cellular component= intracellular
  Homolog annotation: Hit_ID=B6THB1; Match level="QueryCoverage=92%, HitCoverage=33%, E-value=4e-57, Identity=80%"; Hit description =Histone mRNA exonuclease 1
FTGWFVQIHLLWINLKVPFHEVYGDVRCNLKEAVQLAGLTWEGRAHCGLDDARNTARLLALMMHRGFKFSITNSLVWQPQPAPQSTTCQLSPDRSPDPVQPQHKPNEMLGSPVQVNPYAASAGKXRAMYCYCGVLSRWSVVRKPGP

SEQ ID NO: 126893 - protein, 57 aa, Setaria italica
  Transcript Sequence Number=SeqID_60919
LHLALQICHGFCNLEAHPAPSQHYSTNPTNQLPSGLSEAPRCVFATGVEMWVLNGTI

SEQ ID NO: 126894 - protein, 111 aa, Setaria italica
  misc_feature (78)..(78): Xaa can be any naturally occurring amino acid
  Transcript Sequence Number=SeqID_60920
  Gene Ontology: Mol. function=exonuclease activity; Cellular component= intracellular
  Homolog annotation: Hit_ID=B6THB1; Match level="QueryCoverage=78%, HitCoverage=19%, E-value=3e-44, Identity=96%"; Hit description =Histone mRNA exonuclease 1
TYHQFLTDFCKELTGIQQIQVDRGVPLGEALLMHDKWLEDKGIKNTNFAIVTWSNWDCRTMLESECRFKRIRKPPYFXNRWINLKVPSHVRPANWTASFKLQRTSPYTSWN

SEQ ID NO: 126895 - protein, 57 aa, Setaria italica
  Transcript Sequence Number=SeqID_60921
VNNLPAIPSTALQTPSNHSIKPNEMLGSPVQVNPYAASAGKDRAMYCYCGVLSRWSV

SEQ ID NO: 126896 - protein, 79 aa, Setaria italica
  misc_feature (65)..(65): Xaa can be any naturally occurring amino acid
  Transcript Sequence Number=SeqID_60922
  Gene Ontology: Mol. function=exonuclease activity; Cellular component= intracellular
  Homolog annotation: Hit_ID=B6THB1; Match level="QueryCoverage=86%, HitCoverage=15%, E-value=5e-34, Identity=94%"; Hit description =Histone mRNA exonuclease 1
FTGWFVQIHLLWINLKVPFHEVYGDVRCNLKEAVQLAGLTWEGRAHCGLDDARNTARLLALMMHXGFKFSITNSLVWQP

SEQ ID NO: 126897 - protein, 59 aa, Setaria italica
  Transcript Sequence Number=SeqID_60923
  Homolog annotation: Hit_ID=B6THB1; Match level="QueryCoverage=81%, HitCoverage=10%, E-value=4e-22, Identity=95%"; Hit description =Histone mRNA exonuclease 1
FTGWFVQIHLLWINLKVPFHEVYGDVRCNLKEAVQLAGLTWEGRAHCGLDDARNTARLL

SEQ ID NO: 126898 - protein, 76 aa, Setaria italica
  misc_feature (6)..(6): Xaa can be any naturally occurring amino acid
  Transcript Sequence Number=SeqID_60924
  Homolog annotation: Hit_ID=B6THB1; Match level="QueryCoverage=100%, HitCoverage=20%, E-value=3e-21, Identity=69%"; Hit description =Histone mRNA exonuclease 1
  Subcellular localization annotation: CTP_CleavageSite=59; ConfidenceScore=5.13e-01
ALMMHXGFKFSITNSLVWQPQPAPQSTTCQLSPDRSPDPVQPQHKPNEMLGSPVQVNPYAASAGKDRAMYCYCGVL

SEQ ID NO: 126899 - protein, 40 aa, Setaria italica
  Transcript Sequence Number=SeqID_60925
RLCGNRNLPHSQQPASYPLTALLDPVQPQHKPNEMLGSPV

SEQ ID NO: 126900 - protein, 34 aa, Setaria italica
  Transcript Sequence Number=SeqID_60926
GFKFSITNSLVWQPQPAPQSTTCQLSPDRSPDPV

SEQ ID NO: 126901 - protein, 85 aa, Setaria italica
  misc_feature (62)..(62): Xaa can be any naturally occurring amino acid
  Transcript Sequence Number=SeqID_60927
MSFSYVKEQTSKYIGGALPVPDTKDVNVDRLVEISGSFSLDRATATPERALHTANLCVRLLXKGSAVIRRLIMTAVLYHILPHSS

SEQ ID NO: 126902 - protein, 78 aa, Setaria italica
  misc_feature (23)..(23): Xaa can be any naturally occurring amino acid
  misc_feature (33)..(33): Xaa can be any naturally occurring amino acid
  misc_feature (57)..(57): Xaa can be any naturally occurring amino acid
  Transcript Sequence Number=SeqID_60928
  Gene Ontology: Mol. function=protein kinase activity; Biological process=protein amino acid phosphorylation
  Homolog annotation: Hit_ID=B9T4T1; Match level="QueryCoverage=92%, HitCoverage=10%, E-value=1e-21, Identity=67%"; Hit description =Ubiquinone biosynthesis protein coq-8, putative
PEASEKQKLEAKSRLLDLVNKGXVEASLVQLLXETGLLHADPHPGNLRYTPEGRVGXAMLASIIHIVNGDWSSLVYEF

SEQ ID NO: 126903 - protein, 60 aa, Setaria italica
  Transcript Sequence Number=SeqID_60929
MRKLSSLKLCSLLSTTALAVKAEMYYKAKANKYISLLAMKWAERKWHRCLSRPGVQCCRG

SEQ ID NO: 126904 - protein, 67 aa, Setaria italica
  Transcript Sequence Number=SeqID_60930
  Homolog annotation: Hit_ID=B6TKU0; Match level="QueryCoverage=95%, HitCoverage=17%, E-value=4e-21, Identity=76%"; Hit description =Growth inhibition and differentiation-related protein 88
PVLNHTGHCTEHSYHREMKENDDLLTKIDGRDLEPPKPRPKTSARTAQRLIAHGMGLKQFTNFGSDE

SEQ ID NO: 126905 - protein, 41 aa, Setaria italica
  Transcript Sequence Number=SeqID_60931
FGDHGVAIRWVNDTSALAVFRTPSAGTLILTALSNTISAWL

SEQ ID NO: 126906 - protein, 43 aa, Setaria italica
  Transcript Sequence Number=SeqID_60932
VSWRYARLSLSSSWKRERTGLLLDKPCVMRLGVQIDQEDIVIA

SEQ ID NO: 126907 - protein, 47 aa, Setaria italica
  Transcript Sequence Number=SeqID_60933
SAASAASEHGTTDAAHEPDSEEMQREVRIFCYVCCVEPRIKRWSIHD

SEQ ID NO: 126908 - protein, 112 aa, Setaria italica
  misc_feature (7)..(7): Xaa can be any naturally occurring amino acid
  misc_feature (17)..(17): Xaa can be any naturally occurring amino acid
  Transcript Sequence Number=SeqID_60934
QQWIALXGFIQDTNGQXLQKIGREYVNEFLGMSFLTNLTPTVSVLVITKLQLFILKRYELCSIFFCKVPASRSFEPTLRLCMHDMVHDLARHVAGDELSCTNGVANSTTKAG

SEQ ID NO: 126909 - protein, 74 aa, Setaria italica
  Transcript Sequence Number=SeqID_60935
  Gene Ontology: Mol. function=zinc ion binding
  Homolog annotation: Hit_ID=B6SKV4; Match level="QueryCoverage=81%, HitCoverage=8%, E-value=1e-14, Identity=66%"; Hit description =CONSTANS interacting protein 6
GAYDVAVAVHFLPGIVSAKTQKLEEEYATKLAKLGFQETEEKRRKKMEELKMLENSHYDYHKMKLRMQTEIQGL

SEQ ID NO: 126910 - protein, 82 aa, Setaria italica
  Transcript Sequence Number=SeqID_60936
ELTIGTKQKQDWLPPARSRYQDGVEQKPDPHNLVPSTGHVSPPYEESGRTAGSNCVNDDPVRQTYNLKSKQHNLFKDADRQA

SEQ ID NO: 126911 - protein, 111 aa, Setaria italica
  misc_feature (14)..(14): Xaa can be any naturally occurring amino acid
  Transcript Sequence Number=SeqID_60937
  Gene Ontology: Mol. function=binding; Cellular component=cytoplasm; Biological process=regulation of translation
  Homolog annotation: Hit_ID=Q53K35; Match level="QueryCoverage=84%, HitCoverage=3%, E-value=2e-38, Identity=86%"; Hit description=HEAT repeat, putative
  Pfam annotation: Domain name=HEAT; Domain location=4-40; Score=13.4; E_value=0.99; Accession=PF02985.14; Description=HEAT repeat
  Pfam annotation: Domain name=HEAT; Domain location=42-78; Score=21.0; E_value=0.0048; Accession=PF02985.14; Description=HEAT repeat
  Pfam module annotation: Pfam domain module=HEAT::HEAT; Domain location=4-40::42-78
RTLKEIMPVLMDTXISSLASSSSERRQVAGRSLGELVRKLGERVLPSIIPILSQGLKDPNASRRQGVCIGLSEVMGSAGKHQLLSFMDELIPYLFRYLSSYCCTSLPKRYR

SEQ ID NO: 126912 - protein, 116 aa, Setaria italica
  misc_feature (36)..(36): Xaa can be any naturally occurring amino acid
  Transcript Sequence Number=SeqID_60938
  Gene Ontology: Mol. function=binding
  Homolog annotation: Hit_ID=Q53K35; Match level="QueryCoverage=93%, HitCoverage=4%, E-value=3e-28, Identity=59%"; Hit description=HEAT repeat, putative
  Pfam annotation: Domain name=HEAT; Domain location=1-36; Score=10.7; E_value=2.4; Accession=PF02985.14; Description=HEAT repeat
  Pfam annotation: Domain name=HEAT; Domain location=44-79; Score=7.9; E_value=5.3; Accession=PF02985.14; Description=HEAT repeat
  Pfam annotation: Domain name=HEAT; Domain location=84-116; Score=4.4; E_value=14; Accession=PF02985.14; Description=HEAT repeat
  Pfam module annotation: Pfam domain module=HEAT::HEAT::HEAT; Domain location=1-36::44-79::84-116
TEISDLVQILLNMSTSPDWCTRHGALLGFSSISMHXHSKLCHLASFPSLVDLLKDSLKDDKFPVREVATRTLGRILCFQLQLEAGTLQLVQLLVLALRDDSSEVRRRSLFVVNSKS

SEQ ID NO: 126913 - protein, 116 aa, Setaria italica
  misc_feature (9)..(9): Xaa can be any naturally occurring amino acid
  misc_feature (13)..(13): Xaa can be any naturally occurring amino acid
  misc_feature (39)..(39): Xaa can be any naturally occurring amino acid
  misc_feature (67)..(67): Xaa can be any naturally occurring amino acid
  Transcript Sequence Number=SeqID_60939
  Gene Ontology: Mol. function=binding
  Homolog annotation: Hit_ID=Q53K35; Match level="QueryCoverage=100%, HitCoverage=4%, E-value=2e-28, Identity=58%"; Hit description=HEAT repeat, putative
MEETEISDXVQIXLNMSTSPDWCTRHGALLGFSSISMHXSIKLCHLASFPSLVDLLKDSLKDDKLPXRTLGRILCFQLQLEAGTLQLVQLLVLALRDDSSEVRRRSLSCIKAAAKI

SEQ ID NO: 126914 - protein, 53 aa, Setaria italica
  Transcript Sequence Number=SeqID_60940
FQITFILNYKMQCTVCKEGLTLSCLAWRVEILLFSSRILALPCNCFHCFCSCN

SEQ ID NO: 126915 - protein, 52 aa, Setaria italica
  Transcript Sequence Number=SeqID_60941
LLQVKRTNIDHSDDLMTQKRSWSEGESAIIMKFSNHSDMRTGGDVLDTKEAI

SEQ ID NO: 126916 - protein, 81 aa, Setaria italica
  Transcript Sequence Number=SeqID_60942
  Subcellular localization annotation: CTP_CleavageSite=30; ConfidenceScore=5.39e-01
VLGRTDKGKAVSPASNRHTPSRVSPRTLATAATPAQLGRRHIRKQALCNPRYLHLHILQLRSAIESRTRLVSFSSVMALRG

SEQ ID NO: 126917 - protein, 75 aa, Setaria italica
  misc_feature (23)..(23): Xaa can be any naturally occurring amino acid
  Transcript Sequence Number=SeqID_60943
  Gene Ontology: Biological process=protein modification process
  Homolog annotation: Hit_ID=Q5N715; Match level="QueryCoverage=100%, HitCoverage=31%, E-value=3e-32, Identity=92%"; Hit description =Ubiquitin-like
LKVMLSLVTGLWPREQRLLYRGXKERDDCEHLHMVGVQDKDKVLLLEDPAVKERKLRSTTLAQLMGVPCHSFIQV

SEQ ID NO: 126918 - protein, 75 aa, Setaria italica
  Transcript Sequence Number=SeqID_60944
PTDPQYKRSAPFMRKQTGKPGAHASKAEGSSLGGALPPDDAAAKNNDDQKPDGASKEKLQILSAVKVLLQKGNLR

SEQ ID NO: 126919 - protein, 82 aa, Setaria italica
  Transcript Sequence Number=SeqID_60945
  Gene Ontology: Mol. function=DNA binding; Biological process =regulation of transcription, DNA-dependent
MILMFPHSCDSKTIVSQNIYRKYAAPGGFRCLEKWTKAIVNSPATLDGTVPIEPENTRKTGSILVDGYGSIGLNAGNEYFCS

SEQ ID NO: 126920 - protein, 76 aa, Setaria italica
  Transcript Sequence Number=SeqID_60946
NPAGPEGTCAFVESMLTVPVEKPLSPDGISKCGSSRTEIDHNVNGKVELVGSSVCSQSSNVAMHANHVVVHEPEHY

SEQ ID NO: 126921 - protein, 52 aa, Setaria italica
  Transcript Sequence Number=SeqID_60947
  Gene Ontology: Cellular component=integral to membrane
  Homolog annotation: Hit_ID=Q59IV5; Match level="QueryCoverage=88%, HitCoverage=15%, E-value=1e-15, Identity=89%"; Hit description =Plastidic phosphate translocator-like protein2
QGYLGNAKGAVAVVVSIMIFRNPVSITGMLGYTLTVIGVILYSESKKRSNKP

SEQ ID NO: 126922 - protein, 71 aa, Setaria italica
  misc_feature (46)..(46): Xaa can be any naturally occurring amino acid
  Transcript Sequence Number=SeqID_60948
  Gene Ontology: Cellular component=integral to membrane
  Homolog annotation: Hit_ID=Q59IV5; Match level="QueryCoverage=85%, HitCoverage=19%, E-value=1e-25, Identity=93%"; Hit description =Plastidic phosphate translocator-like protein2
EDNRQKQNFQGEPSFHLFGFIMCIGATAARALKTVLQGILLSSEGXKLNSMNLLLYMAPIAVILLLPATLF

SEQ ID NO: 126923 - protein, 69 aa, Setaria italica
  misc_feature (56)..(56): Xaa can be any naturally occurring amino acid
  Transcript Sequence Number=SeqID_60949
  Gene Ontology: Cellular component=integral to membrane
  Homolog annotation: Hit_ID=Q59IV5; Match level="QueryCoverage=69%, HitCoverage=15%, E-value=3e-14, Identity=72%"; Hit description =Plastidic phosphate translocator-like protein2
  Subcellular localization annotation: CTP_CleavageSite=39; ConfidenceScore=5.03e-01
MLEEYQALTSPTVKKRPVPAAAIAWLRVVPMQLVRSRVQLAKIAALSLVFCGSVVXGNVSLRYLPVSFN

SEQ ID NO: 126924 - protein, 70 aa, Setaria italica
  Transcript Sequence Number=SeqID_60950
  Gene Ontology: Cellular component=integral to membrane
  Homolog annotation: Hit_ID=Q59IV5; Match level="QueryCoverage=78%, HitCoverage=17%, E-value=2e-20, Identity=81%"; Hit description =Plastidic phosphate translocator-like protein2
  Subcellular localization annotation: CTP_CleavageSite=38; ConfidenceScore=5.53e-01
PIPCVPSYPLLRVSAALSLVFCGSVVSGNVSLRYLPVSFNQAVGATTPFFTAVFAYIMTVKRESWVTYLT

SEQ ID NO: 126925 - protein, 68 aa, Setaria italica
  Transcript Sequence Number=SeqID_60951
  Subcellular localization annotation: CTP_CleavageSite=61; ConfidenceScore=5.32e-01
FTEFRSSEPPNNFHQSAPNPEHTRCFQTLVGARRGRRAAPRTAKAAPSPDNRRLGKITRVRCTGDRRT

SEQ ID NO: 126926 - protein, 55 aa, Setaria italica
  Transcript Sequence Number=SeqID_60952
  Subcellular localization annotation: CTP_CleavageSite=47; ConfidenceScore=5.21e-01
PQSPQTIFTSQRRTLVGARRGRRAAPRTAKAAPSPDNRRLGKITRVRCTGDRRTV

SEQ ID NO: 126927 - protein, 60 aa, Setaria italica
  Transcript Sequence Number=SeqID_60953
ELIAPQSKRITLIISFKEMIRASKEEYEQLPPYMKSLASWEELQEGISKLNSYFGSDEAK

SEQ ID NO: 126928 - protein, 38 aa, Setaria italica
  Transcript Sequence Number=SeqID_60954
SHLSAIAEIMEELISRGDIQQQWEDKMKKEQQRGFEVD

SEQ ID NO: 126929 - protein, 77 aa, Setaria italica
  Transcript Sequence Number=SeqID_60955
FSLRSWDIIGNTRRLQPHKPVTKAQAAAALTSGRMEEAIRDELNRLEAENEAHLSAIAENMEELISRGDIQQQWRTR

SEQ ID NO: 126930 - protein, 54 aa, Setaria italica
  Transcript Sequence Number=SeqID_60956
RLAHDFCTRREFARWFVKLCSKFERKRMQRIVPDKLTSGSVQSAFDDVNIDDPD

SEQ ID NO: 126931 - protein, 47 aa, Setaria italica
  Transcript Sequence Number=SeqID_60957
FTFSYSALLSRLLLTKLNGGIILIFRFSATHCSPHCITFKRNCQQSQ

SEQ ID NO: 126932 - protein, 62 aa, Setaria italica
  Transcript Sequence Number=SeqID_60958
SKFVVIISTTSPFGILLLIWFPIFGYVLQVIRNEALLLLTYLTRDAEEIQKIVVLRVCLRRY

SEQ ID NO: 126933 - protein, 37 aa, Setaria italica
  Transcript Sequence Number=SeqID_60959
FALMLGHDVVMANVQWIMCRQRHHFILSYLWRMGLNC

SEQ ID NO: 126934 - protein, 85 aa, Setaria italica
  misc_feature (11)..(11): Xaa can be any naturally occurring amino acid
  Transcript Sequence Number=SeqID_60960
  Gene Ontology: Cellular component=integral to membrane
  Homolog annotation: Hit_ID=Q2RB03; Match level="QueryCoverage=100%, HitCoverage=35%, E-value=1e-35, Identity=76%"; Hit description =Mpv17/PMP22 family protein, expressed
  Pfam annotation: Domain name=Mpv17_PMP22; Domain location=14-80; Score=97.3; E_value=5.5e-26; Accession=PF04117.4; Description=Mpv17 PMP22 family
IFAPIFIGIFXSLLVTLEGKPSLVVPQLKQEWLSSVLANWQLWIPFQFLNFYFVPQKFQVLAANFVALAWNVILSFKAHKEVIAK

SEQ ID NO: 126935 - protein, 69 aa, Setaria italica
  misc_feature (1)..(15): Xaa can be any naturally occurring amino acid
  Transcript Sequence Number=SeqID_60961
XXXXXXXXXXXXXXXGSPSQVHNTPTRRILQDIVYIETCHHHDTIFSFNFDQNAALRHHNLQSNIFLHQ

SEQ ID NO: 126936 - protein, 32 aa, Setaria italica
  Transcript Sequence Number=SeqID_60962
MASPNFSKRTGKDEDEPAWAPLRDTYMLGSKL

SEQ ID NO: 126937 - protein, 79 aa, Setaria italica
  Transcript Sequence Number=SeqID_60963
AEGRRRRSGRGAAEARRRRERRIGHGGGSGGGGEIQTGGKGVAARVREWEETMRQVGFINVCSILTDARHRTVTATVPY

SEQ ID NO: 126938 - protein, 92 aa, Setaria italica
  misc_feature (51)..(51): Xaa can be any naturally occurring amino acid
  Transcript Sequence Number=SeqID_60964
  Gene Ontology: Mol. function=methyltransferase activity; Biological process=metabolic process
  Homolog annotation: Hit_ID=B6TUL7; Match level="QueryCoverage=100%, HitCoverage=27%, E-value=1e-40, Identity=88%"; Hit description=CMV 1a interacting protein 1
  Pfam annotation: Domain name=Methyltransf_11; Domain location=2-73; Score=30.2; E_value=8.6e-06; Accession=PF08241.4; Description =Methyltransferase domain
GLDLSPYFLAVAAQREEKLSRQNPIRWVHANGEATGLPSDSFDLVSLAYVXRAITGLVKEAFRVLRPGGTIALTDNSPKSKVLQELSPVLFT

SEQ ID NO: 126939 - protein, 59 aa, Setaria italica
  Transcript Sequence Number=SeqID_60965
  Homolog annotation: Hit_ID=B6TUL7; Match level="QueryCoverage=71%, HitCoverage=12%, E-value=3e-11, Identity=75%"; Hit description=CMV 1a interacting protein 1
MPHLRKLQCHECPARAITGLVKEAFRVLRPGGTIALTDNSVRIYFVSPLLHMSAYFSKI

SEQ ID NO: 126940 - protein, 91 aa, Setaria italica
  misc_feature (17)..(17): Xaa can be any naturally occurring amino acid
  misc_feature (66)..(66): Xaa can be any naturally occurring amino acid
  Transcript Sequence Number=SeqID_60966
  Gene Ontology: Mol. function=hydrolase activity, hydrolyzing O -glycosyl compounds; Cellular component=cell wall; Biological process= carbohydrate metabolic process
  Homolog annotation: Hit_ID=B6T9H5; Match level="QueryCoverage=100%, HitCoverage=29%, E-value=3e-40, Identity=87%"; Hit description =Xyloglucan endotransglucosylase/hydrolase protein 32
  Pfam annotation: Domain name=Glyco_hydro_16; Domain location=3-91; Score=-56.0; E_value=0.0047; Accession=PF00722.13; Description =Glycosyl hydrolases family 16
AGVNTAFYVRHRLLHFXPGKHDEIDMELLGTVPGEPYTLQTNVYVRGTGDGARLVGREMRFHLWFXDPAADFHHYAILWNPDEIVFLVDDV

SEQ ID NO: 126941 - protein, 51 aa, Setaria italica
  Transcript Sequence Number=SeqID_60967
PRLANWEAITSSSSIREFDRHATCVVAKYEVFFLMVESALCGYQQPAKCSY

SEQ ID NO: 126942 - protein, 98 aa, Setaria italica
  misc_feature (74)..(74): Xaa can be any naturally occurring amino acid
  Transcript Sequence Number=SeqID_60968
  Gene Ontology: Mol. function=hydrolase activity
  Homolog annotation: Hit_ID=B6U4K5; Match level="QueryCoverage=84%, HitCoverage=14%, E-value=2e-34, Identity=81%"; Hit description =Embryogenesis-associated protein EMB8
QTLREITRLGRTKQDLISRKLVQRCYDRALAIGLKGYAKLHQPVLARLANWEAITSSSSIREFDRHATCVVAKXETVDTFYRKCSSANYIGNVSVPLL

SEQ ID NO: 126943 - protein, 78 aa, Setaria italica
  misc_feature (10)..(10): Xaa can be any naturally occurring amino acid
  misc_feature (30)..(30): Xaa can be any naturally occurring amino acid
  Transcript Sequence Number=SeqID_60969
  Gene Ontology: Mol. function=hydrolase activity
  Homolog annotation: Hit_ID=B6U4K5; Match level="QueryCoverage=98%, HitCoverage=12%, E-value=2e-27, Identity=77%"; Hit description =Embryogenesis-associated protein EMB8
ISKDDSTPLXLVIPGLTSDSSAAMQGFWCXYVKHLVFSMASKGWNVVVSNHRGLGGISITSDCFYNAGWTEDMREVVN

SEQ ID NO: 126944 - protein, 59 aa, Setaria italica
  Transcript Sequence Number=SeqID_60970
  Gene Ontology: Mol. function=hydrolase activity
  Homolog annotation: Hit_ID=B6U4K5; Match level="QueryCoverage=94%, HitCoverage=9%, E-value=7e-12, Identity=66%"; Hit description =Embryogenesis-associated protein EMB8
MQAQEHGLHSSLESLIDKSPYVNFMEDGMVAAVTNDGPDNDDSLHNQIVDEIKLSDDMV

SEQ ID NO: 126945 - protein, 45 aa, Setaria italica
  Transcript Sequence Number=SeqID_60971
DPICQAILQNLDEPLICTSVKYLSEDGWILDPVIIADLYEPLVSS

SEQ ID NO: 126946 - protein, 75 aa, Setaria italica
  Transcript Sequence Number=SeqID_60972
ISFHCLLDALHLLTLQLDLGITNRAPRPRSTTSEIYIRISILHLRTQSTCYALIEIMFWRRRNQGAARAGTSDLE

SEQ ID NO: 126947 - protein, 76 aa, Setaria italica
  Transcript Sequence Number=SeqID_60973
  Gene Ontology: Mol. function=transition metal ion binding
  Homolog annotation: Hit_ID=B6T667; Match level="QueryCoverage=76%, HitCoverage=49%, E-value=6e-15, Identity=63%"; Hit description =Cytochrome b5
MEILIYISLVVLLGLGALFVIPRSNCKGKNAAHLAGSGKISRSYTKKEVSTHNTRKDCWIIIKDKVYNVTAYVEEH

SEQ ID NO: 126948 - protein, 57 aa, Setaria italica
  Transcript Sequence Number=SeqID_60974
RGRSCSLQGATGAMSLLSWNYRGTGGSLCSPKMQHLSRLIVSTKAQVIFISETKGKN

SEQ ID NO: 126949 - protein, 46 aa, Setaria italica
  Transcript Sequence Number=SeqID_60975
  Homolog annotation: Hit_ID=B6SZ84; Match level="QueryCoverage=84%, HitCoverage=10%, E-value=2e-11, Identity=82%"; Hit description=Sec12- like protein 1
LSLWYGKYLALGSHDGDFCAVDVKKMEVSHWSKKAHLGSPVTSIGV

SEQ ID NO: 126950 - protein, 58 aa, Setaria italica
  Transcript Sequence Number=SeqID_60976
WYFICNADSSSVHQLVKAPATAVAKPVAAGKVPAAQAEAAGGPDGGIDDDLQARLDNL

SEQ ID NO: 126951 - protein, 103 aa, Setaria italica
  Transcript Sequence Number=SeqID_60977
  Gene Ontology: Mol. function=protoporphyrinogen oxidase activity; Cellular component=chloroplast; Biological process=porphyrin biosynthetic process
  Homolog annotation: Hit_ID=Q9M629; Match level="QueryCoverage=93%, HitCoverage=18%, E-value=3e-25, Identity=66%"; Hit description =Protoporphyrinogen IX oxidase
PITSSLGSKVKLSWKLTSITKSDGMGYVLVYETPEGVVSVQAKSVIMTIPSYVASDILRPLSVSIKLSSFMFPETGVLCVLIPLNVLNWEQPVSGRICTSLKN

SEQ ID NO: 126952 - protein, 50 aa, Setaria italica; identical to SEQ ID NO: 99844
  Transcript Sequence Number=SeqID_60978

SEQ ID NO: 126953 - protein, 101 aa, Setaria italica
  misc_feature (22)..(22): Xaa can be any naturally occurring amino acid
  Transcript Sequence Number=SeqID_60979
  Gene Ontology: Mol. function=protoporphyrinogen oxidase activity; Cellular component=chloroplast; Biological process=porphyrin biosynthetic process
  Homolog annotation: Hit_ID=Q9AR38; Match level="QueryCoverage=81%, HitCoverage=15%, E-value=2e-37, Identity=95%"; Hit description =Protoporphyrinogen oxidase, chloroplastic
LQQQLVDNRKECLIDGELQGFXGQLHPRSQGVETLGTIYSSSLFPNRAPAGRVLLLNYIGGATNTGIVSKSASELVEAVDRDLRKMLINPSVSWYPFSSLG

SEQ ID NO: 126954 - protein, 40 aa, Setaria italica
  Transcript Sequence Number=SeqID_60980
RDPRLPTPKGQTVASFRKGLAMLPNAITSRFVLIVLYIYL

SEQ ID NO: 126955 - protein, 136 aa, Setaria italica
  Transcript Sequence Number=SeqID_60981
  Gene Ontology: Mol. function=isoleucine-tRNA ligase activity; Cellular component=cytoplasm; Biological process=tRNA aminoacylation for protein translation
  Homolog annotation: Hit_ID=B9SUT5; Match level="QueryCoverage=75%, HitCoverage=8%, E-value=6e-41, Identity=75%"; Hit description =Isoleucyl tRNA synthetase, putative
  Pfam annotation: Domain name=Anticodon_1; Domain location=1-108; Score=16.9; E_value=5e-06; Accession=PF08264.5; Description =Anticodon-binding domain
IAKRLKGRTGEGDCRISLSTLYHALVTTCVAMAPFTPFFTEVLYQNLRKVSDKSEESIHFCKFPSTTGERDERVEQSVSRMMTIIDLARNIRERHNKALKTPLKYVQAPLKSCIYIFSIMVHIILEDYSYFEINEI

SEQ ID NO: 126956 - protein, 128 aa, Setaria italica
  misc_feature (7)..(7): Xaa can be any naturally occurring amino acid
  misc_feature (100)..(100): Xaa can be any naturally occurring amino acid
  Transcript Sequence Number=SeqID_60982
  Gene Ontology: Mol. function=isoleucine-tRNA ligase activity; Cellular component=cytoplasm; Biological process=tRNA aminoacylation for protein translation
  Homolog annotation: Hit_ID=B9SUT5; Match level="QueryCoverage=85%, HitCoverage=9%, E-value=7e-53, Identity=87%"; Hit description =Isoleucyl tRNA synthetase, putative
PSKRGPXFGVLKRVDDVFDCWFESGSMPYAYIHYPFENKELFEKNFPGNFVAEGLDQTRGWFYTLMVLSTALFGKPAFKNLICNGLVLAEDGKKMSKSKXNYPSPTDLICIVVIGSRYCSFCSFTLLF

SEQ ID NO: 126957 - protein, 137 aa, Setaria italica
  misc_feature (14)..(14): Xaa can be any naturally occurring amino acid
  misc_feature (103)..(103): Xaa can be any naturally occurring amino acid
  Transcript Sequence Number=SeqID_60983
  Gene Ontology: Mol. function=aminoacyl-tRNA ligase activity; Cellular component=cytoplasm; Biological process=tRNA aminoacylation for protein translation
  Homolog annotation: Hit_ID=Q67WM1; Match level="QueryCoverage=83%, HitCoverage=48%, E-value=3e-46, Identity=80%"; Hit description =Isoleucyl-tRNA synthetase-like
KMTQEQILAFEGKXGRVTFFGHCLKLDDIKVVRQFKRPENVSEKEIDAAGDGDVLVILDLRADQSLFEAGVAREVVNRIQKLRKTAQLEPSDPVDVYYKSSGXNKNTLEQILKSQVKLFVLKDPCFRNTFLRKTGLF

SEQ ID NO: 126958 - protein, 96 aa, Setaria italica
  misc_feature (57)..(57): Xaa can be any naturally occurring amino acid
  misc_feature (65)..(65): Xaa can be any naturally occurring amino acid
  Transcript Sequence Number=SeqID_60984
  Gene Ontology: Mol. function=aminoacyl-tRNA ligase activity; Cellular component=cytoplasm; Biological process=tRNA aminoacylation for protein translation
  Homolog annotation: Hit_ID=Q67WM1; Match level="QueryCoverage=100%, HitCoverage=41%, E-value=2e-29, Identity=69%"; Hit description =Isoleucyl-tRNA synthetase-like
VVNRIQKLRKTAQLEPSDPVDVYYKSSGNDKNTLEQILKSQDQYIRDALGSPLVPKXMAPTDVVXLGEESHDVHDMSFVICIARSCPVLDQYLAHA

SEQ ID NO: 126959 - protein, 77 aa, Setaria italica
  Transcript Sequence Number=SeqID_60985
  Gene Ontology: Mol. function=isoleucine-tRNA ligase activity; Cellular component=cytoplasm; Biological process=tRNA aminoacylation for protein translation
  Homolog annotation: Hit_ID=B9SUT5; Match level="QueryCoverage=85%, HitCoverage=5%, E-value=3e-24, Identity=80%"; Hit description =Isoleucyl tRNA synthetase, putative
WILFTTSRATQASLLKSSNVLDHWINSATESLVSFVRQEMDAYRLYTVVPYLVKYIDNLTNIYVRLNRKRLKGRTGE

SEQ ID NO: 126960 - protein, 83 aa, Setaria italica
  Transcript Sequence Number=SeqID_60986
  Gene Ontology: Mol. function=aminoacyl-tRNA ligase activity; Cellular component=cytoplasm; Biological process=tRNA aminoacylation for protein translation
  Homolog annotation: Hit_ID=Q67WM1; Match level="QueryCoverage=100%, HitCoverage=36%, E-value=8e-30, Identity=78%"; Hit description =Isoleucyl-tRNA synthetase-like
GDGDVLVILDLRADQSLFEAGVAREVVNRIQKLRKTAQLEPSDPVDVYYKSSGNDKNTLEQILKSQYIRDALGSPLVPKEMAP

SEQ ID NO: 126961 - protein, 49 aa, Setaria italica
  Transcript Sequence Number=SeqID_60987
LKTKRDQSTQNWDAAIILNSSVPFMHLTEVMFSHSSLVKDEWEMYVCML

SEQ ID NO: 126962 - protein, 50 aa, Setaria italica
  misc_feature (41)..(41): Xaa can be any naturally occurring amino acid
  Transcript Sequence Number=SeqID_60988
  Gene Ontology: Mol. function=aminoacyl-tRNA ligase activity
  Homolog annotation: Hit_ID=Q67WM1; Match level="QueryCoverage=100%, HitCoverage=20%, E-value=2e-09, Identity=68%"; Hit description =Isoleucyl-tRNA synthetase-like
GVAREVVNRIQKLRKTAQLEPSDPVDVYYKSSGNEQKITTXEQILKSQDQ

SEQ ID NO: 126963 - protein, 68 aa, Setaria italica
  Transcript Sequence Number=SeqID_60989
  Homolog annotation: Hit_ID=B9FFW1; Match level="QueryCoverage=100%, HitCoverage=5%, E-value=2e-11, Identity=52%"; Hit description=DNA -directed RNA polymerase
ATCPHRGLDTLSPDDIKQMLEDKLTQHKTSSDGGCSEEFKECLKKFLEERIQLLKCTRKALHLDEKHC

SEQ ID NO: 126964 - protein, 52 aa, Setaria italica
  Transcript Sequence Number=SeqID_60990
  Gene Ontology: Mol. function=DNA-directed RNA polymerase activity
  Homolog annotation: Hit_ID=B9FFW1; Match level="QueryCoverage=71%, HitCoverage=2%, E-value=9e-13, Identity=86%"; Hit description=DNA -directed RNA polymerase
SSLLVLVLPTTTEGLIGNGNKDGIYSVLLRDYNSHAAASCMNRLAKFSARFI

SEQ ID NO: 126965 - protein, 132 aa, Setaria italica
  misc_feature (38)..(38): Xaa can be any naturally occurring amino acid
  Transcript Sequence Number=SeqID_60991
  Gene Ontology: Mol. function=nucleoside-triphosphatase activity; Biological process=defense response
  Homolog annotation: Hit_ID=Q53KQ7; Match level="QueryCoverage=92%, HitCoverage=29%, E-value=2e-21, Identity=45%"; Hit description=NB -ARC domain containing protein, expressed
AEVVWRDNIMNEIIRNITQDKHCGEVLTVIPIVGPGGXIGKTTLAQHVYHSGEVQEHFDVKAWKCVSLNFDANKLIEEIEKDIPGIDGESKGTAGQLIQQRLKKKRFLLILDDIWDCSNEDEWEQLLGCPIS

SEQ ID NO: 126966 - protein, 79 aa, Setaria italica
  Transcript Sequence Number=SeqID_60992
  Gene Ontology: Cellular component=integral to membrane; Biological process=Notch signaling pathway
  Homolog annotation: Hit_ID=B9SA23; Match level="QueryCoverage=65%, HitCoverage=10%, E-value=8e-16, Identity=71%"; Hit description=GDP -mannose transporter, putative
  Pfam annotation: Domain name=PEN-2; Domain location=2-52; Score=26.6; E_value=8.3e-07; Accession=PF10251.1; Description=Presenilin enhancer- 2 subunit of gamma secre
TFCADVVRSAIGFTIFSVVLITWATTFIVGGERLFGPAWNDLVMYNVADKLGLSGFMGIASAGSDHLTGCTPLLFPWRR

SEQ ID NO: 126967 - protein, 87 aa, Setaria italica
  Transcript Sequence Number=SeqID_60993
  Gene Ontology: Mol. function=binding
  Homolog annotation: Hit_ID=B9RQ36; Match level="QueryCoverage=85%, HitCoverage=12%, E-value=6e-17, Identity=54%"; Hit description=Fk506 binding protein, putative
NSTTGTNLRPRNDKQQLMSNPDLLKMASESMKNMKAEDLRRAAQQMNQARPEDMRDMTEKLANTTPEEFAAMKAQADAQMSYAISGA

SEQ ID NO: 126968 - protein, 42 aa, Setaria italica
  Transcript Sequence Number=SeqID_60994
QELKIITVKVPLHCPDCAVRVKEILLEHKSNLYLSDSSSISI

SEQ ID NO: 126969 - protein, 111 aa, Setaria italica
  Transcript Sequence Number=SeqID_60995
  Gene Ontology: Mol. function=triacylglycerol lipase activity; Biological process=lipid metabolic process
  Homolog annotation: Hit_ID=B4FGY5; Match level="QueryCoverage=87%, HitCoverage=27%, E-value=8e-46, Identity=88%"; Hit description=Lipase
IPPSSFVVYTEPNTKPDIRNSGQSFVFNYTLAKAIVEYASAVYMTDLTALYTWTCSRCNDLTRGFEVTCIIVDVQNCLQAFVGVDPNLNAIIVAIRGTQENSIQNWIKDLI

SEQ ID NO: 126970 - protein, 49 aa, Setaria italica
  Transcript Sequence Number=SeqID_60996
  Gene Ontology: Mol. function=triacylglycerol lipase activity; Biological process=lipid metabolic process
  Homolog annotation: Hit_ID=B4FGY5; Match level="QueryCoverage=97%, HitCoverage=13%, E-value=5e-18, Identity=85%"; Hit description=Lipase
PDIRNSGQSFVFNYTLAKAIVEYASAVYMTDLTALYTWTCSRCNDLTRV

SEQ ID NO: 126971 - protein, 31 aa, Setaria italica
  Transcript Sequence Number=SeqID_60997
  Gene Ontology: Mol. function=microtubule motor activity; Cellular component=nuclear chromosome, telomeric region; Biological process =telomere maintenance
  Homolog annotation: Hit_ID=Q7XJW0; Match level="QueryCoverage=96%, HitCoverage=2%, E-value=8e-13, Identity=96%"; Hit description =OSJNBa0016O02.10 protein
RIWCCLKSYRLDKNDPWGSRRYRVFGTEIRD

SEQ ID NO: 126972 - protein, 94 aa, Setaria italica
  Transcript Sequence Number=SeqID_60998
  Gene Ontology: Cellular component=plasma membrane
  Homolog annotation: Hit_ID=Q9SRX5; Match level="QueryCoverage=81%, HitCoverage=41%, E-value=7e-12, Identity=48%"; Hit description =F22D16.19 protein
  Pfam annotation: Domain name=DUF538; Domain location=18-94; Score =21.8; E_value=1.3e-07; Accession=PF04398.4; Description=Protein of unknown function, DUF538
DFPSRDVVVDGNVRKSGFDFPPGILPKGVVAYTLNNATGAFTATLDASASGAGSSVCEFSIQGSYSLRYQTKITGKIKPDHLTDLQGVSVKVLF

SEQ ID NO: 126973 - protein, 61 aa, Setaria italica
  Transcript Sequence Number=SeqID_60999
  Gene Ontology: Mol. function=transferase activity, transferring nitrogenous groups; Biological process=biosynthetic process
  Homolog annotation: Hit_ID=B6TFA9; Match level="QueryCoverage=72%, HitCoverage=9%, E-value=7e-14, Identity=79%"; Hit description=8 -amino-7-oxononanoate synthase
ISIVVGSEEAALRAGRHLLRSGFHVTPIRPPTVPPNSCRFQFSFVIVIFLFHATQGHCQPT

SEQ ID NO: 126974 - protein, 34 aa, Setaria italica
  Transcript Sequence Number=SeqID_61000
ENVTIPCKIHSILSSLGHNLGCSKANTSYKLETG

SEQ ID NO: 126975 - protein, 70 aa, Setaria italica
  Transcript Sequence Number=SeqID_61001
  Subcellular localization annotation: CTP_CleavageSite=63; ConfidenceScore=5.53e-01
AIISRSWTCCSTGRRRRGPSPGPTSQTVQFLSPTPFSAPSSPWAKPFARNAQYFQLAHSSPVSPSTPTGP

SEQ ID NO: 126976 - protein, 64 aa, Setaria italica
  Transcript Sequence Number=SeqID_61002
  Gene Ontology: Mol. function=DNA binding; Cellular component=nucleus; Biological process=regulation of transcription
  Homolog annotation: Hit_ID=Q6F2H1; Match level="QueryCoverage=98%, HitCoverage=12%, E-value=4e-19, Identity=76%"; Hit description=Myb -like DNA-binding domain containing protein
  Subcellular localization annotation: CTP_CleavageSite=58; ConfidenceScore=5.57e-01
GYTSSRPAPLDLARQLAATSQTVQFLSPTPFSAPSSPWAKPFARNAQYFQLAHSSPVSPSTPTG

SEQ ID NO: 126977 - protein, 68 aa, Setaria italica
  Transcript Sequence Number=SeqID_61003
  Gene Ontology: Mol. function=transcription regulator activity; Cellular component=nucleus; Biological process=regulation of transcription
  Homolog annotation: Hit_ID=B9RXX2; Match level="QueryCoverage=67%, HitCoverage=9%, E-value=2e-18, Identity=95%"; Hit description =Transcription factor, putative
  Pfam annotation: Domain name=HLH; Domain location=25-63; Score=6.9; E_ value=0.032; Accession=PF00010.18; Description=Helix-loop-helix DNA -binding domain
MSLESGLLRKLKNSFLVLAFALQVRKEKLGDRITALQQLVSPFGKTDTASVLHEAIEYIKFLHDQVSS

SEQ ID NO: 126978 - protein, 41 aa, Setaria italica
  Transcript Sequence Number=SeqID_61004
VIPSEYTEMVLLQTNLDKVDATQKVKQKLKGQKGPDEIRIP

SEQ ID NO: 126979 - protein, 67 aa, Setaria italica
  Transcript Sequence Number=SeqID_61005
LLYMPMKQGLNDLLYDMLHDRSQVQQLPKFHKPPACCLSQRYRSRASNPPPISSSLDNNNYYQRITK

SEQ ID NO: 126980 - protein, 41 aa, Setaria italica
  Transcript Sequence Number=SeqID_61006
LSSDVRSLRNYSCFQNTAWRNMSLLWRPVVQMLKNRELLCP

SEQ ID NO: 126981 - protein, 87 aa, Setaria italica
  Transcript Sequence Number=SeqID_61007
TQFSPILSTVDEDTTSTSTPAAPQAPPVAPPVWANHSSPCERIKLHHAVKERRPIGIRRWPNRAAQVGRLGLGAVTPSDSRGCAPFI

SEQ ID NO: 126982 - protein, 88 aa, Setaria italica
  Transcript Sequence Number=SeqID_61008
LSKVVVKNVNIIFWCNLDIVPTASLEAVCWVGPEKQGSVHYWSMLQQILKLKSPFSSDFALCQIHLSLSLLPHHHLSPSTMAAAAAAP

SEQ ID NO: 126983 - protein, 76 aa, Setaria italica
  Transcript Sequence Number=SeqID_61009
  Gene Ontology: Mol. function=methyltransferase activity; Cellular component=nucleolus; Biological process=positive regulation of cell proliferation
  Homolog annotation: Hit_ID=B9S9W8; Match level="QueryCoverage=52%, HitCoverage=6%, E-value=3e-14, Identity=87%"; Hit description =Proliferating-cell nucleolar antigen p120, putative
PKSTSGIKFLGSIRSKLLFVACLLGLLLVHFFPNSKTGGYIVYSTCSIMIPENEAVIDYALKKRNVKLVPCGLVCS

SEQ ID NO: 126984 - protein, 58 aa, Setaria italica
  Transcript Sequence Number=SeqID_61010
  Gene Ontology: Cellular component=integral to membrane
VVVVIFGFVAALVTWNICWGTKGVTGFVSHYPDADLRTAKDGEYVKVTGVCKVLITLF

SEQ ID NO: 126985 - protein, 112 aa, Setaria italica
  Transcript Sequence Number=SeqID_61011
  Gene Ontology: Mol. function=ubiquitin thiolesterase activity; Cellular component=integral to membrane; Biological process =ubiquitin-dependent protein catabolic process
  Homolog annotation: Hit_ID=Q01IJ9; Match level="QueryCoverage=66%, HitCoverage=21%, E-value=3e-10, Identity=44%"; Hit description =H0501D11.5 protein
GFVSHYPDADLRTAKDGEYVKVTGVVTCGNLPLESSFQRVPRCVYTSTCLYEYRGWDSKAANTTHRRFTWGLRSMERHAVDFYISDFQSGLRALVKTGFGARVTPYVDRNTS

SEQ ID NO: 126986 - protein, 64 aa, Setaria italica
  Transcript Sequence Number=SeqID_61012
WMIPVTSMAQPKRKRKLHIIYYTTKLQVTDHPHIIYYTTKLQVTDHPLILLYLLSPYNHTLHLH

SEQ ID NO: 126987 - protein, 44 aa, Setaria italica
  Transcript Sequence Number=SeqID_61013
HTSGPGHRGWLGAMHLAHLAAGGDGFSRELGSGDSLVRRKREKK

SEQ ID NO: 126988 - protein, 107 aa, Setaria italica
  Transcript Sequence Number=SeqID_61014
  Gene Ontology: Mol. function=3'-5' exonuclease activity; Cellular component=intracellular; Biological process=nucleobase, nucleoside, nucleotide and nucleic acid metabolic process
  Homolog annotation: Hit_ID=Q8LMQ9; Match level="QueryCoverage=68%, HitCoverage=13%, E-value=3e-25, Identity=72%"; Hit description =Putative nucleolar protein
  Pfam annotation: Domain name=HRDC; Domain location=25-94; Score=65.1; E_value=2.5e-16; Accession=PF00570.15; Description=HRDC domain
MYVRLYYMRFLLSKCKYKEQPLFILLPLSQALHGWRDRLARQEDESTGYVLPNKALIEIAKQMPTDTGHLKRIVKSKYPFVERSLDEIAYTVWNALEYSYAFEGISL

SEQ ID NO: 126989 - protein, 84 aa, Setaria italica
  Transcript Sequence Number=SeqID_61015
LGLKHSAAIGPTESFYPNTGMHSDNVWIQSTQMNEAMQLSNATYYPQLPGYSTEVVGNHYEPEGMQMSSYLSGFEPTFQSISQS

SEQ ID NO: 126990 - protein, 57 aa, Setaria italica
  Transcript Sequence Number=SeqID_61016
TISSLVLFGPTESFYPNTGMHSDNVWIQSTQMNEAMQLSNATYYPQLPGYSTEVVGN

SEQ ID NO: 126991 - protein, 111 aa, Setaria italica
  misc_feature (12)..(12): Xaa can be any naturally occurring amino acid
  misc_feature (71)..(71): Xaa can be any naturally occurring amino acid
  Transcript Sequence Number=SeqID_61017
  Gene Ontology: Mol. function=3'-5' exonuclease activity; Cellular component=intracellular; Biological process=nucleobase, nucleoside, nucleotide and nucleic acid metabolic process
  Homolog annotation: Hit_ID=Q8LMQ9; Match level="QueryCoverage=81%, HitCoverage=17%, E-value=8e-39, Identity=87%"; Hit description =Putative nucleolar protein
RLLKPADLEDTXFTLVEDHKGLMELAKKLKSVTEFAVDLEHNQYRSFQGLTCLMQISTRTEDFIVDTLKLXRIYIGLYLQEPFKDPTKRKVMHGVGFVVLLIVGLPNGNLN

SEQ ID NO: 126992 - protein, 79 aa, Setaria italica
  Transcript Sequence Number=SeqID_61018
PSSTANVSVASGSGAGFMNETAMIDSIHLDDNTRTTSTKNFKTLSGLTRPINKDVLSNNRYQQVRNISNSCMVFIIILH

SEQ ID NO: 126993 - protein, 112 aa, Setaria italica
  misc_feature (71)..(71): Xaa can be any naturally occurring amino acid
  Transcript Sequence Number=SeqID_61019
VLLLSNLKRPTLGALGNSEPGRQTEIFGGFSKEQFQGGSNVENFRSSVLPFQQFSDGVKHSAAIGPTESFXPNTGMHSDNVWIQSTQMNEAMQLSNATYYPQLPGYSTEVVG

SEQ ID NO: 126994 - protein, 132 aa, Setaria italica
  Transcript Sequence Number=SeqID_61020
AEQLKKERSEQLALKSVQASDETTLLDVDSDKSNIGTADQSSVAPSSTANVSVASGSGAGFMNETAMIDSIHLDDNTRTTSTKNFKTLSGLTRPINKDVLSNNRYQQGKKYIKTAVWFYIILHLYCCIVYVS

SEQ ID NO: 126995 - protein, 52 aa, Setaria italica
  Transcript Sequence Number=SeqID_61021
VTAKKEYQNADWRSRPLPDEMIKYARRRSFSGVDSLCSLCSLSRICTAGSVY

SEQ ID NO: 126996 - protein, 86 aa, Setaria italica
  Transcript Sequence Number=SeqID_61022
  Gene Ontology: Mol. function=peptidyl-prolyl cis-trans isomerase activity; Cellular component=endoplasmic reticulum; Biological process=protein folding
  Homolog annotation: Hit_ID=B4FJW5; Match level="QueryCoverage=87%, HitCoverage=34%, E-value=3e-35, Identity=94%"; Hit description =Peptidyl-prolyl cis-trans isomerase
  Pfam annotation: Domain name=Pro_isomerase; Domain location=3-86; Score=39.4; E_value=4.8e-12; Accession=PF00160.13; Description =Cyclophilin type peptidyl-prolyl cis-tr
VWQLIFFILHSAENFRALCTGEKGVGSNGKPLHYKGTPFHRIIPGFMIQGGDIVRGDGKGSESIYGGIFPDENFTVKHTHPGQVVG

SEQ ID NO: 126997 - protein, 47 aa, Setaria italica
  misc_feature (30)..(30): Xaa can be any naturally occurring amino acid
  Transcript Sequence Number=SeqID_61023
  Gene Ontology: Mol. function=structural molecule activity; Cellular component=plastoglobule
  Homolog annotation: Hit_ID=B6SSG5; Match level="QueryCoverage=97%, HitCoverage=17%, E-value=1e-17, Identity=93%"; Hit description =Structural molecule
EVPIKSPGSGKGELEITYLDEELRVSRGDXGNLFVLKMVDPAYRVPL

SEQ ID NO: 126998 - protein, 67 aa, Setaria italica
  Transcript Sequence Number=SeqID_61024
APTVIEANDSSSNDERDVGEDTPEQLSSGGENEKSSASESEKKETTSKLSAAAAPFNPSTVPAFGYK

SEQ ID NO: 126999 - protein, 72 aa, Setaria italica
  Transcript Sequence Number=SeqID_61025
  Gene Ontology: Mol. function=binding
  Homolog annotation: Hit_ID=B9RVA6; Match level="QueryCoverage=68%, HitCoverage=3%, E-value=3e-15, Identity=75%"; Hit description =Eukaryotic translation initiation factor 3 subunit, putative
ALPVDGRTLTDLCTLGAVQMRSLGRVVELSDKLPHIQSLCIHEMVVRAFKHDATESATSFTSSTAAITARSM

SEQ ID NO: 127000 - protein, 75 aa, Setaria italica
  Transcript Sequence Number=SeqID_61026
  Gene Ontology: Mol. function=binding
  Homolog annotation: Hit_ID=B9SQW7; Match level="QueryCoverage=97%, HitCoverage=3%, E-value=3e-11, Identity=55%"; Hit description =Eukaryotic translation initiation factor 3 subunit, putative
  Pfam annotation: Domain name=PAM2; Domain location=28-45; Score=18.6; E_value=0.013; Accession=PF07145.7; Description=Ataxin-2 C-terminal region
  Subcellular localization annotation: CTP_CleavageSite=42; ConfidenceScore=5.22e-01
GCNRSGHRGPRNKPMLPSGEAPTETNTSAPRVMNPNAPEFVPGQSRSPNGQPASPNGPLTSPGGITSSPQGLPSS

SEQ ID NO: 127001 - protein, 78 aa, Setaria italica
  Transcript Sequence Number=SeqID_61027
  Gene Ontology: Mol. function=binding
  Homolog annotation: Hit_ID=B9SQW7; Match level="QueryCoverage=82%, HitCoverage=3%, E-value=4e-19, Identity=73%"; Hit description =Eukaryotic translation initiation factor 3 subunit, putative
ASFKLDVKLDGSQAPGMSPDELARRNLLKGITADESATVHDTATLGVVIVKHCGYTAVVQVPVDPDLTNLLSLSLTSS

SEQ ID NO: 127002 - protein, 134 aa, Setaria italica
  misc_feature (21)..(21): Xaa can be any naturally occurring amino acid
  Transcript Sequence Number=SeqID_61028
  Gene Ontology: Mol. function=hydrolase activity, acting on glycosyl bonds; Cellular component=beta-galactosidase complex; Biological process=carbohydrate metabolic process
  Homolog annotation: Hit_ID=Q0INM3; Match level="QueryCoverage=97%, HitCoverage=14%, E-value=2e-50, Identity=77%"; Hit description=Beta -galactosidase 15
  Subcellular localization annotation: CTP_CleavageSite=22; ConfidenceScore=5.09e-01
LSSFQVGTQTSIFTVESGSPXYSSRHKRRSLPLIGGPYLSSTWWTSKEPIGKWGEGSFAAQGILEHLNVTKDISDYLSYTTSVNISDEDVAYWNSKGVLPSITIDQIRDVARVFVNGKLAGSKVGHWVSLVILT

SEQ ID NO: 127003 - protein, 126 aa, Setaria italica
  misc_feature (6)..(6): Xaa can be any naturally occurring amino acid
  Transcript Sequence Number=SeqID_61029
  Gene Ontology: Mol. function=hydrolase activity, acting on glycosyl bonds; Cellular component=beta-galactosidase complex; Biological process=carbohydrate metabolic process
  Homolog annotation: Hit_ID=Q0INM3; Match level="QueryCoverage=55%, HitCoverage=7%, E-value=3e-29, Identity=81%"; Hit description=Beta -galactosidase 15
  Pfam annotation: Domain name=Gal_Lectin; Domain location=2-74; Score =99.0; E_value=1.6e-26; Accession=PF02140.10; Description=Galactose binding lectin domain
  Subcellular localization annotation: CTP_CleavageSite=34; ConfidenceScore=5.27e-01
HLQCDXGHVISKITFASYGTPSGSCQNFSVGNCHASTTLDLVTEACVGQNKCSISVTNDVFGDPCRKVVKEATLFFPFFFQSPKQVIVFTYMGAKEEVTYNDAEMLRQGCRNAPCNHSSQGQTTVS

SEQ ID NO: 127004 - protein, 94 aa, Setaria italica
  misc_feature (79)..(79): Xaa can be any naturally occurring amino acid
  Transcript Sequence Number=SeqID_61030
  Gene Ontology: Mol. function=hydrolase activity, acting on glycosyl bonds; Cellular component=beta-galactosidase complex; Biological process=carbohydrate metabolic process
  Homolog annotation: Hit_ID=A2ZK00; Match level="QueryCoverage=100%, HitCoverage=13%, E-value=2e-44, Identity=85%"; Hit description=Beta -galactosidase
QIENEYGNIQGRYGQAGKRYMLWAAQMALALDTGVPWVMCRQTDAPEQILDTCNAFYCDGFKPNSYNKPTIWTEDWDGXDWGEPLPHRPVQDSA

SEQ ID NO: 127005 - protein, 89 aa, Setaria italica
  Transcript Sequence Number=SeqID_61031
  Gene Ontology: Mol. function=hydrolase activity, acting on glycosyl bonds; Cellular component=beta-galactosidase complex; Biological process=carbohydrate metabolic process
  Homolog annotation: Hit_ID=Q0INM3; Match level="QueryCoverage=70%, HitCoverage=6%, E-value=2e-24, Identity=80%"; Hit description=Beta -galactosidase 15
  Pfam annotation: Domain name=Gal_Lectin; Domain location=8-68; Score =75.4; E_value=2.1e-19; Accession=PF02140.10; Description=Galactose binding lectin domain
VFTILRVYGTPSGSCQNFSVGNCHASTTLDLVTEACVGQNKFSISVTNDVFGDPCRKVVKDLAVEAECSPHWLPKNLEMICDQDTVVWP

SEQ ID NO: 127006 - protein, 123 aa, Setaria italica
  misc_feature (33)..(33): Xaa can be any naturally occurring amino acid
  misc_feature (51)..(51): Xaa can be any naturally occurring amino acid
  misc_feature (100)..(100): Xaa can be any naturally occurring amino acid
  Transcript Sequence Number=SeqID_61032
WPIIIYSGNIKVRDITCDSRLSTVEVKYAVVKXAVEATVEIQVIHGTFYGXITAHTTSILHRIVLYDSKAGGVATSDGSGAIQLWRRVIAVCLNEKLMLXVDSQASNDIQIIQFGPSLNGASQ

SEQ ID NO: 127007 - protein, 44 aa, Setaria italica
  Transcript Sequence Number=SeqID_61033
  Gene Ontology: Mol. function=peptidase activity; Cellular component =membrane
  Homolog annotation: Hit_ID=B6T405; Match level="QueryCoverage=100%, HitCoverage=12%, E-value=1e-15, Identity=93%"; Hit description=CAAX amino terminal protease family protein
FSYAQTRNLLTPITIHAVWNSGVILLLTFLQLQGYDIKELLQAS

SEQ ID NO: 127008 - protein, 66 aa, Setaria italica
  Transcript Sequence Number=SeqID_61034
FRNHFCLQLLEFINSGIDYTSSNQERKILIGILCFVLHHSVNKVLVEPAKAIILNSSLVSLTDVIV

SEQ ID NO: 127009 - protein, 82 aa, Setaria italica
  Transcript Sequence Number=SeqID_61035
  Homolog annotation: Hit_ID=Q7XS73; Match level="QueryCoverage=86%, HitCoverage=9%, E-value=3e-09, Identity=40%"; Hit description =OSJNBa0020I02.9 protein
PVCLAYPLLRVSASTFSEEDEWLPLTVKLLEFINSGIDYTSSNQEPCAKGPSLFQHDQETDFGEFMILVLLMVFFSLRSLHT

SEQ ID NO: 127010 - protein, 40 aa, Setaria italica
  Transcript Sequence Number=SeqID_61036
SWNLAKNKASASFIKDVVLLDDDDDAEPARSNDAEISNKW

SEQ ID NO: 127011 - protein, 120 aa, Setaria italica
  misc_feature (97)..(120): Xaa can be any naturally occurring amino acid
  Transcript Sequence Number=SeqID_61037
VGSIVTGWYVLVVFVGCRPRRDAGRSSDRSPRLSHSQRAETIIAIGDVRESCIISVGRRESGVCFAMLVSVCCVLVPCDMNVVLLYYWVIKDGAPLXXXXXXXXXXXXXXXXXXXXXXXX

SEQ ID NO: 127012 - protein, 55 aa, Setaria italica
  Transcript Sequence Number=SeqID_61038
FVFRSSLLVFVGRSGRRLSLLDAAEVEFGYDADTGLVTVDLPVPEEEMYRWTLEI

SEQ ID NO: 127013 - protein, 77 aa, Setaria italica
  Transcript Sequence Number=SeqID_61039
  Gene Ontology: Mol. function=heat shock protein binding
  Homolog annotation: Hit_ID=B6T3S9; Match level="QueryCoverage=84%, HitCoverage=34%, E-value=5e-22, Identity=76%"; Hit description =Chaperone protein dnaJ 72
SGCPVVLSAGSIDWEFLLKAVTRRGFLINLGFASVLLSGAAFLDGSILEIWNMNNSGKSFEDVIESIEKAKKDAERR

SEQ ID NO: 127014 - protein, 85 aa, Setaria italica
  misc_feature (20)..(20): Xaa can be any naturally occurring amino acid
  Transcript Sequence Number=SeqID_61040
  Gene Ontology: Mol. function=aspartic-type endopeptidase activity; Cellular component=chromatin; Biological process=chromatin assembly or disassembly
  Homolog annotation: Hit_ID=Q2QTY9; Match level="QueryCoverage=100%, HitCoverage=5%, E-value=1e-26, Identity=68%"; Hit description =Retrotransposon protein, putative, unclassified
DACKNGVGAVLLQDGHPLAXFISKPLGVKTQGLSTYEKEYLAILIAIEQWRAYLLHAEFVIFTDQKSLVHLNEQRLNTPWQQKVL

SEQ ID NO: 127015 - protein, 73 aa, Setaria italica
  Transcript Sequence Number=SeqID_61041
  Gene Ontology: Mol. function=RNA-directed DNA polymerase activity; Cellular component=chromatin; Biological process=chromatin assembly or disassembly
  Homolog annotation: Hit_ID=Q2QZQ5; Match level="QueryCoverage=98%, HitCoverage=5%, E-value=1e-22, Identity=65%"; Hit description =Retrotransposon protein, putative, unclassified
NLAILIAIEQWRAYLLHAEFVIFTDQKSLVHLNEQRLNTPWQQKVFTKLLGMEYKVVYKPGSDNRVADALSRR

SEQ ID NO: 127016 - protein, 53 aa, Setaria italica
  Transcript Sequence Number=SeqID_61042
ITVVFLHGRVRLAFIWSLITGLFTSLSLFTCYTMLIGMYSCFQFFIACRLRDR

SEQ ID NO: 127017 - protein, 59 aa, Setaria italica
  Transcript Sequence Number=SeqID_61043
  Gene Ontology: Mol. function=hydrolase activity, hydrolyzing O -glycosyl compounds; Biological process=carbohydrate metabolic process
  Homolog annotation: Hit_ID=Q9ZNY8; Match level="QueryCoverage=67%, HitCoverage=11%, E-value=4e-14, Identity=87%"; Hit description=Beta -1,3-glucanase
MMSALWIAACSLLLLSSSSGVEGIGVNYGMIANNLPSPDKVIALYRSRNITDVRLFHPN

SEQ ID NO: 127018 - protein, 154 aa, Setaria italica
  misc_feature (137)..(137): Xaa can be any naturally occurring amino acid
  Transcript Sequence Number=SeqID_61044
  Gene Ontology: Mol. function=nucleic acid binding
  Homolog annotation: Hit_ID=B9GWX1; Match level="QueryCoverage=86%, HitCoverage=9%, E-value=2e-52, Identity=72%"; Hit description =Chromatin remodeling complex subunit
IRLVLFNLVTTLLPKLLPNLVQVAHLHPMLKFLHDEVYGQNYQSWDSGIHRPFEAQMEEGRVRLVQLLQRTMITARKADLKNIPPCIKKITFLDFNEGHAKSYNELVVTIRRNILMADWNDPSHVESLLNPKQWKFXATTIKNVRLSCCVAGHI

SEQ ID NO: 127019 - protein, 72 aa, Setaria italica
  Transcript Sequence Number=SeqID_61045
PPFPYSVSLICLYCCAYIFMNHLVFPEDCYCVMYEVVTLKKLACLLMYFVCCRFNGLDTPKATMVLPYIDEW

SEQ ID NO: 127020 - protein, 36 aa, Setaria italica
  Transcript Sequence Number=SeqID_61046
HLVFPEDCYCVMYEVVGTTVQAYQRYRIGEWWFCAP

SEQ ID NO: 127021 - protein, 39 aa, Setaria italica
  misc_feature (30)..(30): Xaa can be any naturally occurring amino acid
  Transcript Sequence Number=SeqID_61047
  Homolog annotation: Hit_ID=B6U8T8; Match level="QueryCoverage=92%, HitCoverage=13%, E-value=2e-09, Identity=80%"; Hit description =Thiamin pyrophosphokinase 1
CRTANLRICADGGANRIFDEMFHMTNDEDXKKSTRNRYV

SEQ ID NO: 127022 - protein, 80 aa, Setaria italica
  Transcript Sequence Number=SeqID_61048
  Subcellular localization annotation: CTP_CleavageSite=72; ConfidenceScore=5.66e-01
YFSDSGSFVVLLFPLSSAATSGLASLSFVLSSFCSAIGASIQPTSWLNGRSCCCCEKAFAKASWLNGRSCCCCEKIVETT

SEQ ID NO: 127023 - protein, 59 aa, Setaria italica
  Transcript Sequence Number=SeqID_61049
EFPASVEQKSEDAGKEQEGTGINQQPEAKKTGKKKIIRRVVKRKVSASGSHVDCLCYTC

SEQ ID NO: 127024 - protein, 71 aa, Setaria italica
  Transcript Sequence Number=SeqID_61050
RELRDLRDRERERERERERDRERLLREREREREQLTMKKEKSPVELKEQKQVSGEVNKGKSIDADLLKEGD

SEQ ID NO: 127025 - protein, 63 aa, Setaria italica
  Transcript Sequence Number=SeqID_61051
MTKEGDEKMSPDHSASVHDEQLKEGQVKVGADHPMANHDEPAKKGEEKMSTSEAAPNEPEADY

SEQ ID NO: 127026 - protein, 70 aa, Setaria italica
  Transcript Sequence Number=SeqID_61052
EDPEEIEIYEDDEDMDDVKMTKEGDEKMSPDHSASVHDEQLKEGQVKVGADHPMANHDEPAKKGEEKMST

SEQ ID NO: 127027 - protein, 135 aa, Setaria italica
  misc_feature (14)..(14): Xaa can be any naturally occurring amino acid
  misc_feature (76)..(76): Xaa can be any naturally occurring amino acid
  misc_feature (102)..(102): Xaa can be any naturally occurring amino acid
  Transcript Sequence Number=SeqID_61053
  Gene Ontology: Mol. function=calcium ion binding
  Homolog annotation: Hit_ID=B9S8Z8; Match level="QueryCoverage=88%, HitCoverage=9%, E-value=5e-28, Identity=49%"; Hit description=P30 dbc protein, putative
PEFSKIVLNWAKEXLNLSLHTPVSLEHDIHDADDSADEGAISSEKSSSSNTPATIWNAKVLLMSGMSKGAYADITXLRSNEERVVNLNNILKFAVFKKDRSXFAIGGPWNAAIDGGDPAVRIKQEQSTDGSPPSY

SEQ ID NO: 127028 - protein, 117 aa, Setaria italica
  Transcript Sequence Number=SeqID_61054
  Homolog annotation: Hit_ID=B9S8Z8; Match level="QueryCoverage=67%, HitCoverage=6%, E-value=4e-16, Identity=56%"; Hit description=P30 dbc protein, putative
  Pfam annotation: Domain name=DUF1777; Domain location=1-114; Score= -77.2; E_value=0.034; Accession=PF08648.4; Description=Protein of unknown function (DUF1777)
RERERERERERERERERERLRERREKERERDRKHAADPRREHTPPRVPGDRRRSSSVRSEKPVRRISPRREAVHRHRSPVKEIKREYICKVLPFRFVDDERDYLSLTKRYPRLAITP

SEQ ID NO: 127029 - protein, 67 aa, Setaria italica
  Transcript Sequence Number=SeqID_61055
MSIIHVLIIFIYFYFFRIFLKMDPKQKPLNEMKEKKKSDDPPKYPGFILQAKRSNNESKLRSTSLSL

SEQ ID NO: 127030 - protein, 71 aa, Setaria italica
  misc_feature (1)..(39): Xaa can be any naturally occurring amino acid
  Transcript Sequence Number=SeqID_61056
XXXXXXXXXXXXXXXXXXXXXXXXXXXXXXXXXXXXXXXSKRNTAIFSQPPLHCLTRAGGYTFIVRSTPNP

SEQ ID NO: 127031 - protein, 52 aa, Setaria italica
  Transcript Sequence Number=SeqID_61057
  Gene Ontology: Cellular component=ribosome
  Homolog annotation: Hit_ID=Q8GVY1; Match level="QueryCoverage=100%, HitCoverage=12%, E-value=9e-11, Identity=57%"; Hit description =Ribosomal protein-like
AVLPSNIKTGPANCLTNVLQRSAPVCSQATHGQLRRDLTEHIWQQFGPFGDK

SEQ ID NO: 127032 - protein, 27 aa, Setaria italica
  Transcript Sequence Number=SeqID_61058
TTCRKLDNIQGDIEFKNVYFSYPARPK

SEQ ID NO: 127033 - protein, 43 aa, Setaria italica
  Transcript Sequence Number=SeqID_61059
LFTILTETLLIWMKKLILTGQLNSQPQSELPCAFSLSLYPTEY

SEQ ID NO: 127034 - protein, 61 aa, Setaria italica
  Transcript Sequence Number=SeqID_61060
RTSRIELAPLPDRNRIRHSRGRGEERGYLRLVRGEGWCVSAGGVGAPSPPPLPTCLPPIAP

SEQ ID NO: 127035 - protein, 45 aa, Setaria italica
  Transcript Sequence Number=SeqID_61061
ACCRIYRHGHACKARQVKLFCTISIECEGDEDETESKRRLMLYTT

SEQ ID NO: 127036 - protein, 70 aa, Setaria italica
  Transcript Sequence Number=SeqID_61062
MDYSMCADTSRGAAIRDLIARALKGPLAPAQQEVHCYILIFLLDNNGCSSKLISTISSSYDEGFSSLCSL

SEQ ID NO: 127037 - protein, 48 aa, Setaria italica
  Transcript Sequence Number=SeqID_61063
IYLVVLGVDLPTLLHSLLICNLIRSAISLPGSKQKSASDDRDSALAGL

SEQ ID NO: 127038 - protein, 60 aa, Setaria italica
  Transcript Sequence Number=SeqID_61064
QVILNTQSGHRTIQNKKSTFDVDTTGNSFHSKDLSSRNKPAASLIRDLIARALKGPLAPA

SEQ ID NO: 127039 - protein, 60 aa, Setaria italica
  Transcript Sequence Number=SeqID_61065
  Gene Ontology: Mol. function=molecular_function; Cellular component =cellular_component; Biological process=cell proliferation
  Homolog annotation: Hit_ID=A4QP78; Match level="QueryCoverage=91%, HitCoverage=12%, E-value=1e-15, Identity=69%"; Hit description =Zgc:163002 protein
  Pfam annotation: Domain name=DUF2363; Domain location=1-58; Score= -0.3; E_value=5.3e-06; Accession=PF10155.1; Description =Uncharacterized conserved protein (DUF2363)
DIAGYFEGLVHMDMSLHSMEVVNRLTTAVELPTEFVHEYITNCIQSCQSIKDETLQENTY

SEQ ID NO: 127040 - protein, 78 aa, Setaria italica
  Transcript Sequence Number=SeqID_61066
DTESCEPACWFFSVPGTAFSDSDSEDLDLSKEDLVKLLLEKDESLKSKDQEVKDMKDKVLRSYAEMENVLARTKRESE

SEQ ID NO: 127041 - protein, 59 aa, Setaria italica
  Transcript Sequence Number=SeqID_61067
  Gene Ontology: Mol. function=protein kinase activity; Biological process=protein amino acid phosphorylation
  Homolog annotation: Hit_ID=B9T343; Match level="QueryCoverage=96%, HitCoverage=5%, E-value=3e-17, Identity=66%"; Hit description =Ubiquitin ligase protein cop1, putative
  Pfam annotation: Domain name=WD40; Domain location=8-45; Score=30.8; E_value=5.4e-06; Accession=PF00400.24; Description=WD domain, G-beta repeat
ILDQRNTRIPWCTISGHGKAVSYVRFLDPETLISASTDNTLKIWDLNRTNCSGLSTDSC

SEQ ID NO: 127042 - protein, 96 aa, Setaria italica
  misc_feature (72)..(72): Xaa can be any naturally occurring amino acid
  Transcript Sequence Number=SeqID_61068
GTAPTEFVLDGPEASRRVGQKLRADPSGSRLEKQGVGGGGAPTNRGLGSRLQPFNCDPIEVLADSGERKAKXAPKFPALSRPNQPPAPDPASAATA

SEQ ID NO: 127043 - protein, 84 aa, Setaria italica
  Transcript Sequence Number=SeqID_61069
GAEWVRWRHWLDLELEAGLGTTKRGKLWGSFCLPLPESASTSMGSQLKGWSREPNPRFVGAPPPRICPRRAGGEPPRRSEAQSG

SEQ ID NO: 127044 - protein, 63 aa, Setaria italica
  misc_feature (25)..(25): Xaa can be any naturally occurring amino acid
  Transcript Sequence Number=SeqID_61070
  Gene Ontology: Mol. function=oxidoreductase activity; Cellular component=integral to membrane; Biological process=oxidation reduction
  Homolog annotation: Hit_ID=Q109A3; Match level="QueryCoverage=100%, HitCoverage=24%, E-value=1e-17, Identity=73%"; Hit description =Oxidoreductase, short chain dehydrogenase/reductase family protein, expressed
NCTRSRDGLELHFATNHIVAFGLDXGHFLLTNLLLENMKSACRDSGVEGRIINLTSSGHMLTY

SEQ ID NO: 127045 - protein, 63 aa, Setaria italica
  Transcript Sequence Number=SeqID_61071
  Homolog annotation: Hit_ID=A4GX19; Match level="QueryCoverage=90%, HitCoverage=30%, E-value=4e-19, Identity=75%"; Hit description =Putative ureidoglycolate hydrolase
QSSAGHYYLPPDPAEVCVFRVSGPKFLKLNKGTWHAGPLFKADAVDFYNLELGNTNVSAKLLN

SEQ ID NO: 127046 - protein, 49 aa, Setaria italica
  misc_feature (15)..(15): Xaa can be any naturally occurring amino acid
  misc_feature (28)..(28): Xaa can be any naturally occurring amino acid
  Transcript Sequence Number=SeqID_61072
  Gene Ontology: Mol. function=metal ion binding; Cellular component =nucleus; Biological process=chromatin modification
  Homolog annotation: Hit_ID=B9IDM7; Match level="QueryCoverage=100%, HitCoverage=14%, E-value=1e-17, Identity=87%"; Hit description=SET domain protein (Fragment)
KQNLKCVRYDVAGEXRVLLVANRDISKXGERLYYDYNGSEHEYPTHHFV

SEQ ID NO: 127047 - protein, 56 aa, Setaria italica
  Transcript Sequence Number=SeqID_61073
TTQFHQSDPSLSLREFFFGYMNQQVRNCSSDPKPNYLSSLPKLKRELDFDPIEGSH

SEQ ID NO: 127048 - protein, 67 aa, Setaria italica
  Transcript Sequence Number=SeqID_61074
EKLSRRGRPRTPTPGSYLGHRYERRDRGRGYRRGYGGGRDEDYRNGYGYRRSPPPMYSYRESRDLPF

SEQ ID NO: 127049 - protein, 82 aa, Setaria italica
  Transcript Sequence Number=SeqID_61075
  Gene Ontology: Mol. function=nucleic acid binding; Cellular component= ribonucleoprotein complex
  Homolog annotation: Hit_ID=B9RCF0; Match level="QueryCoverage=62%, HitCoverage=25%, E-value=2e-14, Identity=70%"; Hit description =Arginine/serine-rich-splicing factor, putative
  Pfam annotation: Domain name=RRM_1; Domain location=1-48; Score=5.9; E_value=0.057; Accession=PF00076.14; Description=RNA recognition motif. (a.k.a. RRM, RBD, o
RVVGCHVVLEPHTRVSRGFAFVTMDTVEEAERCIKYLNNSVMEGRNITVEKKILCKLCAAIKILSSSISTLANTAPSVDSPK

SEQ ID NO: 127050 - protein, 78 aa, Setaria italica
  Transcript Sequence Number=SeqID_61076
  Gene Ontology: Mol. function=cyclopropane-fatty-acyl-phospholipid synthase activity; Biological process=lipid biosynthetic process
  Homolog annotation: Hit_ID=B6SV21; Match level="QueryCoverage=100%, HitCoverage=8%, E-value=9e-36, Identity=89%"; Hit description =Cyclopropane fatty acid synthase
VAAAKASLELHHIQGNRGIWFCGAYQGYGFHEDGLKAGKSAAQDLLGNKKGLLENPKQMIPSWTEAGARLLVARFLGQ

SEQ ID NO: 127051 - protein, 112 aa, Setaria italica
  Transcript Sequence Number=SeqID_61077
  Gene Ontology: Mol. function=signal transducer activity; Cellular component=integral to membrane; Biological process=signal transduction
  Homolog annotation: Hit_ID=Q6AVV2; Match level="QueryCoverage=88%, HitCoverage=6%, E-value=4e-52, Identity=98%"; Hit description=Myosin heavy chain class XI E3 protein, putative
  Pfam annotation: Domain name=DIL; Domain location=69-112; Score=2.2; E_value=0.0021; Accession=PF01843.11; Description=DIL domain
  Subcellular localization annotation: CTP_CleavageSite=20; ConfidenceScore=5.12e-01
YYSSFLSWSFCLFQAPRTSRASLIKGSRSQANALAQQTLIAHWQSIVKILTNYLNILKANYVPSFLISKVFTQIFSFINVQLFNSLLLRRECCSFSNGEYVKAGLAELEQWC

SEQ ID NO: 127052 - protein, 105 aa, Setaria italica
  misc_feature (65)..(65): Xaa can be any naturally occurring amino acid
  Transcript Sequence Number=SeqID_61078
  Gene Ontology: Mol. function=nucleotide binding; Cellular component =myosin complex; Biological process=protein amino acid phosphorylation
  Homolog annotation: Hit_ID=Q9XEI4; Match level="QueryCoverage=97%, HitCoverage=6%, E-value=1e-41, Identity=83%"; Hit description =Unconventional myosin heavy chain
TNDLCPVLSIQQLYRISTMYWDDKYGTHTVSSDVISSMRVMMTEDSNNAVSSSFLLDDDSSIPFXSVDDISKSMTEIEVTDVDMPPLIRENSGFTFLHQRKELKP

SEQ ID NO: 127053 - protein, 84 aa, Setaria italica
  misc_feature (57)..(57): Xaa can be any naturally occurring amino acid
  Transcript Sequence Number=SeqID_61079
  Gene Ontology: Mol. function=nucleotide binding; Cellular component =myosin complex; Biological process=protein amino acid phosphorylation
  Homolog annotation: Hit_ID=Q9XEI4; Match level="QueryCoverage=94%, HitCoverage=6%, E-value=2e-30, Identity=73%"; Hit description =Unconventional myosin heavy chain
PRPYVIQQLYRISTMYWDDKYGTHTVSSDVISSMRVMMTEDSNNAVSSSFLLDDDSXEIEVTDVDMPPLIRENSGFTFLHQRKD

SEQ ID NO: 127054 - protein, 81 aa, Setaria italica
  Transcript Sequence Number=SeqID_61080
  Gene Ontology: Mol. function=nucleotide binding; Cellular component =myosin complex; Biological process=signal transduction
  Homolog annotation: Hit_ID=B0CN61; Match level="QueryCoverage=87%, HitCoverage=4%, E-value=2e-24, Identity=77%"; Hit description=Myosin XI-K
LCPVLSIQQLYRISTMYWDDKYGTHTVSSDVISSMRVMMTEDSNNAVSSSFLLDDDSSIPFSVDDNTTKIRIEQENTKVNK

SEQ ID NO: 127055 - protein, 80 aa, Setaria italica
  Transcript Sequence Number=SeqID_61081
CQYIWQKVYSAFVDICGIAIHLSSNCVLTKSQDNNDKLAYWLSNSSTLLLLLQRTLKTTGAAGLTPQRRRSSAAFVLGRG

SEQ ID NO: 127056 - protein, 81 aa, Setaria italica
  Transcript Sequence Number=SeqID_61082
  Gene Ontology: Mol. function=transporter activity; Cellular component= membrane; Biological process=transport
  Homolog annotation: Hit_ID=Q84XF7; Match level="QueryCoverage=91%, HitCoverage=31%, E-value=3e-25, Identity=77%"; Hit description =Integral membrane protein Nramp1 (Fragment)
SSGLHFAVIGTAFALNMLFRIPVWCGVLITGLSTLMLLLLQQYGVRKLEFLIAFLVFLIATCFLVELGYSKPDASEVVRGL

SEQ ID NO: 127057 - protein, 90 aa, Setaria italica
  misc_feature (39)..(39): Xaa can be any naturally occurring amino acid
  Transcript Sequence Number=SeqID_61083
  Gene Ontology: Mol. function=transporter activity; Cellular component= membrane; Biological process=transport
  Homolog annotation: Hit_ID=B9SMT1; Match level="QueryCoverage=83%, HitCoverage=13%, E-value=7e-31, Identity=86%"; Hit description=Metal transporter, putative
LINISIISVSGAVCGSGNLNPEDQANCSDLDLNKASFLXKNVLGTWSSKLFAVALLASGQSSTITGTYAGQYVMQVCGTFPYFSPNSQVE

SEQ ID NO: 127058 - protein, 45 aa, Setaria italica
  Transcript Sequence Number=SeqID_61084
VALLASGQSSTITGTYAGQYVMQVCGTFPYFSPNSTKLEIRKYFY

SEQ ID NO: 127059 - protein, 47 aa, Setaria italica
  Transcript Sequence Number=SeqID_61085
MFREACAVDNWRSNAVVEEMFGRMALQITDYPGSGPNDRHTPKAPGP

SEQ ID NO: 127060 - protein, 55 aa, Setaria italica
  Transcript Sequence Number=SeqID_61086
MASMDCALHVLLRVMMRRSICRLQEVVDMAVDIGTALFVAVRVSGGSILDRHVPD

SEQ ID NO: 127061 - protein, 53 aa, Setaria italica
  Transcript Sequence Number=SeqID_61087
  Subcellular localization annotation: CTP_CleavageSite=42; ConfidenceScore=5.14e-01
RLQEVVDMAVDIGTALFVAVRVSGLVSRRRLPSSSSRVPSISASTTTTYYYSP

SEQ ID NO: 127062 - protein, 130 aa, Setaria italica
  misc_feature (88)..(88): Xaa can be any naturally occurring amino acid
  Transcript Sequence Number=SeqID_61088
LVLVVRRRRDGDEEERREPRRAPHGRPHRELALPLQDVHQRVRRLPLPLSLAAFASAKSRNTGYNPALIKKQKEFYKNAKLISKYKKXKKQQNQSSNPPEFPIHEGGGDFNVPKLQHKGKKRTAQSLKEE

SEQ ID NO: 127063 - protein, 55 aa, Setaria italica
  Transcript Sequence Number=SeqID_61089
LVPSCSCRTLLTIWVTSTSFYWLYLSYLLSWSTGTVGFISSFCFVHYLFSSVKAD

SEQ ID NO: 127064 - protein, 100 aa, Setaria italica
  Transcript Sequence Number=SeqID_61090
  Gene Ontology: Cellular component=integral to membrane; Biological process=phagocytosis, engulfment
  Homolog annotation: Hit_ID=B9SC23; Match level="QueryCoverage=90%, HitCoverage=13%, E-value=3e-30, Identity=70%"; Hit description =Endosomal P24A protein, putative
TNKQITKVNPKYRQRNQEYPREIPPQRYPSWLLVLGAGTLPFGTLFIELFFIMSSIWMGRVYYVFGFLFIVLLLLVIVCAEVSLVLTYMHLCVEDWKWWW

SEQ ID NO: 127065 - protein, 35 aa, Setaria italica
  Transcript Sequence Number=SeqID_61091
FFFFFLSSTKITQHVNKAIHSITSCMLLAPLHKIH

SEQ ID NO: 127066 - protein, 43 aa, Setaria italica
  Transcript Sequence Number=SeqID_61092
GEFSMRSPMRSSPYRFKMYTNESDVFLCRSAPLAPDAFALLKK

SEQ ID NO: 127067 - protein, 44 aa, Setaria italica
  Transcript Sequence Number=SeqID_61093
RLALLYCCRDGSVNLFRCFQTVTCYQAVVNNLEDAHEQMAVSIC

SEQ ID NO: 127068 - protein, 60 aa, Setaria italica
  misc_feature (44)..(44): Xaa can be any naturally occurring amino acid
  misc_feature (49)..(49): Xaa can be any naturally occurring amino acid
  Transcript Sequence Number=SeqID_61094
  Gene Ontology: Mol. function=thiamin pyrophosphate binding
  Homolog annotation: Hit_ID=B6TXL9; Match level="QueryCoverage=98%, HitCoverage=9%, E-value=1e-27, Identity=94%"; Hit description =Pyruvate decarboxylase isozyme 1
RILHHTIGLPDFTQELRCFQTVTCYQAVVNNLEDAHEQIDTAIXTAIKXSKPVYISISCQ

SEQ ID NO: 127069 - protein, 65 aa, Setaria italica
  Transcript Sequence Number=SeqID_61095
  Gene Ontology: Mol. function=translation initiation factor activity; Cellular component=nucleolus; Biological process=mature ribosome assembly
  Homolog annotation: Hit_ID=Q2PET8; Match level="QueryCoverage=100%, HitCoverage=26%, E-value=1e-27, Identity=86%"; Hit description =Putative eukaryotic translation initiation factor 6
MATRIQFENNCEVGVFSKLTNAYCLVAIGGSENFYSAFEAELADSIPVVKTSIGGTRIIGRLCVG

SEQ ID NO: 127070 - protein, 96 aa, Setaria italica
  Transcript Sequence Number=SeqID_61096
  Gene Ontology: Mol. function=translation initiation factor activity; Cellular component=nucleolus; Biological process=mature ribosome assembly
  Homolog annotation: Hit_ID=Q2PET8; Match level="QueryCoverage=86%, HitCoverage=34%, E-value=5e-38, Identity=89%"; Hit description =Putative eukaryotic translation initiation factor 6
WGGYCAFSNRGGLVHPHTSIEDLDELSTLLQVPLVAGTVNRGSEVIAAGMTVNDWTAFCGSDTTATELSVIESVFKLREGQSTANRTNRTIEGKYY

SEQ ID NO: 127071 - protein, 37 aa, Setaria italica
  Transcript Sequence Number=SeqID_61097
MLISSLCFETVLELQHLRNCLPDQVVVQRIDERLSAL

SEQ ID NO: 127072 - protein, 66 aa, Setaria italica
  Transcript Sequence Number=SeqID_61098
  Subcellular localization annotation: CTP_CleavageSite=29; ConfidenceScore=5.50e-01
RSTIHSPTIQAKTRCALPDSCFTCGRRFSSQAAASRTVTRRSGRSDFWHVALQGARIQLVHSRWWI

SEQ ID NO: 127073 - protein, 51 aa, Setaria italica
  Transcript Sequence Number=SeqID_61099
ASWQGFDQRALASTAGFACSFGSGSSVLMEIIICGYLIICLVYFFERKLNV

SEQ ID NO: 127074 - protein, 35 aa, Setaria italica
  Transcript Sequence Number=SeqID_61100
PWYLAGDDGPGIDSSWTVVGTPVLRVKTIYISSAI

SEQ ID NO: 127075 - protein, 103 aa, Setaria italica
  misc_feature (19)..(19): Xaa can be any naturally occurring amino acid
  Transcript Sequence Number=SeqID_61101
  Gene Ontology: Mol. function=protein binding
  Homolog annotation: Hit_ID=B6T8V9; Match level="QueryCoverage=90%, HitCoverage=17%, E-value=7e-41, Identity=82%"; Hit description=GAMYB- binding protein
MNIPLAGIEAILSSNDLQXASEDTIYDFLLRWARAQYPKSEERREILSSRLLPLVRFSHMTCRKLRKVLTCTDIDHEQATKCVTEALLYKVTASAAKKTTLDR

SEQ ID NO: 127076 - protein, 62 aa, Setaria italica
  Transcript Sequence Number=SeqID_61102
  Gene Ontology: Mol. function=protein binding
  Homolog annotation: Hit_ID=B6T8V9; Match level="QueryCoverage=93%, HitCoverage=11%, E-value=2e-19, Identity=78%"; Hit description=GAMYB- binding protein
YCFGLFLGMQEKGSMSVTVDYEFAARTRPSGEFVSKYKGNYTFTGGIAKRFLYPTAFPPVKV

SEQ ID NO: 127077 - protein, 126 aa, Setaria italica
  misc_feature (65)..(65): Xaa can be any naturally occurring amino acid
  misc_feature (119)..(119): Xaa can be any naturally occurring amino acid
  Transcript Sequence Number=SeqID_61103
  Gene Ontology: Mol. function=ubiquitin thiolesterase activity; Cellular component=nucleus; Biological process=ubiquitin-dependent protein catabolic process
  Homolog annotation: Hit_ID=B0BLB2; Match level="QueryCoverage=100%, HitCoverage=10%, E-value=2e-49, Identity=78%"; Hit description =CM0545.290.nc protein
  Pfam annotation: Domain name=UCH; Domain location=1-116; Score=-38.6; E_value=9.1e-05; Accession=PF00443.21; Description=Ubiquitin carboxyl- terminal hydrolase
FPPVLQLQLKRFEYDFVRDTMVKINDRYEFPLQLDLDRDDGKYLSPEADRSVRNLYTLHSLSSMXVLVHSGGVHGGHYYAFIRPTLSDQWYKFDDERVTKEDTKRALEEQYGGEEELPXTNPGLNT

SEQ ID NO: 127078 - protein, 52 aa, Setaria italica
  Transcript Sequence Number=SeqID_61104
  Gene Ontology: Mol. function=cysteine-type peptidase activity
  Homolog annotation: Hit_ID=B9ET85; Match level="QueryCoverage=84%, HitCoverage=4%, E-value=6e-11, Identity=72%"; Hit description =Ubiquitin carboxyl-terminal hydrolase
LNLSYLLVDKNAGPNDRLVHVYHFFKDIHHIQYFGEPFFFLIRDGEALSDIK

SEQ ID NO: 127079 - protein, 59 aa, Setaria italica
  misc_feature (9)..(9): Xaa can be any naturally occurring amino acid
  Transcript Sequence Number=SeqID_61105
  Gene Ontology: Mol. function=cysteine-type peptidase activity; Cellular component=nucleus; Biological process=ubiquitin-dependent protein catabolic process
  Homolog annotation: Hit_ID=Q94ED6; Match level="QueryCoverage=100%, HitCoverage=5%, E-value=6e-16, Identity=72%"; Hit description =Ubiquitin carboxyl-terminal hydrolase
RSTYDDVVXEKVAHQLGLDEPSKIRLTQHHPLSHQPKPYYIKYRGLDYLSDMLQHHNQV

SEQ ID NO: 127080 - protein, 88 aa, Setaria italica
  misc_feature (36)..(36): Xaa can be any naturally occurring amino acid
  misc_feature (39)..(39): Xaa can be any naturally occurring amino acid
  Transcript Sequence Number=SeqID_61106
RSGSWRLDGLSLKVIHGPVGRSKDVNGTPELKFNGXQYXFEKINVPLGEDGASVAEARPVAVMDLSGVSLSDLQEGQLSSESTASIVK

SEQ ID NO: 127081 - protein, 55 aa, Setaria italica
  Transcript Sequence Number=SeqID_61107
IWKYFCYYAIRKVMNLILDFDNSRLSACQQAFLHSIHHFPMGSLVDSNLHQLSKA

SEQ ID NO: 127082 - protein, 61 aa, Setaria italica
  Transcript Sequence Number=SeqID_61108
LLVAYALGGGCPETWSGFSTSAFVDLKEFVTLSASSGVMVWYVLCTVLASALCASVLISLM

SEQ ID NO: 127083 - protein, 84 aa, Setaria italica
  Transcript Sequence Number=SeqID_61109
  Gene Ontology: Mol. function=squalene monooxygenase activity; Cellular component=membrane; Biological process=terpene biosynthetic process
  Homolog annotation: Hit_ID=B6U6N2; Match level="QueryCoverage=70%, HitCoverage=10%, E-value=2e-28, Identity=100%"; Hit description =Squalene monooxygenase
RRIHFTSSTESYTTWQESTCVQNKPNTKLAYPLEKFHSDVAGRSFHNGRFIQRMRQKAASLPNVQLEQGTVTSLLEENGTVKGV

SEQ ID NO: 127084 - protein, 74 aa, Setaria italica
  Transcript Sequence Number=SeqID_61110
  Gene Ontology: Mol. function=squalene monooxygenase activity; Cellular component=membrane; Biological process=terpene biosynthetic process
  Homolog annotation: Hit_ID=B6U6N2; Match level="QueryCoverage=90%, HitCoverage=12%, E-value=4e-31, Identity=97%"; Hit description =Squalene monooxygenase
VICSFLVKSASLPNVQLEQGTVTSLLEENGTVKGVQYKTKSGQELKAYAPLTIVCDGCFSNLRRALCSPKVDVP

SEQ ID NO: 127085 - protein, 55 aa, Setaria italica
  Transcript Sequence Number=SeqID_61111
  Gene Ontology: Mol. function=squalene monooxygenase activity; Cellular component=membrane; Biological process=terpene biosynthetic process
  Homolog annotation: Hit_ID=B9R6V0; Match level="QueryCoverage=80%, HitCoverage=8%, E-value=1e-18, Identity=97%"; Hit description =Squalene monooxygenase, putative
IATAKKCATKLNGRRVHVIERDLTEPDRIVGELLQPGGYLKLIELGLEDCVEEID

SEQ ID NO: 127086 - protein, 133 aa, Setaria italica
  misc_feature (109)..(109): Xaa can be any naturally occurring amino acid
  Transcript Sequence Number=SeqID_61112
  Gene Ontology: Mol. function=squalene monooxygenase activity; Cellular component=membrane; Biological process=terpene biosynthetic process
  Homolog annotation: Hit_ID=B6U6N2; Match level="QueryCoverage=100%, HitCoverage=27%, E-value=4e-69, Identity=89%"; Hit description =Squalene monooxygenase
GYALFKDGRNTKLAYPLEKFHSDVAGRSFHNGRFIQRMRQKAASLPNVQLEQGTVTSLLEENGTVKGVQYKTKSGQELKAYAPLTIVCDGCFSNLRRALCSPKNCQLPXNHGHVILANPSPILFYPISSTEVR

SEQ ID NO: 127087 - protein, 94 aa, Setaria italica
  misc_feature (61)..(61): Xaa can be any naturally occurring amino acid
  misc_feature (80)..(80): Xaa can be any naturally occurring amino acid
  Transcript Sequence Number=SeqID_61113
  Gene Ontology: Mol. function=squalene monooxygenase activity; Cellular component=membrane; Biological process=terpene biosynthetic process
  Homolog annotation: Hit_ID=Q10PK2; Match level="QueryCoverage=100%, HitCoverage=13%, E-value=2e-32, Identity=81%"; Hit description =Squalene monooxygenase, putative, expressed
  Pfam annotation: Domain name=SE; Domain location=1-94; Score=-137.7; E_value=0.00075; Accession=PF08491.2; Description=Squalene epoxidase
PAAPHPTPGALLMGDAFNMRHPLTGGGMTVALSDIVVLRNLLKPLRNLHDASSLLLNYLCXFLFSLFTYFVRFKPVASTXINTLAGALYKVFSA

SEQ ID NO: 127088 - protein, 79 aa, Setaria italica
  Transcript Sequence Number=SeqID_61114
  Gene Ontology: Mol. function=structural constituent of ribosome; Cellular component=ribonucleoprotein complex; Biological process =translation
  Homolog annotation: Hit_ID=B4FKB3; Match level="QueryCoverage=94%, HitCoverage=56%, E-value=2e-33, Identity=92%"; Hit description=50S ribosomal protein L31
  Pfam annotation: Domain name=Ribosomal_L31; Domain location=8-73; Score=30.4; E_value=3.8e-07; Accession=PF01197.10; Description =Ribosomal protein L31
MQGMRCSMRKKGLHPEIYEDAKVYCNGELVLVTGGTKPEYTVDVWSGNHPYYVGDTSALVVMDSQIEESYRQRKWGPTY

SEQ ID NO: 127089 - protein, 93 aa, Setaria italica
  misc_feature (80)..(80): Xaa can be any naturally occurring amino acid
  Transcript Sequence Number=SeqID_61115
SNLRELGSSNVKDEEKKKSRAERFGLASSSSSDEEAKKKARLERFGQGTNVDKAEEEKRKARAARFAETSSGSPRENGKXNSKPDAATVTGTA

SEQ ID NO: 127090 - protein, 133 aa, Setaria italica
  misc_feature (46)..(46): Xaa can be any naturally occurring amino acid
  misc_feature (80)..(80): Xaa can be any naturally occurring amino acid
  misc_feature (106)..(106): Xaa can be any naturally occurring amino acid
  misc_feature (113)..(113): Xaa can be any naturally occurring amino acid
  misc_feature (115)..(115): Xaa can be any naturally occurring amino acid
  Transcript Sequence Number=SeqID_61116
  Gene Ontology: Mol. function=metal ion binding; Cellular component =integral to membrane
  Homolog annotation: Hit_ID=Q52T38; Match level="QueryCoverage=95%, HitCoverage=24%, E-value=6e-36, Identity=46%"; Hit description=S -acyltransferase TIP1
  Pfam annotation: Domain name=zf-DHHC; Domain location=28-83; Score =44.2; E_value=5.1e-10; Accession=PF01529.12; Description=DHHC zinc finger domain
VNNTSKNVRDSQNQRDDEPLLKRDLDNLELLDGNWSQLCITCKYQXIVRPVRSKHCSTCDRCVEQFDHHCPWVSNCIGKXSVGDPASPASFGGWLGYTAINHSWVXSFVIMDXFXFFGIITLTVIQASQISRN

SEQ ID NO: 127091 - protein, 70 aa, Setaria italica
  Transcript Sequence Number=SeqID_61117
  Gene Ontology: Mol. function=binding
  Homolog annotation: Hit_ID=B4FQN7; Match level="QueryCoverage=91%, HitCoverage=14%, E-value=1e-27, Identity=92%"; Hit description =Interferon-related developmental regulator family protein
WSDASKMISALDCLAVITFVGATDLAETELALKAMWDVIHPKSGSNVGTVRKPKPPVLAAAISAIGTFTT

SEQ ID NO: 127092 - protein, 81 aa, Setaria italica
  misc_feature (75)..(75): Xaa can be any naturally occurring amino acid
  Transcript Sequence Number=SeqID_61118
LFSKLVINLFGHEHNWSVPQWPQKRYHSKGRTARAVFCLLTLLELSMWTAPPESENLQPNNIVFPPFIINLFYFXFNFNHL

SEQ ID NO: 127093 - protein, 125 aa, Setaria italica
  misc_feature (90)..(90): Xaa can be any naturally occurring amino acid
  Transcript Sequence Number=SeqID_61119
GLFVLFTKGYLVFYYYLNGFYFVVFELTDGQSQLMIVCDKYQIWLRGIVTHNGSRYELDMPGPKAMVGSESLHTTGSYPNLIGDSVHTCXIGFQSLLNAFHILVAYGGNTKKAQGCNCVILVMFF

SEQ ID NO: 127094 - protein, 125 aa, Setaria italica
  misc_feature (11)..(11): Xaa can be any naturally occurring amino acid
  Transcript Sequence Number=SeqID_61120
  Gene Ontology: Mol. function=protein binding; Biological process =ubiquitin-dependent protein catabolic process
  Homolog annotation: Hit_ID=B6SWY8; Match level="QueryCoverage=96%, HitCoverage=36%, E-value=9e-23, Identity=54%"; Hit description=ASK20
KDERSLDELLXFINGDGGLGRKAAKSKKKNKRRKDQAKNPARANSEPVNKEGAGCVVSRKADSGNISELPCQSQDLQDDIEYPFDDADLDDGLDPAMREEIDREVADFAMKLNLVWPESSCLFGS

SEQ ID NO: 127095 - protein, 49 aa, Setaria italica
  Transcript Sequence Number=SeqID_61121
  Gene Ontology: Mol. function=protein binding; Biological process =ubiquitin-dependent protein catabolic process
  Homolog annotation: Hit_ID=B6SWY8; Match level="QueryCoverage=100%, HitCoverage=11%, E-value=1e-11, Identity=73%"; Hit description=ASK20
EELDREVEDFARRLNSVWPERMHLGQDRRIESHIGGNGSLQRFPGFNHR

SEQ ID NO: 127096 - protein, 72 aa, Setaria italica
  misc_feature (32)..(32): Xaa can be any naturally occurring amino acid
  Transcript Sequence Number=SeqID_61122
  Gene Ontology: Mol. function=protein binding; Biological process =ubiquitin-dependent protein catabolic process
  Homolog annotation: Hit_ID=B6SWY8; Match level="QueryCoverage=69%, HitCoverage=14%, E-value=2e-16, Identity=90%"; Hit description=ASK20
SINTLPFHCRIKSIIKISIIKGVLDIFHLPDXDLTEEEKLEPLKNINDDPTIRLLNRLYAKKRKELQERQKL

SEQ ID NO: 127097 - protein, 63 aa, Setaria italica
  Transcript Sequence Number=SeqID_61123
NGGNKNRYGGSGGGSDGPEDESFKDSLYEMIQIPDSNYCLHNCGNFITSFSLHCSLFWNCYIL

SEQ ID NO: 127098 - protein, 140 aa, Setaria italica
  misc_feature (129)..(129): Xaa can be any naturally occurring amino acid
  Transcript Sequence Number=SeqID_61124
  Homolog annotation: Hit_ID=Q656P7; Match level="QueryCoverage=87%, HitCoverage=23%, E-value=1e-54, Identity=82%"; Hit description=Root hair defective 3 GTP-binding protein-like
FVFLGFYFTDLELLEVILRSSFDKALTKEGFAVAARDCTQTFLEKFDKGSEDAAIQQVKWDPSKVKDKLKRDIESHVASVRAAKLSDLCAKYEAQLTKALAEPVEALLDSASEDTWPAIRKLLQRETKXAISGLESTLSV

SEQ ID NO: 127099 - protein, 96 aa, Setaria italica
  misc_feature (38)..(38): Xaa can be any naturally occurring amino acid
  misc_feature (77)..(77): Xaa can be any naturally occurring amino acid
  Transcript Sequence Number=SeqID_61125
  Homolog annotation: Hit_ID=Q656P7; Match level="QueryCoverage=97%, HitCoverage=18%, E-value=1e-33, Identity=83%"; Hit description=Root hair defective 3 GTP-binding protein-like
VGKAIWVQLDIAAEFQNGFLPALLSLSTKFVPTIMNIXLKRLADEGQRPAAPERQREMELQPTNVSSHSNVTSAGSXSVTRTENGPEYSSPVANDL

SEQ ID NO: 127100 - protein, 94 aa, Setaria italica
  Transcript Sequence Number=SeqID_61126
  Homolog annotation: Hit_ID=B6U4D9; Match level="QueryCoverage=69%, HitCoverage=8%, E-value=6e-26, Identity=89%"; Hit description =Protein SEY1
YKKLRKRTNNLESKLLQLVNPAYQSLLNHLRTRTLEAFKESFDKALEKEGFAAAARDCTQTFLEKFDKGSEGMFSETLVITCFLSWLVLHFCRN

SEQ ID NO: 127101 - protein, 86 aa, Setaria italica
  misc_feature (74)..(74): Xaa can be any naturally occurring amino acid
  Transcript Sequence Number=SeqID_61127
  Homolog annotation: Hit_ID=Q656P7; Match level="QueryCoverage=100%, HitCoverage=16%, E-value=2e-38, Identity=88%"; Hit description=Root hair defective 3 GTP-binding protein-like
QLESKLLQLVNPAYQSLLGHLRTRTLEVFKESFDKALTKEGFAVAARDCTQTFLEKFDKGSEDAAIQQVKWDPXKVKDKLKRDIES

SEQ ID NO: 127102 - protein, 104 aa, Setaria italica
  misc_feature (87)..(87): Xaa can be any naturally occurring amino acid
  misc_feature (94)..(94): Xaa can be any naturally occurring amino acid
  Transcript Sequence Number=SeqID_61128
  Homolog annotation: Hit_ID=B6U4D9; Match level="QueryCoverage=99%, HitCoverage=12%, E-value=1e-51, Identity=92%"; Hit description =Protein SEY1
VFSFSSQQFWKVIKENKDLDLPAHKVMVATVRCEEIGNEKVASFTADEEWQQFEEAVQHDYVPGFGKKLSSLLDRCLSEYDMEAIYXDEGVRTXKRQQLESKLL

SEQ ID NO: 127103 - protein, 113 aa, Setaria italica
  Transcript Sequence Number=SeqID_61129
  Gene Ontology: Mol. function=catalytic activity; Biological process =cellular metabolic process
  Homolog annotation: Hit_ID=B6TDM4; Match level="QueryCoverage=62%, HitCoverage=21%, E-value=1e-25, Identity=76%"; Hit description =Dihydroflavonol-4-reductase
CIHTVFYEIRGTLLKQSNTFLPAGCTEEYADFFMGPVHVEDVALAHILVFENPSASGRHICVESISHWSDFAAKVAELYPNLNVPKYATIQIPSHTFFFSFHVGLWDSGRAIS

SEQ ID NO: 127104 - protein, 90 aa, Setaria italica
  Transcript Sequence Number=SeqID_61130
  Gene Ontology: Mol. function=catalytic activity; Biological process =cellular metabolic process
  Homolog annotation: Hit_ID=B6TDM4; Match level="QueryCoverage=85%, HitCoverage=23%, E-value=1e-27, Identity=77%"; Hit description =Dihydroflavonol-4-reductase
RKEKPKITKTYREGQQSASSPISHWSDFAAKVAELYPNLNVPKLPEDTQPGLVRAEVGSKKLIALGLQISPVEKIIRDAVESLKSRGYIS

SEQ ID NO: 127105 - protein, 61 aa, Setaria italica
  Transcript Sequence Number=SeqID_61131
  Homolog annotation: Hit_ID=B6TDM4; Match level="QueryCoverage=54%, HitCoverage=10%, E-value=1e-09, Identity=90%"; Hit description =Dihydroflavonol-4-reductase
TLAEKAAWKFAEEEGLDVVVVNPGTVLGPMIPPTINASMAMFRRLLEVNGTINLSCLGRSF

SEQ ID NO: 127106 - protein, 46 aa, Setaria italica
  Transcript Sequence Number=SeqID_61132
  Gene Ontology: Mol. function=catalytic activity; Biological process =cellular metabolic process
  Homolog annotation: Hit_ID=C3VPA5; Match level="QueryCoverage=93%, HitCoverage=13%, E-value=1e-14, Identity=79%"; Hit description =Cinnamoyl-CoA reductase
MTCCTEEYADFFMGPVHVEDVALAHILVFENPSASGRHICVESISH

SEQ ID NO: 127107 - protein, 43 aa, Setaria italica
  misc_feature (8)..(8): Xaa can be any naturally occurring amino acid
  Transcript Sequence Number=SeqID_61133
  Gene Ontology: Mol. function=cyclin-dependent protein kinase inhibitor activity; Cellular component=nucleus; Biological process =cell cycle arrest
  Homolog annotation: Hit_ID=Q52PU9; Match level="QueryCoverage=100%, HitCoverage=22%, E-value=1e-13, Identity=76%"; Hit description =Cyclin-dependent kinase inhibitor 1
  Pfam annotation: Domain name=CDI; Domain location=1-43; Score=73.5; E_ value=7.9e-19; Accession=PF02234.11; Description=Cyclin-dependent kinase inhibitor
SKELNEFXGAAERRQQQAFIDKYNFDPVNDCPLPGRYEWVKLD

SEQ ID NO: 127108 - protein, 79 aa, Setaria italica
  misc_feature (1)..(1): Xaa can be any naturally occurring amino acid
  Transcript Sequence Number=SeqID_61134
XFAGPQMVLMCTCINVFLDYYILEFLFVCEIPFDITLELEIMLLCMELSQDFHVYDDLVGCRSTRETTPCSLINSETIS

SEQ ID NO: 127109 - protein, 83 aa, Setaria italica
  misc_feature (41)..(41): Xaa can be any naturally occurring amino acid
  Transcript Sequence Number=SeqID_61135
  Subcellular localization annotation: CTP_CleavageSite=33; ConfidenceScore=5.19e-01
PPRTPTPTGTRAPHNPPPSRLRIRSPPEELGIPQAARPPPXPTRHPPFSARQSPPPPPPKSQPRAAAHHAPPPSSNETKRNKG

SEQ ID NO: 127110 - protein, 82 aa, Setaria italica
  Transcript Sequence Number=SeqID_61136
  Subcellular localization annotation: CTP_CleavageSite=35; ConfidenceScore=5.65e-01
SSQPAAEQAPHSIPSRGARNPPSSSAASNPTRHPPFSARQSPPPPPESIASDKQEQQINPRNRTRNVNLQNRSRELPLTMLP

SEQ ID NO: 127111 - protein, 75 aa, Setaria italica
  Transcript Sequence Number=SeqID_61137
LTAYVIIASRVDATIKLTTWHPAITLVPQYGWLTNHYASDPVITRLYSIIEPHQKGFTIQCAIGISYMVSESSLL

SEQ ID NO: 127112 - protein, 56 aa, Setaria italica
  Transcript Sequence Number=SeqID_61138
  Gene Ontology: Mol. function=nucleic acid binding; Cellular component= ribonucleoprotein complex; Biological process=nuclear mRNA splicing, via spliceosome
  Homolog annotation: Hit_ID=B9SCZ8; Match level="QueryCoverage=92%, HitCoverage=53%, E-value=2e-18, Identity=88%"; Hit description=Lsm1, putative
  Pfam annotation: Domain name=LSM; Domain location=6-56; Score=34.9; E_ value=3.3e-07; Accession=PF01423.14; Description=LSM domain
MASGGPALESLVNQVISVITNDGRNIVGTLRGFDQATNIILDESHERVYSTKEGSS

SEQ ID NO: 127113 - protein, 110 aa, Setaria italica
  misc_feature (65)..(65): Xaa can be any naturally occurring amino acid
  Transcript Sequence Number=SeqID_61139
EFTVSSLEETLIEVNLILDILFLAFYDNFSRCNGGLWISLCSLFKDILCGSYDVGKFAVSVEAKXSFHYAKAQLLLILIETLDFENLLRMIRDEVPLRSHLLSYFNLWLI

SEQ ID NO: 127114 - protein, 83 aa, Setaria italica
  Transcript Sequence Number=SeqID_61140
  Gene Ontology: Mol. function=hydrolase activity; Cellular component =chromosome
  Homolog annotation: Hit_ID=B6UAQ8; Match level="QueryCoverage=87%, HitCoverage=20%, E-value=3e-30, Identity=88%"; Hit description =Meiotic recombination protein SPO11
  Pfam annotation: Domain name=TP6A_N; Domain location=2-59; Score =23.6; E_value=5.2e-06; Accession=PF04406.6; Description=Type IIB DNA topoisomerase
RSWEMCYKILGRELVHQRELFYKLLSDSPKYFSCQRHVNRAIQDVVSLLRCTRQSLGVMASSRGALIGRLVLHVCSMIYLNMS

SEQ ID NO: 127115 - protein, 83 aa, Setaria italica
  Transcript Sequence Number=SeqID_61141
RGRGGGLLGGEMDAAATTAVACQHLRTERGGLPKISSQTHRHSNSKISSVGVEISSTTDSRAASIESPTYSREGACGGSVATD

SEQ ID NO: 127116 - protein, 69 aa, Setaria italica
  misc_feature (5)..(5): Xaa can be any naturally occurring amino acid
  Transcript Sequence Number=SeqID_61142
RCWQXPQDLITTHRHSNSKISSVGVEISSTTDISSVGVEISSTTDSRAASIESPTYSREGACGGSVATD

SEQ ID NO: 127117 - protein, 89 aa, Setaria italica
  misc_feature (75)..(75): Xaa can be any naturally occurring amino acid
  Transcript Sequence Number=SeqID_61143
  Subcellular localization annotation: CTP_CleavageSite=19; ConfidenceScore=5.04e-01
VVFLVFLFLSVCSCAGRSAASNRAHRHAGRTCKLQQRAGRQLLGGPAQHATPSGPVQHGPEQVQLAQELAAAKQXLVAPGNKVEQQPSL

SEQ ID NO: 127118 - protein, 69 aa, Setaria italica
  Transcript Sequence Number=SeqID_61144
  Gene Ontology: Cellular component=cell wall
  Pfam annotation: Domain name=PAE; Domain location=1-69; Score=-200.1; E_value=0.0024; Accession=PF03283.5; Description=Pectinacetylesterase
SNDKSQNPDFYNWNKVKIRYCDGASFSGNVKDELQNGTRFFFRGQRIWEAVMNELVFKGLRNAKQAFLT

SEQ ID NO: 127119 - protein, 71 aa, Setaria italica
  Transcript Sequence Number=SeqID_61145
  Gene Ontology: Mol. function=DNA-directed RNA polymerase activity; Cellular component=membrane fraction; Biological process=negative regulation of transport
  Homolog annotation: Hit_ID=B6T950; Match level="QueryCoverage=98%, HitCoverage=25%, E-value=2e-31, Identity=97%"; Hit description =Ischemia/reperfusion inducible protein
PLAICVADVSDISRFALVDHLPHGLLDSLLPGPVTVVLKRGENSILERSLNPGLDSIGVRVPDLDFIRSIA

SEQ ID NO: 127120 - protein, 70 aa, Setaria italica
  misc_feature (28)..(28): Xaa can be any naturally occurring amino acid
  Transcript Sequence Number=SeqID_61146
  Gene Ontology: Mol. function=nucleoside-triphosphatase activity; Cellular component=membrane; Biological process=transport
  Homolog annotation: Hit_ID=Q6EQ64; Match level="QueryCoverage=100%, HitCoverage=11%, E-value=3e-29, Identity=82%"; Hit description=PDR -type ABC transporter-like
VGLTPNYNVSSVASTAFYAIWNLFSGFXIPRTRIPVWWRWFYWICPIAWTLNGLVTSQFGDVTMEFTNGV

SEQ ID NO: 127121 - protein, 117 aa, Setaria italica
  Transcript Sequence Number=SeqID_61147
  Gene Ontology: Mol. function=ion channel activity; Cellular component= integral to membrane; Biological process=ion transport
  Homolog annotation: Hit_ID=Q9LD37; Match level="QueryCoverage=89%, HitCoverage=13%, E-value=1e-33, Identity=62%"; Hit description =Probable cyclic nucleotide-gated ion channel 20, chloroplastic
RRAERFTWAATQGVNEEELLSNLPEDIQRDIRRHFFRFLNKVRLFTLMDWPILDAICDKLRQNLYISGSDILYQGGPVDKMVFIVRGKLESVSADGSKAPLHDGECNSRKKEDYLQQ

SEQ ID NO: 127122 - protein, 114 aa, Setaria italica
  misc_feature (107)..(107): Xaa can be any naturally occurring amino acid
  Transcript Sequence Number=SeqID_61148
  Gene Ontology: Mol. function=ion channel activity; Cellular component= integral to membrane; Biological process=ion transport
  Homolog annotation: Hit_ID=Q7X9R7; Match level="QueryCoverage=86%, HitCoverage=54%, E-value=5e-45, Identity=85%"; Hit description =Putative cyclic nucleotide and calmodulin-regulated ion channel protein (Fragment)
ASKIGQSIKVNNRTLLRQNLYISGSDILYQGGPVDKMVFIVRGKLESVSADGSKAPLHDGDVCGEELLTWYLENSSVNRDAGKIKFQGMRLVAIRTVTCSTNVEAFXLRASDLE

SEQ ID NO: 127123 - protein, 57 aa, Setaria italica
  Transcript Sequence Number=SeqID_61149
  Gene Ontology: Mol. function=ion channel activity; Cellular component= integral to membrane; Biological process=ion transport
  Homolog annotation: Hit_ID=B9SF64; Match level="QueryCoverage=96%, HitCoverage=7%, E-value=3e-11, Identity=65%"; Hit description=Cyclic nucleotide-gated ion channel, putative
FQQISTLAGNLVPSYFAWEVLFTMAIIGLGLLLFALLIGNMQNFLQALGRRRLEMLT

SEQ ID NO: 127124 - protein, 143 aa, Setaria italica
  misc_feature (73)..(73): Xaa can be any naturally occurring amino acid
  Transcript Sequence Number=SeqID_61150
WKGHTSLIPAFIGIMENNDAHHNVIRTIGYISSHQSQKIPELSSEYPGRFPERQEASGSENDPYKVFKLPARXKNTEDHKEVPPVNIEVHNDMATHASNLAYKEPSRTQKCYDSREDSKNVIPLSQQESACSGQDKTQKLLRK

SEQ ID NO: 127125 - protein, 118 aa, Setaria italica
  misc_feature (34)..(34): Xaa can be any naturally occurring amino acid
  misc_feature (45)..(45): Xaa can be any naturally occurring amino acid
  Transcript Sequence Number=SeqID_61151
QESTEMNMIWKFNSKLSSPEVGIVQPRDFSSEFXEVNNTSVDSPXWKGTPASYQPSFGIMENNDAHHNVIRTIGYISSHQSQKIPELSSEYPGRFPERQEASGSENDPYKVFKLPDKE

SEQ ID NO: 127126 - protein, 57 aa, Setaria italica
  Transcript Sequence Number=SeqID_61152
VFCVAIKGYYQGPYQGPPVMAPPQYAAAPPRREPSFLEGWYARPNLCPFCSCDSFYF

SEQ ID NO: 127127 - protein, 65 aa, Setaria italica
  Transcript Sequence Number=SeqID_61153
  Gene Ontology: Mol. function=farnesyl-diphosphate farnesyltransferase activity; Cellular component=integral to membrane; Biological process= lipid biosynthetic process
  Homolog annotation: Hit_ID=Q6SYC8; Match level="QueryCoverage=93%, HitCoverage=14%, E-value=2e-23, Identity=81%"; Hit description =Squalene synthase
TILEDINEIPRSRMFWPREIWSKYADKLEDFKYEENSEKAVQCLNDLVTNALIHTEGSLQHESMH

SEQ ID NO: 127128 - protein, 68 aa, Setaria italica
  misc_feature (17)..(17): Xaa can be any naturally occurring amino acid
  misc_feature (20)..(20): Xaa can be any naturally occurring amino acid
  Transcript Sequence Number=SeqID_61154
  Gene Ontology: Mol. function=farnesyl-diphosphate farnesyltransferase activity; Cellular component=integral to membrane; Biological process= lipid biosynthetic process
LLLESKIDDNDPNAALXRKXVDSIKQTCKSSGLLKRRGYHLDKSPYKPMLIMIVLLLLAIIFGVLYTK

SEQ ID NO: 127129 - protein, 34 aa, Setaria italica
  Transcript Sequence Number=SeqID_61155
GTINLPFSFQIMAIGTCAFCYNNVNVFRGVVKMR

SEQ ID NO: 127130 - protein, 76 aa, Setaria italica
  Transcript Sequence Number=SeqID_61156
  Gene Ontology: Mol. function=hydrolase activity, hydrolyzing O -glycosyl compounds; Biological process=carbohydrate metabolic process
  Homolog annotation: Hit_ID=Q43763; Match level="QueryCoverage=78%, HitCoverage=7%, E-value=2e-14, Identity=67%"; Hit description=Alpha -glucosidase
NTVFLTFYCFVCLAGGSLETDSRLHVRITDAEHPRWEVPQDIIPRKAPRDIVLDASTGASPRSRVLSAATSDLTFT

SEQ ID NO: 127131 - protein, 35 aa, Setaria italica
  Transcript Sequence Number=SeqID_61157
LYASWLSLPSTKVRIIYEKTVLSACHRMAYVWFIS

SEQ ID NO: 127132 - protein, 41 aa, Setaria italica
  Transcript Sequence Number=SeqID_61158
TRHMPFCDRQIKLFSHNYNPNLRVCMFNNKKNENISVSHPA

SEQ ID NO: 127133 - protein, 54 aa, Setaria italica
  Transcript Sequence Number=SeqID_61159
  Gene Ontology: Mol. function=violaxanthin de-epoxidase activity; Cellular component=chloroplast; Biological process=transport
  Homolog annotation: Hit_ID=Q9AU61; Match level="QueryCoverage=100%, HitCoverage=11%, E-value=7e-24, Identity=98%"; Hit description =Violaxanthin de-epoxidase
AANVACLNTCNNRPDETECQIKCGDLFENSVVDEFNECAVSRKKCVPRKSDVGE

SEQ ID NO: 127134 - protein, 84 aa, Setaria italica
  Transcript Sequence Number=SeqID_61160
  Gene Ontology: Mol. function=pyruvate kinase activity; Cellular component=cytoplasm; Biological process=glycolysis
  Homolog annotation: Hit_ID=Q5F2M7; Match level="QueryCoverage=100%, HitCoverage=16%, E-value=3e-27, Identity=71%"; Hit description =Pyruvate kinase
  Pfam annotation: Domain name=PK_C; Domain location=12-84; Score=32.8; E_value=6.8e-08; Accession=PF02887.8; Description=Pyruvate kinase, alphabeta domain
  Subcellular localization annotation: CTP_CleavageSite=44; ConfidenceScore=5.17e-01
MMQGSPTGSLELESLASSAVRTANSARAVLILVLTRGGTTARLVAKYRPSMPILSVVVPELKTDSFDWTCSDEGPARQSLIVRG

SEQ ID NO: 127135 - protein, 51 aa, Setaria italica
  Transcript Sequence Number=SeqID_61161
RSLQFKSLVLFSYVKIDPTAGSLVGTAGLLVPNDTWNSYLRCPKFAYCKLI

SEQ ID NO: 127136 - protein, 34 aa, Setaria italica
  Transcript Sequence Number=SeqID_61162
YRYTVCLMILLPHTTLSSTLYIYIIGAMHNQNRQ

SEQ ID NO: 127137 - protein, 45 aa, Setaria italica
  Transcript Sequence Number=SeqID_61163
TRPHHAIVCNIKINGKESPKLACKLFTFHLFYIAYKTTSCYCTRI

SEQ ID NO: 127138 - protein, 83 aa, Setaria italica
  misc_feature (54)..(54): Xaa can be any naturally occurring amino acid
  Transcript Sequence Number=SeqID_61164
  Gene Ontology: Mol. function=nucleotide binding; Cellular component =myosin complex; Biological process=signal transduction
  Homolog annotation: Hit_ID=Q9XEI4; Match level="QueryCoverage=78%, HitCoverage=4%, E-value=1e-14, Identity=60%"; Hit description =Unconventional myosin heavy chain
TSHSSLAKGHLNGMGQQNQLTHWLGIVKILTSYLDVLKANHVPSILVHKLFTQXIFSLIDVQLFNPETGRNWLHIPSCIGYHS

SEQ ID NO: 127139 - protein, 79 aa, Setaria italica
  Transcript Sequence Number=SeqID_61165
  Gene Ontology: Mol. function=nucleotide binding; Cellular component =myosin complex
  Homolog annotation: Hit_ID=Q6L5H7; Match level="QueryCoverage=72%, HitCoverage=2%, E-value=2e-12, Identity=61%"; Hit description =Putative myosin heavy chain
FCSSPIFRLRVSLLFHDTITRLEQEATAKEALLLTEKQAHEATRKTLSEVQERNEELLKNIHDNDKHILQLQFPQRLCI

SEQ ID NO: 127140 - protein, 57 aa, Setaria italica
  Transcript Sequence Number=SeqID_61166
YIALCKKHALLYSSTKSGQTYSMVHGTPREPQLVHTYHDEQLLLVVKTFLVHQKTLL

SEQ ID NO: 127141 - protein, 112 aa, Setaria italica
  misc_feature (37)..(37): Xaa can be any naturally occurring amino acid
  misc_feature (40)..(40): Xaa can be any naturally occurring amino acid
  Transcript Sequence Number=SeqID_61167
  Gene Ontology: Mol. function=protein binding; Cellular component =cytoplasmic vesicle; Biological process=ubiquitin-dependent protein catabolic process
  Homolog annotation: Hit_ID=Q69RC4; Match level="QueryCoverage=95%, HitCoverage=89%, E-value=6e-50, Identity=90%"; Hit description =Autophagy-related protein 8A
  Pfam annotation: Domain name=MAP1_LC3; Domain location=5-108; Score =263.3; E_value=5.7e-76; Accession=PF02991.8; Description=Microtubule associated protein 1A1B, light chain 3
ARTEKRLSESARIRDKYPDRIPVIVEKAGKTDVPEIXKKXYLVPADLTVGQFIFVVRKRIKLSPEKAIFVFVKNTLPPTASLMSAIYEENKDEDGFLYMTYSGENTFGSALS

SEQ ID NO: 127142 - protein, 73 aa, Setaria italica
  Transcript Sequence Number=SeqID_61168
  Subcellular localization annotation: CTP_CleavageSite=57; ConfidenceScore=5.51e-01
APLLLPPIDLPARFRQPLDPIGSPDRRTRRALQSVSPSIAFPQRNRRNSGGFSGFLFSSSVQSLLRFLDRFDL

SEQ ID NO: 127143 - protein, 62 aa, Setaria italica
  Transcript Sequence Number=SeqID_61169
TIEAIRQRSRDDVYVHHVYDGKKQQPGQACLFTVAGGSCLGRAEGVLATVSHVEEAVLVRDL

SEQ ID NO: 127144 - protein, 44 aa, Setaria italica
  Transcript Sequence Number=SeqID_61170
  Gene Ontology: Mol. function=protein binding; Cellular component =cytoplasmic vesicle; Biological process=ubiquitin-dependent protein catabolic process
  Homolog annotation: Hit_ID=Q69RC4; Match level="QueryCoverage=95%, HitCoverage=35%, E-value=3e-16, Identity=95%"; Hit description =Autophagy-related protein 8A
  Pfam annotation: Domain name=MAP1_LC3; Domain location=1-42; Score =5.5; E_value=3.6e-06; Accession=PF02991.8; Description=Microtubule associated protein 1A1B, light chain 3
GHLCFVKNTLPPTASLMSAIYEENKDEDGFLYMTYSGENTFGSA

SEQ ID NO: 127145 - protein, 65 aa, Setaria italica
  Transcript Sequence Number=SeqID_61171
  Homolog annotation: Hit_ID=B9RZY6; Match level="QueryCoverage=84%, HitCoverage=3%, E-value=1e-10, Identity=56%"; Hit description =Neurobeachin, putative
KHLLESSIFPPSIRSAYMFLAPLQVLCTSRERIKYAAKLASEGALKAMGEFAAEIIYKGLEYPSN

SEQ ID NO: 127146 - protein, 102 aa, Setaria italica
  misc_feature (66)..(66): Xaa can be any naturally occurring amino acid
  misc_feature (96)..(96): Xaa can be any naturally occurring amino acid
  Transcript Sequence Number=SeqID_61172
  Gene Ontology: Mol. function=anthranilate synthase activity; Biological process=glutamine metabolic process
  Homolog annotation: Hit_ID=B9HVR6; Match level="QueryCoverage=83%, HitCoverage=30%, E-value=1e-31, Identity=80%"; Hit description =Anthranilate synthase, beta subunit, ASB1
FLLIKKLYAACCLFYRISPRGILISPGPGTPQDSGISLQTVTELGPSIPLFGVCMGLQCIGEAFGXGKVVRSPYGVVHGKGSLVHYDEKLDGTLFXGLPTIP

SEQ ID NO: 127147 - protein, 88 aa, Setaria italica
  Transcript Sequence Number=SeqID_61173
QIIKDQKARSRRVTMYYKHTGFRIQTTCYINQKLSQHRTIQIAKLNFTRSKHLPVQRKGGQPYARADGYENLRTSTCSARLQLHTGFL

SEQ ID NO: 127148 - protein, 95 aa, Setaria italica
  misc_feature (7)..(7): Xaa can be any naturally occurring amino acid
  Transcript Sequence Number=SeqID_61174
  Gene Ontology: Mol. function=transferase activity
  Homolog annotation: Hit_ID=B6SUR9; Match level="QueryCoverage=96%, HitCoverage=40%, E-value=1e-30, Identity=66%"; Hit description =Glutathione S-transferase
YVDEAFXGPPLLPIDSYDRAMARFWADFMDNKLLKLFWLAHWTEGEVQKGITKEAKESLALLEDKLRGNRFFGGDTVSYLDLVYCWLAPWTTRRT

SEQ ID NO: 127149 - protein, 46 aa, Setaria italica
  Transcript Sequence Number=SeqID_61175
ILVPVCCITYASWLTLFMIGKGRLESYVSHQCTLSVNNLVHRIPMV

SEQ ID NO: 127150 - protein, 81 aa, Setaria italica
  Transcript Sequence Number=SeqID_61176
NRTLYHGFTFSFWTVESVQEFGHQTAGKFRCRSHGLWYMAGWSGNLVELSGSFLTLPGSSMAIAFLYHDLHPATNQRCPFS

SEQ ID NO: 127151 - protein, 75 aa, Setaria italica
  Transcript Sequence Number=SeqID_61177
  Gene Ontology: Mol. function=histone deacetylase activity; Cellular component=nucleus; Biological process=histone deacetylation
  Homolog annotation: Hit_ID=P56521; Match level="QueryCoverage=81%, HitCoverage=11%, E-value=7e-29, Identity=100%"; Hit description =Probable histone deacetylase 19
LSPVCLAYPCCVSQTTDRVMTVSFHKFGDYFPGTGDIRDIGHSKGKYYSLNVPLDDGIDDESYQSLFKPIMGKVM

SEQ ID NO: 127152 - protein, 70 aa, Setaria italica
  Transcript Sequence Number=SeqID_61178
  Gene Ontology: Mol. function=histone deacetylase activity; Cellular component=nucleus; Biological process=histone deacetylation
  Homolog annotation: Hit_ID=P56521; Match level="QueryCoverage=95%, HitCoverage=13%, E-value=6e-24, Identity=85%"; Hit description =Probable histone deacetylase 19
VGIDHKAVEESTRRSNILGIRVKREFGESDTKVQDGGRVTSEHRGLEPMAEDIGSSKQAPADANAMAIDE

SEQ ID NO: 127153 - protein, 90 aa, Setaria italica
  misc_feature (71)..(71): Xaa can be any naturally occurring amino acid
  Transcript Sequence Number=SeqID_61179
  Gene Ontology: Mol. function=oxidoreductase activity; Biological process=metabolic process
  Homolog annotation: Hit_ID=B6SZZ4; Match level="QueryCoverage=100%, HitCoverage=21%, E-value=3e-41, Identity=85%"; Hit description =Monooxygenase
QPAARGFAHYPDGHGFEPEFLQFIGHGFRSGMLPCNETDIYWFFTWTRSEHDKGVDESAAKMKQFVLDKLXGSKVPEEALAVIDRSEMSD

SEQ ID NO: 127154 - protein, 109 aa, Setaria italica
  Transcript Sequence Number=SeqID_61180
  Gene Ontology: Mol. function=oxidoreductase activity; Biological process=metabolic process
  Homolog annotation: Hit_ID=B6SZZ4; Match level="QueryCoverage=99%, HitCoverage=25%, E-value=1e-37, Identity=76%"; Hit description =Monooxygenase
SCTCTILTWFLSTLVLRFRNTIKGVDESAAKMKQFVLDKLRGSKVPEEALAVIDRSEMSDVLAAPLRFRPPLSLVTASISRGNVCVAGDALHPMTPDLGQGGCSALEDG

SEQ ID NO: 127155 - protein, 73 aa, Setaria italica
  Transcript Sequence Number=SeqID_61181
LDDLDIRLTLLLLATSMATASAYFLYILSTKFVGLSCSYCLLSAFLSFSLLFIRVKVCAHKEKVCFSFEPLTM

SEQ ID NO: 127156 - protein, 158 aa, Setaria italica
  Transcript Sequence Number=SeqID_61182
  Gene Ontology: Mol. function=protein dimerization activity; Cellular component=nucleus; Biological process=regulation of transcription, DNA-dependent
  Homolog annotation: Hit_ID=Q0J951; Match level="QueryCoverage=79%, HitCoverage=15%, E-value=6e-66, Identity=93%"; Hit description=Auxin response factor 12
  Pfam annotation: Domain name=Auxin_resp; Domain location=9-63; Score=- 12.1; E_value=0.0035; Accession=PF06507.5; Description=Auxin response factor
CDSGCCLRLRNLVSAGTWVCITYFCYRPHVPAETRFLRYMGTITEVSDADPVRWPSSYWRSVKVGWDESTAGERPPRVSLWEIEPLTTFPMYPSLFPLRVKHPWYSGVAALHDDSNALMWLRGVAGEGGFQSFNFQSPVIGSWGQQRLHPSLLSNDHD

SEQ ID NO: 127157 - protein, 77 aa, Setaria italica
  misc_feature (63)..(63): Xaa can be any naturally occurring amino acid
  Transcript Sequence Number=SeqID_61183
  Gene Ontology: Mol. function=protein dimerization activity; Cellular component=nucleus; Biological process=regulation of transcription, DNA-dependent
  Homolog annotation: Hit_ID=Q0J951; Match level="QueryCoverage=100%, HitCoverage=9%, E-value=5e-37, Identity=96%"; Hit description=Auxin response factor 12
DGHIPNYPNLPPQLICQLHDVTMHADVETDEVYAQMTLQPLNPQEQNDAYLPAEMGIMSKQPXTNYFCKTLTASDTS

SEQ ID NO: 127158 - protein, 100 aa, Setaria italica
  misc_feature (36)..(36): Xaa can be any naturally occurring amino acid
  Transcript Sequence Number=SeqID_61184
SPSAIQQQLHQLQQMQHAHNDQKQKIQPDQPYQVPXHFISSSSNENMLESNFLQGSSKCVDLSRFNQPTVSEQQQQQQAWKQKFMGSQSMSFGGFGFVFN

SEQ ID NO: 127159 - protein, 111 aa, Setaria italica
  misc_feature (65)..(65): Xaa can be any naturally occurring amino acid
  Transcript Sequence Number=SeqID_61185
  Gene Ontology: Mol. function=electron carrier activity; Biological process=chromatin modification
  Homolog annotation: Hit_ID=Q336Y0; Match level="QueryCoverage=68%, HitCoverage=4%, E-value=1e-33, Identity=88%"; Hit description=Amine oxidase, flavin-containing family protein, expressed
VLLFRVIFFLVTLYSGLSILVCCTKFGVLCIPILVSRLLYSYVAVGASGRDYDILGRPVANCLFXAGEATCKEHPDTVGGAILSGLREAVRIIDLVNTGNDYIAEVEALQT

SEQ ID NO: 127160 - protein, 114 aa, Setaria italica
  misc_feature (2)..(2): Xaa can be any naturally occurring amino acid
  Transcript Sequence Number=SeqID_61186
  Gene Ontology: Mol. function=hydrolase activity
  Homolog annotation: Hit_ID=B6TC35; Match level="QueryCoverage=92%, HitCoverage=30%, E-value=2e-42, Identity=82%"; Hit description =Tartrate-resistant acid phosphatase type 5
NXLKNLEYALTQSKAPWKIVVGHHPISSGCGHGNNTELEELLLPVIKAHGADMYVNGHDHCLQRITSRDSPLQFLTSGGGSKAWAGKFKATPDKVEFLYDGQGFIVRIVGLSKV

SEQ ID NO: 127161 - protein, 36 aa, Setaria italica
  Transcript Sequence Number=SeqID_61187
NTELEELLLPAHGADMYVNGHDHCLQRITSRDSPSS

SEQ ID NO: 127162 - protein, 132 aa, Setaria italica
  misc_feature (59)..(59): Xaa can be any naturally occurring amino acid
  Transcript Sequence Number=SeqID_61188
  Gene Ontology: Mol. function=hydrolase activity
  Homolog annotation: Hit_ID=B6TC35; Match level="QueryCoverage=72%, HitCoverage=28%, E-value=3e-45, Identity=90%"; Hit description =Tartrate-resistant acid phosphatase type 5
LECHGLGLGIMLVALGAVVALLQVAAALPRLEHPPKADGSLAILVVGDWGRRGQFNQTXVAQQMGVVGEKMDIDFVISTGDNIYDDGIANTSDPLFKESFSNIYTAKGLQKPWYLVLGNHDYTGLIVVLSFP

SEQ ID NO: 127163 - protein, 63 aa, Setaria italica
  Transcript Sequence Number=SeqID_61189
TAALAHSQPPLEHPQGRACEQRAEHSTSREGKAMGEVSEDDGALRAPAGVTKDGVLMDFVLLC

SEQ ID NO: 127164 - protein, 43 aa, Setaria italica
  Transcript Sequence Number=SeqID_61190
SSIITAGEEDDDQQGEETMPLLVYVSREKRRASPHHFKAGALN

SEQ ID NO: 127165 - protein, 59 aa, Setaria italica
  Transcript Sequence Number=SeqID_61191
IHASHLHEAPKEAMGLNCSMFRHVKNQHHQGAPNVGHGETLADAYRLVADEAPDEDLPK

SEQ ID NO: 127166 - protein, 69 aa, Setaria italica
  Transcript Sequence Number=SeqID_61192
FIRLFFVIISVWYYITWYREKKCLEGQIGCVCRAVADELAVLNADDTEPCGVRCVPSAFRFSPASRRTG

SEQ ID NO: 127167 - protein, 111 aa, Setaria italica
  misc_feature (73)..(73): Xaa can be any naturally occurring amino acid
  Transcript Sequence Number=SeqID_61193
  Gene Ontology: Mol. function=calmodulin binding; Cellular component =integral to membrane; Biological process=response to biotic stimulus
  Homolog annotation: Hit_ID=B9R8R7; Match level="QueryCoverage=80%, HitCoverage=19%, E-value=7e-23, Identity=62%"; Hit description =Protein MLO, putative
SPIELLLISFVLIILLPGWHNLFWFSTIPLVVILAVGTKLQAIIAMMAVEITERHTVIQGMPVVKLSDDHFWXKPRLVLHLIHFASFQNAFEYYIISFGFWYNFGLGDPAS

SEQ ID NO: 127168 - protein, 119 aa, Setaria italica
  Transcript Sequence Number=SeqID_61194
  Subcellular localization annotation: CTP_CleavageSite=38; ConfidenceScore=5.37e-01
GYFPPGSVPLFSPFVKLNGFLRLPYWYFFVLLPLSRVRASASRAPGIATALSARDGMHQPWLRPCSSGGKPFREGERAAECGTARMGFSPVTSRTTGPRPSSRRRRCGLRPRSRASRAG

SEQ ID NO: 127169 - protein, 59 aa, Setaria italica
  Transcript Sequence Number=SeqID_61195
  Gene Ontology: Mol. function=starch synthase activity; Cellular component=chloroplast; Biological process=glucan biosynthetic process
  Homolog annotation: Hit_ID=B2Z9Y2; Match level="QueryCoverage=88%, HitCoverage=4%, E-value=1e-24, Identity=92%"; Hit description=Starch synthase IIIb
TIILWQNHLNLVKDLHYQQSFAWGGTEIKVWFGKVEDLPVYFLEPQNGMFWVGCVYGKN

SEQ ID NO: 127170 - protein, 77 aa, Setaria italica
  Transcript Sequence Number=SeqID_61196
PQLLIPLVHGHQQLGSTTEEHDSSIVDEPPKGRPFAEAVVGYPVKDAEEDQEQYEPEMQAPVEDDVDPEVLKRRLQE

SEQ ID NO: 127171 - protein, 44 aa, Setaria italica
  Transcript Sequence Number=SeqID_61197
  Gene Ontology: Mol. function=protein dimerization activity; Cellular component=nucleus; Biological process=regulation of transcription, DNA-dependent
  Homolog annotation: Hit_ID=Q0D9R7; Match level="QueryCoverage=100%, HitCoverage=3%, E-value=1e-17, Identity=90%"; Hit description=Auxin response factor 19
VYKRGAVGRSIDISHYSGYDELKHALARMFSIEGQLEEQQRIGW

SEQ ID NO: 127172 - protein, 36 aa, Setaria italica
  Transcript Sequence Number=SeqID_61198
LDMQQQLSNSQSLSQQQTIESLTAAAAYQESTFAAL

SEQ ID NO: 127173 - protein, 116 aa, Setaria italica
  Transcript Sequence Number=SeqID_61199
GLTVDEIRADPGKFEVQTTGSTTQAAGFEPLEAESTPKTAEARGKPSRSRRRVEGSDPQEGGEREAELYLLRLTSQPWPWRRKSEEAGPPWRMPDRRRQEAVHLGDDEAAGEAALN

SEQ ID NO: 127174 - protein, 97 aa, Setaria italica
  misc_feature (84)..(84): Xaa can be any naturally occurring amino acid
  Transcript Sequence Number=SeqID_61200
  Subcellular localization annotation: CTP_CleavageSite=17; ConfidenceScore=5.32e-01
SSASLSPPSCGRILPLVASICSVPPRLGRLRSRFGLQWFKSGCLCGGSGCLHLEFARVGSDFVHCQPLAIFRLRAALRQISSNXPHVLRRLSSSEPP

SEQ ID NO: 127175 - protein, 70 aa, Setaria italica
  Transcript Sequence Number=SeqID_61201
  Subcellular localization annotation: CTP_CleavageSite=29; ConfidenceScore=5.71e-01
INKLCFSFSPLLAGGSFHSSPRSARFPPRLGRLRSRFGLQWFKSGCLCGGSGCLHLRNFVPGSVFLYFRS

SEQ ID NO: 127176 - protein, 80 aa, Setaria italica
  Transcript Sequence Number=SeqID_61202
GRSVCLNFYVEEGGGGGVEREGGAGRSGVSEVGTTSICPLPLSLPQSRTPPGRRGSAGTDLIWRSEENRGKSLSREGDFR

SEQ ID NO: 127177 - protein, 115 aa, Setaria italica
  Transcript Sequence Number=SeqID_61203
  Gene Ontology: Mol. function=calcium ion binding; Biological process =embryonic development ending in birth or egg hatching
  Homolog annotation: Hit_ID=B6SKB5; Match level="QueryCoverage=66%, HitCoverage=14%, E-value=1e-34, Identity=92%"; Hit description=ATPase
MCCICVGNTPNYTVQVTDVADAMILNRLFRQLFSKGVILVSTSNRAPDKLYEGGLQRDLFLPFIDTLKERCIAHPIGSAVDYRQLGSVCDQFLLASSVSLVSSALFPFSYLFLLN

SEQ ID NO: 127178 - protein, 73 aa, Setaria italica
  Transcript Sequence Number=SeqID_61204
  Subcellular localization annotation: CTP_CleavageSite=20; ConfidenceScore=5.07e-01
HFMGHPPFGKILNTAYCTFTCFTVGKAELFCCLCKPSGANTRSFQMRQTVMLPLMLVQYQHHYLRLAMAAAAS

SEQ ID NO: 127179 - protein, 43 aa, Setaria italica
  Transcript Sequence Number=SeqID_61205
MRSVVRSLRQLRRFTQHHAESHSSTTRLIRQQNALIMCKFEQY

SEQ ID NO: 127180 - protein, 125 aa, Setaria italica
  misc_feature (6)..(6): Xaa can be any naturally occurring amino acid
  misc_feature (56)..(56): Xaa can be any naturally occurring amino acid
  Transcript Sequence Number=SeqID_61206
  Gene Ontology: Mol. function=calcium ion binding; Biological process =embryonic development ending in birth or egg hatching
  Homolog annotation: Hit_ID=B6SKB5; Match level="QueryCoverage=90%, HitCoverage=21%, E-value=1e-54, Identity=92%"; Hit description=ATPase
  Pfam annotation: Domain name=AFG1_ATPase; Domain location=1-125; Score=-161.1; E_value=0.00044; Accession=PF03969.8; Description=AFG1- like ATPase
NVHSRXQMHKGVSDPLDVVAAEISDEAIILCLDEFMVTDVADAMILNRLFSQLFSXGVILVSTSNRAPDKLYEGGLQRDLFLPFIDTLKERCIAHPIGSAVDYRQLGSVCDQFLLASSVNLVSSA

SEQ ID NO: 127181 - protein, 93 aa, Setaria italica
  Transcript Sequence Number=SeqID_61207
  Homolog annotation: Hit_ID=B6SKB5; Match level="QueryCoverage=83%, HitCoverage=15%, E-value=2e-29, Identity=80%"; Hit description=ATPase
EFTRKKLPVIDFSHCSLRFAYLQIMVISQVMYENKARLLCTAEAGPIELFENIVTVAEAHKVSPRSSRSQKSDDPDLCVDNELGFAKDRTISR

SEQ ID NO: 127182 - protein, 32 aa, Setaria italica
  Transcript Sequence Number=SeqID_61208
HKWQHHSLPLMLVQHQHHYLRLAMVAAAVEAT

SEQ ID NO: 127183 - protein, 39 aa, Setaria italica
  Transcript Sequence Number=SeqID_61209
APMSQSQNVTVVVENPMTVDDKGKLVSNVVVGVTTGGKK

SEQ ID NO: 127184 - protein, 95 aa, Setaria italica
  Transcript Sequence Number=SeqID_61210
MCSNLFSEDLVEKVFNVDNGKYTYNHYALALVAHAMTYAANSGFSLGRKIFVQYVTYLLEKANDTSSSSFKCLVVFSCCLSSSLVLFILCKFFLV

SEQ ID NO: 127185 - protein, 52 aa, Setaria italica
  Transcript Sequence Number=SeqID_61211
EEEEEDRGSRASPPGQSRATKDAKGLYICEIQKAQQVVAVTGSYSLRLMYVL

SEQ ID NO: 127186 - protein, 72 aa, Setaria italica
  Transcript Sequence Number=SeqID_61212
PDPCAGTRSPLDSTRPNPNKRAHRKKSREIGRMISPSGLHGLRLHRHGLLLIHRHGRSKDGHWVPRVRYLVG

SEQ ID NO: 127187 - protein, 129 aa, Setaria italica
  Transcript Sequence Number=SeqID_61213
  Gene Ontology: Mol. function=transcription factor activity; Cellular component=nucleus; Biological process=regulation of transcription, DNA-dependent
  Homolog annotation: Hit_ID=Q5MGQ8; Match level="QueryCoverage=95%, HitCoverage=37%, E-value=4e-33, Identity=69%"; Hit description=DREB 2A
PTAEDAARAYDQAARAMYGEVARTNFPRQNAVASSQVAWAATPAQVAPSVVEGVVHSTSCESTTTSNHSDIASTLHKPEVSDLSSSVKVECPEVVEAGSRRSEMVSGTSHQHEDSHPSTQAKTTTQIVR

SEQ ID NO: 127188 - protein, 41 aa, Setaria italica
  Transcript Sequence Number=SeqID_61214
MTVDQKQAMPMQAQAMQPGRKKRPRRLRDGPTSVAAVIQRW

SEQ ID NO: 127189 - protein, 79 aa, Setaria italica
  misc_feature (62)..(62): Xaa can be any naturally occurring amino acid
  Transcript Sequence Number=SeqID_61215
SFPSTRWELFTSPVLALQNKRFLQIMIDRLPSTSSAMKWAEDHWLAGQTEIQFTDYRPSKKXVQLTRPPVHHTRPHLQV

SEQ ID NO: 127190 - protein, 68 aa, Setaria italica
  misc_feature (40)..(40): Xaa can be any naturally occurring amino acid
  Transcript Sequence Number=SeqID_61216
PIRNKYRYSGKAALITVGGLAAGATVGSAVENFLQVDIVXPFLGIHSPAVVVSEFILFSQLLVSLFVR

SEQ ID NO: 127191 - protein, 62 aa, Setaria italica
  Transcript Sequence Number=SeqID_61217
  Subcellular localization annotation: CTP_CleavageSite=31; ConfidenceScore=5.00e-01
KEIAPNYIETPSSSSLGIQSCVYGALMVFTYASGSSTSLPSAYTSPDVPGFILATGFGASLY

SEQ ID NO: 127192 - protein, 42 aa, Setaria italica
  Transcript Sequence Number=SeqID_61218
  Gene Ontology: Mol. function=protein serine/threonine kinase activity; Cellular component=plasma membrane; Biological process =protein amino acid phosphorylation
  Homolog annotation: Hit_ID=B9RND0; Match level="QueryCoverage=100%, HitCoverage=5%, E-value=4e-13, Identity=83%"; Hit description=Kinase, putative
ARPILRDQDRLEELADPRLGAQYPKDDFVRVCTIAAACVSPE

SEQ ID NO: 127193 - protein, 47 aa, Setaria italica
  Transcript Sequence Number=SeqID_61219
MPCSMLHYPKFLSHLTLGLQVLDKHLSILAKQHVETRFIKVHAEKAP

SEQ ID NO: 127194 - protein, 57 aa, Setaria italica
  Transcript Sequence Number=SeqID_61220
QRKTITRTNYILRHTQSADISLMTCSLSASNCSSSLSILKYQDEKRRKKDFSTLLNL

SEQ ID NO: 127195 - protein, 130 aa, Setaria italica
  misc_feature (43)..(43): Xaa can be any naturally occurring amino acid
  Transcript Sequence Number=SeqID_61221
  Gene Ontology: Mol. function=binding; Cellular component=cytoplasm
  Homolog annotation: Hit_ID=B9T038; Match level="QueryCoverage=99%, HitCoverage=27%, E-value=2e-56, Identity=78%"; Hit description =Calcium-binding protein, putative
  Pfam annotation: Domain name=Mo25; Domain location=1-130; Score= -75.7; E_value=2.6e-08; Accession=PF08569.3; Description=Mo25 protein family
ESNKDLLDILISGYENMDIALHYGAMLRECIRHQSIASICSSXRYVLESEHMKKFFDYIQLPNFDIASDASATFKELLTRHKATVAEFLTNNYDWFFEEFNSRLLSSTNYITKRQAIKLLGDMLLDRSNV

SEQ ID NO: 127196 - protein, 30 aa, Setaria italica
  Transcript Sequence Number=SeqID_61222
AEASEAMSNLEAVYSRRTSSCVQILKHTYG

SEQ ID NO: 127197 - protein, 48 aa, Setaria italica
  misc_feature (31)..(31): Xaa can be any naturally occurring amino acid
  misc_feature (36)..(36): Xaa can be any naturally occurring amino acid
  Transcript Sequence Number=SeqID_61223
  Subcellular localization annotation: CTP_CleavageSite=17; ConfidenceScore=5.30e-01
STMSFISMFTFTNLRITVTAKVTFFFFFLFXLFFFXFSGRHSESHSSS

SEQ ID NO: 127198 - protein, 67 aa, Setaria italica
  misc_feature (52)..(52): Xaa can be any naturally occurring amino acid
  Transcript Sequence Number=SeqID_61224
  Homolog annotation: Hit_ID=B6SRT2; Match level="QueryCoverage=88%, HitCoverage=11%, E-value=3e-15, Identity=66%"; Hit description=TIP
SKIFSPLAFVSLQNLQNPGSVVPKIGPDHASPMNDGTDATDYLFPEDLPEDXYSMLYPGNDDFSNSI

SEQ ID NO: 127199 - protein, 64 aa, Setaria italica
  Transcript Sequence Number=SeqID_61225
PMLRRTAEPPTPIRTDMTITGKAQRRGGHHLPQSTDRRPDRYTAFISPAHYYCIFFRCCIESFD

SEQ ID NO: 127200 - protein, 57 aa, Setaria italica
  Transcript Sequence Number=SeqID_61226
QVFVTHAMQFIVLLQYKSRSAAVDKDPMTLLELKVCIRFQFIWSAVLLWLLLRYPFQ

SEQ ID NO: 127201 - protein, 163 aa, Setaria italica
  misc_feature (39)..(39): Xaa can be any naturally occurring amino acid
  misc_feature (87)..(87): Xaa can be any naturally occurring amino acid
  misc_feature (151)..(151): Xaa can be any naturally occurring amino acid
  Transcript Sequence Number=SeqID_61227
  Gene Ontology: Mol. function=nucleoside-triphosphatase activity; Cellular component=chloroplast; Biological process=chlorophyll biosynthetic process
  Homolog annotation: Hit_ID=Q45KX6; Match level="QueryCoverage=100%, HitCoverage=22%, E-value=4e-75, Identity=83%"; Hit description =Chloroplast Mg-chelatase subunit XANTHA-G
LLLNVLTEGVNIVEREGISFRHPCKPLLIATYNPEEGSXADLPMSFDDRVAAVEIATQFQESSKEVFKMVEEETEVAKTQGTTWSHXIILAREYLKDVNISTEQLKYLVMEAIRGGCQGHRAELYAARVAKCLAAMEGREKVFVDDLKKAXVELVILPRSILS

SEQ ID NO: 127202 - protein, 59 aa, Setaria italica
  Transcript Sequence Number=SeqID_61228
  Gene Ontology: Mol. function=nucleoside-triphosphatase activity; Cellular component=chloroplast; Biological process=chlorophyll biosynthetic process
  Homolog annotation: Hit_ID=Q9SMF0; Match level="QueryCoverage=93%, HitCoverage=14%, E-value=9e-24, Identity=98%"; Hit description=Mg -protoporphyrin IX (Fragment)
MPHLLVIFVVDASGSMALNRMQNAKGAALKLLAESYTSRDQVSIIPFRGDYAEVLLPPS

SEQ ID NO: 127203 - protein, 106 aa, Setaria italica
  misc_feature (17)..(17): Xaa can be any naturally occurring amino acid
  misc_feature (85)..(85): Xaa can be any naturally occurring amino acid
  misc_feature (94)..(94): Xaa can be any naturally occurring amino acid
  Transcript Sequence Number=SeqID_61229
  Gene Ontology: Mol. function=nucleoside-triphosphatase activity; Cellular component=chloroplast; Biological process=chlorophyll biosynthetic process
  Homolog annotation: Hit_ID=Q45KX6; Match level="QueryCoverage=94%, HitCoverage=12%, E-value=2e-35, Identity=80%"; Hit description =Chloroplast Mg-chelatase subunit XANTHA-G
TPETVLQFQESSKEVFXKMVEEETEVAKTQIILAREYLKDVNISTEQLKYLVMEAIRGGCQGHRAELYAARVAKCLAAMEGREKXVFVDDLKKXVELVILPRSILS

SEQ ID NO: 127204 - protein, 60 aa, Setaria italica
  Transcript Sequence Number=SeqID_61230
  Gene Ontology: Mol. function=G-protein coupled photoreceptor activity; Cellular component=membrane; Biological process=regulation of transcription, DNA-dependent
  Homolog annotation: Hit_ID=P93528; Match level="QueryCoverage=81%, HitCoverage=4%, E-value=2e-19, Identity=95%"; Hit description =Phytochrome C
EIKSIVAWLQENHDGSTGLSTDSLVEAGYPGAAALREVVCGMAAIKISSCRSHLHPLLHA

SEQ ID NO: 127205 - protein, 129 aa, Setaria italica
  Transcript Sequence Number=SeqID_61231
  Gene Ontology: Mol. function=G-protein coupled photoreceptor activity; Cellular component=membrane; Biological process=regulation of transcription, DNA-dependent
  Homolog annotation: Hit_ID=P93528; Match level="QueryCoverage=99%, HitCoverage=11%, E-value=4e-60, Identity=88%"; Hit description =Phytochrome C
IAFLLIECFKPDFQILMVNSCCSRDLSEKVVGVCFVAQDLTGQKMIMDKYTRIQGDYVAIVKNPSELIPPIFMINDLGSCLEWNEAMQKITGMKREDAIDKLLIGEVFTLHDYGCRVKDHATLTKLSIL

SEQ ID NO: 127206 - protein, 113 aa, Setaria italica
  Transcript Sequence Number=SeqID_61232
  Gene Ontology: Mol. function=G-protein coupled photoreceptor activity; Cellular component=membrane; Biological process=regulation of transcription, DNA-dependent
  Homolog annotation: Hit_ID=P93528; Match level="QueryCoverage=92%, HitCoverage=8%, E-value=3e-47, Identity=88%"; Hit description =Phytochrome C
VVGTTEPEDEIKWGGAKHEAVDADENGRKMHPRSSFKAFLEVVKWRSVPWEDVEMDAIHSLQLILRRTTLDKDEDANRNNVRTIVKAPSEDTKKIQGLLELRTVTDEMVRLIE

SEQ ID NO: 127207 - protein, 152 aa, Setaria italica
  misc_feature (33)..(33): Xaa can be any naturally occurring amino acid
  misc_feature (40)..(40): Xaa can be any naturally occurring amino acid
  misc_feature (52)..(52): Xaa can be any naturally occurring amino acid
  Transcript Sequence Number=SeqID_61233
  Subcellular localization annotation: CTP_CleavageSite=29; ConfidenceScore=5.11e-01
PSWHPATQSNFWRNSSVKHGVVLSKSLVVADKXNLVEKGXMLTVKEKRKVVXRTQATIVAATIEGIPSNIDLFKELMLPFVIMAEKFKKLQRWENPRSTICFLLLVHTVVFRNMLSYVFPFTLMMMALSMLAVKGLKETKARTKVRILYGQK

SEQ ID NO: 127208 - protein, 75 aa, Setaria italica
  misc_feature (63)..(63): Xaa can be any naturally occurring amino acid
  Transcript Sequence Number=SeqID_61234
MMALSMLAVKGLKEQGRLGRSFGKVTIRDQPPSNTIQKILALKEAMASVENYLQNLNVSLLKXRTIFLAGQPEVR

SEQ ID NO: 127209 - protein, 83 aa, Setaria italica
  Transcript Sequence Number=SeqID_61235
  Gene Ontology: Mol. function=aspartic-type endopeptidase activity; Cellular component=chromatin
  Homolog annotation: Hit_ID=Q7XP97; Match level="QueryCoverage=55%, HitCoverage=1%, E-value=3e-14, Identity=86%"; Hit description =OSJNBa0060B20.14 protein
ETSSREMELMQELDRERGLEMEREVERQRQLDIERAKSRELQFNLDLEKEKQTQRELQRELEQVELGLPASCCALPPSLSRYR

SEQ ID NO: 127210 - protein, 61 aa, Setaria italica
  Transcript Sequence Number=SeqID_61236
RDFGDASSIGDPEFDGPRPQGPRGGGGGGKSSSSRQVVERRERDGTSAGTGRREGKWERKH

SEQ ID NO: 127211 - protein, 77 aa, Setaria italica
  Transcript Sequence Number=SeqID_61237
PIRSRRGPKKAPIWTQDQTNCPIREIQRSKAIVSPIQNLEVEGESNCSIRILCTEQEEGKGRSYNLGLLIHRTLSRT

SEQ ID NO: 127212 - protein, 50 aa, Setaria italica
  Transcript Sequence Number=SeqID_61238
TGAEHDLHQAKSNRHCYCCFADAKKNIQAFAQNALASRVTSSLQSAFGVI

SEQ ID NO: 127213 - protein, 96 aa, Setaria italica
  misc_feature (20)..(20): Xaa can be any naturally occurring amino acid
  Transcript Sequence Number=SeqID_61239
  Gene Ontology: Cellular component=integral to membrane
  Homolog annotation: Hit_ID=B6SML9; Match level="QueryCoverage=97%, HitCoverage=50%, E-value=2e-32, Identity=75%"; Hit description=FAM18- like protein
  Pfam annotation: Domain name=DUF846; Domain location=1-66; Score= -25.1; E_value=5.2e-06; Accession=PF05832.4; Description=Eukaryotic protein of unknown function (DUF846)
CLDAESLARMNKKDSWLFWXWTLYLAAAAWIILGIFSLIRLQADYLLVIGVCLSLSIANIVGFTKCNKDAKKNIQDWTKNALLSGSVRSHLQSSNL

SEQ ID NO: 127214 - protein, 82 aa, Setaria italica
  misc_feature (10)..(10): Xaa can be any naturally occurring amino acid
  misc_feature (24)..(24): Xaa can be any naturally occurring amino acid
  Transcript Sequence Number=SeqID_61240
  Gene Ontology: Cellular component=nucleus; Biological process =regulation of transcription, DNA-dependent
  Homolog annotation: Hit_ID=Q53MB0; Match level="QueryCoverage=98%, HitCoverage=11%, E-value=1e-28, Identity=72%"; Hit description=GRAS family transcription factor containing protein, expressed
NQRMLIEQNXFGRAALNVIACEGXTDRVERPETYKQWQVRNQRAGLKQLPLNPDVVQVVRDKVDGCYHKDFVIDIDHNWLLV

SEQ ID NO: 127215 - protein, 100 aa, Setaria italica
  Transcript Sequence Number=SeqID_61241
  Gene Ontology: Mol. function=peptidyl-prolyl cis-trans isomerase activity; Cellular component=endoplasmic reticulum lumen; Biological process=protein folding
  Homolog annotation: Hit_ID=B4FUK2; Match level="QueryCoverage=92%, HitCoverage=59%, E-value=8e-46, Identity=97%"; Hit description=FK506- binding protein 2-1
  Pfam annotation: Domain name=FKBP_C; Domain location=2-80; Score =137.8; E_value=3.5e-38; Accession=PF00254.20; Description=FKBP-type peptidyl-prolyl cis-trans isomer
MLQGTLIDGSVFDSSYDRGDPFEFTLGNGQVIKGWDQGLLGMCVGEKRKLKIPAKMGYGERGSPPKIPGGATLIFDTELIAVNGKTSGGAKAESLTSRSL

SEQ ID NO: 127216 - protein, 45 aa, Setaria italica
  Transcript Sequence Number=SeqID_61242
  Gene Ontology: Biological process=cell redox homeostasis
  Homolog annotation: Hit_ID=B9SA45; Match level="QueryCoverage=75%, HitCoverage=7%, E-value=1e-12, Identity=82%"; Hit description =Thioredoxin domain-containing protein, putative
YCLVILLLFLFRYPVLVVNFYAPWCYWSNRLKPSWEKTATIIRER

SEQ ID NO: 127217 - protein, 57 aa, Setaria italica
  Transcript Sequence Number=SeqID_61243
PLFCYTWIHADGYIKEGKRGVDRVGTRGHELDTRDITVLLHHLQIRQWILVSEPRAN

SEQ ID NO: 127218 - protein, 96 aa, Setaria italica
  misc_feature (89)..(89): Xaa can be any naturally occurring amino acid
  Transcript Sequence Number=SeqID_61244
  Gene Ontology: Mol. function=methyltransferase activity
  Homolog annotation: Hit_ID=B9S2X8; Match level="QueryCoverage=59%, HitCoverage=14%, E-value=1e-13, Identity=67%"; Hit description=S -adenosyl-methyltransferase mraw, putative
FTRTLQGIAVNDELRVLEDSLHSSFDCLATGGRLAVISFHSLEDRIVKKTFLELIHGGEADDEEDDEDDLALPDIDDEDEPWFNQRLQXGRNGIVL

SEQ ID NO: 127219 - protein, 148 aa, Setaria italica
  misc_feature (36)..(36): Xaa can be any naturally occurring amino acid
  Transcript Sequence Number=SeqID_61245
  Gene Ontology: Mol. function=metal ion binding
  Homolog annotation: Hit_ID=B9RVW9; Match level="QueryCoverage=99%, HitCoverage=28%, E-value=2e-64, Identity=75%"; Hit description =Protein binding protein, putative
EDNSNTQSGAAKVSILMIGQQAIMDAYLCLLHLTAXGILVVFSIFEMRYLLAIWKASRPLNSGEGWEIMRRELSVLYSRFYGILLGGILLMYELHNFLRPLLLLMYSFWVPQIVTNIIRDTRKPLHPQYILGMTVTRLAIPLYIFGCP

SEQ ID NO: 127220 - protein, 136 aa, Setaria italica
  misc_feature (5)..(5): Xaa can be any naturally occurring amino acid
  misc_feature (12)..(12): Xaa can be any naturally occurring amino acid
  misc_feature (18)..(18): Xaa can be any naturally occurring amino acid
  misc_feature (78)..(78): Xaa can be any naturally occurring amino acid
  misc_feature (128)..(128): Xaa can be any naturally occurring amino acid
  Transcript Sequence Number=SeqID_61246
  Gene Ontology: Mol. function=CD4 receptor binding; Cellular component= trans-Golgi network transport vesicle
  Homolog annotation: Hit_ID=B9RBS1; Match level="QueryCoverage=100%, HitCoverage=40%, E-value=3e-46, Identity=60%"; Hit description =Maspardin, putative
IHHVXIYGTSLXGFLAQXFAQHRPSVNWTLFLLKRYLLTGIRDGPHEPFIADSVDFVVGQVETLSRDDLSSRLMLNVXVSSVGSLMLPDSLITIMDTNDYSAVPQQLKDQLNERYPGARRAVLKTGGXFPFLSRPD

SEQ ID NO: 127221 - protein, 50 aa, Setaria italica
  misc_feature (25)..(25): Xaa can be any naturally occurring amino acid
  Transcript Sequence Number=SeqID_61247
  Homolog annotation: Hit_ID=B9RBS1; Match level="QueryCoverage=100%, HitCoverage=16%, E-value=6e-15, Identity=66%"; Hit description =Maspardin, putative
KSLVLSNTFLETHKFAAAMPWSPVXIRDGPHEPFIADSVDFVVGQVETLS

SEQ ID NO: 127222 - protein, 86 aa, Setaria italica
  misc_feature (27)..(27): Xaa can be any naturally occurring amino acid
  misc_feature (53)..(53): Xaa can be any naturally occurring amino acid
  misc_feature (66)..(66): Xaa can be any naturally occurring amino acid
  Transcript Sequence Number=SeqID_61248
  Gene Ontology: Mol. function=nucleotide binding; Cellular component =integral to membrane; Biological process=transport
  Homolog annotation: Hit_ID=Q6S9Z3; Match level="QueryCoverage=56%, HitCoverage=11%, E-value=8e-16, Identity=89%"; Hit description =Allantoin permease
FGAPSLAGLIGGFGNGLQFMGGQAAGXYAAADAVQALPLVSTFWGVVLFGEYXRRSSRRTYILLGXMLFMFITAVAVLMASSGHRG

SEQ ID NO: 127223 - protein, 72 aa, Setaria italica
  Transcript Sequence Number=SeqID_61249
  Gene Ontology: Mol. function=nucleotide binding; Cellular component =integral to membrane; Biological process=transport
  Homolog annotation: Hit_ID=B6U6B9; Match level="QueryCoverage=72%, HitCoverage=11%, E-value=3e-20, Identity=88%"; Hit description =Ureide permease 2
SVKRARETGRGRGPGGKEGRSIKVFGSSTFIGLGIVFFSGVCFSLFSPAFNLATNDQWHAILKGVPHLVVYT

SEQ ID NO: 127224 - protein, 79 aa, Setaria italica
  Transcript Sequence Number=SeqID_61250
  Gene Ontology: Mol. function=nucleotide binding; Cellular component =integral to membrane; Biological process=transport
  Homolog annotation: Hit_ID=B6U6B9; Match level="QueryCoverage=70%, HitCoverage=12%, E-value=3e-21, Identity=89%"; Hit description =Ureide permease 2
PCVVSLSPVACLSAWDKVIAGGALKMLVIEDKAGAIALMLASLLFLGTWPALLTLLERRGRLPQHTYLDYSLTNFLAAV

SEQ ID NO: 127225 - protein, 37 aa, Setaria italica
  Transcript Sequence Number=SeqID_61251
  Homolog annotation: Hit_ID=B6U6B9; Match level="QueryCoverage=94%, HitCoverage=7%, E-value=3e-09, Identity=85%"; Hit description=Ureide permease 2
GTNRQYNRAEILFPGVACFLVAVILGSAVHASNAADN

SEQ ID NO: 127226 - protein, 58 aa, Setaria italica
  Transcript Sequence Number=SeqID_61252
  Gene Ontology: Mol. function=transition metal ion binding; Cellular component=endoplasmic reticulum; Biological process=response to antibiotic
  Homolog annotation: Hit_ID=B6T383; Match level="QueryCoverage=79%, HitCoverage=21%, E-value=2e-22, Identity=100%"; Hit description =Cytoplasm protein
  Pfam annotation: Domain name=Cyt-b5; Domain location=2-58; Score =20.9; E_value=0.00099; Accession=PF00173.20; Description=Cytochrome b5-like HemeSteroid binding doma
YNRTFTFFNPLTRVYNIAPYMKFHPGGVDMLMKAAGKDCTALFNKYHAWVNAEFLLEK

SEQ ID NO: 127227 - protein, 47 aa, Setaria italica
  Transcript Sequence Number=SeqID_61253
GCTTKAIEKAADNPKVVEAIGVPIVRGPWYEALLATFTNVFCCSSSE

SEQ ID NO: 127228 - protein, 78 aa, Setaria italica
  Transcript Sequence Number=SeqID_61254
PKSLRKQLRSSQEHHASLPRSSSDPDRSAKAKAPTDQPSAHVRARGEDPIFIMAASNSSGKNGTNPLEAMGAFFAKQV

SEQ ID NO: 127229 - protein, 108 aa, Setaria italica
  Transcript Sequence Number=SeqID_61255
  Gene Ontology: Mol. function=phosphoribosylformylglycinamidine synthase activity; Cellular component=chloroplast; Biological process='de novo' IMP biosynthetic process
  Homolog annotation: Hit_ID=B9SDY9; Match level="QueryCoverage=87%, HitCoverage=6%, E-value=3e-42, Identity=81%"; Hit description =Phosphoribosylformylglycinamidine synthase, putative
LKGKEALEEINVRMGLAFDEQDIKYYTHLFRDDIKRNPTTVELFDIAQSNSEHSRHWFFNGKLVIDGETMARTLFQLVKSPLKANPNNSVIGFKDNYEVDKYKRNNTK

SEQ ID NO: 127230 - protein, 37 aa, Setaria italica
  Transcript Sequence Number=SeqID_61256
  Gene Ontology: Mol. function=phosphoribosylformylglycinamidine synthase activity; Cellular component=chloroplast; Biological process='de novo' IMP biosynthetic process
  Homolog annotation: Hit_ID=Q84XV9; Match level="QueryCoverage=81%, HitCoverage=2%, E-value=3e-11, Identity=80%"; Hit description =Phosphoribosylformylglycinamidine synthase
MPHPERSFMMWQYPWYPKDWQVEKSGPSPWRLIIEIL

SEQ ID NO: 127231 - protein, 46 aa, Setaria italica
  Transcript Sequence Number=SeqID_61257
LSAKDWWPRKRCLDNLSCRVEHGMCYFEYEDIPPVLLVTLPDNYMP

SEQ ID NO: 127232 - protein, 108 aa, Setaria italica
  misc_feature (58)..(58): Xaa can be any naturally occurring amino acid
  misc_feature (77)..(77): Xaa can be any naturally occurring amino acid
  Transcript Sequence Number=SeqID_61258
  Gene Ontology: Mol. function=metal ion binding; Cellular component =nucleus; Biological process=regulation of transcription from RNA polymerase II promoter
  Homolog annotation: Hit_ID=Q94DE2; Match level="QueryCoverage=87%, HitCoverage=64%, E-value=2e-38, Identity=86%"; Hit description =Protein BUD31 homolog 1
  Pfam annotation: Domain name=G10; Domain location=1-106; Score=159.5; E_value=9.7e-45; Accession=PF01125.9; Description=G10 protein
EYGRWAIELHTSSSHQKSRYIYDLYYRRKEISKELYEFCLDQGYADRNLIAKWKKPGXRRRLCCLRCIQTRDHNFAXTTCVCRVPKHLREEKVIECVHCGCKGCASGD

SEQ ID NO: 127233 - protein, 71 aa, Setaria italica
  misc_feature (11)..(11): Xaa can be any naturally occurring amino acid
  Transcript Sequence Number=SeqID_61259
  Gene Ontology: Mol. function=metal ion binding; Cellular component =nucleus; Biological process=regulation of transcription from RNA polymerase II promoter
  Homolog annotation: Hit_ID=Q25AP3; Match level="QueryCoverage=95%, HitCoverage=8%, E-value=2e-32, Identity=94%"; Hit description =H0811D08.6 protein
  Pfam annotation: Domain name=G10; Domain location=1-69; Score=52.8; E_ value=1.3e-12; Accession=PF01125.9; Description=G10 protein
YDLYYRRKEIXSKELYEFCLDQGYADRNLIAKWKKPGYERLCCLRCIQTRDHNFATTCVCRVPNHETESFY

SEQ ID NO: 127234 - protein, 73 aa, Setaria italica
  Transcript Sequence Number=SeqID_61260
LLLTLSFTCSPSSLILRFMQSRSWTLRPSIVDQGLEAIIVRLGFSCPTYFLYGPSHLPSSALVGLTKVLAQLN

SEQ ID NO: 127235 - protein, 64 aa, Setaria italica
  misc_feature (64)..(64): Xaa can be any naturally occurring amino acid
  Transcript Sequence Number=SeqID_61261
  Gene Ontology: Mol. function=transferase activity, transferring phosphorus-containing groups; Cellular component=chloroplast; Biological process=phosphorylation
  Homolog annotation: Hit_ID=Q75KR1; Match level="QueryCoverage=98%, HitCoverage=6%, E-value=5e-27, Identity=87%"; Hit description =Pyruvate, phosphate dikinase 2
TPQELDAMKECMPEPYAELVENCKILEKHYKEMMVEYTFTVQENRLWMLQCRTGKRTGKGAVKX

SEQ ID NO: 127236 - protein, 139 aa, Setaria italica
  Transcript Sequence Number=SeqID_61262
  Gene Ontology: Mol. function=protein kinase CK2 regulator activity; Cellular component=protein kinase CK2 complex; Biological process =Wnt receptor signaling pathway
  Homolog annotation: Hit_ID=B6T9Z0; Match level="QueryCoverage=82%, HitCoverage=41%, E-value=2e-58, Identity=91%"; Hit description =Casein kinase II subunit beta-4
  Pfam annotation: Domain name=CK_II_beta; Domain location=8-132; Score= 182.3; E_value=1.4e-51; Accession=PF01214.10; Description=Casein kinase II regulatory subunit
CSLHQSLWVKATKVPYYDYALDLILDVESSHGDMFTEEQNELIESAAEMLYGLIHVRYIITSKGLAAMLDKYKNVDFGRCPRVNCSGQPCLPVGQSDIPRSSSVKIYCPRCEDIYTPRSKYLSSILSYTIKFALTLKGF

SEQ ID NO: 127237 - protein, 56 aa, Setaria italica
  Transcript Sequence Number=SeqID_61263
  Gene Ontology: Mol. function=protein kinase CK2 regulator activity; Cellular component=protein kinase CK2 complex
  Homolog annotation: Hit_ID=B6T9Z0; Match level="QueryCoverage=76%, HitCoverage=15%, E-value=9e-18, Identity=88%"; Hit description =Casein kinase II subunit beta-4
NIGHHALPLTCHVDIDGTYFGTTFTHLFLMTYPHLKPQKPAQQYIPRVFGFKIHKP

SEQ ID NO: 127238 - protein, 107 aa, Setaria italica
  Transcript Sequence Number=SeqID_61264
  Gene Ontology: Mol. function=protein kinase CK2 regulator activity; Cellular component=protein kinase CK2 complex; Biological process =Wnt receptor signaling pathway
  Homolog annotation: Hit_ID=B6T9Z0; Match level="QueryCoverage=94%, HitCoverage=36%, E-value=4e-51, Identity=92%"; Hit description =Casein kinase II subunit beta-4
  Pfam annotation: Domain name=CK_II_beta; Domain location=1-107; Score= 138.7; E_value=1.8e-38; Accession=PF01214.10; Description=Casein kinase II regulatory subunit
MSMSKLADGDMFTEEQNELIESAAEMLYGLIHVRYIITSKGLAAMLDKYKNVDFGRCPRVNCSGQPCLPVGQSDIPRSSSVKIYCPRCEDIYTPRSKYLSNIDGTYF

SEQ ID NO: 127239 - protein, 57 aa, Setaria italica
  misc_feature (42)..(42): Xaa can be any naturally occurring amino acid
  Transcript Sequence Number=SeqID_61265
  Gene Ontology: Mol. function=oxidoreductase activity; Biological process=oxidation reduction
  Homolog annotation: Hit_ID=B4FBV2; Match level="QueryCoverage=89%, HitCoverage=14%, E-value=1e-18, Identity=84%"; Hit description=Iron ion binding protein
WSLINFFLATDDVVGLQICKDRNAQPQVCEYVAPVKGGFIVXNLGDMLERWSNCIFR

SEQ ID NO: 127240 - protein, 57 aa, Setaria italica
  Transcript Sequence Number=SeqID_61266
  Gene Ontology: Mol. function=oxidoreductase activity; Biological process=oxidation reduction
  Homolog annotation: Hit_ID=B4FBV2; Match level="QueryCoverage=71%, HitCoverage=12%, E-value=8e-17, Identity=87%"; Hit description=Iron ion binding protein
CKDRNAQPQVWEYVAPVKGGFIVNLGDMLERWSNCIFRSTLTIRSKYLRIGTKKRTN

SEQ ID NO: 127241 - protein, 54 aa, Setaria italica
  misc_feature (19)..(19): Xaa can be any naturally occurring amino acid
  Transcript Sequence Number=SeqID_61267
SSLGLEGQSIFQRRAAKFXLANSDIHIRSNISCPHGDTGQDILLRIWISLFGQD

SEQ ID NO: 127242 - protein, 66 aa, Setaria italica
  Transcript Sequence Number=SeqID_61268
ISSCLNCGGSGKVISEHCTECHGSRKVQVERNIKVDIPGGIDDGSTIQVRGGGSVDKQRQAMETII

SEQ ID NO: 127243 - protein, 88 aa, Setaria italica
  Transcript Sequence Number=SeqID_61269
  Gene Ontology: Mol. function=heat shock protein binding; Cellular component=cytoplasm; Biological process=protein folding
  Homolog annotation: Hit_ID=Q8H812; Match level="QueryCoverage=78%, HitCoverage=13%, E-value=6e-26, Identity=73%"; Hit description =Putative DNAJ protein
  Pfam annotation: Domain name=DnaJ_C; Domain location=7-82; Score =19.9; E_value=5.2e-08; Accession=PF01556.10; Description=DnaJ C terminal region
MQLFHVMHFYLIGRGASGDLYVFIRVHEKQGIHRDGLNLYSDVSVDYTDAILGTTVKVETIEGLKDLHIPSGTQPGDNLKFLNWDSGH

SEQ ID NO: 127244 - protein, 130 aa, Setaria italica
  misc_feature (12)..(12): Xaa can be any naturally occurring amino acid
  Transcript Sequence Number=SeqID_61270
  Homolog annotation: Hit_ID=B6T2A6; Match level="QueryCoverage=60%, HitCoverage=31%, E-value=2e-15, Identity=65%"; Hit description=Stem -specific protein TSJT1
KQVAHAPQELNXSPRSGGECKPRNPDEILRDFHATHPPTPSPPPSGRAALACVGGSCPASGGYQRMFCGLDDIYCVFLGSLRQQVRRRLRSPEHRRRRAALLGHRGGRLRRDLRGPGHRQRRRTRRTKLR

SEQ ID NO: 127245 - protein, 39 aa, Setaria italica
  Transcript Sequence Number=SeqID_61271
  Homolog annotation: Hit_ID=B6UF09; Match level="QueryCoverage=100%, HitCoverage=15%, E-value=5e-14, Identity=92%"; Hit description =Proline synthetase-like protein
FGFSMGMSGDFEQAIEMGSTNVRIGSTIFGPREYPNKKQ

SEQ ID NO: 127246 - protein, 61 aa, Setaria italica
  misc_feature (28)..(28): Xaa can be any naturally occurring amino acid
  misc_feature (50)..(50): Xaa can be any naturally occurring amino acid
  Transcript Sequence Number=SeqID_61272
  Gene Ontology: Cellular component=intracellular
  Homolog annotation: Hit_ID=B6UF09; Match level="QueryCoverage=100%, HitCoverage=24%, E-value=3e-23, Identity=85%"; Hit description =Proline synthetase-like protein
YQALVDCKLEVCKALEIPTANFELSMGXMSGDFEQAIEMGSTNVRIGSTXFGPREYPNKKQ

SEQ ID NO: 127247 - protein, 119 aa, Setaria italica
  Transcript Sequence Number=SeqID_61273
  Gene Ontology: Mol. function=binding; Cellular component=condensed chromosome kinetochore; Biological process=cell division
  Homolog annotation: Hit_ID=Q6K6B1; Match level="QueryCoverage=80%, HitCoverage=8%, E-value=4e-22, Identity=56%"; Hit description=CLIP -associating protein-like
  Pfam annotation: Domain name=HEAT; Domain location=1-35; Score=2.6; E_ value=23; Accession=PF02985.14; Description=HEAT repeat
  Pfam annotation: Domain name=HEAT; Domain location=42-77; Score=23.5; E_value=0.00089; Accession=PF02985.14; Description=HEAT repeat
  Pfam module annotation: Pfam domain module=HEAT::HEAT; Domain location=1-35::42-77
DPFRCLTVIVPLLVSDDEKILVVCINCLQSLLGAFSQEELIDQLPTFLPALFDAFNNQSPDVRKTVVFCLVDIYIMLGKAFAPYLEGLSSTQLRLVNHLTLNRNFNKDEGTRTKPNTNY

SEQ ID NO: 127248 - protein, 80 aa, Setaria italica
  Transcript Sequence Number=SeqID_61274
  Gene Ontology: Mol. function=binding
GSQVMSRASASGRHSFDDSHVTSGDVSGYTDSLASLNDALSEGLSPSSDWVARVSAFDFIRNLLKQGQKGIQRKSTTKIL

SEQ ID NO: 127249 - protein, 71 aa, Setaria italica
  Transcript Sequence Number=SeqID_61275
  Gene Ontology: Mol. function=binding
  Homolog annotation: Hit_ID=Q6K6B1; Match level="QueryCoverage=90%, HitCoverage=5%, E-value=4e-11, Identity=60%"; Hit description=CLIP -associating protein-like
LQKAKLAVLEFANKSFSKYTVDSDGYSNSGFLKLWLSKLAPLVNEKNAKLKEASISGIIAVYSHFDSTAVA

SEQ ID NO: 127250 - protein, 51 aa, Setaria italica
  Transcript Sequence Number=SeqID_61276
  Gene Ontology: Mol. function=binding
RPLLRKQVMSRASASGRHSFDDSHVTSGDVSGYTDSLASLNDALSEGLLVP

SEQ ID NO: 127251 - protein, 149 aa, Setaria italica
  Transcript Sequence Number=SeqID_61277
  Gene Ontology: Mol. function=binding; Cellular component=centrosome; Biological process=cell division
  Homolog annotation: Hit_ID=Q6K6B1; Match level="QueryCoverage=100%, HitCoverage=12%, E-value=5e-60, Identity=73%"; Hit description=CLIP -associating protein-like
YPSFLMLLKQLVPPLSTQLSDRRSSIVKQACHLLNILSKELLGDFEPCAEIFIPMLFKLVVITVLVIAESADTCIKTILRNCKVARILPRIVDTAKNDRSAILRARCCEYALLVLEYWADAPEIQRSADLYEDMIKCCVADAMSEVRAT

SEQ ID NO: 127252 - protein, 157 aa, Setaria italica
  misc_feature (74)..(74): Xaa can be any naturally occurring amino acid
  misc_feature (142)..(142): Xaa can be any naturally occurring amino acid
  Transcript Sequence Number=SeqID_61278
  Gene Ontology: Mol. function=binding; Cellular component=centrosome; Biological process=cell division
  Homolog annotation: Hit_ID=Q6K6B1; Match level="QueryCoverage=94%, HitCoverage=12%, E-value=3e-55, Identity=68%"; Hit description=CLIP -associating protein-like
DSVALVLRLSRTSKIAATLVPEKDWSLRIAAMQRIEALVYGGAIDYPSFLMLLKQLVPPLSTQLSDRRSSIVKXACHLLNILSKELLGDFEPCAEIFIPMLFKLVVITVLVIAESADTCIKTILRNCKVARILPRIVDTAKXDRSAILRARCCEYAL

SEQ ID NO: 127253 - protein, 153 aa, Setaria italica
  misc_feature (34)..(34): Xaa can be any naturally occurring amino acid
  misc_feature (66)..(66): Xaa can be any naturally occurring amino acid
  Transcript Sequence Number=SeqID_61279
  Gene Ontology: Mol. function=binding; Cellular component=centrosome; Biological process=cell division
  Homolog annotation: Hit_ID=Q6K6B1; Match level="QueryCoverage=100%, HitCoverage=12%, E-value=2e-49, Identity=66%"; Hit description=CLIP -associating protein-like
TRKKTSGNQVKVHSEKELLREFEKIAATLVPEKXDWSLRIAAMQRIEALVYGGAIDYPSFLMLLKXQLVPPLSTQLSDRRSSIVKQACHLLNILSKELLGDFEPCAEIFIPMLFKLVVITVLVIAESADTCIKTILRNCKVARILPRIVDTAK

SEQ ID NO: 127254 - protein, 126 aa, Setaria italica
  misc_feature (121)..(121): Xaa can be any naturally occurring amino acid
  Transcript Sequence Number=SeqID_61280
  Gene Ontology: Mol. function=binding
  Homolog annotation: Hit_ID=Q6K6B1; Match level="QueryCoverage=91%, HitCoverage=9%, E-value=2e-37, Identity=58%"; Hit description=CLIP -associating protein-like
KNPCNLAISQNDRSAILRARCCEYALLVLEYWADAPEIQRSADLYEDMIKCCVADAMSEVRATARTCYRMFAKTWPERSRRLFMSFDPAIQRVINDEDGGVHKRYASPSLRDRVVQPSRAXSHASG

SEQ ID NO: 127255 - protein, 125 aa, Setaria italica
  Transcript Sequence Number=SeqID_61281
  Gene Ontology: Mol. function=binding; Cellular component=centrosome; Biological process=cell division
  Homolog annotation: Hit_ID=Q6K6B1; Match level="QueryCoverage=100%, HitCoverage=10%, E-value=2e-48, Identity=74%"; Hit description=CLIP -associating protein-like
ALVYGGAIDYPSFLMLLKQLVPPLSTQLSDRRSSIVKQACHLLNILSKELLGDFEPCAEIFIPMLFKLVVITVLVIAESADTCIKTILRNCKVARILPRIVDTAKNDRSAILRARCCEYALLVLE

SEQ ID NO: 127256 - protein, 137 aa, Setaria italica
  misc_feature (14)..(14): Xaa can be any naturally occurring amino acid
  misc_feature (91)..(91): Xaa can be any naturally occurring amino acid
  Transcript Sequence Number=SeqID_61282
  Gene Ontology: Mol. function=binding
INDEDGGVHKRYAXPSLRDRVVQPSRAPSHASGTHVPGYGTSAIVAMDKSAAISSDSSFSSNSLRLSQSKTIGRSSERSLESVLNSSKEKXSAIESLLKGANISGQNFSAARSTSLDLGVDPPSSRDPPVPLAAPAS

SEQ ID NO: 127257 - protein, 124 aa, Setaria italica
  misc_feature (1)..(1): Xaa can be any naturally occurring amino acid
  misc_feature (5)..(5): Xaa can be any naturally occurring amino acid
  Transcript Sequence Number=SeqID_61283
  Gene Ontology: Mol. function=binding
  Subcellular localization annotation: CTP_CleavageSite=46; ConfidenceScore=5.15e-01
XSDSXFSSNSLRLSQSKTIGRSSERSLESVLNSSKEKVSAIESLLKGANISGQNFSAARSTSLDLGVDPPSSRDPPVPLAAPASNVLSLQNSALLDSSLPSITAASSRNGGSRLLDTMTTTVRP

SEQ ID NO: 127258 - protein, 145 aa, Setaria italica
  misc_feature (16)..(16): Xaa can be any naturally occurring amino acid
  misc_feature (25)..(25): Xaa can be any naturally occurring amino acid
  Transcript Sequence Number=SeqID_61284
  Gene Ontology: Mol. function=binding
  Homolog annotation: Hit_ID=Q6K6B1; Match level="QueryCoverage=42%, HitCoverage=5%, E-value=7e-10, Identity=50%"; Hit description=CLIP -associating protein-like
AMSEVRATARTCYRMXKTWPERSRXRLFMSFDPAIQRVINDEDGGVHKRYASPSLRDRVVQPSRAPSHASGTHVPGYGTSAIVAMDKSAAISSDSSFSSNSLRLSQSKTIGRSSERSLESVLNSSKEKVSAIESLLKGANISGQN

SEQ ID NO: 127259 - protein, 122 aa, Setaria italica
  misc_feature (12)..(12): Xaa can be any naturally occurring amino acid
  Transcript Sequence Number=SeqID_61285
  Gene Ontology: Mol. function=binding
  Homolog annotation: Hit_ID=Q9NBD7; Match level="QueryCoverage=89%, HitCoverage=7%, E-value=2e-09, Identity=29%"; Hit description=CLIP -associating protein
  Pfam annotation: Domain name=HEAT; Domain location=45-81; Score=30.1; E_value=9.1e-06; Accession=PF02985.14; Description=HEAT repeat
EVSSPTIIVERXAGNYAWTHKSWRVREEFVRTVATAVGLFASTEISLQRVLLSPVLQLMNDSNQSVRDAAISCIEEMYKHMGSQFHEELQRHNLPSYMVKEINSRLERIEPKVRSSDTAMQY

SEQ ID NO: 127260 - protein, 113 aa, Setaria italica
  Transcript Sequence Number=SeqID_61286
  Gene Ontology: Mol. function=binding
  Homolog annotation: Hit_ID=Q9NBD7; Match level="QueryCoverage=87%, HitCoverage=6%, E-value=6e-11, Identity=35%"; Hit description=CLIP -associating protein
  Pfam annotation: Domain name=HEAT; Domain location=57-93; Score=30.1; E_value=9.1e-06; Accession=PF02985.14; Description=HEAT repeat
SAIAARQLLITLMEVSSPTIIVERAGNYAWTHKSWRVREEFVRTVATAVGLFASTEISLQRVLLSPVLQLMNDSNQSVRDAAISCIEEMYKHMGSQFHEELQRHNLPSYMVKE

SEQ ID NO: 127261 - protein, 133 aa, Setaria italica
  misc_feature (17)..(17): Xaa can be any naturally occurring amino acid
  Transcript Sequence Number=SeqID_61287
  Gene Ontology: Mol. function=binding
TCYRMFAKTWPERSRRXFMSFDPAIQRVINDEDGGVHKRYASPSLRDRVVQPSRAPSHASGTHVPGYGTSAIVAMDKSAAISSDSSFSSNSLRLSQSKTIGRSSERSLESVLNSSKEKVSAIESLLKGANISG

SEQ ID NO: 127262 - protein, 112 aa, Setaria italica
  misc_feature (31)..(31): Xaa can be any naturally occurring amino acid
  Transcript Sequence Number=SeqID_61288
  Gene Ontology: Mol. function=binding
  Subcellular localization annotation: CTP_CleavageSite=72; ConfidenceScore=5.56e-01
PSHASGTHVPGYGTSAIVAMDKSAAISSDSXFSSNSLRLSQSKTIGRSSERSLESVLNSSKEKVSAIESLLKGANISGQNFSAARSTSLDLGVDPPSSRDTYLVDLTLSYLK

SEQ ID NO: 127263 - protein, 64 aa, Setaria italica
  Transcript Sequence Number=SeqID_61289
  Subcellular localization annotation: CTP_CleavageSite=41; ConfidenceScore=5.33e-01
MTPLLVVGVGVHAGLLFLLDTMTTQFAPKERSRSPYLSNMSSESMSGLSMPYSRRSTERLQEGA

SEQ ID NO: 127264 - protein, 128 aa, Setaria italica
  misc_feature (10)..(10): Xaa can be any naturally occurring amino acid
  misc_feature (30)..(30): Xaa can be any naturally occurring amino acid
  Transcript Sequence Number=SeqID_61290
  Gene Ontology: Mol. function=binding
KTWPERSRRXFMSFDPAIQRVINDEDGGVXKRYASPSLRDRVVQPSRAPSHASGTHVPGYGTSAIVAMDKSAAISSDSSFSSNSLRLSQSKTIGRSSERSLESVLNSSKEKVSAIESLLKGANISGQN

SEQ ID NO: 127265 - protein, 82 aa, Setaria italica
  Transcript Sequence Number=SeqID_61291
  Gene Ontology: Mol. function=binding
RLGDGKQPVRDAARQLLITLMEVSSPTIIVERAGNYAWTHKSWRVREEFVRTVATAVGLFASTEISLQRVLLSPVLQLMNDS

SEQ ID NO: 127266 - protein, 117 aa, Setaria italica
  misc_feature (7)..(7): Xaa can be any naturally occurring amino acid
  misc_feature (9)..(9): Xaa can be any naturally occurring amino acid
  misc_feature (18)..(18): Xaa can be any naturally occurring amino acid
  misc_feature (68)..(68): Xaa can be any naturally occurring amino acid
  Transcript Sequence Number=SeqID_61292
  Gene Ontology: Mol. function=binding
SFDPAIXRXINDEDGGVXQRYASPSLRDRVVQPSRAPSHASGTHVPGYGTSAIVAMDKSAAISSDSSXSSNSLRLSQSKTIGRSSERSLESVLNSSKEKVSAIESLLKGANISGQNF

SEQ ID NO: 127267 - protein, 101 aa, Setaria italica
  misc_feature (8)..(8): Xaa can be any naturally occurring amino acid
  Transcript Sequence Number=SeqID_61293
  Gene Ontology: Mol. function=binding
  Subcellular localization annotation: CTP_CleavageSite=93; ConfidenceScore=5.32e-01
WWCQRYAXPSLRDRVVQPSRAPSHASGTHVPGYGTSAIVAMDKSAAISSDSSFSSNSLRLSQSKTIGRSSERSLESVLNSSKEKVSAIESLLKGANISGQN

SEQ ID NO: 127268 - protein, 101 aa, Setaria italica
  misc_feature (9)..(9): Xaa can be any naturally occurring amino acid
  misc_feature (60)..(60): Xaa can be any naturally occurring amino acid
  Transcript Sequence Number=SeqID_61294
  Gene Ontology: Mol. function=binding
  Subcellular localization annotation: CTP_CleavageSite=72; ConfidenceScore=5.50e-01
LVNLGYGTXSAIVAMDKSAAISSDSSFSSNSLRLSQSKTIGRSSERSLESVLNSSKEKVXAIESLLKGANISGQNFSAARSTSLDLGVDPPSSRDPPVPLA

SEQ ID NO: 127269 - protein, 77 aa, Setaria italica
  misc_feature (21)..(21): Xaa can be any naturally occurring amino acid
  Transcript Sequence Number=SeqID_61295
  Gene Ontology: Mol. function=binding
  Homolog annotation: Hit_ID=Q6K6B1; Match level="QueryCoverage=83%, HitCoverage=5%, E-value=8e-11, Identity=42%"; Hit description=CLIP -associating protein-like
ATARTCYRMFAKTWPERSRRXFMSFDPAMQRVINDEDGGVHKRYASPSLRDRVVQPSRAPSHASGTHVPWIIGLLSS

SEQ ID NO: 127270 - protein, 78 aa, Setaria italica
  Transcript Sequence Number=SeqID_61296
  Gene Ontology: Mol. function=binding
  Homolog annotation: Hit_ID=Q6K6B1; Match level="QueryCoverage=98%, HitCoverage=6%, E-value=3e-24, Identity=61%"; Hit description=CLIP -associating protein-like
WADAPEIQRSADLYEDMIKCCVADAMSEVRATARTCYRMFAKTWPERSRRLFMSFDPAIQRVINDEDGGVHKRYASPS

SEQ ID NO: 127271 - protein, 76 aa, Setaria italica
  Transcript Sequence Number=SeqID_61297
  Gene Ontology: Mol. function=binding
  Homolog annotation: Hit_ID=Q6K6B1; Match level="QueryCoverage=97%, HitCoverage=6%, E-value=1e-23, Identity=60%"; Hit description=CLIP -associating protein-like
YWADAPEIQRSADLYEDMIKCCVADAMSEVRATARTCYRMFAKTWPERSRRLFMSFDPAIQRVINDEDGGVHKRYA

SEQ ID NO: 127272 - protein, 107 aa, Setaria italica
  misc_feature (13)..(13): Xaa can be any naturally occurring amino acid
  Transcript Sequence Number=SeqID_61298
  Gene Ontology: Mol. function=binding
RVINDEDGGVHKXCSPSLRDRVVQPSRAPSHASGTHVPGYGTSAIVAMDKSAAISSDSSFSSNSLRLSQSKTIGRSSERSLESVLNSSKEKVSAIESLLKGCQLYQG

SEQ ID NO: 127273 - protein, 108 aa, Setaria italica
  misc_feature (12)..(12): Xaa can be any naturally occurring amino acid
  misc_feature (97)..(97): Xaa can be any naturally occurring amino acid
  Transcript Sequence Number=SeqID_61299
  Gene Ontology: Mol. function=binding
  Subcellular localization annotation: CTP_CleavageSite=100; ConfidenceScore=5.06e-01
NDEDGGVHKRYXASPSLRDRVVQPSRAPSHASGTHVPGYGTSAIVAMDKSAAISSDSSFSSNSLRLSQSKTIGRSSERSLESVLNSSKEKVSAIESXLLKGANISGQN

SEQ ID NO: 127274 - protein, 77 aa, Setaria italica
  Transcript Sequence Number=SeqID_61300
  Gene Ontology: Mol. function=binding
  Subcellular localization annotation: CTP_CleavageSite=71; ConfidenceScore=5.53e-01
SPSLRDRVVQPSRAPSHASGTHVPGYGTSAIVAMDKSAAISSDSSFSSNSLRLSQSKTIGRSSERSLESVLNSSKSK

SEQ ID NO: 127275 - protein, 84 aa, Setaria italica
  Transcript Sequence Number=SeqID_61301
  Gene Ontology: Mol. function=binding
  Pfam annotation: Domain name=HEAT; Domain location=7-43; Score=18.9; E_value=0.021; Accession=PF02985.14; Description=HEAT repeat
VAGEHFKIHLNALVPAAVERLGDGKQPVRDAARQLLITLMEVSSPTIIVERAGNYAWTHKSWRVREEFVRTVATAVGLFASTEY

SEQ ID NO: 127276 - protein, 85 aa, Setaria italica
  misc_feature (25)..(25): Xaa can be any naturally occurring amino acid
  Transcript Sequence Number=SeqID_61302
  Gene Ontology: Mol. function=binding
  Homolog annotation: Hit_ID=Q6K6B1; Match level="QueryCoverage=84%, HitCoverage=6%, E-value=6e-15, Identity=50%"; Hit description=CLIP -associating protein-like
MQYKAAESRSVSANPKRGSPRTKAXPRESTLFGGDTDITEKAVEPVKVHSEKELLREFEKIAATLVPEKDWSLRIAAMQRIEALV

SEQ ID NO: 127277 - protein, 81 aa, Setaria italica
  Transcript Sequence Number=SeqID_61303
  Gene Ontology: Mol. function=binding
  Pfam annotation: Domain name=HEAT; Domain location=7-43; Score=30.1; E_value=9.1e-06; Accession=PF02985.14; Description=HEAT repeat
VFASTEISLQRVLLSPVLQLMNDSNQSVRDAAISCIEEMYKHMGSQFHEELQRHNLPSYMVKEINSRLERIEPKVRSSDTA

SEQ ID NO: 127278 - protein, 77 aa, Setaria italica
  Transcript Sequence Number=SeqID_61304
  Gene Ontology: Mol. function=binding
MNDSNQSVRDAAISCIEEMYKHMGSQFHEELQRHNLPSYMVKEINSRLERIEPKVRSSDTAMQYKAAESRSVSANPK

SEQ ID NO: 127279 - protein, 82 aa, Setaria italica
  Transcript Sequence Number=SeqID_61305
  Gene Ontology: Mol. function=zinc ion binding; Cellular component =intracellular
GGGNEQRLGRRRRRKTGRGRRWCGGGGGAGMFDPRQLCDMEHHEVKFGQGGGDMTRDFLGVGGGGIVRGISTPRGDHQSSSD

SEQ ID NO: 127280 - protein, 82 aa, Setaria italica
  Transcript Sequence Number=SeqID_61306
  Gene Ontology: Mol. function=binding
ANPKRRQPKGSQFHEELQRHNLPSYMVKEINSRLERIEPKVRSSDTAMQYKAAESRSVSANPKRGSPRTKSLPRESTLFGGD

SEQ ID NO: 127281 - protein, 84 aa, Setaria italica
  misc_feature (62)..(62): Xaa can be any naturally occurring amino acid
  Transcript Sequence Number=SeqID_61307
  Gene Ontology: Mol. function=binding
  Pfam annotation: Domain name=HEAT; Domain location=3-35; Score=26.0; E_value=0.00016; Accession=PF02985.14; Description=HEAT repeat
LQRVLLSPVLQLMNDSNQSVRDAAISCIEEMYKHMGSQFHEELQRHNLPSYMVKEINSRLEXIEPKVRSSDTAMQYKAAESRSV

SEQ ID NO: 127282 - protein, 65 aa, Setaria italica
  Transcript Sequence Number=SeqID_61308
  Gene Ontology: Mol. function=binding
VLQLMNDSNQSVRDAAISCIEEMYKHMGSQFHEELQRHNLPSYMVKEINSRLERIEPKVRSSDTA

SEQ ID NO: 127283 - protein, 67 aa, Setaria italica
  misc_feature (12)..(12): Xaa can be any naturally occurring amino acid
  misc_feature (21)..(21): Xaa can be any naturally occurring amino acid
  misc_feature (33)..(33): Xaa can be any naturally occurring amino acid
  Transcript Sequence Number=SeqID_61309
  Gene Ontology: Mol. function=binding
  Pfam annotation: Domain name=HEAT; Domain location=19-55; Score=26.7; E_value=9.8e-05; Accession=PF02985.14; Description=HEAT repeat
SLLRTVATAVGXFASTEISFXQEFCLSPVLQLXNDSNQSVRDAAISCIEEMYKHMGSQFHEELQRHN

SEQ ID NO: 127284 - protein, 90 aa, Setaria italica
  Transcript Sequence Number=SeqID_61310
  Gene Ontology: Mol. function=binding
  Homolog annotation: Hit_ID=Q6K6B1; Match level="QueryCoverage=94%, HitCoverage=7%, E-value=7e-20, Identity=51%"; Hit description=CLIP -associating protein-like
RSVSANPKRGSPRTKSLPRESTLFGGDTDITEKAVEPVKVHSEKELLREFEKIAATLVPEKDWSLRIAAMQRIEALVYGGAIDYPSFLML

SEQ ID NO: 127285 - protein, 84 aa, Setaria italica
  misc_feature (64)..(64): Xaa can be any naturally occurring amino acid
  Transcript Sequence Number=SeqID_61311
  Gene Ontology: Mol. function=binding
  Homolog annotation: Hit_ID=Q6K6B1; Match level="QueryCoverage=96%, HitCoverage=6%, E-value=4e-20, Identity=58%"; Hit description=CLIP -associating protein-like
LPRESTLFGGDTDITEKAVEPVKVHSEKELLREFEKIAATLVPEKDWSLRIAAMQRIEALVYGXGAIDYPSFLMLLKQLVPPLS

SEQ ID NO: 127286 - protein, 64 aa, Setaria italica
  misc_feature (45)..(45): Xaa can be any naturally occurring amino acid
  Transcript Sequence Number=SeqID_61312
  Subcellular localization annotation: CTP_CleavageSite=38; ConfidenceScore=5.28e-01
ESLLKGANISGQNFSAARSTSLDLGVDPPSSRDPPVPLAAPASNXLSLQNSALLDSLPLPSITA

SEQ ID NO: 127287 - protein, 81 aa, Setaria italica
  misc_feature (9)..(9): Xaa can be any naturally occurring amino acid
  Transcript Sequence Number=SeqID_61313
  Gene Ontology: Mol. function=binding
  Subcellular localization annotation: CTP_CleavageSite=48; ConfidenceScore=5.31e-01
ISSDSSFSXQTSLRLSQSKTIGRSSERSLESVLNSSKEKVSAIESLLKGANISGQNFSAARSTSLDLGVDPPSSRDPPVPL

SEQ ID NO: 127288 - protein, 78 aa, Setaria italica
  misc_feature (33)..(33): Xaa can be any naturally occurring amino acid
  Transcript Sequence Number=SeqID_61314
  Gene Ontology: Mol. function=binding
SNSLRLSQSKTIGRSSERSLESVLNSSKEKSLXAIESLLKGANISGQNFSAARSTSLDLGVDPPSSRDPPVPLAAPAS

SEQ ID NO: 127289 - protein, 74 aa, Setaria italica
  Transcript Sequence Number=SeqID_61315
  Gene Ontology: Mol. function=binding
  Subcellular localization annotation: CTP_CleavageSite=53; ConfidenceScore=5.56e-01
GTHVPGYGTSAIVAMDKSAAISSDSSFSSNSLRLSQSKTIGRSSERSLESVLNSSKEKVSAIESLLKGANISRV

SEQ ID NO: 127290 - protein, 72 aa, Setaria italica
  misc_feature (26)..(26): Xaa can be any naturally occurring amino acid
  misc_feature (33)..(33): Xaa can be any naturally occurring amino acid
  Transcript Sequence Number=SeqID_61316
  Gene Ontology: Mol. function=binding
  Subcellular localization annotation: CTP_CleavageSite=54; ConfidenceScore=5.50e-01
GTHVPGYGTSAIVAMDKSAAISSDSXFSSNSLXRLSQSKTIGRSSERSLESVLNSSKEKVSAIESLLKGANI

SEQ ID NO: 127291 - protein, 65 aa, Setaria italica
  misc_feature (25)..(25): Xaa can be any naturally occurring amino acid
  Transcript Sequence Number=SeqID_61317
  Subcellular localization annotation: CTP_CleavageSite=59; ConfidenceScore=5.50e-01
MYLDMALSAIVAMDKSAAISSDSSXFSSNSLRLSQSKTIGRSSERSLESVLNSSKEKVSAIRKVC

SEQ ID NO: 127292 - protein, 80 aa, Setaria italica
  Transcript Sequence Number=SeqID_61318
  Gene Ontology: Mol. function=binding
  Homolog annotation: Hit_ID=Q6K6B1; Match level="QueryCoverage=100%, HitCoverage=6%, E-value=5e-26, Identity=75%"; Hit description=CLIP -associating protein-like
EALVYGGAIDYPSFLMLLKQLVPPLSTQLSDRRSSIVKQACHLLNILSKELLGDFEPCAEIFIPMLFKLVVITVLVIAES

SEQ ID NO: 127293 - protein, 76 aa, Setaria italica
  Transcript Sequence Number=SeqID_61319
  Gene Ontology: Mol. function=binding
  Homolog annotation: Hit_ID=Q6K6B1; Match level="QueryCoverage=97%, HitCoverage=6%, E-value=1e-26, Identity=71%"; Hit description=CLIP -associating protein-like
HVLKLILRNCKVARILPRIVDTAKNDRSAILRARCCEYALLVLEYWADAPEIQRSADLYEDMIKCCVADAMSEVRA

SEQ ID NO: 127294 - protein, 75 aa, Setaria italica
  Transcript Sequence Number=SeqID_61320
  Gene Ontology: Mol. function=binding
  Homolog annotation: Hit_ID=Q6K6B1; Match level="QueryCoverage=100%, HitCoverage=6%, E-value=5e-26, Identity=73%"; Hit description=CLIP -associating protein-like
LFKLVVITVLVIAESADTCIKTILRNCKVARILPRIVDTAKNDRSAILRARCCEYALLVLEYWADAPEIQRSADL

SEQ ID NO: 127295 - protein, 80 aa, Setaria italica
  misc_feature (63)..(63): Xaa can be any naturally occurring amino acid
  Transcript Sequence Number=SeqID_61321
  Gene Ontology: Mol. function=binding
  Homolog annotation: Hit_ID=Q6K6B1; Match level="QueryCoverage=100%, HitCoverage=6%, E-value=2e-25, Identity=72%"; Hit description=CLIP -associating protein-like
VYGGAIDYPSFLMLLKQLVPPLSTQLSDRRSSIVKQACHLLNILSKELLGDFEPCAEIFIPMXFKLVVITVLVIAESADT

SEQ ID NO: 127296 - protein, 46 aa, Setaria italica
  Transcript Sequence Number=SeqID_61322
  Gene Ontology: Mol. function=binding
  Homolog annotation: Hit_ID=Q6K6B1; Match level="QueryCoverage=100%, HitCoverage=3%, E-value=7e-13, Identity=67%"; Hit description=CLIP -associating protein-like
LTLQRNDRSAILRARCCEYALLVLEYWADAPEIQRSADLYEDMIKC

SEQ ID NO: 127297 - protein, 64 aa, Setaria italica
  Transcript Sequence Number=SeqID_61323
  Gene Ontology: Mol. function=binding
  Homolog annotation: Hit_ID=Q6K6B1; Match level="QueryCoverage=100%, HitCoverage=5%, E-value=6e-20, Identity=71%"; Hit description=CLIP -associating protein-like
LGDFEPCAEIFIPMLFKLVVITVLVIAESADTCIKTILRNCKVARILPRIVDTAKNDRSAILRA

SEQ ID NO: 127298 - protein, 75 aa, Setaria italica
  misc_feature (63)..(63): Xaa can be any naturally occurring amino acid
  misc_feature (67)..(67): Xaa can be any naturally occurring amino acid
  Transcript Sequence Number=SeqID_61324
  Gene Ontology: Mol. function=binding
  Homolog annotation: Hit_ID=Q6K6B1; Match level="QueryCoverage=98%, HitCoverage=6%, E-value=2e-23, Identity=75%"; Hit description=CLIP -associating protein-like
PPLSTQLSDRRSSIVKQACHLLNILSKELLGDFEPCAEIFIPMLFKLVVITVLVIAESADTCXIKTXLRNCKVAR

SEQ ID NO: 127299 - protein, 53 aa, Setaria italica
  Transcript Sequence Number=SeqID_61325
  Gene Ontology: Mol. function=binding
  Homolog annotation: Hit_ID=Q6K6B1; Match level="QueryCoverage=100%, HitCoverage=4%, E-value=1e-14, Identity=69%"; Hit description=CLIP -associating protein-like
PCAEIFIPMLFKLVVITVLVIAESADTCIKTILRNCKVARILPRIVDTAKNDR

SEQ ID NO: 127300 - protein, 63 aa, Setaria italica
  misc_feature (14)..(14): Xaa can be any naturally occurring amino acid
  Transcript Sequence Number=SeqID_61326
  Gene Ontology: Mol. function=binding
  Homolog annotation: Hit_ID=Q6K6B1; Match level="QueryCoverage=100%, HitCoverage=5%, E-value=4e-18, Identity=65%"; Hit description=CLIP -associating protein-like
VITLNTADTCIKTXILRNCKVARILPRIVDTAKNDRSAILRARCCEYALLVLEYWADAPEIQR

SEQ ID NO: 127301 - protein, 49 aa, Setaria italica
  Transcript Sequence Number=SeqID_61327
  Gene Ontology: Mol. function=binding
  Homolog annotation: Hit_ID=Q6K6B1; Match level="QueryCoverage=100%, HitCoverage=4%, E-value=9e-13, Identity=75%"; Hit description=CLIP -associating protein-like
EALVYGGAIDYPSFLMLLKQLVPPLSTQLSDRRSSIVKQACHLLNILSK

SEQ ID NO: 127302 - protein, 73 aa, Setaria italica
  Transcript Sequence Number=SeqID_61328
  Gene Ontology: Mol. function=binding
  Homolog annotation: Hit_ID=Q6K6B1; Match level="QueryCoverage=98%, HitCoverage=6%, E-value=4e-18, Identity=59%"; Hit description=CLIP -associating protein-like
FGGDTDITEKAVEPVKVHSEKELLREFEKIAATLVPEKDWSLRIAAMQRIEALVYGGAIDYPSFLMLLKQLVP

SEQ ID NO: 127303 - protein, 59 aa, Setaria italica
  Transcript Sequence Number=SeqID_61329
  Gene Ontology: Mol. function=binding
  Homolog annotation: Hit_ID=Q6K6B1; Match level="QueryCoverage=100%, HitCoverage=5%, E-value=4e-13, Identity=57%"; Hit description=CLIP -associating protein-like
DITEKAVEPVKVHSEKELLREFEKIAATLVPEKDWSLRIAAMQRIEALVYGGAIDYPSF

SEQ ID NO: 127304 - protein, 38 aa, Setaria italica
  Transcript Sequence Number=SeqID_61330
  Gene Ontology: Mol. function=binding
VERLGDGKQPVRDAARQLLITLMEVSSPTIIVERAGNY

SEQ ID NO: 127305 - protein, 55 aa, Setaria italica
  Transcript Sequence Number=SeqID_61331
  Gene Ontology: Mol. function=binding
  Homolog annotation: Hit_ID=Q6K6B1; Match level="QueryCoverage=100%, HitCoverage=4%, E-value=1e-10, Identity=56%"; Hit description=CLIP -associating protein-like
VKVHSEKELLREFEKIAATLVPEKDWSLRIAAMQRIEALVYGGAIDYPSFLMPLE

SEQ ID NO: 127306 - protein, 59 aa, Setaria italica
  misc_feature (22)..(22): Xaa can be any naturally occurring amino acid
  misc_feature (49)..(49): Xaa can be any naturally occurring amino acid
  Transcript Sequence Number=SeqID_61332
  Gene Ontology: Mol. function=binding
  Homolog annotation: Hit_ID=Q6K6B1; Match level="QueryCoverage=94%, HitCoverage=4%, E-value=2e-11, Identity=55%"; Hit description=CLIP -associating protein-like
VYNRKAVEPVKVHSEKELLREXEKIAATLVPEKDWSLRIAAMQRIEALXYGGAIDYPSF

SEQ ID NO: 127307 - protein, 40 aa, Setaria italica
  misc_feature (10)..(10): Xaa can be any naturally occurring amino acid
  Transcript Sequence Number=SeqID_61333
  Gene Ontology: Mol. function=binding
IAATLVPEKXDWSLRIAAMQRIEALVYGGAIDYPSFLMLL

SEQ ID NO: 127308 - protein, 37 aa, Setaria italica
  Transcript Sequence Number=SeqID_61334
ASVILCSVNYARKNPCNLAISQNSLIHVSADSAITST

SEQ ID NO: 127309 - protein, 82 aa, Setaria italica
  Transcript Sequence Number=SeqID_61335
HRIRSPCLYLDWICSPPLLPRPSRTWLPPPSPPAFHLLFPSPPPPQAWFSSTGGAGAAGPPPVPHHHLLQQQQAQLQAFWGY

SEQ ID NO: 127310 - protein, 54 aa, Setaria italica
  Transcript Sequence Number=SeqID_61336
ERELPVSCPILSMDDDVVYLLSQTRPRYMDIKLSQSLQCCLPHINSKYHCQLCS

SEQ ID NO: 127311 - protein, 26 aa, Setaria italica
  Transcript Sequence Number=SeqID_61337
SSDSKGWISKRLSVNEFERDKLIPLP

SEQ ID NO: 127312 - protein, 78 aa, Setaria italica
  Transcript Sequence Number=SeqID_61338
  Subcellular localization annotation: CTP_CleavageSite=21; ConfidenceScore=5.29e-01
LPLLGLDLFTSSASSPFTDMAASTVSSCVPPSLPESAAASGLVLLDRWCYIADLPNNTTAERSGGRAARKVTLIGKPL

SEQ ID NO: 127313 - protein, 66 aa, Setaria italica
  Transcript Sequence Number=SeqID_61339
NQLKKFNLQCLHPDSLYHVSTNRLTLLCPSQFFACTSDGLPCLVCLIATFQLNLQVDLLDNKVEEY

SEQ ID NO: 127314 - protein, 134 aa, Setaria italica
  Transcript Sequence Number=SeqID_61340
  Gene Ontology: Mol. function=nucleic acid binding; Cellular component= nucleus; Biological process=mRNA processing
  Homolog annotation: Hit_ID=B6EDB8; Match level="QueryCoverage=95%, HitCoverage=63%, E-value=1e-51, Identity=75%"; Hit description =Putative polypyrimidine tract-binding protein 2 (Fragment)
  Pfam annotation: Domain name=RRM_1; Domain location=1-67; Score=5.4; E_value=0.063; Accession=PF00076.14; Description=RNA recognition motif. (a.k.a. RRM, RBD, o
ASIENMQYVVTIDVLHEVFSAFGFVQKIAIFEKNGFQALIQYPDIQTAVAAKEALEGHSIYEGGYCKLHLAFSRHTELNVKVNNERGRDYTKGNVTTSSDQPSILGPQPIPNVGAVIPPPPHTSVPSCLVLPSF

SEQ ID NO: 127315 - protein, 57 aa, Setaria italica
  Transcript Sequence Number=SeqID_61341
NLCSEKRIHTNTMPIMKRLPRLTSTLLRSNLEQQWILASERKRQQRRIDIHPSMILA

SEQ ID NO: 127316 - protein, 103 aa, Setaria italica
  misc_feature (54)..(54): Xaa can be any naturally occurring amino acid
  Transcript Sequence Number=SeqID_61342
  Subcellular localization annotation: CTP_CleavageSite=82; ConfidenceScore=5.19e-01
QLPPGSAQFMQYLGNGNHLVPNTHGPQAVPFPGLSAQQLPPGPQMMQAPGYGGXPFSQGPRQPMPQFPMYGNQQFPPGMEPQMMPFSEQGGRQLSILLHGVPY

SEQ ID NO: 127317 - protein, 67 aa, Setaria italica
  Transcript Sequence Number=SeqID_61343
  Subcellular localization annotation: CTP_CleavageSite=37; ConfidenceScore=5.14e-01
HILLPDLNGLASSCHGVSWQAASGTHVCVCFLSLTHRCPTPSPPLRCPLPFPIFLPFPVPYYLPLPL

SEQ ID NO: 127318 - protein, 83 aa, Setaria italica
  Transcript Sequence Number=SeqID_61344
EHQGRAAWTLVRTYQIEPSWAPGPLIFSLARMIDPARDSVHHPHNGLHYGTQEHCRVPGALGKAPKTLGEPFAECNTRQWAHG

SEQ ID NO: 127319 - protein, 70 aa, Setaria italica
  misc_feature (14)..(14): Xaa can be any naturally occurring amino acid
  Transcript Sequence Number=SeqID_61345
  Subcellular localization annotation: CTP_CleavageSite=41; ConfidenceScore=5.12e-01
TFAECPKNNSATIXEKIKKTKSLVAAATADHRRRRRHCRPHAATVTGPSPPWISPPSPSPWPVAPPSPST

SEQ ID NO: 127320 - protein, 90 aa, Setaria italica
  Transcript Sequence Number=SeqID_61346
KRRERIFSGSQFICLLLHYKRSIECTHLDEKERKEGGLISFKQNNRIGWPPRQHGQLHLVPSVLLVLLDELGVLEVLLGEVGRHHRFLIT

SEQ ID NO: 127321 - protein, 135 aa, Setaria italica
  misc_feature (60)..(60): Xaa can be any naturally occurring amino acid
  Transcript Sequence Number=SeqID_61347
  Gene Ontology: Mol. function=protein serine/threonine kinase activity; Cellular component=plasma membrane; Biological process =protein amino acid phosphorylation
  Homolog annotation: Hit_ID=Q01L66; Match level="QueryCoverage=87%, HitCoverage=19%, E-value=6e-53, Identity=67%"; Hit description =H0321H01.14 protein
FTPRLVRLHHRGHGRPRAEPLKKPSLPQLVVEPTDARSNSFVGTHEYLAPEIIRGDGHGXKFPDNPAVSFHARDLIRGLLVKEPEYRLGSSRGAAEIKRHPFFEGLNWALIRWTAPPETPKSFDAAAATLATTRK

SEQ ID NO: 127322 - protein, 138 aa, Setaria italica
  misc_feature (30)..(30): Xaa can be any naturally occurring amino acid
  misc_feature (93)..(93): Xaa can be any naturally occurring amino acid
  misc_feature (107)..(107): Xaa can be any naturally occurring amino acid
  Transcript Sequence Number=SeqID_61348
  Gene Ontology: Mol. function=protein serine/threonine kinase activity; Cellular component=plasma membrane; Biological process =protein amino acid phosphorylation
  Homolog annotation: Hit_ID=P93520; Match level="QueryCoverage=100%, HitCoverage=23%, E-value=2e-68, Identity=85%"; Hit description =Calcium/calmodulin-dependent protein kinase homolog|CaM kinase homolog|MCK1 protein
  Pfam annotation: Domain name=Pkinase_Tyr; Domain location=21-136; Score=-173.5; E_value=0.034; Accession=PF07714.9; Description =Protein tyrosine kinase
AEAERPLDKTFGFGKNFGAKYELGKEVGRXGHFGHTCSAVVKKGEYKGHTVAVKIISKAKMTTAISIEDVRREVKILKALSGHNNLVKFYDAXLCEGGELLDRILAXGGRYTEEDAKAIVVQILSVVAFCHLQGVVHR

SEQ ID NO: 127323 - protein, 58 aa, Setaria italica
  Transcript Sequence Number=SeqID_61349
ATPLKRLALKALSKALREDELLYLRLQFKLLEPRDGFVSLDNFRTVSYEDMSTLCCMF

SEQ ID NO: 127324 - protein, 111 aa, Setaria italica
  misc_feature (7)..(7): Xaa can be any naturally occurring amino acid
  misc_feature (21)..(21): Xaa can be any naturally occurring amino acid
  misc_feature (64)..(64): Xaa can be any naturally occurring amino acid
  Transcript Sequence Number=SeqID_61350
  Gene Ontology: Mol. function=nucleotide binding; Biological process =defense response
LRTLNMXGLNANVVIPKEFGXRNLRTLFGFRVHMDMNGGWCSLEEIGPLPKLRDLTLHGLENVXASSLAETARISSKEHLEYLVLRWSSSGCMELRNKIEMQQQQQVCRDG

SEQ ID NO: 127325 - protein, 109 aa, Setaria italica
  Transcript Sequence Number=SeqID_61351
PSMESCLSVPVKNSKQETTGELGPNHYKIEKPGPTDGSLLLPTPCQPLNEEDAWSLLTKQLPPSPNQGNLLLDHSAMPWWAWFIVRWSRVPTRIILLLRGFNVMSEFDG

SEQ ID NO: 127326 - protein, 80 aa, Setaria italica
  Transcript Sequence Number=SeqID_61352
  Gene Ontology: Mol. function=nucleotide binding; Biological process =defense response
LLFCIRNPVFAHKIGSRIKELNQRLDGIHKEADRFNFSINLGSNPEPRKLTDAERSTQNMTSEFDESAIVGEKIEQDTRE

SEQ ID NO: 127327 - protein, 55 aa, Setaria italica
  Transcript Sequence Number=SeqID_61353
MAAILNALAAYVKKQIADMAEEKVSMLLGVSAKIEKLEGNIESLKAFLADAERRR

SEQ ID NO: 127328 - protein, 79 aa, Setaria italica
  Transcript Sequence Number=SeqID_61354
  Gene Ontology: Mol. function=nucleotide binding; Biological process =defense response
MDGGWCSLEEIGPLSKLKKLTLHGLEDVSASSLAETARISSKEHLEYLELHWSSSGCMELRDEIEKQQQQEVVEEVLEN

SEQ ID NO: 127329 - protein, 69 aa, Setaria italica
  Transcript Sequence Number=SeqID_61355
LEGLCEWEEWDWEEQTVDVTAGTMAMHALEFLKIDKCKLSCLPPGLANNKRHALRGLYLYELKTKPGIC

SEQ ID NO: 127330 - protein, 67 aa, Setaria italica
  Transcript Sequence Number=SeqID_61356
  Subcellular localization annotation: CTP_CleavageSite=40; ConfidenceScore=5.04e-01
SSISSKCWVMLSHTFTLKCSWMIYGVTKHGVMFLVSQVKNASQKQQGNWVLITTRLEDLAQRSGSLL

SEQ ID NO: 127331 - protein, 51 aa, Setaria italica
  Transcript Sequence Number=SeqID_61357
LEQGLLTIVHQTIFVQRIIQIKEQPLWNSLFPMCTIFLQKGAVSLSQIAHN

SEQ ID NO: 127332 - protein, 56 aa, Setaria italica
  Transcript Sequence Number=SeqID_61358
KKNKEQINRLRNNIILWKYLAEASKVLQSLRFQAPGFPLICSGPQANQITAAMIIV

SEQ ID NO: 127333 - protein, 90 aa, Setaria italica
  misc_feature (87)..(87): Xaa can be any naturally occurring amino acid
  Transcript Sequence Number=SeqID_61359
YNHTYYAARTNDKSLCTRAKSRELNYQVNSFLAVHKPSSQNWMLLSHCDDFIIIRNDGEEPNGSTNQFGHQDHIIRKQQDRTSSSDXKFV

SEQ ID NO: 127334 - protein, 103 aa, Setaria italica
  Transcript Sequence Number=SeqID_61360
GTLQINSETALCQYAGVYATYSNTVLTVAGVYGTYSNTIRKKTGKNFFSSKKKIPPSTVNLSDSTRCRLFTKYLKQAAPGTQLGRVPIPIPAGLVPPFRDIYP

SEQ ID NO: 127335 - protein, 92 aa, Setaria italica
  misc_feature (25)..(25): Xaa can be any naturally occurring amino acid
  misc_feature (65)..(65): Xaa can be any naturally occurring amino acid
  Transcript Sequence Number=SeqID_61361
  Subcellular localization annotation: CTP_CleavageSite=85; ConfidenceScore=5.78e-01
LLQSSMNSRQDHPMSSTNGGPYNGXGNAAIPKVNSTSSLQSNPSTSFPSPVPTASNNNMMPAPQXNTNQLTSPTTSSSIPPMQPPATRPQED

SEQ ID NO: 127336 - protein, 71 aa, Setaria italica
  misc_feature (32)..(32): Xaa can be any naturally occurring amino acid
  Transcript Sequence Number=SeqID_61362
  Gene Ontology: Mol. function=choline-phosphate cytidylyltransferase activity; Cellular component=endoplasmic reticulum membrane; Biological process=biosynthetic process
  Homolog annotation: Hit_ID=B4F7T8; Match level="QueryCoverage=54%, HitCoverage=11%, E-value=2e-13, Identity=89%"; Hit description =Choline-phosphate cytidylyltransferase B
MADDAKAEAARPRPESSQEEEEDWKEAEGDSXEAQVPTDRPIRVYADGIYDLFHFGHARSLEQAKKLFPNT

SEQ ID NO: 127337 - protein, 114 aa, Setaria italica
  misc_feature (13)..(13): Xaa can be any naturally occurring amino acid
  misc_feature (26)..(26): Xaa can be any naturally occurring amino acid
  misc_feature (40)..(40): Xaa can be any naturally occurring amino acid
  misc_feature (55)..(55): Xaa can be any naturally occurring amino acid
  Transcript Sequence Number=SeqID_61363
  Homolog annotation: Hit_ID=Q6K987; Match level="QueryCoverage=97%, HitCoverage=15%, E-value=4e-32, Identity=66%"; Hit description =Endoribonuclease L-PSP family protein-like
IWWRICSAVVSVXTDICDKRLCSTAXQLYYTEENLKAMAXRFCAFQITKILADNXFSWDSTTMLRFYYSVDNSVAADAMSRAFSEAFAELAEDNSSSRTDESPFYNIVPVSGSG

SEQ ID NO: 127338 - protein, 95 aa, Setaria italica
  Transcript Sequence Number=SeqID_61364
ADAAEEEEESEDEKKAAAAVTATKDKAWGLRTKKGRGGAVRNPAGLGPRPTKGADGDAATTTTGGAKKADKKGAGGAAAGGPAKKRNAVDFLKRL

SEQ ID NO: 127339 - protein, 66 aa, Setaria italica
  Transcript Sequence Number=SeqID_61365
  Gene Ontology: Mol. function=translation elongation factor activity; Cellular component=cytoplasm; Biological process=translational elongation
  Homolog annotation: Hit_ID=A7Y7K1; Match level="QueryCoverage=81%, HitCoverage=58%, E-value=1e-19, Identity=88%"; Hit description =Putative elongation factor 1-alpha (Fragment)
VLRSRDFEPWTIFSSPLAMGKEKVHINIVVIGHVDSGKSTTTGHLIYKLGGIDKRVIERFEKEAAE

SEQ ID NO: 127340 - protein, 45 aa, Setaria italica
  Transcript Sequence Number=SeqID_61366
QIERWIMSYLWISRLKVGGDEQDQLEQINKAAVALWKFETTKYYC

SEQ ID NO: 127341 - protein, 55 aa, Setaria italica
  Transcript Sequence Number=SeqID_61367
  Gene Ontology: Mol. function=G-protein coupled photoreceptor activity; Cellular component=membrane; Biological process=regulation of transcription, DNA-dependent
  Homolog annotation: Hit_ID=P93527; Match level="QueryCoverage=96%, HitCoverage=4%, E-value=2e-21, Identity=92%"; Hit description =Phytochrome B
  Pfam annotation: Domain name=HisKA; Domain location=3-55; Score=19.9; E_value=0.0029; Accession=PF00512.17; Description=His Kinase A (phosphoacceptor) domain
VVLKNPLSGIRFTNSLLQMTDLNDDQRQFLETSSACEKQMSKIVKDASLQSIEDG

SEQ ID NO: 127342 - protein, 119 aa, Setaria italica
  Transcript Sequence Number=SeqID_61368
  Gene Ontology: Mol. function=G-protein coupled photoreceptor activity; Cellular component=membrane; Biological process=regulation of transcription, DNA-dependent
  Homolog annotation: Hit_ID=P93527; Match level="QueryCoverage=93%, HitCoverage=9%, E-value=2e-63, Identity=99%"; Hit description =Phytochrome B
  Pfam annotation: Domain name=Phytochrome; Domain location=1-119; Score=157.0; E_value=5.7e-44; Accession=PF00360.12; Description =Phytochrome region
TGIVTQSPSIMDLVKCDGAALYYHGKYYPLGVTPTESQIKDIIEWLTVCHGDSTGLSTDSLADAGYHGAAALGDAVCGMAVAYITPSDYLFWFRSHTAKEIKWGGAKHHPEVLRYCIGS

SEQ ID NO: 127343 - protein, 85 aa, Setaria italica
  Transcript Sequence Number=SeqID_61369
  Gene Ontology: Mol. function=G-protein coupled photoreceptor activity; Cellular component=nuclear speck; Biological process =regulation of transcription, DNA-dependent
  Homolog annotation: Hit_ID=P93527; Match level="QueryCoverage=88%, HitCoverage=6%, E-value=8e-35, Identity=94%"; Hit description =Phytochrome B
SLLNPLWIHSRVSAKPFYAILHRIDIGVVIDLEPARTEDPALSIAGAVQSQKLAVRAISRLQALPGGDVKLLCRTTCSLVVYVPS

SEQ ID NO: 127344 - protein, 88 aa, Setaria italica
  misc_feature (49)..(49): Xaa can be any naturally occurring amino acid
  misc_feature (66)..(66): Xaa can be any naturally occurring amino acid
  Transcript Sequence Number=SeqID_61370
  Gene Ontology: Mol. function=zinc ion binding; Cellular component =cytoplasm; Biological process=regulation of transcription, DNA -dependent
  Homolog annotation: Hit_ID=A6N1P6; Match level="QueryCoverage=95%, HitCoverage=32%, E-value=2e-25, Identity=75%"; Hit description=Zinc finger (Zpr1-type) family protein (Fragment)
  Pfam annotation: Domain name=zf-ZPR1; Domain location=1-88; Score =6.9; E_value=3.4e-10; Accession=PF03367.5; Description=ZPR1 zinc -finger domain
PFLEIPYFREVIVMATTCDICGYRNSELKPGGEIPAKGKKTTLRVQKCXKDLTRDVIKSDSASVKXVPELELELTSGTLGGMVTTVEG

SEQ ID NO: 127345 - protein, 42 aa, Setaria italica
  misc_feature (11)..(11): Xaa can be any naturally occurring amino acid
  Transcript Sequence Number=SeqID_61371
SLHLHAILVFXFLKNLDSQPNSIMKQNFFSYPELVYGMRDAK

SEQ ID NO: 127346 - protein, 33 aa, Setaria italica
  Transcript Sequence Number=SeqID_61372
IINDLLYRFGSWGICFTYGTWFAIEGLFSRWTE

SEQ ID NO: 127347 - protein, 89 aa, Setaria italica
  Transcript Sequence Number=SeqID_61373
FSPHLLCMVAKKKKKHQELNYHYVTALKNTKSLITTMLQHLITLSSDHLPLQHLISGGFSPGGALLRSPPASAFSRVRAALPPPRRRPS

SEQ ID NO: 127348 - protein, 49 aa, Setaria italica
  Transcript Sequence Number=SeqID_61374
RTVQVGHATSLILVPDAPPQVFRSRIWWWCIWYQNEGSCMPYLKMDCAG

SEQ ID NO: 127349 - protein, 44 aa, Setaria italica
  Transcript Sequence Number=SeqID_61375
IWDHLQSSPNLSCICFTSVMPCKIDLGPSSVFTEFYLYSPHTPC

SEQ ID NO: 127350 - protein, 83 aa, Setaria italica
  Transcript Sequence Number=SeqID_61376
  Gene Ontology: Mol. function=DNA binding
NQEDVQDVNEKELSAALEAIKKVMKMDAAEPFNIPVDPVALGIPVSILCYFFHFKCTIMPHLLSMACLSSVAKLPCKPPQGVE

SEQ ID NO: 127351 - protein, 53 aa, Setaria italica
  Transcript Sequence Number=SeqID_61377
  Gene Ontology: Mol. function=phosphotransferase activity, alcohol group as acceptor; Biological process=nucleoside metabolic process
  Homolog annotation: Hit_ID=A3CAB2; Match level="QueryCoverage=90%, HitCoverage=9%, E-value=9e-16, Identity=85%"; Hit description =Uridine kinase
FYADRLIRLVVEHGLGHLPFQEKQVITPTGSVYTGVEFSKSRTCLFAISFGKL

SEQ ID NO: 127352 - protein, 74 aa, Setaria italica
  Transcript Sequence Number=SeqID_61378
  Gene Ontology: Mol. function=phosphotransferase activity, alcohol group as acceptor; Cellular component=cytoplasm; Biological process =nucleoside metabolic process
  Homolog annotation: Hit_ID=A3CAB2; Match level="QueryCoverage=97%, HitCoverage=14%, E-value=1e-34, Identity=97%"; Hit description =Uridine kinase
HTIIRDAATATHDFIFYADRLIRLVVEHGLGHLPFQEKQVITPTGSVYTGVEFSKRLCGISVIRSGESMENATT

SEQ ID NO: 127353 - protein, 48 aa, Setaria italica
  Transcript Sequence Number=SeqID_61379
TLVTEVLFVSNRVCNDIGIPVREISPSWSKHELWQEAFVTSKNIPSQT

SEQ ID NO: 127354 - protein, 59 aa, Setaria italica
  Transcript Sequence Number=SeqID_61380
  Gene Ontology: Mol. function=intramolecular transferase activity, phosphotransferases; Cellular component=chloroplast; Biological process=carbohydrate metabolic process
  Homolog annotation: Hit_ID=B9T3D2; Match level="QueryCoverage=77%, HitCoverage=7%, E-value=7e-11, Identity=65%"; Hit description =Phosphoglucomutase, putative
LHSAIYVQRFVNRVDYMSIYASDLVQAVRKSAGDKDKPLEGLHIVVDAGNGARRSFLIR

SEQ ID NO: 127355 - protein, 50 aa, Setaria italica
  Transcript Sequence Number=SeqID_61381
TMHGLGMPKNQNIPVNKLSSLSHALRHAKETTTAEKWPTKSSPFIICAVC

SEQ ID NO: 127356 - protein, 24 aa, Setaria italica
  Transcript Sequence Number=SeqID_61382
AITLNYAWTRHAKESNIPVNKLSS

SEQ ID NO: 127357 - protein, 53 aa, Setaria italica
  Transcript Sequence Number=SeqID_61383
KIAYLDRDILIPYICLDSSHLEKKGRREKRLVFCRAISIAPESFDSFWCLLSS

SEQ ID NO: 127358 - protein, 56 aa, Setaria italica
  Transcript Sequence Number=SeqID_61384
  Gene Ontology: Mol. function=actin binding; Cellular component =integral to membrane; Biological process=actin cytoskeleton organization and biogenesis
  Homolog annotation: Hit_ID=A3AB67; Match level="QueryCoverage=100%, HitCoverage=6%, E-value=3e-19, Identity=80%"; Hit description=Formin- like protein 16
EERQNEYMNLGLPIVGGLSTEFANVKRAAMVDYDAVVSECSILGSRLTDIKRLLET

SEQ ID NO: 127359 - protein, 71 aa, Setaria italica
  Transcript Sequence Number=SeqID_61385
  Subcellular localization annotation: CTP_CleavageSite=11; ConfidenceScore=5.10e-01
APNSKVGRRCSSSTPSRRRHKGTTPSATGQFHHQSICFNLFPVHFLCLASCLHDLVVACLIWLQNTVSLAS

SEQ ID NO: 127360 - protein, 101 aa, Setaria italica
  Transcript Sequence Number=SeqID_61386
  Gene Ontology: Mol. function=hydrolase activity
  Homolog annotation: Hit_ID=B6TIY2; Match level="QueryCoverage=78%, HitCoverage=22%, E-value=2e-27, Identity=82%"; Hit description =Transposon protein
HAHIQELFFQLILLLFIFSPASQIDYTQPMKGSQQAPQDTPAPADDNSQTGTVGCVAVDAAGNLATATSTGGLVNKMAGRIGDTPVVGAGTYANALCAVSA

SEQ ID NO: 127361 - protein, 53 aa, Setaria italica
  Transcript Sequence Number=SeqID_61387
  Gene Ontology: Mol. function=hydrolase activity
  Homolog annotation: Hit_ID=B6TIY2; Match level="QueryCoverage=67%, HitCoverage=10%, E-value=6e-12, Identity=94%"; Hit description =Transposon protein
AGLSTVANAVSLARLLMEKTPHIYLAFDGAEAFARELEANRRVYVLTWSVGQF

SEQ ID NO: 127362 - protein, 36 aa, Setaria italica
  Transcript Sequence Number=SeqID_61388
MVNSDRFDRGSLRKEVAQDMVPKNTESLLFMPYLHR

SEQ ID NO: 127363 - protein, 58 aa, Setaria italica
  Transcript Sequence Number=SeqID_61389
KTRTLQKWSEWGIKGIATPIFQYSTSLLNIECPFSINPCEPAEAAKIQTDGERAQRAR

SEQ ID NO: 127364 - protein, 73 aa, Setaria italica
  Transcript Sequence Number=SeqID_61390
  Subcellular localization annotation: CTP_CleavageSite=43; ConfidenceScore=5.60e-01
RRTWPAASAPCGAAAARSCPPSPPPIRRHAPATHPPPCPSSSRARRLSPCPPAPSTRPAASAPCGPSQPPSCP

SEQ ID NO: 127365 - protein, 87 aa, Setaria italica
  Transcript Sequence Number=SeqID_61391
KDNRKGQDNNTIRTYNTRNTRNLHQTAILMTRAAGGRAKGGAVGAEFEELEKALWMSSIMIYLSIDSRVSFFHRQTCMCRAFSKKQM

SEQ ID NO: 127366 - protein, 70 aa, Setaria italica
  misc_feature (32)..(32): Xaa can be any naturally occurring amino acid
  Transcript Sequence Number=SeqID_61392
PSLFCFLLCCCFLSSESEDKKQQHRRKQKKRXRHRRDSTSSASSESESASDSDSDDKGSRRKSKRRSSRR

SEQ ID NO: 127367 - protein, 72 aa, Setaria italica
  Transcript Sequence Number=SeqID_61393
TRLLCPVFTLPAFLCPPAPALAVFLRLMDGWFLAAHSRILRAYFPEEDEIGNVSWFTSGVHLEDIRPVRLDL

SEQ ID NO: 127368 - protein, 84 aa, Setaria italica
  Transcript Sequence Number=SeqID_61394
  Homolog annotation: Hit_ID=B4F841; Match level="QueryCoverage=66%, HitCoverage=17%, E-value=2e-25, Identity=96%"; Hit description=Lipid binding protein
RERERERERFDLFIFLVLNCDASFDSPSQVPGRPDAYSAVFYFAAEAPIPPDSLLGRFVHGDDAYRNARFKIANRIVKGPWLVR

SEQ ID NO: 127369 - protein, 77 aa, Setaria italica
  Transcript Sequence Number=SeqID_61395
SSKLSKVCIVLGSSVWTDLLLLNYPQLPLLTSIVMLIVHMVDFFRPETQPTHYHGSEAVAARPRLAERPKDTSRLPQ

SEQ ID NO: 127370 - protein, 72 aa, Setaria italica
  Transcript Sequence Number=SeqID_61396
QEFPEESESSSADVFEGNPTEVAPAFEHYDFNQTLHVLPATLQVRPYTAIPQIKERHRLLSPVFPPQSYSRA

SEQ ID NO: 127371 - protein, 128 aa, Setaria italica
  misc_feature (16)..(16): Xaa can be any naturally occurring amino acid
  misc_feature (85)..(85): Xaa can be any naturally occurring amino acid
  misc_feature (99)..(99): Xaa can be any naturally occurring amino acid
  Transcript Sequence Number=SeqID_61397
  Gene Ontology: Mol. function=nutrient reservoir activity
  Homolog annotation: Hit_ID=B6UH16; Match level="QueryCoverage=99%, HitCoverage=73%, E-value=1e-28, Identity=57%"; Hit description =Globulin
  Pfam annotation: Domain name=Tryp_alpha_amyl; Domain location=1-119; Score=23.8; E_value=0.00072; Accession=PF00234.14; Description =Protease inhibitorseed storageLTP f
QVLDRQLTGGMRYGVXPFRWGTGLRMRCCQQLQDVSRECRCSAVRRMVRGYEEAMPPLEEGPYGYGGEQGEGYYGGGEGGEGYPXRFLPRRIGRVRLTXKARQYAAGLPMMCRLEPQECSVFSGDQYK

SEQ ID NO: 127372 - protein, 49 aa, Setaria italica
  misc_feature (24)..(24): Xaa can be any naturally occurring amino acid
  Transcript Sequence Number=SeqID_61398
  Homolog annotation: Hit_ID=B6UH16; Match level="QueryCoverage=73%, HitCoverage=19%, E-value=4e-09, Identity=89%"; Hit description =Globulin
GRGRGYLPFPPRRIGRVRLTKARXYAAGLPMMCRLEPQECSVFSGDQYK

SEQ ID NO: 127373 - protein, 116 aa, Setaria italica
  Transcript Sequence Number=SeqID_61399
  Gene Ontology: Mol. function=nutrient reservoir activity
  Homolog annotation: Hit_ID=B6UH16; Match level="QueryCoverage=69%, HitCoverage=40%, E-value=4e-26, Identity=79%"; Hit description =Globulin
MAKFVVAAATAALCLAALVAMAAGQSGFERQRLRDLRCQREVEENPLWACRQVLDRQLTGGMRYGVGPFRWGTGLRMRCCQQLQDVSRECRCSAVRRMVRGYEEGPIDRPTRKEGT

SEQ ID NO: 127374 - protein, 73 aa, Setaria italica
  Transcript Sequence Number=SeqID_61400
TWEGTRNNKQTGMKLHEKGVCNGALDEEEKSKHSKPRVKRAKKNVDLSLICCLIILYLLLTKLVLVYYLRVRR

SEQ ID NO: 127375 - protein, 38 aa, Setaria italica
  Transcript Sequence Number=SeqID_61401
FRIAHKSKTSLKCTYSRARNESRTANYELGNNICSGKI

SEQ ID NO: 127376 - protein, 35 aa, Setaria italica
  Transcript Sequence Number=SeqID_61402
SKFGSFWTVIAANFLTEYQKQCYEVVLKSALEISI

SEQ ID NO: 127377 - protein, 48 aa, Setaria italica
  Transcript Sequence Number=SeqID_61403
  Gene Ontology: Mol. function=4-alpha-glucanotransferase activity; Biological process=carbohydrate metabolic process
  Homolog annotation: Hit_ID=C3W8P5; Match level="QueryCoverage=97%, HitCoverage=10%, E-value=1e-18, Identity=89%"; Hit description =Disproportionating enzyme (Fragment)
HEGRRSRFYKTVVGSNEEPPSRCTPEVVHFIVQQHFDAPSMWAIFPLQ

SEQ ID NO: 127378 - protein, 47 aa, Setaria italica
  Transcript Sequence Number=SeqID_61404
  Gene Ontology: Mol. function=4-alpha-glucanotransferase activity; Biological process=carbohydrate metabolic process
  Homolog annotation: Hit_ID=B9SCF0; Match level="QueryCoverage=85%, HitCoverage=4%, E-value=4e-16, Identity=92%"; Hit description=4 -alpha-glucanotransferase, putative
RTPISLHRARLTQMAKYFTAYRIDHILGFFRIWELPDHAATGLVGKF

SEQ ID NO: 127379 - protein, 65 aa, Setaria italica
  misc_feature (5)..(5): Xaa can be any naturally occurring amino acid
  Transcript Sequence Number=SeqID_61405
  Gene Ontology: Mol. function=nucleotide binding; Cellular component =plasma membrane; Biological process=small GTPase mediated signal transduction
  Homolog annotation: Hit_ID=Q40787; Match level="QueryCoverage=100%, HitCoverage=31%, E-value=4e-30, Identity=96%"; Hit description=Ras -related protein Rab7
AKAWXASKGNIPYFETSAKDGTNVEDAFQCIVKNALKNEPEEELYVPDTVDVVGGNRAQRSSGCC

SEQ ID NO: 127380 - protein, 61 aa, Setaria italica
  Transcript Sequence Number=SeqID_61406
  Gene Ontology: Mol. function=serine-type endopeptidase activity; Biological process=proteolysis
  Homolog annotation: Hit_ID=Q5VQ13; Match level="QueryCoverage=52%, HitCoverage=10%, E-value=5e-11, Identity=96%"; Hit description=ATP -dependent Clp protease proteolytic subunit
IFSLVIRYDCISVFSPKSPIHLKHLLLALQIHEDLSRVKRFDAEGALEYGIIDRIIRPSRI

SEQ ID NO: 127381 - protein, 111 aa, Setaria italica
  Transcript Sequence Number=SeqID_61407
  Gene Ontology: Mol. function=serine-type endopeptidase activity; Cellular component=cytoplasm; Biological process=proteolysis
  Homolog annotation: Hit_ID=Q5VQ13; Match level="QueryCoverage=91%, HitCoverage=34%, E-value=5e-48, Identity=90%"; Hit description=ATP -dependent Clp protease proteolytic subunit
  Pfam annotation: Domain name=CLP_protease; Domain location=1-94; Score=-18.7; E_value=4.4e-07; Accession=PF00574.15; Description=Clp protease
YIYLFFCIVQGSRTGMPLCRISLQSPAGAARGQADDIENEANELIRIKNYLYGKLAEHTGHSVEKIHEDLSRVKRFDAEGALEYGIIDRIIRPSRIKKEGSTGHRKDMLNL

SEQ ID NO: 127382 - protein, 49 aa, Setaria italica
  Transcript Sequence Number=SeqID_61408
  Gene Ontology: Mol. function=serine-type endopeptidase activity; Biological process=proteolysis
  Homolog annotation: Hit_ID=Q5VQ13; Match level="QueryCoverage=83%, HitCoverage=13%, E-value=5e-13, Identity=87%"; Hit description=ATP -dependent Clp protease proteolytic subunit
MYCPTRTFSGKSRARTGMPLCRISLQSPAGAARGQADDIENEANELIRI

SEQ ID NO: 127383 - protein, 104 aa, Setaria italica
  misc_feature (25)..(25): Xaa can be any naturally occurring amino acid
  Transcript Sequence Number=SeqID_61409
  Homolog annotation: Hit_ID=B6TM56; Match level="QueryCoverage=65%, HitCoverage=59%, E-value=1e-17, Identity=67%"; Hit description =Chloroplast outer envelope 24 kD protein
MATRRLSCCLLLAVLLVAAPPSTVXFFPDAERQKARQPPPIKLEEEEGAPPPPATEEEMAPRNLWQVYALGAFIVLRWAWAKWKENQDRKDSPDDDGGAPDGST

SEQ ID NO: 127384 - protein, 62 aa, Setaria italica
  Transcript Sequence Number=SeqID_61410
ASWLPPVRARREMHDGRAMHMASSLAAAALFQPSCHQAQFMNKERVCFGLLVSPGVRNPSSR

SEQ ID NO: 127385 - protein, 52 aa, Setaria italica
  Transcript Sequence Number=SeqID_61411
  Subcellular localization annotation: CTP_CleavageSite=16; ConfidenceScore=5.05e-01
ASHMHGRAMHMASSLAAAALFQPSCHQAQFMNKERVCFGLLVSPGVRNPSSR

SEQ ID NO: 127386 - protein, 144 aa, Setaria italica
  misc_feature (14)..(14): Xaa can be any naturally occurring amino acid
  Transcript Sequence Number=SeqID_61412
  Gene Ontology: Mol. function=GTP binding; Cellular component =intracellular
  Homolog annotation: Hit_ID=Q6ATJ0; Match level="QueryCoverage=65%, HitCoverage=23%, E-value=1e-42, Identity=93%"; Hit description =Putative GTP-binding protein
  Pfam annotation: Domain name=MMR_HSR1; Domain location=69-144; Score =44.4; E_value=4.3e-10; Accession=PF01926.15; Description=GTPase of unknown function
AEVVSARGRGSGGXGFMSGAGETELQLQRRRIQERRVKLLTQIEHVRRTRAIQRSGRKRHGGSFGQELVTVAVVGYTNAGKSTLVSALSETALYSDDRLFATVDPRLRSVILPSGRKALLSDTVGFISDLPIQHVLDSSAPNLE

SEQ ID NO: 127387 - protein, 42 aa, Setaria italica
  misc_feature (15)..(15): Xaa can be any naturally occurring amino acid
  Transcript Sequence Number=SeqID_61413
  Gene Ontology: Mol. function=GTP binding; Cellular component =intracellular
ELLALIDRKLTEQQXVVQRSYGPFDRKWRPSSSMDGEKAAEQ

SEQ ID NO: 127388 - protein, 91 aa, Setaria italica
  misc_feature (44)..(44): Xaa can be any naturally occurring amino acid
  Transcript Sequence Number=SeqID_61414
  Homolog annotation: Hit_ID=Q7XN71; Match level="QueryCoverage=90%, HitCoverage=31%, E-value=6e-18, Identity=62%"; Hit description =OSJNBa0089N06.11 protein
LSEGRRVTCRLLGVILEETTPEELQVGCNNAALLPKETSVCTSXLMELCIFLQNHVTVRPSVMEVLLEIAKFCDVYLMERVLDDESEVSTK

SEQ ID NO: 127389 - protein, 67 aa, Setaria italica
  Transcript Sequence Number=SeqID_61415
  Homolog annotation: Hit_ID=Q25A44; Match level="QueryCoverage=80%, HitCoverage=21%, E-value=1e-21, Identity=88%"; Hit description =H0303G06.15 protein
ALSEAGLFANGALINDKVLFCSTENGRTSFVRQLEPDWHIDTSPEIVHQLSVSTRSYKDIFLTHSWS

SEQ ID NO: 127390 - protein, 85 aa, Setaria italica
  Transcript Sequence Number=SeqID_61416
  Gene Ontology: Mol. function=catalytic activity
  Homolog annotation: Hit_ID=B6TWB0; Match level="QueryCoverage=45%, HitCoverage=11%, E-value=2e-11, Identity=82%"; Hit description =Catalytic/ protein phosphatase type 2C
GRERRGDGGGGEGKAAAPAVLRSSGTVWGEGSETFAAVCSRRGEKGTNQDCSIVWEEECEIIEVNVHCPVQGDIVIECISLDEDF

SEQ ID NO: 127391 - protein, 63 aa, Setaria italica
  Transcript Sequence Number=SeqID_61417
  Gene Ontology: Mol. function=catalytic activity
  Homolog annotation: Hit_ID=B6TWB0; Match level="QueryCoverage=90%, HitCoverage=16%, E-value=2e-23, Identity=87%"; Hit description =Catalytic/ protein phosphatase type 2C
MPSSVQGFGCQEDTIFCGIFDGHGPWGHYVAKAVRDSLPPSLLCHWQEALTLASLIDGEKRLS

SEQ ID NO: 127392 - protein, 76 aa, Setaria italica
  Transcript Sequence Number=SeqID_61418
MAIVTCLIGLQYGHVIVHFQKHRERIMNWLIPSFSMLVLGFAMDFFGMHMNKPLYTLSYTLATAGAAGLLFAGIYT

SEQ ID NO: 127393 - protein, 103 aa, Setaria italica
  misc_feature (22)..(22): Xaa can be any naturally occurring amino acid
  misc_feature (75)..(75): Xaa can be any naturally occurring amino acid
  Transcript Sequence Number=SeqID_61419
  Gene Ontology: Mol. function=protein binding
  Homolog annotation: Hit_ID=B9SHQ0; Match level="QueryCoverage=100%, HitCoverage=19%, E-value=7e-25, Identity=59%"; Hit description =Tubulin-specific chaperone E, putative
GSNEIDDFSSVDSLNLFPSLRXSDNPIADPAKGGAPRFVLIARLGKVKILNGSEVSPRERRESEIRYIRLVMGKXQSNDIEDIKRLHPRFAELKAFHCIEDEK

SEQ ID NO: 127394 - protein, 101 aa, Setaria italica
  Transcript Sequence Number=SeqID_61420
  Gene Ontology: Mol. function=protein binding
  Homolog annotation: Hit_ID=B9IQ98; Match level="QueryCoverage=69%, HitCoverage=13%, E-value=7e-22, Identity=70%"; Hit description =Tubulin folding cofactor
LLSLLLKLFLFLILPSALDDASAVPFENLQVLLLGSNEIDDFSSVDSLNLFPSLRDVRLSDNPIADPAKGGAPRFVLIARLGKVKILNGSEVSPRERRESE

SEQ ID NO: 127395 - protein, 126 aa, Setaria italica
  Transcript Sequence Number=SeqID_61421
  Gene Ontology: Mol. function=protein kinase activity; Biological process=protein amino acid phosphorylation
  Homolog annotation: Hit_ID=Q6KAK1; Match level="QueryCoverage=63%, HitCoverage=5%, E-value=1e-26, Identity=77%"; Hit description =Protein kinase-like
  Pfam annotation: Domain name=WD40; Domain location=87-126; Score =19.2; E_value=0.017; Accession=PF00400.24; Description=WD domain, G -beta repeat
SYSKNNLLLPNGLLYRWSLGQRSPFSKIISFCRTDFFGRGTSDILEKAVGNNECYDIRSSFGVQVVQEMYKQTTTVSGLTPKTQLALAAADSAGCHRDTILALASFNLSSQRLISASRDGAVKVWK

SEQ ID NO: 127396 - protein, 46 aa, Setaria italica
  Transcript Sequence Number=SeqID_61422
LRHPISQDPRNKWHAKLCPNGRRATSLSLYQTGAECQTLSTKLKFI

SEQ ID NO: 127397 - protein, 129 aa, Setaria italica
  Transcript Sequence Number=SeqID_61423
  Gene Ontology: Mol. function=oxidoreductase activity, acting on the CH-OH group of donors, NAD or NADP as acceptor; Cellular component =glyoxysome; Biological process=cellular carbohydrate metabolic process
  Homolog annotation: Hit_ID=B6T3Y0; Match level="QueryCoverage=91%, HitCoverage=32%, E-value=1e-56, Identity=89%"; Hit description =Malate dehydrogenase
  Pfam annotation: Domain name=Ldh_1_C; Domain location=2-127; Score =117.4; E_value=4.8e-32; Accession=PF02866.10; Description =lactatemalate dehydrogenase, alphabeta C-t
SKEDVSVPVVGGHAGVTILPLLSQVNPPSSFTQEEIKYLTNRIQNGGTEVVEAKAGAGSATLSMAFAAAKFGDACLRAMRGEAGIIECSYVASEVTELPFFATKVRLGRGGAEEILPLGPTPSTSATRC

SEQ ID NO: 127398 - protein, 61 aa, Setaria italica
  Transcript Sequence Number=SeqID_61424
  Homolog annotation: Hit_ID=B9RK77; Match level="QueryCoverage=95%, HitCoverage=18%, E-value=1e-12, Identity=60%"; Hit description =Valacyclovir hydrolase, putative
NLQDDSILVDLAVAITMEGISAFRFDFSGNGESEGEFQYGSYRKEAADLRSVVLYFSKQNM

SEQ ID NO: 127399 - protein, 81 aa, Setaria italica
  Transcript Sequence Number=SeqID_61425
SSAACIRLLFELHTCSPAKTASATTSRHQHVQRVDDPRYVPPVLVSNRSIQNSNLRHPSCQVKKKKAHNTGESLILSRRRE

SEQ ID NO: 127400 - protein, 82 aa, Setaria italica
  Transcript Sequence Number=SeqID_61426
  Gene Ontology: Mol. function=protein serine/threonine kinase activity; Biological process=protein amino acid phosphorylation
  Homolog annotation: Hit_ID=Q00RH9; Match level="QueryCoverage=95%, HitCoverage=6%, E-value=2e-20, Identity=62%"; Hit description =OSIGBa0125M19.7 protein
  Pfam annotation: Domain name=Lectin_legB; Domain location=1-82; Score= -113.9; E_value=0.013; Accession=PF00139.11; Description=Legume lectin domain
GLLNPLNNGNATNHIVAIEIDTIQNDELQDIDSNHIGVDINGLISVGSATAGYYTPTHAFHKLSLISGQPMQLWVDYDSNQA

SEQ ID NO: 127401 - protein, 80 aa, Setaria italica
  Transcript Sequence Number=SeqID_61427
  Gene Ontology: Mol. function=protein serine/threonine kinase activity; Cellular component=cell surface; Biological process =protein amino acid phosphorylation
  Homolog annotation: Hit_ID=Q00RI0; Match level="QueryCoverage=81%, HitCoverage=9%, E-value=4e-12, Identity=53%"; Hit description =OSIGBa0125M19.6 protein
MAPCCLSKPSRPLLSVACNLSTVLPGTEVYAGFSSATGPIPSRHYILGWSFKLNGEPAALNYPALSIKTIQELAAQLQYQ

SEQ ID NO: 127402 - protein, 40 aa, Setaria italica
  Transcript Sequence Number=SeqID_61428
EFPIFHNQPRLPAPFGVFAYPELQVRVSNCSACVIHQLTS

SEQ ID NO: 127403 - protein, 69 aa, Setaria italica
  misc_feature (37)..(37): Xaa can be any naturally occurring amino acid
  Transcript Sequence Number=SeqID_61429
  Homolog annotation: Hit_ID=B6U2H4; Match level="QueryCoverage=65%, HitCoverage=10%, E-value=5e-17, Identity=91%"; Hit description =Cyclin-like F-box
MTWRRRPWAASRTPPGRRRTARQATSGPVLDDSIMSXWYLSMESGKFWFPAQVYNREHGHVGFMMSCYD

SEQ ID NO: 127404 - protein, 61 aa, Setaria italica
  Transcript Sequence Number=SeqID_61430
  Subcellular localization annotation: CTP_CleavageSite=58; ConfidenceScore=5.43e-01
SKSQSVGSISSHPSGYFTRLVFILGMSQIFLPLSKNFLMGKSKLPARNSLPELLPPVFAAL

SEQ ID NO: 127405 - protein, 78 aa, Setaria italica
  Transcript Sequence Number=SeqID_61431
MAPRCRAPLLARVPERKHPHDIRANPKVQLAQAKRFATGVLERYNKRKKIKFELLDAKPVISIPEPRCCYTHINFTAR

SEQ ID NO: 127406 - protein, 83 aa, Setaria italica
  misc_feature (45)..(45): Xaa can be any naturally occurring amino acid
  Transcript Sequence Number=SeqID_61432
NKEDSEEQLFFAEIYHCGPRRAPNGFIVTSCEPLGPDSAVGPNIXEPDCTSVVRKNADFTYCFACTERKLHPRGENYVAGHCN

SEQ ID NO: 127407 - protein, 40 aa, Setaria italica
  Transcript Sequence Number=SeqID_61433
LKEVRVAQAPSLVYITCLLITSSLHKYPSAPVILFYAFLL

SEQ ID NO: 127408 - protein, 47 aa, Setaria italica
  Transcript Sequence Number=SeqID_61434
RTMYISDLPSYNFQGSFLPWYTVGVYCNREVYDMYAVCILLIYHISK

SEQ ID NO: 127409 - protein, 62 aa, Setaria italica
  Transcript Sequence Number=SeqID_61435
TCNVHQARCLSNAYSFNQLSCTSPFSCVYFIHTTCMHCKELSLRGRNDEFRRKQAVDALLIN

SEQ ID NO: 127410 - protein, 69 aa, Setaria italica
  Transcript Sequence Number=SeqID_61436
  Gene Ontology: Mol. function=aspartic-type endopeptidase activity; Biological process=proteolysis
  Homolog annotation: Hit_ID=B6TP02; Match level="QueryCoverage=75%, HitCoverage=13%, E-value=3e-13, Identity=67%"; Hit description =Aspartic proteinase nepenthesin-1
MALLLRLLALSLLLAVATPIRDVTDACSSQVKDFPHLNSSGIHLTPLPADLPFSAVLTHDDARIASLAA

SEQ ID NO: 127411 - protein, 61 aa, Setaria italica
  Transcript Sequence Number=SeqID_61437
SRSSTNVLVLCDSKKTYNLERMEYQVEKHIRMNKKFISISWAPIGLMSLEPSGPCTYSKIK

SEQ ID NO: 127412 - protein, 58 aa, Setaria italica
  Transcript Sequence Number=SeqID_61438
  Gene Ontology: Mol. function=catalytic activity; Cellular component =chloroplast; Biological process=cellular metabolic process
  Homolog annotation: Hit_ID=B6SU61; Match level="QueryCoverage=91%, HitCoverage=17%, E-value=6e-21, Identity=90%"; Hit description=Tic62 protein
SIWLSSEKEILDVTGPYRIDYMATTKLVQAATAAQVEHFVLVTSLGTNRIGFPAFLLK

SEQ ID NO: 127413 - protein, 83 aa, Setaria italica
  Transcript Sequence Number=SeqID_61439
  Gene Ontology: Mol. function=aminoacyl-tRNA ligase activity
  Homolog annotation: Hit_ID=Q84T06; Match level="QueryCoverage=100%, HitCoverage=12%, E-value=4e-39, Identity=84%"; Hit description =Unknow protein
RLRCMWELGSVLNFLHVFRPLLNITAEFTAEDLEAALITPNETLDDVHMPLLKSIPPVTRMAMGRGTWVTVLCRKLKDWWHWV

SEQ ID NO: 127414 - protein, 120 aa, Setaria italica
  misc_feature (28)..(28): Xaa can be any naturally occurring amino acid
  Transcript Sequence Number=SeqID_61440
  Gene Ontology: Mol. function=aminoacyl-tRNA ligase activity
  Homolog annotation: Hit_ID=Q84T06; Match level="QueryCoverage=72%, HitCoverage=12%, E-value=2e-12, Identity=48%"; Hit description =Unknow protein
ERKNAEDDDEEEEEYSLSTSEDIEPQQXKKLETRGRRGSKLRSVDEIQSGLRRSKRSSRPRINYRQYDFSDSDTEPGKARKSDASDPDAGSDAENDMELSTSSQEQEEEEEDDSPDETNG

SEQ ID NO: 127415 - protein, 63 aa, Setaria italica
  Transcript Sequence Number=SeqID_61441
KTKGKKGRRLPTRKVGFRRLTYKMLSECYFILGSHEEVFAFGYVHYMKGRASNGPLLYYGQTN

SEQ ID NO: 127416 - protein, 36 aa, Setaria italica
  Transcript Sequence Number=SeqID_61442
LSGIISQQDDIRNFIDSSLKQGHDLSTFRKERIGWS

SEQ ID NO: 127417 - protein, 56 aa, Setaria italica
  Transcript Sequence Number=SeqID_61443
SSLAFSYRKREENSAEPVTTTTTTNRRVLPLRSEAPSNGKLNGPSPTANDSFDGNS

SEQ ID NO: 127418 - protein, 56 aa, Setaria italica
  Transcript Sequence Number=SeqID_61444
  Gene Ontology: Mol. function=aminoacyl-tRNA ligase activity
  Homolog annotation: Hit_ID=Q2PF39; Match level="QueryCoverage=98%, HitCoverage=7%, E-value=5e-23, Identity=78%"; Hit description =Aminoacyl-tRNA synthetase
DSKGTWVTVLCRKLKDWWHWVAEGDLPIVASHGTEIETYKTLEPATRLVILKAICD

SEQ ID NO: 127419 - protein, 83 aa, Setaria italica
  Transcript Sequence Number=SeqID_61445
  Gene Ontology: Mol. function=protein binding; Cellular component =nucleus
  Pfam annotation: Domain name=DUF538; Domain location=1-83; Score =45.6; E_value=1.9e-10; Accession=PF04398.4; Description=Protein of unknown function, DUF538
HSKEMLKALGFPGGVMPLRGLEECGWVKETGFVWMRQKAPYEHYFRGTGTRVRYDAEVTAYVEEGRMKRMTGVRKTKTRYLDY

SEQ ID NO: 127420 - protein, 84 aa, Setaria italica
  Transcript Sequence Number=SeqID_61446
  Gene Ontology: Mol. function=DNA binding; Cellular component=nucleus; Biological process=regulation of transcription, DNA-dependent
  Homolog annotation: Hit_ID=Q8LT07; Match level="QueryCoverage=92%, HitCoverage=17%, E-value=3e-39, Identity=98%"; Hit description =Transcription factor PCF5
  Pfam annotation: Domain name=TCP; Domain location=19-84; Score=111.9; E_value=2.1e-30; Accession=PF03634.5; Description=TCP family transcription factor
RGGGGGEIVAVQGGHIVRSTGRKDRHSKVCTARGPRDRRVRLSAHTAIQFYDVQDRLGYDRPSKAVDWLIKNAKDAIDKLEVLP

SEQ ID NO: 127421 - protein, 110 aa, Setaria italica
  misc_feature (33)..(33): Xaa can be any naturally occurring amino acid
  misc_feature (50)..(50): Xaa can be any naturally occurring amino acid
  Transcript Sequence Number=SeqID_61447
  Gene Ontology: Cellular component=vacuole; Biological process =response to stress
  Homolog annotation: Hit_ID=B6TLW3; Match level="QueryCoverage=97%, HitCoverage=62%, E-value=5e-41, Identity=79%"; Hit description=Fiber protein Fb19
  Pfam annotation: Domain name=Usp; Domain location=3-104; Score=33.7; E_value=7.5e-07; Accession=PF00582.18; Description=Universal stress protein family
SAASAVGLAGPGAADVLPFVEADLKRTALRVIXKAKELCAQVADAEYEAXEGDARNVLCDAVERHHAEMLVVGSHGYGAIKRAVLGSVSDYCAHHAHCTVMIVKKPKPKH

SEQ ID NO: 127422 - protein, 59 aa, Setaria italica
  Transcript Sequence Number=SeqID_61448
  Gene Ontology: Cellular component=vacuole; Biological process =response to stress
  Homolog annotation: Hit_ID=B6TLW3; Match level="QueryCoverage=79%, HitCoverage=27%, E-value=2e-15, Identity=85%"; Hit description=Fiber protein Fb19
GTARNVLCDAAERHHAEMLVVGSHGYGAIKRAVLGSVSDYCAHQCLCFGFFTIITVQCA

SEQ ID NO: 127423 - protein, 159 aa, Setaria italica
  misc_feature (34)..(34): Xaa can be any naturally occurring amino acid
  misc_feature (50)..(50): Xaa can be any naturally occurring amino acid
  misc_feature (68)..(68): Xaa can be any naturally occurring amino acid
  misc_feature (152)..(152): Xaa can be any naturally occurring amino acid
  Transcript Sequence Number=SeqID_61449
  Gene Ontology: Mol. function=protein serine/threonine kinase activity; Biological process=protein amino acid phosphorylation
  Homolog annotation: Hit_ID=B6T841; Match level="QueryCoverage=92%, HitCoverage=36%, E-value=4e-79, Identity=95%"; Hit description =Glycogen synthase kinase-3 MsK-3
  Pfam annotation: Domain name=Pkinase; Domain location=1-133; Score= -95.2; E_value=0.008; Accession=PF00069.17; Description=Protein kinase domain
VKGEPNISYICSRYYRAPELIFGATEYTTAIDIXWSAGCVLAELMLGQPXFPGESGVDQLVEIIKALXPTREEIKCMNPNYTEFKFPQIKAHPWHKVFHKRMPPEAVDLVSRLLQYSPNLRCTAVEALVHPFFDELRDPNTRLPNGRFLPPXFNFKPLL

SEQ ID NO: 127424 - protein, 105 aa, Setaria italica
  misc_feature (59)..(59): Xaa can be any naturally occurring amino acid
  misc_feature (65)..(65): Xaa can be any naturally occurring amino acid
  misc_feature (81)..(81): Xaa can be any naturally occurring amino acid
  Transcript Sequence Number=SeqID_61450
  Gene Ontology: Mol. function=protein serine/threonine kinase activity; Biological process=protein amino acid phosphorylation
  Homolog annotation: Hit_ID=B6T841; Match level="QueryCoverage=95%, HitCoverage=24%, E-value=1e-45, Identity=90%"; Hit description =Glycogen synthase kinase-3 MsK-3
LVILKLWFLCSYVPETVHRVVKHHNKMNQRMPLIYVKLYMYQICRALAYIHGSIGVCHXDIKPQXNLLVNPHTHQLKLCDXGSAKVLVKGEPNISYICSRYYRHL

SEQ ID NO: 127425 - protein, 110 aa, Setaria italica
  misc_feature (24)..(24): Xaa can be any naturally occurring amino acid
  misc_feature (93)..(93): Xaa can be any naturally occurring amino acid
  Transcript Sequence Number=SeqID_61451
  Gene Ontology: Mol. function=protein serine/threonine kinase activity; Biological process=protein amino acid phosphorylation
  Homolog annotation: Hit_ID=B6T841; Match level="QueryCoverage=90%, HitCoverage=24%, E-value=7e-51, Identity=96%"; Hit description =Glycogen synthase kinase-3 MsK-3
  Pfam annotation: Domain name=Pkinase; Domain location=2-110; Score= -105.1; E_value=0.031; Accession=PF00069.17; Description=Protein kinase domain
SKFRYSSSFSVVEYVPETVHRVVXKHHNKMNQRMPLIYVKLYMYQICRALAYIHGSIGVCHRDIKPQNLLVNPHTHQLKLCDFGSAKVLVKGXPNISYICSRYYRAPELI

SEQ ID NO: 127426 - protein, 104 aa, Setaria italica
  Transcript Sequence Number=SeqID_61452
  Gene Ontology: Mol. function=protein serine/threonine kinase activity; Biological process=protein amino acid phosphorylation
  Homolog annotation: Hit_ID=B6T841; Match level="QueryCoverage=68%, HitCoverage=17%, E-value=8e-35, Identity=98%"; Hit description =Glycogen synthase kinase-3 MsK-3
KNRELQTMRLLDHPNVVALKHCFFSTTEKDELYLNLVLEYVPETVHRVVKHHNKMNQRMPLIYVKLYMYQVIICPLRFWVLLLLLSYTVMPFVFRILLNCYFDK

SEQ ID NO: 127427 - protein, 94 aa, Setaria italica
  misc_feature (80)..(80): Xaa can be any naturally occurring amino acid
  Transcript Sequence Number=SeqID_61453
  Subcellular localization annotation: CTP_CleavageSite=62; ConfidenceScore=5.29e-01
GGVPLHVIATYTTQLRTQATAVVQAGNLASSTTDRRACHQSSNIPRENAHLQSSGLKARSISQSNIGALLLCVFWDQISXQCLLGLLSVHAARS

SEQ ID NO: 127428 - protein, 89 aa, Setaria italica
  Transcript Sequence Number=SeqID_61454
  Subcellular localization annotation: CTP_CleavageSite=63; ConfidenceScore=5.14e-01
ISEEEGAYTNANSALHQLTTAVVDLMRYLSNLLFRCSSSSATGISGLPSKICFPFSLPPLPPLAALAPASSPFLPFYLPPPPLLSACRD

SEQ ID NO: 127429 - protein, 87 aa, Setaria italica
  Transcript Sequence Number=SeqID_61455
  Gene Ontology: Mol. function=protein serine/threonine kinase activity; Biological process=protein amino acid phosphorylation
  Homolog annotation: Hit_ID=B6T841; Match level="QueryCoverage=57%, HitCoverage=12%, E-value=5e-23, Identity=94%"; Hit description =Glycogen synthase kinase-3 MsK-3
  Subcellular localization annotation: CTP_CleavageSite=42; ConfidenceScore=5.71e-01
NLLFRCSSSSATGISGLPSKICFPLLSSSSPPSGCSRSRNLRCTAVEALVHPFFDELRDPNTRLPNGRFLPPLFNFKPHELKGVPAD

SEQ ID NO: 127430 - protein, 69 aa, Setaria italica
  misc_feature (33)..(33): Xaa can be any naturally occurring amino acid
  Transcript Sequence Number=SeqID_61456
  Gene Ontology: Mol. function=protein serine/threonine kinase activity; Biological process=protein amino acid phosphorylation
  Homolog annotation: Hit_ID=B6T841; Match level="QueryCoverage=100%, HitCoverage=16%, E-value=2e-32, Identity=94%"; Hit description =Glycogen synthase kinase-3 MsK-3
SPNLRCTAVEALVHPFFDELRDPNTRLPNGRFXPPLFNFKPHELKGVPADIVAKLIPEHAKKQCPYVGL

SEQ ID NO: 127431 - protein, 65 aa, Setaria italica
  misc_feature (21)..(21): Xaa can be any naturally occurring amino acid
  misc_feature (30)..(30): Xaa can be any naturally occurring amino acid
  Transcript Sequence Number=SeqID_61457
  Gene Ontology: Mol. function=protein serine/threonine kinase activity; Biological process=protein amino acid phosphorylation
  Homolog annotation: Hit_ID=B6T841; Match level="QueryCoverage=98%, HitCoverage=15%, E-value=9e-27, Identity=92%"; Hit description =Glycogen synthase kinase-3 MsK-3
VTAVEALVHPFFDELRDPNTXRLPNGRFLXPLFNFKPHELKGVPADIVAKLIPEHAKKQCPYVGL

SEQ ID NO: 127432 - protein, 35 aa, Setaria italica
  Transcript Sequence Number=SeqID_61458
  Gene Ontology: Mol. function=protein serine/threonine kinase activity; Biological process=protein amino acid phosphorylation
  Homolog annotation: Hit_ID=B6T841; Match level="QueryCoverage=100%, HitCoverage=8%, E-value=8e-12, Identity=94%"; Hit description =Glycogen synthase kinase-3 MsK-3
PLFNFKPHELKGVPADIVAKLIPEHAKKQCPYVGL

SEQ ID NO: 127433 - protein, 68 aa, Setaria italica
  misc_feature (22)..(22): Xaa can be any naturally occurring amino acid
  misc_feature (33)..(33): Xaa can be any naturally occurring amino acid
  Transcript Sequence Number=SeqID_61459
  Gene Ontology: Mol. function=protein serine/threonine kinase activity; Biological process=protein amino acid phosphorylation
  Homolog annotation: Hit_ID=B6T841; Match level="QueryCoverage=100%, HitCoverage=16%, E-value=6e-28, Identity=89%"; Hit description =Glycogen synthase kinase-3 MsK-3
NLRCTAVEALVHPFFDELRDPXIPRLPNGRFLXPLFNFKPHELKGVPADIVAKLIPEHAKKQCPYVGL

SEQ ID NO: 127434 - protein, 56 aa, Setaria italica
  Transcript Sequence Number=SeqID_61460
  Gene Ontology: Mol. function=protein serine/threonine kinase activity; Biological process=protein amino acid phosphorylation
  Homolog annotation: Hit_ID=B6T841; Match level="QueryCoverage=83%, HitCoverage=11%, E-value=6e-21, Identity=97%"; Hit description =Glycogen synthase kinase-3 MsK-3
VSRPAPRTPPNLRCTAVEALVHPFFDELRDPNTRLPNGRFLPPLFNFKPHELKGVP

SEQ ID NO: 127435 - protein, 62 aa, Setaria italica
  Transcript Sequence Number=SeqID_61461
  Subcellular localization annotation: CTP_CleavageSite=19; ConfidenceScore=5.11e-01
RGGVPLHVIATYTTQLRTQATAVVQAGNLASSTTDRRACHQSSNIPRENAHLQSSGLKAHRG

SEQ ID NO: 127436 - protein, 58 aa, Setaria italica
  Transcript Sequence Number=SeqID_61462
  Subcellular localization annotation: CTP_CleavageSite=15; ConfidenceScore=5.08e-01
PLHVIATYTTQLRTQATAVVQAGNLASSTTDRRACHQSSNIPRENAHLQSSGLKAHRG

SEQ ID NO: 127437 - protein, 35 aa, Setaria italica
  Transcript Sequence Number=SeqID_61463
LSPCVPLRPELCKCAFPLGCWMIGGMHACPSLKML

SEQ ID NO: 127438 - protein, 55 aa, Setaria italica
  Transcript Sequence Number=SeqID_61464
LLITKTIQDICMILFDQISPLTDMGKSDQIVSYKYLMLMCFIIMNLLYKMVQNFT

SEQ ID NO: 127439 - protein, 48 aa, Setaria italica
  Transcript Sequence Number=SeqID_61465
  Gene Ontology: Mol. function=oxidoreductase activity, acting on the CH-OH group of donors, NAD or NADP as acceptor; Biological process =metabolic process
SNSHGAVTRVLFCGPYWPASTNYTREYLQNYPYIQMQIFESSAVLEVL

SEQ ID NO: 127440 - protein, 52 aa, Setaria italica
  Transcript Sequence Number=SeqID_61466
MTHICIKIGRLGGGGSDHSAFVQHIGIPSVDMSIGSGLSYFCCILAFINSQP

SEQ ID NO: 127441 - protein, 31 aa, Setaria italica
  Transcript Sequence Number=SeqID_61467
  Homolog annotation: Hit_ID=B6SWE3; Match level="QueryCoverage=87%, HitCoverage=3%, E-value=2e-10, Identity=100%"; Hit description =Glutamate carboxypeptidase 2
YIYVSDYPVYHSLYDDFIWMEKFGDPLFQRH

SEQ ID NO: 127442 - protein, 54 aa, Setaria italica
  Transcript Sequence Number=SeqID_61468
YEHLLSMIKDMMVIVLPINYPDSKYSLFSLLSRKVQNPDNRTESLYDLWMASNT

SEQ ID NO: 127443 - protein, 55 aa, Setaria italica
  Transcript Sequence Number=SeqID_61469
  Homolog annotation: Hit_ID=B6SWE3; Match level="QueryCoverage=80%, HitCoverage=5%, E-value=7e-11, Identity=72%"; Hit description =Glutamate carboxypeptidase 2
NRKKFRKNTLSYQRHSTTRRTKTMWGLVALRLSDEEILPFNYSYYATELENGVMG

SEQ ID NO: 127444 - protein, 94 aa, Setaria italica
  Transcript Sequence Number=SeqID_61470
  Gene Ontology: Mol. function=nucleic acid binding
  Homolog annotation: Hit_ID=B6THS7; Match level="QueryCoverage=38%, HitCoverage=17%, E-value=6e-13, Identity=97%"; Hit description =Splicing factor, arginine/serine-rich 4
DAADAKYYMDGQIVLGRQITVVFAEENRKKPQEMRARDRVRGRSYDRRYSRSRSPPYSRGRSPSRSYSRYVCPLYLGLKGYRILVDTIQMCFID

SEQ ID NO: 127445 - protein, 74 aa, Setaria italica
  Transcript Sequence Number=SeqID_61471
  Gene Ontology: Mol. function=glutamate-ammonia ligase activity; Cellular component=cytoplasm; Biological process=nitrogen compound metabolic process
  Homolog annotation: Hit_ID=P38560; Match level="QueryCoverage=98%, HitCoverage=17%, E-value=1e-26, Identity=84%"; Hit description =Glutamine synthetase root isozyme 2
VFTEIAGVVVSFDPKPIPGDWNGAHHSNLPESAGAHTNYSTKSMRSDGGYEVIKKAIQKLGLRHREHIAAYGDG

SEQ ID NO: 127446 - protein, 77 aa, Setaria italica
  Transcript Sequence Number=SeqID_61472
  Gene Ontology: Mol. function=nucleotide binding; Biological process =small GTPase mediated signal transduction
  Homolog annotation: Hit_ID=Q9XEN4; Match level="QueryCoverage=72%, HitCoverage=26%, E-value=2e-19, Identity=78%"; Hit description=Small GTP-binding protein
CPSLVGKSKVRYCRLGSNWVFFFLLETSAKTAINVNDIFYEIAKRLLQGQQDPSPQAGMVLNQRPNERMVSSSSCCS

SEQ ID NO: 127447 - protein, 50 aa, Setaria italica
  Transcript Sequence Number=SeqID_61473
TFLITCPICCKCTRGSSTKYPESPVWLHSSLITLQLPSCLLMCLSCKCQY

SEQ ID NO: 127448 - protein, 72 aa, Setaria italica
  misc_feature (35)..(35): Xaa can be any naturally occurring amino acid
  Transcript Sequence Number=SeqID_61474
  Gene Ontology: Mol. function=nucleotide binding; Cellular component =plasma membrane; Biological process=small GTPase mediated signal transduction
  Homolog annotation: Hit_ID=Q2QLR7; Match level="QueryCoverage=90%, HitCoverage=25%, E-value=7e-23, Identity=84%"; Hit description=Ras -related protein RHN1, putative, expressed
  Pfam annotation: Domain name=Ras; Domain location=1-71; Score=-62.3; E_value=0.00013; Accession=PF00071.14; Description=Ras family
LIRGRLTAAIVVYDITNPASFTRAKKWVQELQAHXNPNTIVALAGNKADMLDARQVPAEEAKERNAQENGAF

SEQ ID NO: 127449 - protein, 71 aa, Setaria italica
  misc_feature (57)..(57): Xaa can be any naturally occurring amino acid
  misc_feature (62)..(62): Xaa can be any naturally occurring amino acid
  Transcript Sequence Number=SeqID_61475
  Gene Ontology: Mol. function=nucleotide binding; Cellular component =plasma membrane; Biological process=small GTPase mediated signal transduction
  Homolog annotation: Hit_ID=Q94IR3; Match level="QueryCoverage=88%, HitCoverage=31%, E-value=1e-23, Identity=84%"; Hit description=Small GTP-binding protein
LASSISALLPAEEAKTYAQENGLFFMETSAKTAINVNDIFYEIAKRLLQGQQDPSPXAGMVXNQRPNERMV

SEQ ID NO: 127450 - protein, 100 aa, Setaria italica
  misc_feature (1)..(1): Xaa can be any naturally occurring amino acid
  Transcript Sequence Number=SeqID_61476
XSFFFFLYKTMTTTILIAEKIHFPIDYTSLREIPGKRSQNATMTLIPMEHWQILNSLTCTPFPNFHQFEMIFPTMPTKQTCHNLWQMTINALYSYPGAIL

SEQ ID NO: 127451 - protein, 72 aa, Setaria italica
  Transcript Sequence Number=SeqID_61477
  Homolog annotation: Hit_ID=B6SV12; Match level="QueryCoverage=73%, HitCoverage=10%, E-value=2e-22, Identity=96%"; Hit description=SLT1 protein
SFPLGLFFLIFVVNYLLSLTRIPEDAKLEAYFDEAASVLEIMVPKRGNEPEEHEVRVSLRPPHFGANDLLLT

SEQ ID NO: 127452 - protein, 84 aa, Setaria italica
  Transcript Sequence Number=SeqID_61478
LAIAASGTFLGICYRSQGPCLHYLALGFNMFVWGYLVYCLWFSCNFCLCQKIGCLLDVLKCVHHRHEQSVCFIEWLLDNCIGHL

SEQ ID NO: 127453 - protein, 84 aa, Setaria italica; identical to SEQ ID NO: 127452
  Transcript Sequence Number=SeqID_61479

SEQ ID NO: 127454 - protein, 41 aa, Setaria italica
  misc_feature (15)..(15): Xaa can be any naturally occurring amino acid
  Transcript Sequence Number=SeqID_61480
  Homolog annotation: Hit_ID=B6SW94; Match level="QueryCoverage=100%, HitCoverage=7%, E-value=2e-10, Identity=85%"; Hit description=SLT1 protein
EAYRDETGTGLEIIXPLKFRCLAPEEHEVHVSMRPPSSWCQ

SEQ ID NO: 127455 - protein, 52 aa, Setaria italica
  Transcript Sequence Number=SeqID_61481
EHWQILNSLTCTPFPNFHQFEMIFPTMPTKQTCHNLWQMTINALYSYPGAIL

SEQ ID NO: 127456 - protein, 58 aa, Setaria italica
  Transcript Sequence Number=SeqID_61482
MPYTVIQEPFYKTNRLLMSVMHTFKHIEQTTNLLTQTKVTTKPKTIHKVSPNKHIETK

SEQ ID NO: 127457 - protein, 53 aa, Setaria italica
  Transcript Sequence Number=SeqID_61483
LEHWQILNSLTCTPFPNFHQFEMIFPTMPTKQTCHNLWQMTINALYSYPGAIL

SEQ ID NO: 127458 - protein, 75 aa, Setaria italica
  Transcript Sequence Number=SeqID_61484
ITLVFEKFLENVHKIATMTLIPMEHWQILNSLTCTPFPNFHQFEMIFPTMPTKQTCHNLWQMTINALYSYPGAIL

SEQ ID NO: 127459 - protein, 47 aa, Setaria italica
  Transcript Sequence Number=SeqID_61485
IAEKIHFPIDYTSLREIPGKRSQNATMTLIPMEHWQILNSLTCTPIS

SEQ ID NO: 127460 - protein, 64 aa, Setaria italica
  Transcript Sequence Number=SeqID_61486
CYRSQGPCLHYLALGFNMFVWGYLVYCLWFSCNFCLCQKIGCLLDVLKCVHHRHEQSVCFIEWL

SEQ ID NO: 127461 - protein, 61 aa, Setaria italica
  Transcript Sequence Number=SeqID_61487
LVVGNCSIWNIFRNMLQVTRTMSALLSSWFQYVCLGIPCVLSFGLVVTFVCVKDWLSARCA

SEQ ID NO: 127462 - protein, 42 aa, Setaria italica
  Transcript Sequence Number=SeqID_61488
NQELSNADMVLVTCSIFLKMFQMLQLPTTRMLQSTRIVSHQN

SEQ ID NO: 127463 - protein, 49 aa, Setaria italica
  Transcript Sequence Number=SeqID_61489
EATLVMVPMKTCSRSYEETFGVEVPYCDHKTTVQQPSTVLLILMGNNPS

SEQ ID NO: 127464 - protein, 58 aa, Setaria italica
  Transcript Sequence Number=SeqID_61490
NQELSNADMVLVTCSIFLKMFQMLQLPTTRMLQSTRIVSHQKLDKTVLGCCTVVLWSQ

SEQ ID NO: 127465 - protein, 36 aa, Setaria italica
  Transcript Sequence Number=SeqID_61491
KCSRCCNCQLPECFNQLGLFPIKISKTVLGCCTVVL

SEQ ID NO: 127466 - protein, 49 aa, Setaria italica
  Transcript Sequence Number=SeqID_61492
LAIAASGTFLGICYRSQGPCLHYLALGFNMFVWGYLVYCLWFSCNFCLC

SEQ ID NO: 127467 - protein, 57 aa, Setaria italica
  Transcript Sequence Number=SeqID_61493
  Gene Ontology: Mol. function=translation initiation factor activity
  Homolog annotation: Hit_ID=B6SN22; Match level="QueryCoverage=100%, HitCoverage=32%, E-value=1e-16, Identity=74%"; Hit description=GTP binding protein
MAKVHPNAADTEPPSPAPEVEETPTVLTVWRKSLLFNCDGFTVFDAKGDLAFRVDCY

SEQ ID NO: 127468 - protein, 54 aa, Setaria italica
  Transcript Sequence Number=SeqID_61494
  Gene Ontology: Mol. function=translation initiation factor activity
  Homolog annotation: Hit_ID=B6SN22; Match level="QueryCoverage=100%, HitCoverage=29%, E-value=7e-13, Identity=72%"; Hit description=GTP binding protein
MGKVHPNAVAPEPATTTVRRSAEEEAPAVLTVWRKSLLFNCDGFTVFDAKGDLA

SEQ ID NO: 127469 - protein, 60 aa, Setaria italica
  Transcript Sequence Number=SeqID_61495
  Gene Ontology: Mol. function=translation initiation factor activity
  Homolog annotation: Hit_ID=B6SN22; Match level="QueryCoverage=100%, HitCoverage=32%, E-value=5e-16, Identity=73%"; Hit description=GTP binding protein
MAKVHPNGAVAPEPTISSGAAAEEQPPAVLTVWRKSLLFNCDGFTVFDAKGDLAFRVDCY

SEQ ID NO: 127470 - protein, 56 aa, Setaria italica
  misc_feature (43)..(43): Xaa can be any naturally occurring amino acid
  Transcript Sequence Number=SeqID_61496
FPPTDRLLCLAFCSVTFVARRQRSDAGMLPLLVICFAGWKHPXPFFFFAAAYPLVG

SEQ ID NO: 127471 - protein, 80 aa, Setaria italica
  Transcript Sequence Number=SeqID_61497
ASFAYGRNTQLLNSYMAQIIQQEQEQEQEEHSGSSSSAELLKKCEYTVMGEENLERTAGRHGYQVELNKAAVVTVGDIWT

SEQ ID NO: 127472 - protein, 97 aa, Setaria italica
  Transcript Sequence Number=SeqID_61498
VLCSFVSSFLIRSQTIDRRSMLNSVSFADKSPEEARAPRALLELDSVVDLCQCSCSFVAPSINKVLCAIYSFESDLWAFLCLLKVEQWRHAVKFKHS

SEQ ID NO: 127473 - protein, 145 aa, Setaria italica
  Transcript Sequence Number=SeqID_61499
  Gene Ontology: Mol. function=nutrient reservoir activity
  Homolog annotation: Hit_ID=B6SK46; Match level="QueryCoverage=36%, HitCoverage=10%, E-value=2e-24, Identity=88%"; Hit description=Cupin family protein
SAPKPYNLYDSEPGFRNTYGWTIAVDKHDYEPLKHSDIGVYLVNLTAGSMLAPHNYIIYTGATTLARCLLRNIAHSPEVLFASIDLGTTTLLILAFVYEEVMEFLVFILSNWLIVSLLCEYTAKLHWRQSRILCRLIRGILWVRK

SEQ ID NO: 127474 - protein, 65 aa, Setaria italica
  Transcript Sequence Number=SeqID_61500
  Subcellular localization annotation: CTP_CleavageSite=42; ConfidenceScore=5.63e-01
PAAPPSSPSPSHAPPPPSPSSRASPSPSSPCPGEGVQGAGARAGGGPDTAVVPGHGEEALILPFF

SEQ ID NO: 127475 - protein, 81 aa, Setaria italica
  Transcript Sequence Number=SeqID_61501
LMDRTDADMVTGYSSLTSPCQKGRHLIAAMQWELAYPVEVELIRGEAAGGDPGRGASDPGGDGESGGGREGLGLRGYAAST

SEQ ID NO: 127476 - protein, 51 aa, Setaria italica
  Transcript Sequence Number=SeqID_61502
  Gene Ontology: Mol. function=protein serine/threonine kinase activity; Biological process=protein amino acid phosphorylation
  Homolog annotation: Hit_ID=B6T7G8; Match level="QueryCoverage=90%, HitCoverage=13%, E-value=8e-20, Identity=93%"; Hit description =Serine/threonine-protein kinase 16
VLVLFWSLGCTLYAIMFNVSPFEYALGESGGSLQLAIVNGQLKWPAGPNPP

SEQ ID NO: 127477 - protein, 82 aa, Setaria italica
  Transcript Sequence Number=SeqID_61503
  Subcellular localization annotation: CTP_CleavageSite=46; ConfidenceScore=5.61e-01
HCIIRRPCLLPLRVVTITSTVSRRPLSSPSQVVTNGRVPACVHRVRAPAGSGRGRFSVLLARRRKDDGDPVLRAMDELVDED

SEQ ID NO: 127478 - protein, 62 aa, Setaria italica
  Transcript Sequence Number=SeqID_61504
  Homolog annotation: Hit_ID=B6UFQ5; Match level="QueryCoverage=90%, HitCoverage=16%, E-value=9e-10, Identity=62%"; Hit description =Oxidoreductase
MTTVIAQHEVVTNGRVPACVHRVRAPAGSGRGRFSVLLARRRKDDGDPVLRAMDELVDEDHP

SEQ ID NO: 127479 - protein, 75 aa, Setaria italica
  Transcript Sequence Number=SeqID_61505
  Gene Ontology: Mol. function=protein transporter activity; Cellular component=retromer complex; Biological process=vacuolar transport
  Homolog annotation: Hit_ID=Q9XEQ3; Match level="QueryCoverage=82%, HitCoverage=10%, E-value=6e-26, Identity=91%"; Hit description=H beta 58 homolog
YPFEFSTVEMPYESYNGTNVRLRYILKVTIGRNYVGNIVEYRDFCVRNYSPVPTINNSIKREAYRKRQKIGICLI

SEQ ID NO: 127480 - protein, 75 aa, Setaria italica
  Transcript Sequence Number=SeqID_61506
  Gene Ontology: Mol. function=protein binding; Cellular component =retromer complex; Biological process=vacuolar transport
  Homolog annotation: Hit_ID=B9T2W4; Match level="QueryCoverage=100%, HitCoverage=24%, E-value=2e-24, Identity=76%"; Hit description =Vacuolar protein sorting 26, vps26, putative
  Pfam annotation: Domain name=Vps26; Domain location=1-75; Score= -164.6; E_value=0.04; Accession=PF03643.7; Description=Vacuolar protein sorting-associated protein 26
NLLPGPSIRECNRDVTWWLEDCLHIEFEYSKSKYHLNDVIIGKIYFLLVRIKIKNMELEIRRRESTGSGSNTYVE

SEQ ID NO: 127481 - protein, 145 aa, Setaria italica
  misc_feature (69)..(69): Xaa can be any naturally occurring amino acid
  Transcript Sequence Number=SeqID_61507
  Gene Ontology: Mol. function=metal ion binding
  Homolog annotation: Hit_ID=UPI0000162A17; Match level="QueryCoverage =82%, HitCoverage=64%, E-value=5e-28, Identity=53%"; Hit description =PHD finger family protein
  Pfam annotation: Domain name=zf-C3HC4; Domain location=32-70; Score =14.6; E_value=0.0022; Accession=PF00097.17; Description=Zinc finger, C3HC4 type (RING finger)
MFPWEMEVDGESSGAPGKVDDMENYAFENESCGICRDIVIDRGVLDCCQHWFCYTCIDNWAAITNRCPXCKSEFQHIACTPVYGTIGSIDEDEYSLTSCDDDWYVQEESSTLSFPSYYIDAEAVVCLDDGDCKIRSGLVTAEDDS

SEQ ID NO: 127482 - protein, 52 aa, Setaria italica
  Transcript Sequence Number=SeqID_61508
HSESCNHHHPNKPLPAERDKQIKTHNQLHGTEKYMTKGDCECYLNIVTSASI

SEQ ID NO: 127483 - protein, 72 aa, Setaria italica
  Transcript Sequence Number=SeqID_61509
AKHVILIVVISGNKGKRSERKCWCSNIAELSWFFFFGSQLVSDLQVFHFVFYIKVSEQGVHIMMPCVTSISR

SEQ ID NO: 127484 - protein, 78 aa, Setaria italica
  Transcript Sequence Number=SeqID_61510
  Subcellular localization annotation: CTP_CleavageSite=47; ConfidenceScore=5.25e-01
APSSLLSRESSSITCISIVLGSSASHQVQNLQNLASTPRVYATRPTKAVTNACTTLQNLYQFEDVKQRTPGKGMYNYV

SEQ ID NO: 127485 - protein, 103 aa, Setaria italica
  misc_feature (38)..(38): Xaa can be any naturally occurring amino acid
  misc_feature (43)..(43): Xaa can be any naturally occurring amino acid
  Transcript Sequence Number=SeqID_61511
GIKENHEFQENVMVRTPTGWRDRLDGVVSLFLRHPNQXLKEEXEMATKSLLQETQFWHRTKMKTQDSGDVTTKELCRHWSQLWLALWHKHEALRQDFASSELE

SEQ ID NO: 127486 - protein, 71 aa, Setaria italica
  misc_feature (66)..(66): Xaa can be any naturally occurring amino acid
  Transcript Sequence Number=SeqID_61512
  Homolog annotation: Hit_ID=Q5JMX2; Match level="QueryCoverage=98%, HitCoverage=12%, E-value=2e-14, Identity=58%"; Hit description =Putative vascular plant one zinc finger protein
ALWDCGRPVGGSEDSGDYCNPYHAGLALNDDGLLGTRPVMRPRGIDLKDGPLFAALIDKSTRKDVXIPVCG

SEQ ID NO: 127487 - protein, 139 aa, Setaria italica
  Transcript Sequence Number=SeqID_61513
NAPGDGAAGGDAAAVHRCHRKAGAGPDDTREGAGGNGVATNKQPEGIITKETAATTEPRPQPVSMNDSYVNDTVDSDSSMDDDDDEDDFDDDDEGNVGGGNSKMQYEIQFQRQQQSQSSVVRPNASGGAGSGPGGPGPG

SEQ ID NO: 127488 - protein, 97 aa, Setaria italica
  misc_feature (48)..(48): Xaa can be any naturally occurring amino acid
  Transcript Sequence Number=SeqID_61514
WSSDRSGHPLPNHFHPGRFSSPLINGFHFSLMYLLYLPTCRLHARLYXYTSKPQNLNSSPPLPSSGSSLPHARSDTSINVVVVVARPTITRQPIIPT

SEQ ID NO: 127489 - protein, 101 aa, Setaria italica
  misc_feature (92)..(92): Xaa can be any naturally occurring amino acid
  Transcript Sequence Number=SeqID_61515
TKVPTRTNKRTKNGQPDEPTVPDDGDKNKRAEDSMKETDVQLLQQQFGADETESDDNDMGGDYTEEGGNDEDKTKYKTSFQKPNVIGSSGDXTAPPATAAA

SEQ ID NO: 127490 - protein, 58 aa, Setaria italica
  Transcript Sequence Number=SeqID_61516
  Subcellular localization annotation: CTP_CleavageSite=49; ConfidenceScore=5.40e-01
MQTQASNGGVAARFSFIQRVTGQTIPMPSVAPPVFISALTPPPLQPTPVASAAPAAAP

SEQ ID NO: 127491 - protein, 71 aa, Setaria italica
  Transcript Sequence Number=SeqID_61517
KESNKKRPEDSKTCPYFHQLDALYRNKAAPAIRPAPPLPARPRPRQQQPDLSWAWSSDRSGHPLPKHFHPR

SEQ ID NO: 127492 - protein, 69 aa, Setaria italica
  Transcript Sequence Number=SeqID_61518
  Subcellular localization annotation: CTP_CleavageSite=38; ConfidenceScore=5.39e-01
RSILGLRLVRRVVRSSSVVAGRTLHVSLSIILRLASVVAALPSSSRGFRFGFSSTVTATAAVYAPGAVL

SEQ ID NO: 127493 - protein, 63 aa, Setaria italica
  misc_feature (60)..(60): Xaa can be any naturally occurring amino acid
  Transcript Sequence Number=SeqID_61519
RKENLRNRTNNRPLDYDLRLHAPGAAAIIVRAAPTRRAPVPVTVAAVLAAMLGVRRRLGXVAP

SEQ ID NO: 127494 - protein, 46 aa, Setaria italica
  Transcript Sequence Number=SeqID_61520
YEKKAHYCHHHLQHQDSLQNVSIHIEGNPDVVNGTGDNIRIPFNMN

SEQ ID NO: 127495 - protein, 50 aa, Setaria italica
  misc_feature (36)..(36): Xaa can be any naturally occurring amino acid
  Transcript Sequence Number=SeqID_61521
DQLKYKDRREEWLDVCSSIGLGLQNYKVEEMERILXLSYNDLPYHLKTCL

SEQ ID NO: 127496 - protein, 53 aa, Setaria italica
  Transcript Sequence Number=SeqID_61522
  Gene Ontology: Mol. function=phosphoprotein phosphatase activity; Cellular component=cytoplasm; Biological process=negative regulation of tyrosine phosphorylation of Stat3 protein
  Homolog annotation: Hit_ID=Q10BT5; Match level="QueryCoverage=96%, HitCoverage=16%, E-value=1e-23, Identity=100%"; Hit description =Serine/threonine-protein phosphatase PP2A-2 catalytic subunit
ELIFSAPNYCYRCGNMASILEVDDCREHTFIQFEPAPRRGEPDVTRRTPDYFL

SEQ ID NO: 127497 - protein, 150 aa, Setaria italica
  misc_feature (16)..(16): Xaa can be any naturally occurring amino acid
  Transcript Sequence Number=SeqID_61523
EIVSFTFTSPVDKSLXASIPNHSVEKQFIENLNAVSTSSNTSNTKLDVIDGDYLGLLLEQKLRELTSGVRSPYFNPAKGVKVHGTSTALEDTASACETSSIASTDYDRESMQSFNDGKATLPQTDLATKSGQVWYIILGHTSSSHTLLSA

SEQ ID NO: 127498 - protein, 55 aa, Setaria italica
  Transcript Sequence Number=SeqID_61524
  Gene Ontology: Mol. function=oxidoreductase activity, acting on single donors with incorporation of molecular oxygen, incorporation of two atoms of oxygen
  Homolog annotation: Hit_ID=B6U3W8; Match level="QueryCoverage=100%, HitCoverage=30%, E-value=2e-20, Identity=85%"; Hit description=1,2 -dihydroxy-3-keto-5-methylthiopentene dioxygenase 4
AWIVGEKGEDLQGPKEFLPLSKLEDVGVLYWQLDPKKSESEEELAKIRKERGYSY

SEQ ID NO: 127499 - protein, 102 aa, Setaria italica
  misc_feature (17)..(17): Xaa can be any naturally occurring amino acid
  Transcript Sequence Number=SeqID_61525
  Gene Ontology: Mol. function=oxidoreductase activity, acting on single donors with incorporation of molecular oxygen, incorporation of two atoms of oxygen; Cellular component=plasma membrane; Biological process=...
  Gene Ontology: Biological process=methionine biosynthetic process
  Homolog annotation: Hit_ID=B6U3W8; Match level="QueryCoverage=93%, HitCoverage=51%, E-value=6e-44, Identity=92%"; Hit description=1,2 -dihydroxy-3-keto-5-methylthiopentene dioxygenase 4
  Pfam annotation: Domain name=ARD; Domain location=1-102; Score=60.1; E_value=8.1e-15; Accession=PF03079.6; Description=ARDARD' family
LKYLFFADVGVLYWQLXDPKKSESEEELAKIRKERGYSYMDLIEICPDKLENYEEKVKNFFTEHMHADEEIRYCLEGSGYFDVRDKDDKWIRIWIKEGDMII

SEQ ID NO: 127500 - protein, 64 aa, Setaria italica
  Transcript Sequence Number=SeqID_61526
  Gene Ontology: Mol. function=oxidoreductase activity, acting on single donors with incorporation of molecular oxygen, incorporation of two atoms of oxygen
  Homolog annotation: Hit_ID=B6U3W8; Match level="QueryCoverage=81%, HitCoverage=28%, E-value=5e-16, Identity=78%"; Hit description=1,2 -dihydroxy-3-keto-5-methylthiopentene dioxygenase 4
MAPRAWIVGEKGEDLQGPKEFLPLSKLEDVGVLYWQLDPKKSESEEERGPPRAQGIPAPLQAWR

SEQ ID NO: 127501 - protein, 51 aa, Setaria italica
  Transcript Sequence Number=SeqID_61527
  Homolog annotation: Hit_ID=B9SRZ4; Match level="QueryCoverage=88%, HitCoverage=32%, E-value=2e-13, Identity=77%"; Hit description =Transporter, putative
MALSRSMRTCLHSGRLALLAILVSGGIVLQILACALYNNWWPMLTVLMYLI

SEQ ID NO: 127502 - protein, 68 aa, Setaria italica
  Transcript Sequence Number=SeqID_61528
  Subcellular localization annotation: CTP_CleavageSite=47; ConfidenceScore=5.38e-01
QPGRGGPFSAAAHWAASSRLYRAAVAARVSCGARAPPAPSQIAGHCCAASVKSDTTSSLVTVKYTDLL

SEQ ID NO: 127503 - protein, 52 aa, Setaria italica
  Transcript Sequence Number=SeqID_61529
  Pfam annotation: Domain name=Vps55; Domain location=1-52; Score= -55.4; E_value=0.082; Accession=PF04133.6; Description=Vacuolar protein sorting 55
SLTFCAVLMYLILPMPLIFFLGSDTSSIMSNGGDGWVNFTKFLTGASIVGSI

SEQ ID NO: 127504 - protein, 55 aa, Setaria italica
  Transcript Sequence Number=SeqID_61530
FYTCSTTVSSKLYLISYTAGHEGTLESLFGHELERAEEYMPSRSTQPEPWIDGLN

SEQ ID NO: 127505 - protein, 68 aa, Setaria italica
  misc_feature (24)..(24): Xaa can be any naturally occurring amino acid
  misc_feature (42)..(42): Xaa can be any naturally occurring amino acid
  Transcript Sequence Number=SeqID_61531
  Gene Ontology: Mol. function=nucleoside-triphosphatase activity; Biological process=protein transport
  Homolog annotation: Hit_ID=Q06HR0; Match level="QueryCoverage=80%, HitCoverage=31%, E-value=4e-21, Identity=94%"; Hit description=ATP dependent Clp protease ATP-binding subunit ClpX1 (Fragment)
YLPGVSAWLNIVFQVKLHFTDGAXLRIIAKKAMSKNTGARGXRTILENILMDSMYEIPDAKSGEKRID

SEQ ID NO: 127506 - protein, 44 aa, Setaria italica
  Transcript Sequence Number=SeqID_61532
  Gene Ontology: Mol. function=hydrolase activity; Biological process =proteolysis
  Homolog annotation: Hit_ID=B4FAQ7; Match level="QueryCoverage=90%, HitCoverage=9%, E-value=3e-15, Identity=95%"; Hit description =Abhydrolase domain-containing protein 5
TETEAWFIDSFEEWRKAKNLSNFVLLGHSFGGYIAAKYALKVCS

SEQ ID NO: 127507 - protein, 42 aa, Setaria italica
  Transcript Sequence Number=SeqID_61533
  Gene Ontology: Mol. function=aminopeptidase activity; Biological process=proteolysis
  Homolog annotation: Hit_ID=Q650U5; Match level="QueryCoverage=83%, HitCoverage=9%, E-value=1e-11, Identity=91%"; Hit description=CGI-58 protein-like
LSHSFCSWGGSSRPDFTCKSTEETEAWFIDSFEEWRKAKEPQ

SEQ ID NO: 127508 - protein, 87 aa, Setaria italica
  Transcript Sequence Number=SeqID_61534
  Gene Ontology: Mol. function=nucleic acid binding
  Homolog annotation: Hit_ID=B6UA93; Match level="QueryCoverage=88%, HitCoverage=18%, E-value=9e-38, Identity=94%"; Hit description=RNA -binding post-transcriptional regulator csx1
KIIRNKVTSLPEGYGFIEFISHEAAEKVLQTYNGTQMPGTEHTFRLNWASFSSGERRPDAGPDHSIFVGDLAPDVTDCTSPVWAKQP

SEQ ID NO: 127509 - protein, 81 aa, Setaria italica
  Transcript Sequence Number=SeqID_61535
  Gene Ontology: Mol. function=nucleic acid binding
  Homolog annotation: Hit_ID=B6UA93; Match level="QueryCoverage=85%, HitCoverage=16%, E-value=2e-32, Identity=95%"; Hit description=RNA -binding post-transcriptional regulator csx1
AYPYVYGAYAGYSQYPQQVDGTGDATCVAGSHPGMEQKEEPYDPMNIPDVDKLNASYMAVHGRAMLGRSLWLKTNPLPQPT

SEQ ID NO: 127510 - protein, 106 aa, Setaria italica
  misc_feature (36)..(36): Xaa can be any naturally occurring amino acid
  Transcript Sequence Number=SeqID_61536
MFCEILVAFSLHLFLLCQLVTRLSDAIGSGTRDQNXFDALVEELTSQFARCQQLLNSISGTISSKSTTVEGQRQSLDETRQLLDQRKELITKYRSSVEDLLKGDTR

SEQ ID NO: 127511 - protein, 57 aa, Setaria italica
  Transcript Sequence Number=SeqID_61537
WFSFHLVSPLRRSSTELLYFVINSLKRQDTQSNTLKSKSISNFKCRIKFKKNPCFAC

SEQ ID NO: 127512 - protein, 117 aa, Setaria italica
  misc_feature (15)..(15): Xaa can be any naturally occurring amino acid
  misc_feature (17)..(17): Xaa can be any naturally occurring amino acid
  Transcript Sequence Number=SeqID_61538
  Gene Ontology: Mol. function=ubiquitin-protein ligase activity
  Homolog annotation: Hit_ID=B9T256; Match level="QueryCoverage=86%, HitCoverage=4%, E-value=1e-27, Identity=58%"; Hit description =Ubiquitin ligase E3 alpha, putative
HFCEDYSSRKYRGSXFXTPAVPFRLMQLPPVYQVLLERYIKMQCPDCGSVPDEPALCLLCGKLCSPSWKPCCRTGKCLNHASQCGAGVGIFLLVRVCISLLFAITPNYYGQCTFLCS

SEQ ID NO: 127513 - protein, 50 aa, Setaria italica
  Transcript Sequence Number=SeqID_61539
YLKQMMATFAHIQNAEQTSPSSASSITVDSKKTRSPKRSGFLGIICFKYH

SEQ ID NO: 127514 - protein, 95 aa, Setaria italica
  Transcript Sequence Number=SeqID_61540
  Gene Ontology: Mol. function=metal ion binding
  Homolog annotation: Hit_ID=B6TXY1; Match level="QueryCoverage=93%, HitCoverage=15%, E-value=3e-27, Identity=69%"; Hit description =Protein binding protein
  Subcellular localization annotation: CTP_CleavageSite=51; ConfidenceScore=5.16e-01
MMMRQLASVTDNYGHADGTWNLWPEPMAGSSLVPSTSSVPDSAAAAGLRLRGTAGTTRNGSLSEVLTMVDRVREVLPHIPDELTIQTFLISFYSQ

SEQ ID NO: 127515 - protein, 68 aa, Setaria italica
  Transcript Sequence Number=SeqID_61541
HTISVTNAPRQLLSTWFLSKHRSGDAEAGGFQAAALLQLPTLLHVIPPHSGSVHGLLLSSKLFSEYKH

SEQ ID NO: 127516 - protein, 45 aa, Setaria italica
  Transcript Sequence Number=SeqID_61542
FFAHLFSHFTAFTGFCNAGSLSHEAKEVFLAALVSEGRAEWMDKG

SEQ ID NO: 127517 - protein, 40 aa, Setaria italica
  Transcript Sequence Number=SeqID_61543
  Homolog annotation: Hit_ID=B6TCL9; Match level="QueryCoverage=100%, HitCoverage=22%, E-value=4e-15, Identity=92%"; Hit description =Vacuolar protein sorting protein 25
MQRLGDFRLPPFFNYPPYFTLQPVRETREKQVQLWKDLIL

SEQ ID NO: 127518 - protein, 50 aa, Setaria italica
  Transcript Sequence Number=SeqID_61544
PPFTVIGPTLLSSLYICRFLLWLRPHHKIMDACEVEDQITIKFSYDDAIS

SEQ ID NO: 127519 - protein, 42 aa, Setaria italica
  Transcript Sequence Number=SeqID_61545
STRNSASDQIRDDSLFLNGSQILKKKLLPAVILTSYEQGTHP

SEQ ID NO: 127520 - protein, 80 aa, Setaria italica
  Transcript Sequence Number=SeqID_61546
  Homolog annotation: Hit_ID=O64544; Match level="QueryCoverage=98%, HitCoverage=53%, E-value=2e-16, Identity=50%"; Hit description =YUP8H12R.31
TARSQDDVAAAIDRLNGELDRLLENAPSLVIMQHSARISTIRKRISALNMLLKSIQRRIDNIDRVISTGLTSDHSSPVQS

SEQ ID NO: 127521 - protein, 34 aa, Setaria italica
  Transcript Sequence Number=SeqID_61547
SIKMNTWLCFCRSFISCTVSKPEAQVKLNLRCTT

SEQ ID NO: 127522 - protein, 128 aa, Setaria italica
  Transcript Sequence Number=SeqID_61548
  Homolog annotation: Hit_ID=Q5VPU9; Match level="QueryCoverage=93%, HitCoverage=29%, E-value=6e-35, Identity=60%"; Hit description =Carboxyl-terminal peptidase-like
  Pfam annotation: Domain name=DUF239; Domain location=41-128; Score= -2.2; E_value=1.2e-08; Accession=PF03080.7; Description=Arabidopsis proteins of unknown function
TYGYKFCYGKKRPDSIPNIHPEASVTSGHEYAVVSSADGQYYGTQININLWKPMTETAQDFSLTQLWTVAGSYANMDLNTIEAGWQVYQDFYGDNNPRLFIYWTRNAYNGTGCYNLLCSGFVQTNNQT

SEQ ID NO: 127523 - protein, 55 aa, Setaria italica
  Transcript Sequence Number=SeqID_61549
  Gene Ontology: Mol. function=nucleotide binding; Cellular component =Golgi apparatus; Biological process=small GTPase mediated signal transduction
  Homolog annotation: Hit_ID=B6UIH4; Match level="QueryCoverage=89%, HitCoverage=33%, E-value=1e-20, Identity=100%"; Hit description=ADP -ribosylation factor 3
  Pfam annotation: Domain name=Arf; Domain location=1-48; Score=-90.3; E_value=0.012; Accession=PF00025.13; Description=ADP-ribosylation factor family
LPGALDDAAITESLELHKIKSRQWAIFKTSAIKGEGLFEGLDWLSNTLKLLLQAQ

SEQ ID NO: 127524 - protein, 42 aa, Setaria italica
  Transcript Sequence Number=SeqID_61550
SQYEGTSNVLVSETLASTLQTIDWWCKTSGVKTKRMGIVTLY

SEQ ID NO: 127525 - protein, 89 aa, Setaria italica
  misc_feature (19)..(19): Xaa can be any naturally occurring amino acid
  Transcript Sequence Number=SeqID_61551
GQTKGELMLLKQQVIGLKXKEEEAAKKEAEVQRKLKKLKELEVEVIELRRKNKELLYEKRDLIVKLDAAEGKITEVPYYWYSIINEALN

SEQ ID NO: 127526 - protein, 36 aa, Setaria italica
  Transcript Sequence Number=SeqID_61552
YVPETKGLSFEQVEQLWKERAWGSHGDCQSLLGAAP

SEQ ID NO: 127527 - protein, 43 aa, Setaria italica
  Transcript Sequence Number=SeqID_61553
  Gene Ontology: Mol. function=substrate-specific transmembrane transporter activity; Cellular component=integral to membrane; Biological process=transmembrane transport
  Homolog annotation: Hit_ID=B6U4Q3; Match level="QueryCoverage=81%, HitCoverage=6%, E-value=2e-11, Identity=91%"; Hit description =Membrane transporter D1
MDLLPTRCCSVPGTWRWMLGVAAVPAIVQFVLMLFLPESPRWL

SEQ ID NO: 127528 - protein, 57 aa, Setaria italica
  Transcript Sequence Number=SeqID_61554
VFFFFSLSMIPGIGKISENGLMLQAAARIKQLEAMIDSVSTHLERLQESQRSNGTVG

SEQ ID NO: 127529 - protein, 51 aa, Setaria italica
  Transcript Sequence Number=SeqID_61555
  Gene Ontology: Mol. function=peptidyl-prolyl cis-trans isomerase activity; Cellular component=chloroplast; Biological process=protein folding
  Homolog annotation: Hit_ID=Q6Z4E9; Match level="QueryCoverage=64%, HitCoverage=13%, E-value=9e-10, Identity=90%"; Hit description =Immunophilin / FKBP-type peptidyl-prolyl cis-trans isomerase-like
NCQRLIIVPPELAYGKKGVQEIPPNATIELDVELLSIKQSPFGTPVKIVEG

SEQ ID NO: 127530 - protein, 77 aa, Setaria italica
  Transcript Sequence Number=SeqID_61556
AKSMDEDLAEAAKEVEEKRRAANEAPVDPKILQKYAIDNNDNEMEEALKSAKVSASGIISVKSNKTRQTRREAQGNG

SEQ ID NO: 127531 - protein, 76 aa, Setaria italica
  misc_feature (26)..(26): Xaa can be any naturally occurring amino acid
  misc_feature (66)..(66): Xaa can be any naturally occurring amino acid
  Transcript Sequence Number=SeqID_61557
FLGSKISAYRFELRNMARIIYELKDXLSLKKALLLKGEIIEILTSEKQCMGLHSIEVALQKFQDLXSSIGHEGTIL

SEQ ID NO: 127532 - protein, 69 aa, Setaria italica
  Transcript Sequence Number=SeqID_61558
KILFKLSNICTIPHAQCYFINLEISVKQPRCCEAPCIAYVNNMHNQFGSLRQLEIAIFVHVLDSVSLLC

SEQ ID NO: 127533 - protein, 109 aa, Setaria italica
  Transcript Sequence Number=SeqID_61559
FSSVQKEVAAVKQVLGDVHFLVGEKENVVADLKDKVQMISVLEKDVVDKLNFLESKISAYQLELRSRARIIYELKDRLEAEKLNNSFQPQLEEISINKLNILHIFDLSL

SEQ ID NO: 127534 - protein, 106 aa, Setaria italica
  misc_feature (35)..(35): Xaa can be any naturally occurring amino acid
  Transcript Sequence Number=SeqID_61560
CYLKKALLVKDDIIERLTSEKQAMRVELHNMEIAXLQRFQDLFSSIGHGRMKNFLAISGSQDVNNGQPESIPGTQGGLANEHNSVTAIDEAATTQNVDHQLEISPG

SEQ ID NO: 127535 - protein, 78 aa, Setaria italica
  Transcript Sequence Number=SeqID_61561
  Gene Ontology: Mol. function=secondary active sulfate transmembrane transporter activity; Cellular component=integral to membrane; Biological process=sulfate transport
  Homolog annotation: Hit_ID=Q93YK6; Match level="QueryCoverage=100%, HitCoverage=12%, E-value=1e-28, Identity=76%"; Hit description =Sulfate transporter
IALQQLKGFLGIKNFTNNTDIVSVMKSIFKSAHHGWNWQTILIAASFLGFLMVTKYIGKKKKKLFWMSATAPLISVIV

SEQ ID NO: 127536 - protein, 116 aa, Setaria italica
  misc_feature (102)..(102): Xaa can be any naturally occurring amino acid
  Transcript Sequence Number=SeqID_61562
  Gene Ontology: Cellular component=intracellular
  Homolog annotation: Hit_ID=B9RQZ2; Match level="QueryCoverage=92%, HitCoverage=19%, E-value=2e-40, Identity=71%"; Hit description =Topbp1, putative
LVLIFSRPYLKESERSELIFKNHFLTILFPIDRFGELGPSSKTFYNHGGFTRIQVLDHIYNFYQENMSMDEIDMALHTDSRHADRLRSLYSSAESAEKGLVXFKRIEFLGSRRSFE

SEQ ID NO: 127537 - protein, 37 aa, Setaria italica
  Transcript Sequence Number=SeqID_61563
MPTKVHQFARMHPGLQFLMVNYNEQTEICRRLNVYVL

SEQ ID NO: 127538 - protein, 83 aa, Setaria italica
  Transcript Sequence Number=SeqID_61564
  Subcellular localization annotation: CTP_CleavageSite=41; ConfidenceScore=5.54e-01
FGCSGVAKSSTHSPGFPVNGVRVMNKGLGVSYSSYSRPDVLSSPGTPSYHRRGTTIVGYQQGPNSERVIPLRPDIEGIQEAAW

SEQ ID NO: 127539 - protein, 50 aa, Setaria italica
  Transcript Sequence Number=SeqID_61565
  Gene Ontology: Mol. function=zinc ion binding
NCRVLVRLTIRRVLPETFPYGVETISFDLSQYNNAPSFHWPESSSRSQLQ

SEQ ID NO: 127540 - protein, 61 aa, Setaria italica
  Transcript Sequence Number=SeqID_61566
  Gene Ontology: Mol. function=deoxyribodipyrimidine photo-lyase activity; Biological process=DNA repair
  Homolog annotation: Hit_ID=Q8LM09; Match level="QueryCoverage=80%, HitCoverage=8%, E-value=7e-13, Identity=73%"; Hit description =Putative CPD photolyase
ATGAVASELQRDAADMAVHQVDAHNVVPVWAASGKLEYSAKTFRGKVSKGLQVRQGFCSEG

SEQ ID NO: 127541 - protein, 126 aa, Setaria italica
  Transcript Sequence Number=SeqID_61567
  Gene Ontology: Mol. function=protein serine/threonine kinase activity; Cellular component=cytoplasm; Biological process=protein amino acid phosphorylation
  Homolog annotation: Hit_ID=Q75KK8; Match level="QueryCoverage=97%, HitCoverage=22%, E-value=5e-58, Identity=88%"; Hit description =Mitogen-activated protein kinase 14
LYRVDVPSPEAISRIRNEKARRYLSTMRRKKAIPFTQKFPNADPLALSLLERMLAFEPKDRPSAEEALADPYFKNIANVDREPSAQAVTKLEFEFERRRVTKDDIRELIYREILEYHPKMLREFLE

SEQ ID NO: 127542 - protein, 98 aa, Setaria italica
  misc_feature (6)..(6): Xaa can be any naturally occurring amino acid
  Transcript Sequence Number=SeqID_61568
  Gene Ontology: Mol. function=protein serine/threonine kinase activity; Cellular component=cytoplasm; Biological process=protein amino acid phosphorylation
  Homolog annotation: Hit_ID=Q75KK8; Match level="QueryCoverage=100%, HitCoverage=17%, E-value=2e-49, Identity=97%"; Hit description =Mitogen-activated protein kinase 14
ILLPPXSRREFKDIYVVFELMESDLHQVIKANDDLTPEHYQFFLYQLLRGLKYIHTANVFHRDLKPKNILANADCKLKICDFGLARVAFSDTPTAIFL

SEQ ID NO: 127543 - protein, 40 aa, Setaria italica
  Transcript Sequence Number=SeqID_61569
VINLIQTNYIKRSLAPKFGWLGSNAPCMGTSYTRNPTMRT

SEQ ID NO: 127544 - protein, 98 aa, Setaria italica
  Transcript Sequence Number=SeqID_61570
  Gene Ontology: Mol. function=protein serine/threonine kinase activity; Biological process=protein amino acid phosphorylation
  Homolog annotation: Hit_ID=A9RAB0; Match level="QueryCoverage=77%, HitCoverage=15%, E-value=2e-17, Identity=57%"; Hit description =Mitogen-activated protein kinase 2
FVSVHIGSAERYGNYASPAADQYEQRRIANGVSPRSSYPKRIPTCKGETSEADRIDVRQTGQPKPYIPNKLPTTVDGRNGQLVALPAIHQQSEPSICS

SEQ ID NO: 127545 - protein, 110 aa, Setaria italica
  misc_feature (67)..(67): Xaa can be any naturally occurring amino acid
  Transcript Sequence Number=SeqID_61571
  Gene Ontology: Mol. function=protein serine/threonine kinase activity; Cellular component=cytoplasm; Biological process=protein amino acid phosphorylation
  Homolog annotation: Hit_ID=C4PE55; Match level="QueryCoverage=100%, HitCoverage=49%, E-value=5e-45, Identity=80%"; Hit description =Kinase (Fragment)
IYREILEYHPNMLREFLEGTESTGFMYPSAVDHFKKQFAYLEEHYAKGSTAAPPERQHNSLPSTHAXNRPSVLYSDNRTQSTTNVTEDLSKCVIRDDARRAQLDSSSVGA

SEQ ID NO: 127546 - protein, 41 aa, Setaria italica
  Transcript Sequence Number=SeqID_61572
ICQNNVALSISYLLPWTVAVATGRFPQQCTSEPFPNMLSAA

SEQ ID NO: 127547 - protein, 55 aa, Setaria italica
  Transcript Sequence Number=SeqID_61573
FKFKLHVTFYNNKTYVHNSESGATSFKNKLGNQSHTYQTNYLLQLMAGMATGSFT

SEQ ID NO: 127548 - protein, 118 aa, Setaria italica
  Transcript Sequence Number=SeqID_61574
  Homolog annotation: Hit_ID=B9RK77; Match level="QueryCoverage=92%, HitCoverage=34%, E-value=3e-38, Identity=64%"; Hit description =Valacyclovir hydrolase, putative
ERLGKEFMDRINKEGYIDVTNKSGKFLYRVTKESLMERLNTDMHAASLSISKECRFFTIHGSADEIIPVEDAYEFAKLIPNHKLRVIEGANHCYTAHRKELSDAIVECINNPNEGQGE

SEQ ID NO: 127549 - protein, 34 aa, Setaria italica
  Transcript Sequence Number=SeqID_61575
SGNGESEGEFQYGNYRKEADDLHSVVSYLFLICL

SEQ ID NO: 127550 - protein, 94 aa, Setaria italica
  Transcript Sequence Number=SeqID_61576
  Gene Ontology: Mol. function=protein serine/threonine kinase activity; Biological process=protein amino acid phosphorylation
  Homolog annotation: Hit_ID=B6UBV8; Match level="QueryCoverage=94%, HitCoverage=17%, E-value=5e-40, Identity=87%"; Hit description=3 -phosphoinositide-dependent protein kinase 1
VVGYLDGYSSLKKHPFFRGIDWKNLRKTRPPKLAIDPNASEDEDSQDSNWLSHMGGTTVNQQSNTVSNNGVASSSEVRSHISKLASIDSFDSKW

SEQ ID NO: 127551 - protein, 84 aa, Setaria italica
  misc_feature (3)..(3): Xaa can be any naturally occurring amino acid
  misc_feature (11)..(11): Xaa can be any naturally occurring amino acid
  Transcript Sequence Number=SeqID_61577
TSXPFHLEERXGAVSPAVLLLRLAARKLLLANWHVDDAPMNFPVSVYTYIQGTILFVVFVSVAANSMKWLRPEIIKQQGKLIYN

SEQ ID NO: 127552 - protein, 50 aa, Setaria italica
  Transcript Sequence Number=SeqID_61578
LIFQRIIARDIKFPEYFSDEARDLIDKLLVCRNTHYLYRFRAQVPPLFFM

SEQ ID NO: 127553 - protein, 63 aa, Setaria italica
  Transcript Sequence Number=SeqID_61579
  Homolog annotation: Hit_ID=Q2QWP0; Match level="QueryCoverage=77%, HitCoverage=7%, E-value=1e-09, Identity=67%"; Hit description=F13j11 PRLI-interacting factor G, putative, expressed
  Subcellular localization annotation: CTP_CleavageSite=33; ConfidenceScore=5.24e-01
MLSEQQMGQSDQNGPAQMMRSASGVKLEPQQLQAQMMRSLSSVKMEQQSSDSSAFLQQQQQSN

SEQ ID NO: 127554 - protein, 54 aa, Setaria italica
  Transcript Sequence Number=SeqID_61580
  Gene Ontology: Cellular component=integral to membrane; Biological process=protein transport
  Homolog annotation: Hit_ID=Q0JAI9; Match level="QueryCoverage=100%, HitCoverage=19%, E-value=1e-22, Identity=92%"; Hit description =Secretory carrier-associated membrane protein 6
  Pfam annotation: Domain name=SCAMP; Domain location=1-54; Score= -78.0; E_value=0.032; Accession=PF04144.5; Description=SCAMP family
HGKSLTGILAAIDTFSEHIVIGIFYFVGFGLFCLETLLSIAVLQRVYMYFRGNK

SEQ ID NO: 127555 - protein, 85 aa, Setaria italica
  Transcript Sequence Number=SeqID_61581
  Gene Ontology: Mol. function=lipid binding
  Homolog annotation: Hit_ID=B6UI71; Match level="QueryCoverage=75%, HitCoverage=28%, E-value=4e-25, Identity=81%"; Hit description=Lipid binding protein
  Pfam annotation: Domain name=F-box; Domain location=9-56; Score=33.3; E_value=1e-06; Accession=PF00646.25; Description=F-box domain
MGLEGRSDGPIGRLPEHLIVEIFIRLPVSEWVQIACVNKQWANIFEGDCLWQTAIARNWPSAGLQKRWPGPIPRGSPRRSVHCLW

SEQ ID NO: 127556 - protein, 93 aa, Setaria italica
  misc_feature (83)..(83): Xaa can be any naturally occurring amino acid
  Transcript Sequence Number=SeqID_61582
  Gene Ontology: Mol. function=lipid binding
  Homolog annotation: Hit_ID=B6UI71; Match level="QueryCoverage=78%, HitCoverage=32%, E-value=2e-31, Identity=86%"; Hit description=Lipid binding protein
GHLLVSRNAGLGQFPEVPQGDQFIACGKTGEKAHDLSSKIWLAVIDGLEENQKTFLLLKHLAREGEFFLPFPYSRSYKVLWRXYDKLFTDFRD

SEQ ID NO: 127557 - protein, 95 aa, Setaria italica
  Transcript Sequence Number=SeqID_61583
  Gene Ontology: Mol. function=nucleotide-sugar transmembrane transporter activity; Cellular component=integral to membrane; Biological process=nucleotide-sugar transport
  Homolog annotation: Hit_ID=Q8LGE9; Match level="QueryCoverage=98%, HitCoverage=28%, E-value=2e-28, Identity=67%"; Hit description=CMP -sialic acid transporter-like protein
AFRFGVIFNMGWLIYGDFKAGFELGPWWQRLFNGYSITTWMVVFNLGSTGLLVSWLMKYSDNIVYSTSMAMLLTMVYLYIFQCESHSSAFLGIII

SEQ ID NO: 127558 - protein, 85 aa, Setaria italica
  misc_feature (32)..(32): Xaa can be any naturally occurring amino acid
  Transcript Sequence Number=SeqID_61584
HTSQTINKAAKQKRSYGFYRLRLPPNFPHHMXGNPDTAVNGHRSIACCLLPVACCDTEMDTRVPVAKNKEACSKLPLLSDGSYFC

SEQ ID NO: 127559 - protein, 64 aa, Setaria italica
  Transcript Sequence Number=SeqID_61585
  Homolog annotation: Hit_ID=B4FTI4; Match level="QueryCoverage=92%, HitCoverage=15%, E-value=3e-28, Identity=96%"; Hit description =Protein BRE
SGWLNVLTLQSSQHCNADGTPITSPPINDYPWSPRWDQAEMVERIYDFLTDECQNFKKFCSDAI

SEQ ID NO: 127560 - protein, 99 aa, Setaria italica
  Transcript Sequence Number=SeqID_61586
  Gene Ontology: Mol. function=3'-phosphoadenosine 5'-phosphosulfate transmembrane transporter activity; Cellular component=integral to membrane; Biological process=transport
  Homolog annotation: Hit_ID=B6TDX5; Match level="QueryCoverage=87%, HitCoverage=24%, E-value=8e-42, Identity=93%"; Hit description =Adenosine 3-phospho 5-phosphosulfate transporter 1
MLTVAMIAVIHLCYFLFTGLILQNHLIPAVDFMFRHPDCFSDVVILSSVATASQFFISYTIRTFGALTFATIMTTRQLVSILLSCVWFVHPLSWMQWVG

SEQ ID NO: 127561 - protein, 83 aa, Setaria italica
  misc_feature (46)..(46): Xaa can be any naturally occurring amino acid
  misc_feature (74)..(74): Xaa can be any naturally occurring amino acid
  Transcript Sequence Number=SeqID_61587
  Gene Ontology: Mol. function=oxidoreductase activity; Cellular component=chloroplast; Biological process=fatty acid biosynthetic process
  Homolog annotation: Hit_ID=P48618; Match level="QueryCoverage=100%, HitCoverage=20%, E-value=1e-37, Identity=89%"; Hit description=Omega- 3 fatty acid desaturase, chloroplastic (Fragment)
EWSYLRGGLTTLDRDYGLINNIHHDIGTHVIHHLFPQIPHYHLIEXTEAAKPVLGKYYKEPKKSGPLPLHLFGXLAESLKQDH

SEQ ID NO: 127562 - protein, 78 aa, Setaria italica
  Transcript Sequence Number=SeqID_61588
  Gene Ontology: Mol. function=oxidoreductase activity; Cellular component=chloroplast; Biological process=lipid metabolic process
  Homolog annotation: Hit_ID=B6TE28; Match level="QueryCoverage=76%, HitCoverage=13%, E-value=6e-29, Identity=100%"; Hit description =Omega-3 fatty acid desaturase
PEEPNPIRRERRRSRPARLDSWLVWPLYWAAQGTMFWALFVLGHDCGHGSFSNNPKLNSVVGHILHSSILVPYHGWRI

SEQ ID NO: 127563 - protein, 19 aa, Setaria italica
  Transcript Sequence Number=SeqID_61589
QDYICLFRIVSSSTNNVLT

SEQ ID NO: 127564 - protein, 67 aa, Setaria italica
  Transcript Sequence Number=SeqID_61590
  Gene Ontology: Mol. function=intramolecular transferase activity, phosphotransferases
  Homolog annotation: Hit_ID=Q6ZDQ1; Match level="QueryCoverage=58%, HitCoverage=6%, E-value=1e-12, Identity=79%"; Hit description =Phosphoacetylglucosamine mutase
CLCFCTGPSNAVEGWSFENWCELYSDLPSRQLKVKVIDRSSIVTTDAETKVSQPSSLQSPYLSILAN

SEQ ID NO: 127565 - protein, 57 aa, Setaria italica
  Transcript Sequence Number=SeqID_61591
FESSAKTRENVEKCFEELALKVYLHKPERYLIPKAYILALDTFQDSPSKNSGRLVKL

SEQ ID NO: 127566 - protein, 99 aa, Setaria italica
  Transcript Sequence Number=SeqID_61592
ELRYEGSKDECIHLISDQEEIKLVKDGFVTKSLKPDTEVPRLPNASVAGLDSQIDNNHIVPFEYKVARSQNRCEVSNYVLTRTLSSSNSLATCVISGVM

SEQ ID NO: 127567 - protein, 54 aa, Setaria italica
  Transcript Sequence Number=SeqID_61593
TWKHMTPMLQVTTFLTNAAERKGMFSFTKPVKLLARNADEQSGQHNVTALTHTQ

SEQ ID NO: 127568 - protein, 38 aa, Setaria italica
  Transcript Sequence Number=SeqID_61594
RMLADELILVLDSSTLYFFSMLIASEIFSFHWQTILLF

SEQ ID NO: 127569 - protein, 50 aa, Setaria italica
  Transcript Sequence Number=SeqID_61595
  Gene Ontology: Mol. function=protein disulfide oxidoreductase activity; Cellular component=chloroplast; Biological process =glycerol ether metabolic process
  Homolog annotation: Hit_ID=Q5JMR9; Match level="QueryCoverage=98%, HitCoverage=39%, E-value=4e-15, Identity=81%"; Hit description =Thioredoxin M-like
VSEKLSDKIQVVKIDTEKYTSIANRYRIEALPTFIIFKNGKHSQSVQSAG

SEQ ID NO: 127570 - protein, 51 aa, Setaria italica
  Transcript Sequence Number=SeqID_61596
  Homolog annotation: Hit_ID=B6T984; Match level="QueryCoverage=64%, HitCoverage=5%, E-value=1e-10, Identity=96%"; Hit description =Calmodulin binding protein
  Pfam annotation: Domain name=IQ; Domain location=26-46; Score=12.9; E_ value=1; Accession=PF00612.19; Description=IQ calmodulin-binding motif
  Pfam annotation: Domain name=IQ; Domain location=4-24; Score=25.3; E _value=0.00025; Accession=PF00612.19; Description=IQ calmodulin -binding motif
  Pfam module annotation: Pfam domain module=IQ::IQ; Domain location=26- 46::4-24
GKKTKTAVKAQAAFRGYLARRAFRALKGIIRLQALIRGDLVRRQAVQLSGQ

SEQ ID NO: 127571 - protein, 42 aa, Setaria italica
  Transcript Sequence Number=SeqID_61597
ISRSTTHSVPDGQLTELEKVKRSLRKVTNSMAETSKGSQVLD

SEQ ID NO: 127572 - protein, 86 aa, Setaria italica
  Transcript Sequence Number=SeqID_61598
  Subcellular localization annotation: CTP_CleavageSite=53; ConfidenceScore=5.19e-01
KLGTSLFRTGLSSITCISTVFCMGFIKIYVWASPPPQCSSFVPAFISSLVPFPAKHNTLIQYTYNMNVLLFFFLSTIVKLLVFVFF

SEQ ID NO: 127573 - protein, 65 aa, Setaria italica
  Transcript Sequence Number=SeqID_61599
  Gene Ontology: Mol. function=nucleoside-triphosphatase activity; Cellular component=cytoplasm
  Homolog annotation: Hit_ID=B9RDF4; Match level="QueryCoverage=95%, HitCoverage=11%, E-value=3e-22, Identity=79%"; Hit description =Spastin, putative
GSKPVQKAGGSYDDKLAEMINTTIVDRSPAVKWDDVAGLDKAKQALMEMVILPTKRRDLFTGLRT

SEQ ID NO: 127574 - protein, 80 aa, Setaria italica
  Transcript Sequence Number=SeqID_61600
  Gene Ontology: Mol. function=nucleoside-triphosphatase activity
  Homolog annotation: Hit_ID=B9RDF4; Match level="QueryCoverage=63%, HitCoverage=9%, E-value=6e-17, Identity=78%"; Hit description =Spastin, putative
ILCLGATNKPQELDDAVLRRLVKRIYVPLPDPNVRRLLLKNQLKGQAFKLSSKCSMISLDSLFYFVCELKPIWNWFLTDY

SEQ ID NO: 127575 - protein, 88 aa, Setaria italica
  misc_feature (14)..(14): Xaa can be any naturally occurring amino acid
  misc_feature (18)..(18): Xaa can be any naturally occurring amino acid
  Transcript Sequence Number=SeqID_61601
  Gene Ontology: Cellular component=chloroplast envelope
  Homolog annotation: Hit_ID=Q7F2H9; Match level="QueryCoverage=96%, HitCoverage=21%, E-value=1e-23, Identity=67%"; Hit description =P0432B10.9 protein
  Subcellular localization annotation: CTP_CleavageSite=78; ConfidenceScore=5.08e-01
HHRLGSIVNFVIMXYLLXPTAAASSVASALPNYMFEPGAYTLGSRVATLLSKGATFTMVGFAAGLAGTALSNGLIAMRKRMDASFETP

SEQ ID NO: 127576 - protein, 92 aa, Setaria italica
  Transcript Sequence Number=SeqID_61602
  Gene Ontology: Mol. function=magnesium ion binding; Cellular component=chloroplast; Biological process=photosynthesis, light harvesting
  Homolog annotation: Hit_ID=Q10HD0; Match level="QueryCoverage=86%, HitCoverage=30%, E-value=1e-41, Identity=98%"; Hit description =Chlorophyll a-b binding protein, chloroplastic
  Pfam annotation: Domain name=Chloroa_b-bind; Domain location=40-92; Score=-8.9; E_value=0.00011; Accession=PF00504.13; Description =Chlorophyll A-B binding protein
VRIVRSVRLFYLLRRTVKSAPQSIWYGPDRPKYLGPFSEQTPSYLTGEFPGDYGWDTAGLSADPETFARNRELEVIHSRWAMLGALGCVFPE

SEQ ID NO: 127577 - protein, 89 aa, Setaria italica
  Transcript Sequence Number=SeqID_61603
  Gene Ontology: Mol. function=magnesium ion binding; Cellular component=chloroplast; Biological process=photosynthesis, light harvesting
  Homolog annotation: Hit_ID=Q10HD0; Match level="QueryCoverage=84%, HitCoverage=28%, E-value=1e-32, Identity=90%"; Hit description =Chlorophyll a-b binding protein, chloroplastic
GFGLRLVSGDVEGADEVLRPLAADAGGRITMRRTVKSAPQSIWYGPDRPKYLGPFSEQTPSYLTGEFPGDYGWDTAGLSADPETFARNR

SEQ ID NO: 127578 - protein, 70 aa, Setaria italica
  Transcript Sequence Number=SeqID_61604
  Gene Ontology: Mol. function=protein serine/threonine phosphatase activity; Cellular component=protein serine/threonine phosphatase complex; Biological process=protein amino acid dephosphorylation
  Homolog annotation: Hit_ID=Q94H98; Match level="QueryCoverage=88%, HitCoverage=16%, E-value=7e-25, Identity=88%"; Hit description =Probable protein phosphatase 2C 34
LNFHKFVQGIANRLVKAALKEATRKREVRYRDLRTIERGVRRHFHDDISVVVVYLDRHRERRHTRVIDSS

SEQ ID NO: 127579 - protein, 48 aa, Setaria italica
  Transcript Sequence Number=SeqID_61605
ASSGNRLTHPQKTGSLACECNQHVMHHRKMHLKLTHLQLRFFPYLMCS

SEQ ID NO: 127580 - protein, 38 aa, Setaria italica
  Transcript Sequence Number=SeqID_61606
KKTPASNSLILCILVARKYLNTGWSSLYDCYNSSKTTK

SEQ ID NO: 127581 - protein, 84 aa, Setaria italica
  Transcript Sequence Number=SeqID_61607
  Gene Ontology: Mol. function=metal ion transmembrane transporter activity; Cellular component=membrane; Biological process=metal ion transport
  Homolog annotation: Hit_ID=B6UH65; Match level="QueryCoverage=85%, HitCoverage=20%, E-value=1e-28, Identity=81%"; Hit description=Zinc transporter 2
FTSSFYIFRSELEEGKVSTTNGTSSEPQPAEAHGSDHSVASMLHNANTLGDSILLIAALCFHSVFEGIAIGVAETKADAWKALL

SEQ ID NO: 127582 - protein, 57 aa, Setaria italica
  misc_feature (6)..(6): Xaa can be any naturally occurring amino acid
  Transcript Sequence Number=SeqID_61608
KIIHQXNPAMTLRHKQCEQTIPTDRDLCLRQLLNVNIGNFGHSCVAGSCCHSYKWSE

SEQ ID NO: 127583 - protein, 71 aa, Setaria italica
  Transcript Sequence Number=SeqID_61609
  Subcellular localization annotation: CTP_CleavageSite=52; ConfidenceScore=5.52e-01
QVDQRILASSSPFSLAQKLPEPPLSVSPPPWRRRRLFSQRMEPSRLLLHLLVISKVRPYNSDLTSFTLGLM

SEQ ID NO: 127584 - protein, 120 aa, Setaria italica
  Transcript Sequence Number=SeqID_61610
  Gene Ontology: Mol. function=oxidoreductase activity, acting on the CH-OH group of donors, NAD or NADP as acceptor; Cellular component =peroxisome; Biological process=metabolic process
  Homolog annotation: Hit_ID=B9T0F2; Match level="QueryCoverage=70%, HitCoverage=22%, E-value=3e-40, Identity=90%"; Hit description =Hydroxypyruvate reductase, putative
  Pfam annotation: Domain name=2-Hacid_dh_C; Domain location=1-77; Score=-94.1; E_value=0.016; Accession=PF02826.11; Description=D -isomer specific 2-hydroxyacid dehydr
MVAGPLPGDRLLTVCFELPICCDELLKACGLIDEAALVEHLKANPMFRVGLDVFEDEPYMKPGLADMKNAVLVPHIASASKWTREGMSTLAALNVLGGIKGYPVWGNPNQVEPFLKRRKN

SEQ ID NO: 127585 - protein, 81 aa, Setaria italica
  Transcript Sequence Number=SeqID_61611
  Gene Ontology: Mol. function=oxidoreductase activity, acting on the CH-OH group of donors, NAD or NADP as acceptor; Cellular component =peroxisome; Biological process=metabolic process
  Homolog annotation: Hit_ID=B0M1A3; Match level="QueryCoverage=83%, HitCoverage=17%, E-value=1e-18, Identity=67%"; Hit description =Peroxisomal hydroxypyruvate reductase
NMAVGYNNVDVAAANKNGIAVGNTPGVLTETTAELAASLTLAAARRIVEADQFMRAGLYDGWLPHLSVDICLLLYLFRHNT

SEQ ID NO: 127586 - protein, 53 aa, Setaria italica
  Transcript Sequence Number=SeqID_61612
KPIQTSWYAFKAETRLEIFCTPPCLVSFEVISSLVSALKLTRQGGVQKIIFRS

SEQ ID NO: 127587 - protein, 114 aa, Setaria italica
  Transcript Sequence Number=SeqID_61613
  Gene Ontology: Mol. function=nucleic acid binding
  Homolog annotation: Hit_ID=Q7XHQ6; Match level="QueryCoverage=82%, HitCoverage=34%, E-value=1e-26, Identity=60%"; Hit description =Putative RNA and export factor binding protein
RRPIGPTVAPPPPPATARSLETGTKLHISNLDAGVTVEDVQELFSEGTAEVVFARKVDALDAIKKYNGVLLDGKPMNIDLIGSNAERPSMPPLIQNRPLQNYNDIHSSVPQKPK

SEQ ID NO: 127588 - protein, 128 aa, Setaria italica
  misc_feature (17)..(17): Xaa can be any naturally occurring amino acid
  Transcript Sequence Number=SeqID_61614
RRCYLPLRPFSRGIAAXASPAAAAAPELREESATARRDWDVRPRRRLQLQGLQRGRRTRPGRAAGGLRDCTQQRRVADCRRFPLIATMAGSLISCSPSVDLKVEKPDEMVTTGVLASLQNFLRKCPCN

SEQ ID NO: 127589 - protein, 48 aa, Setaria italica
  Transcript Sequence Number=SeqID_61615
INFLIKQAIRYHLLGLERSSKRYNLFVVLTSTNILTIWEVLITFDLFA

SEQ ID NO: 127590 - protein, 59 aa, Setaria italica
  Transcript Sequence Number=SeqID_61616
  Gene Ontology: Mol. function=transcription factor activity; Cellular component=nucleus; Biological process=regulation of transcription, DNA-dependent
  Homolog annotation: Hit_ID=B6SXJ5; Match level="QueryCoverage=59%, HitCoverage=9%, E-value=3e-13, Identity=100%"; Hit description =Protein BABY BOOM 2
FFLCFQSETEEEAAEAYDIAAIEIRGKNAVTNFDRSNYVDKGMHCIEGEGLRLLASKPE

SEQ ID NO: 127591 - protein, 136 aa, Setaria italica
  misc_feature (93)..(93): Xaa can be any naturally occurring amino acid
  Transcript Sequence Number=SeqID_61617
  Gene Ontology: Mol. function=oxidoreductase activity; Biological process=oxidation reduction
  Homolog annotation: Hit_ID=Q9M5K1; Match level="QueryCoverage=100%, HitCoverage=48%, E-value=9e-44, Identity=54%"; Hit description =Putative flavonol synthase-like protein
  Pfam annotation: Domain name=2OG-FeII_Oxy; Domain location=42-124; Score=39.7; E_value=1.2e-08; Accession=PF03171.12; Description=2OG -Fe(II) oxygenase superfamily
FEALLENYINLCRDLSRKIMRGIALALGGAIDAFEGETAGDPFWVLRLIGYPVEIPEEQRTDTGCGAHTDYGLLTLVNQDDDICALEVQNRSXVWSNGIYESTLHRVVNNSPRYRISVAFFYESNFDAAIEPVQFC

SEQ ID NO: 127592 - protein, 64 aa, Setaria italica
  Transcript Sequence Number=SeqID_61618
  Gene Ontology: Mol. function=oxidoreductase activity; Biological process=oxidation reduction
  Homolog annotation: Hit_ID=B9T4U5; Match level="QueryCoverage=78%, HitCoverage=15%, E-value=2e-15, Identity=68%"; Hit description =Flavonol synthase/flavanone 3-hydroxylase, putative
PDMHEAIDCYTPIKPGKYGDLAKPMEGSNLWPENPSNFEALLENYINLCRGPQLDLLLTIFSTH

SEQ ID NO: 127593 - protein, 109 aa, Setaria italica
  misc_feature (98)..(98): Xaa can be any naturally occurring amino acid
  misc_feature (105)..(105): Xaa can be any naturally occurring amino acid
  Transcript Sequence Number=SeqID_61619
  Gene Ontology: Mol. function=isomerase activity; Biological process =protein folding
  Homolog annotation: Hit_ID=B6U100; Match level="QueryCoverage=79%, HitCoverage=12%, E-value=6e-31, Identity=77%"; Hit description =Peptidyl-prolyl isomerase
ADIKKALEIDPDNRDVKMGYRRLKETVKEYKRRDAKLYGNMISKLSKVEDTEGNDHESRGQSKKHGMWPLAQLLSRFFTKDGTKGSTLWLVLRLLILXVLVVAVXVGYY

SEQ ID NO: 127594 - protein, 65 aa, Setaria italica
  Transcript Sequence Number=SeqID_61620
  Gene Ontology: Mol. function=isomerase activity; Biological process =protein folding
  Homolog annotation: Hit_ID=B6U100; Match level="QueryCoverage=86%, HitCoverage=8%, E-value=5e-13, Identity=69%"; Hit description =Peptidyl-prolyl isomerase
  Pfam annotation: Domain name=TPR_1; Domain location=9-42; Score=15.9; E_value=0.072; Accession=PF00515.20; Description=Tetratricopeptide repeat
KQLSKPLKISCKLNNAACKLKLKDYKEAKELCTEVLELDCTNVKALYRRAQAHTHLHIPVVWIYF

SEQ ID NO: 127595 - protein, 54 aa, Setaria italica
  Transcript Sequence Number=SeqID_61621
GLENESNEQEIRSQQDSTVHSPSRVSASFPFYAIYLRTSSVTHVYTRIPSGHCR

SEQ ID NO: 127596 - protein, 32 aa, Setaria italica
  Transcript Sequence Number=SeqID_61622
RRLASCRLTKLGALVWQKVVHEHQGWRLLSSM

SEQ ID NO: 127597 - protein, 60 aa, Setaria italica
  Transcript Sequence Number=SeqID_61623
  Gene Ontology: Mol. function=nucleotide binding; Cellular component =intracellular; Biological process=small GTPase mediated signal transduction
  Homolog annotation: Hit_ID=B9RHQ5; Match level="QueryCoverage=90%, HitCoverage=7%, E-value=5e-21, Identity=90%"; Hit description=GTP -binding protein lepa, putative
MLVQTQANVYLALENNLEIIPVLNKIDLPGAEPDRVAQEIEEIIGLDCSDAIRCSAKGRY

SEQ ID NO: 127598 - protein, 70 aa, Setaria italica
  Transcript Sequence Number=SeqID_61624
YERAHVIFLKSLLSAVKISAWERHTIIQSKRTGYEARKFRMAQFWQENVRNSSALWRRPLRTSITCNATL

SEQ ID NO: 127599 - protein, 98 aa, Setaria italica
  misc_feature (15)..(15): Xaa can be any naturally occurring amino acid
  misc_feature (35)..(35): Xaa can be any naturally occurring amino acid
  Transcript Sequence Number=SeqID_61625
  Gene Ontology: Mol. function=NAD+ ADP-ribosyltransferase activity; Cellular component=nucleus
  Homolog annotation: Hit_ID=B6TNC0; Match level="QueryCoverage=95%, HitCoverage=28%, E-value=2e-39, Identity=88%"; Hit description =Ankyrin repeat domain-containing protein 2
  Pfam annotation: Domain name=Ank; Domain location=1-34; Score=4.6; E _value=8; Accession=PF00023.22; Description=Ankyrin repeat
  Pfam annotation: Domain name=Ank; Domain location=35-67; Score=38.3; E_value=3e-08; Accession=PF00023.22; Description=Ankyrin repeat
  Pfam module annotation: Pfam domain module=Ank::Ank; Domain location =1-34::35-67
GKKGLCIFACGYGEXLKCAEILLEAGAAVDALDKXKNTPLHYAAGYGRKECVDLLLKHGAAVTVQNLDGKTPIEVARLNNQDEVLKLLEKDAFLNEPM

SEQ ID NO: 127600 - protein, 94 aa, Setaria italica
  Transcript Sequence Number=SeqID_61626
HFVSLISLVARLHVALCCHYIISSLSSLLIPKSNHQQSSNFESSTDRPQRELERVIYYPRLWILRQPILPCLRCPLAACLSSLHTEPPESHICT

SEQ ID NO: 127601 - protein, 45 aa, Setaria italica
  Transcript Sequence Number=SeqID_61627
ITLPKVRFLWSKLNHIMSQRIACRKLANNSCHCFGSFFMSMNYEF

SEQ ID NO: 127602 - protein, 79 aa, Setaria italica
  Transcript Sequence Number=SeqID_61628
ASPLHRRSAATLSPVEVPAAGAESRHGRRPNDPAAGYYSGRPLNYDGQQAEATAPQARPQPAVGEQANALPVAPQPQPP

SEQ ID NO: 127603 - protein, 84 aa, Setaria italica
  Transcript Sequence Number=SeqID_61629
EPEKERCLLSLPPRLRSTAGPPPRSRRWRCQQPERRAAMADAPNDPAGMSLSFRIYLPFLKTKNPSSKQNKNKRVHAVSLPLRR

SEQ ID NO: 127604 - protein, 55 aa, Setaria italica
  Transcript Sequence Number=SeqID_61630
KNFRIVPINNQWFGNCKRGIVDNRNIQDLTMSCFEHVTALHEQGIDKHRRCSMLE

SEQ ID NO: 127605 - protein, 49 aa, Setaria italica
  Transcript Sequence Number=SeqID_61631
SKQRHGQVLNVSVVNNTPFAVAKPLVVDGTSKSHELSLAYVESSLPLLD

SEQ ID NO: 127606 - protein, 125 aa, Setaria italica
  misc_feature (34)..(34): Xaa can be any naturally occurring amino acid
  Transcript Sequence Number=SeqID_61632
  Gene Ontology: Mol. function=hydroxymethyl-, formyl- and related transferase activity; Biological process=biosynthetic process
  Homolog annotation: Hit_ID=B4FRN6; Match level="QueryCoverage=100%, HitCoverage=36%, E-value=2e-58, Identity=86%"; Hit description =Methionyl-tRNA formyltransferase
  Pfam annotation: Domain name=Formyl_trans_C; Domain location=14-117; Score=48.1; E_value=3.5e-11; Accession=PF02911.10; Description =Formyl transferase, C-terminal domain
AQPQDDSKATLAPKLNSEESWLSFDQEAKELHNXGWPGTRAKLQLINQNGEPDMLEIKVISTKVSASCDKVGDENEILFSGSSLLIPCSGSTWLEVLELQLPGKKVTTARDFWNGLRGQKLLKSP

SEQ ID NO: 127607 - protein, 129 aa, Setaria italica
  Transcript Sequence Number=SeqID_61633
  Gene Ontology: Mol. function=DNA binding; Cellular component=nucleus; Biological process=cell division
  Homolog annotation: Hit_ID=B6TA37; Match level="QueryCoverage=94%, HitCoverage=22%, E-value=4e-56, Identity=84%"; Hit description =Protein RCC2
FVSFSGWNIRCMASGNMHHVVGADDSCISWGVAQNGELGYGPNGQKSSANPKKVDILEGMHVTSVGCGYGLSLIVVDRANIGDRLDKLEIYDGDTSTEVEVEVQAAKKASTSTNSRAQQAQENQDDSES

SEQ ID NO: 127608 - protein, 43 aa, Setaria italica
  Transcript Sequence Number=SeqID_61634
  Gene Ontology: Mol. function=DNA binding; Cellular component=nucleus
  Homolog annotation: Hit_ID=B6TA37; Match level="QueryCoverage=76%, HitCoverage=6%, E-value=7e-13, Identity=100%"; Hit description =Protein RCC2
PASSACTAGGGQLYMWGKMKNTGDDWMYPKPVMDLRFLTHLSQ

SEQ ID NO: 127609 - protein, 72 aa, Setaria italica
  Transcript Sequence Number=SeqID_61635
  Gene Ontology: Mol. function=protein serine/threonine kinase activity; Biological process=protein amino acid phosphorylation
  Homolog annotation: Hit_ID=Q4PLL4; Match level="QueryCoverage=98%, HitCoverage=6%, E-value=3e-11, Identity=53%"; Hit description=SHR5 -receptor-like kinase (Fragment)
  Pfam annotation: Domain name=SKG6; Domain location=31-65; Score=12.6; E_value=0.027; Accession=PF08693.2; Description=Transmembrane alpha -helix domain
  Subcellular localization annotation: CTP_CleavageSite=34; ConfidenceScore=5.38e-01
IPTQGYYGPMISALSVTPNFTPTVRNGVPKKKSKAGAIAGIVIGASVLGLAALLGVFMLVKKRRRVAQQQEG

SEQ ID NO: 127610 - protein, 56 aa, Setaria italica
  Transcript Sequence Number=SeqID_61636
  Gene Ontology: Mol. function=protein serine/threonine kinase activity; Biological process=protein amino acid phosphorylation
  Homolog annotation: Hit_ID=Q4PLL4; Match level="QueryCoverage=87%, HitCoverage=4%, E-value=4e-17, Identity=91%"; Hit description=SHR5 -receptor-like kinase (Fragment)
LRFQGNSFEGPIPESLSNLTKLTNLRIGDIVNGSSSMSFISNLTSLDVLYATCFSL

SEQ ID NO: 127611 - protein, 47 aa, Setaria italica
  Transcript Sequence Number=SeqID_61637
  Gene Ontology: Mol. function=phosphoenolpyruvate carboxykinase (ATP) activity; Cellular component=cytoplasm; Biological process =gluconeogenesis
  Homolog annotation: Hit_ID=Q10NX1; Match level="QueryCoverage=87%, HitCoverage=9%, E-value=1e-17, Identity=100%"; Hit description =Phosphoenolpyruvate carboxykinase, putative, expressed
LNVSVAVLENVVFDEHTREVDYTDKSVTENTRAAYPIEYIPNAKIPC

SEQ ID NO: 127612 - protein, 38 aa, Setaria italica
  Transcript Sequence Number=SeqID_61638
PTSTSGDQRRGSPNIEMDEHTFLTNRERAVDYLNSLDK

SEQ ID NO: 127613 - protein, 141 aa, Setaria italica
  Transcript Sequence Number=SeqID_61639
  Gene Ontology: Mol. function=nucleic acid binding; Cellular component= intracellular; Biological process=regulation of transcription, DNA -dependent
  Homolog annotation: Hit_ID=Q9ZQT8; Match level="QueryCoverage=92%, HitCoverage=35%, E-value=4e-38, Identity=57%"; Hit description=WREBP- 2 protein
  Pfam annotation: Domain name=zf-C2H2; Domain location=102-127; Score =30.0; E_value=9.3e-06; Accession=PF00096.18; Description=Zinc finger, C2H2 type
  Pfam annotation: Domain name=zf-C2H2; Domain location=11-35; Score =32.8; E_value=1.4e-06; Accession=PF00096.18; Description=Zinc finger, C2H2 type
  Pfam annotation: Domain name=zf-C2H2; Domain location=41-65; Score =28.8; E_value=2.2e-05; Accession=PF00096.18; Description=Zinc finger, C2H2 type
  Pfam module annotation: Pfam domain module=zf-C2H2::zf-C2H2::zf-C2H2; Domain location=102-127::11-35::41-65
YLTTTTGQKDFVCPHPGCGKAFSLDFNLRSHLKTHALENYHICPFPACGKRFTSDSKLRVHVKSHEKTGTPVTVQHTPPAEKPHSTPKPSTPATTSFADRPYVCPYEGCDKAYIHSYKLNLHLKTQHPEHGQEESLLRPPL

SEQ ID NO: 127614 - protein, 70 aa, Setaria italica
  Transcript Sequence Number=SeqID_61640
  Subcellular localization annotation: CTP_CleavageSite=21; ConfidenceScore=5.12e-01
PKLRPPCRLQIRLSASGIRPSASAVRTLPLSSPGPGRPVHFSSVRHRDGGYGGGGGYGGSRGESGGNWRN

SEQ ID NO: 127615 - protein, 72 aa, Setaria italica
  misc_feature (29)..(29): Xaa can be any naturally occurring amino acid
  Transcript Sequence Number=SeqID_61641
  Subcellular localization annotation: CTP_CleavageSite=30; ConfidenceScore=5.46e-01
SWVLVILLAATVRQRTPPPIPAPEPSPCXSVSTPARTPSPTPAPTPARTPAPTPAPTPTPTPAPTPAPTPAP

SEQ ID NO: 127616 - protein, 58 aa, Setaria italica
  misc_feature (54)..(54): Xaa can be any naturally occurring amino acid
  Transcript Sequence Number=SeqID_61642
  Gene Ontology: Mol. function=small conjugating protein ligase activity; Cellular component=cytoplasm; Biological process=ubiquitin- dependent protein catabolic process
  Homolog annotation: Hit_ID=Q8LRF5; Match level="QueryCoverage=100%, HitCoverage=18%, E-value=1e-22, Identity=87%"; Hit description =Autophagy-related protein 3
  Pfam annotation: Domain name=Autophagy_act_C; Domain location=1-35; Score=6.0; E_value=0.017; Accession=PF03987.7; Description =Autophagocytosis associated protein,
LVFEDISQDHARKTVTIEDHPHLLAGRHASVHPCKHADVMKKIVDVLVSRGVEXEVDK

SEQ ID NO: 127617 - protein, 91 aa, Setaria italica
  Transcript Sequence Number=SeqID_61643
HPPLCPLRRIGDHVHYPPVLPRARRSREQRKHGGFFLRRRGSEADRIAAPCRSTSSPTRYARAPDLPALVGDAPCVFCWRLDAPILPNLLR

SEQ ID NO: 127618 - protein, 44 aa, Setaria italica
  Transcript Sequence Number=SeqID_61644
CAAVETVSCKAFTASTDLQPGKMKVLYVTFTRAQVIKPHKSQTF

SEQ ID NO: 127619 - protein, 73 aa, Setaria italica
  Transcript Sequence Number=SeqID_61645
YHVLHLFQIVGLFSFCRFIDIIMHLDIHYIKVHSKNYAPRKPKRPTIWNGGSSTENHLDVRLLICTFSPLYFM

SEQ ID NO: 127620 - protein, 42 aa, Setaria italica
  Transcript Sequence Number=SeqID_61646
VHRYYYASRHTLYLQCIIISMPLEKPKRPTIWNGESSHYQLS

SEQ ID NO: 127621 - protein, 111 aa, Setaria italica
  misc_feature (50)..(50): Xaa can be any naturally occurring amino acid
  Transcript Sequence Number=SeqID_61647
  Gene Ontology: Mol. function=acyltransferase activity; Biological process=metabolic process
  Homolog annotation: Hit_ID=B6SM73; Match level="QueryCoverage=88%, HitCoverage=29%, E-value=3e-33, Identity=74%"; Hit description =Diacylglycerol O-acyltransferase 1
  Pfam annotation: Domain name=DAGAT; Domain location=2-109; Score= -159.6; E_value=0.00027; Accession=PF03982.5; Description =Diacylglycerol acyltransferase
FLVLFLLVPVFCFGQSYAYKWWRPGGKLFVNIARAVKFTPIIFWGRFGTXPFPFPRPMHVVVGKPIEVDKNPQPAIDEINEVHEQFIMALRELFEKYKGKAGYPGLHLRVL

SEQ ID NO: 127622 - protein, 54 aa, Setaria italica
  Transcript Sequence Number=SeqID_61648
KLFVNIARAVKFTPIIFWGRFGTPFPFPRPMHVVVGKPIEVDKKPPRLAISMRN

SEQ ID NO: 127623 - protein, 58 aa, Setaria italica
  Transcript Sequence Number=SeqID_61649
NTYVKIGIHTYLYICISATKSSKQLKSFLTHEHPVHVFTSELGALWSSPQCCNYRPTA

SEQ ID NO: 127624 - protein, 71 aa, Setaria italica
  Transcript Sequence Number=SeqID_61650
SNQQHILEEGETNLLASTGISSNTLTASTNSTKQQARVPRTWQVWPDQRAGSTEQEAGHQQPPAGRMPRRP

SEQ ID NO: 127625 - protein, 51 aa, Setaria italica
  Transcript Sequence Number=SeqID_61651
KNNIISVCVFMPTTWIPHHAWTCAMVILGTAMSNSSHTPIGFSAFSYEKGR

SEQ ID NO: 127626 - protein, 119 aa, Setaria italica
  Transcript Sequence Number=SeqID_61652
  Gene Ontology: Mol. function=protein serine/threonine kinase activity
  Homolog annotation: Hit_ID=B6TWH0; Match level="QueryCoverage=47%, HitCoverage=14%, E-value=5e-25, Identity=87%"; Hit description=ATP binding protein
HANHRYLLLLASIIDSRLAAPPSLLAIDLIGGQRPACYRLPSQTEILLKVPVLHVEFLKATITSEDMNWCCIPRTKKQENPYSNSIGDIYSEKNIRLFSYAELRSATDNFNRTNKVGRG

SEQ ID NO: 127627 - protein, 39 aa, Setaria italica
  Transcript Sequence Number=SeqID_61653
RGGDHRMIVNGTFNNTVLVSLYTVIHLCEEIQPHYHSSL

SEQ ID NO: 127628 - protein, 97 aa, Setaria italica
  misc_feature (69)..(69): Xaa can be any naturally occurring amino acid
  Transcript Sequence Number=SeqID_61654
  Gene Ontology: Mol. function=methyltransferase activity; Biological process=metabolic process
  Homolog annotation: Hit_ID=Q75G68; Match level="QueryCoverage=95%, HitCoverage=22%, E-value=3e-33, Identity=76%"; Hit description =Probable protein arginine N-methyltransferase 6.2
KMSSMMPLAKQCAFMEPSVETISGENVLTWPTVVSQVDCYTIQAQELETITAAFKFTSMLQAPLHGFAXFWFDVEVQTEPSYVQENTKERQRQNQIP

SEQ ID NO: 127629 - protein, 69 aa, Setaria italica
  Transcript Sequence Number=SeqID_61655
KILVSFFFAALDSFTLLLKEKGLYTKIDNSFRPVWIDRVILIRRGLLNGKLLGSNAHLERPLLDELVFE

SEQ ID NO: 127630 - protein, 86 aa, Setaria italica
  misc_feature (46)..(46): Xaa can be any naturally occurring amino acid
  Transcript Sequence Number=SeqID_61656
  Gene Ontology: Mol. function=voltage-gated chloride channel activity; Cellular component=integral to membrane; Biological process=chloride transport
  Homolog annotation: Hit_ID=Q10ER1; Match level="QueryCoverage=95%, HitCoverage=12%, E-value=2e-34, Identity=92%"; Hit description =Chloride channel protein CLC-d, putative, expressed
LGKEGPLVHTGACIASLLGQGGSAKYHLSSRWVRIFESDRDRRDLXGVAAAFRAPVGGVLFALEEVTSWWRSHLMWRVFFTSAVVV

SEQ ID NO: 127631 - protein, 103 aa, Setaria italica
  Transcript Sequence Number=SeqID_61657
  Gene Ontology: Mol. function=phosphoinositide phospholipase C activity; Cellular component=plasma membrane; Biological process =intracellular signaling cascade
  Homolog annotation: Hit_ID=Q9M5Q2; Match level="QueryCoverage=88%, HitCoverage=15%, E-value=1e-30, Identity=64%"; Hit description =Phospholipase C2
RRSRGCRGGLTAEGFHRWLCHNANAALDPRRGVYQDMGSPLSHYFIYTGHNSYLTGNQLSSGCSERPIVKALLDGVRVIELDLWPNAAKDQVEVLHGRWANAF

SEQ ID NO: 127632 - protein, 79 aa, Setaria italica
  Transcript Sequence Number=SeqID_61658
CCFPFFFVEYVGELRIFVSRRKSFVHRGPIRAQAHGFRHVLAYITPPQQQHKWHRKAEIRNADLKHLMVSASLWQLGVL

SEQ ID NO: 127633 - protein, 84 aa, Setaria italica
  Transcript Sequence Number=SeqID_61659
  Gene Ontology: Mol. function=protein serine/threonine kinase activity; Cellular component=integral to membrane; Biological process=protein amino acid phosphorylation
  Homolog annotation: Hit_ID=B6T6U0; Match level="QueryCoverage=69%, HitCoverage=15%, E-value=8e-23, Identity=89%"; Hit description =BRASSINOSTEROID INSENSITIVE 1-associated receptor kinase 1
CSALVRKKDRSLPCLTTSEASHYLPGKGSTARLEFKQRLSIAIGAAKGLNHLHSRDVPLIHKNFKTNNVLVDENFIAKVADAGL

SEQ ID NO: 127634 - protein, 135 aa, Setaria italica
  Transcript Sequence Number=SeqID_61660
QQYVLTKKCRWSGKCSICGQDHKDVVCRKNPDAKLRWELVSSSAPNGAFHMMAAASSTPTPTCTATAAVPTCPYTSVLASATGDSISCPYTSDWGLLDAPCYSFSTHGSMGSHSDGSYFGCLFFVWRSRGICYAC

SEQ ID NO: 127635 - protein, 53 aa, Setaria italica
  Transcript Sequence Number=SeqID_61661
FEMQLQVTADLNKSLSGDQSRGQGDKKVHSGGHVHRKGKFQRHQPYRGGSAQP

SEQ ID NO: 127636 - protein, 115 aa, Setaria italica
  misc_feature (91)..(91): Xaa can be any naturally occurring amino acid
  Transcript Sequence Number=SeqID_61662
  Gene Ontology: Mol. function=zinc ion binding; Cellular component =intracellular
  Homolog annotation: Hit_ID=B9RHD7; Match level="QueryCoverage=100%, HitCoverage=50%, E-value=5e-21, Identity=49%"; Hit description=Salt -tolerance protein, putative
FFLCSFFPTCCSISIGTSLCLSCDMTVHVGGKRTHGRYLLLRQSVEFPGDKLGHMDDVAMQSKDPETQIDQKPPHSVTKEQMANHHNGSDXDPASDGNCEDQGNINSKMIDLNMR

SEQ ID NO: 127637 - protein, 63 aa, Setaria italica
  Transcript Sequence Number=SeqID_61663
PFAPLTLELFEWYISLIMELYDKDLNVEQTGWPRRYLWSSLFSLRLSELMSLVTLPLYRSASG

SEQ ID NO: 127638 - protein, 42 aa, Setaria italica
  Transcript Sequence Number=SeqID_61664
  Gene Ontology: Mol. function=protein serine/threonine kinase activity
  Homolog annotation: Hit_ID=B9T518; Match level="QueryCoverage=100%, HitCoverage=8%, E-value=1e-15, Identity=90%"; Hit description =Serine/threonine-protein kinase rio2, putative
  Pfam annotation: Domain name=Rio2_N; Domain location=1-42; Score =29.2; E_value=7.5e-08; Accession=PF09202.3; Description=Rio2, N -terminal
RYLTKDDFRVLTAVEMGMRNHEIVPAELVDRIAGLKHGGTYK

SEQ ID NO: 127639 - protein, 84 aa, Setaria italica
  misc_feature (75)..(75): Xaa can be any naturally occurring amino acid
  Transcript Sequence Number=SeqID_61665
SISITYLPWCNVMQSLLEPISRCFIIHTNTCSPHSPHPSPYPCMPSSMHTTKSQIEGEPSDITHLRACPCKTKNXTKSQIEGEP

SEQ ID NO: 127640 - protein, 54 aa, Setaria italica
  Transcript Sequence Number=SeqID_61666
  Gene Ontology: Mol. function=phosphatidate cytidylyltransferase activity; Cellular component=integral to membrane; Biological process=phospholipid biosynthetic process
  Homolog annotation: Hit_ID=Q5N9J9; Match level="QueryCoverage=100%, HitCoverage=17%, E-value=1e-18, Identity=79%"; Hit description =Probable phytol kinase 2, chloroplastic
PNKSYAGSIAMAVAGFLASVGYMHYFHTFGFIEETWYMALGFLVVSIAAALVES

SEQ ID NO: 127641 - protein, 75 aa, Setaria italica
  Transcript Sequence Number=SeqID_61667
MKNSILLFVAETQQETCSYKCWAGVLAVLASFQVITSSDAQVILYHHSSVHILTFHTALEHMLLSLLTTKNKPKG

SEQ ID NO: 127642 - protein, 112 aa, Setaria italica
  misc_feature (105)..(105): Xaa can be any naturally occurring amino acid
  Transcript Sequence Number=SeqID_61668
  Gene Ontology: Mol. function=formate-tetrahydrofolate ligase activity; Cellular component=plasma membrane; Biological process =folic acid and derivative biosynthetic process
  Homolog annotation: Hit_ID=Q8W525; Match level="QueryCoverage=91%, HitCoverage=34%, E-value=1e-49, Identity=94%"; Hit description =Formate tetrahyrofolate ligase (Fragment)
  Pfam annotation: Domain name=FTHFS; Domain location=1-112; Score= -463.8; E_value=8.8e-05; Accession=PF01268.11; Description=Formate- -tetrahydrofolate ligase
VLTFCLVLLIVFRRLTKLGISKTDPNELTPDEVRRFARLDIDPESITWRRVMDVNDRFLRKITIGQGPDEKGMVRETGFDISVASEIMAVLALTTSLADMRERLXGRMVIGN

SEQ ID NO: 127643 - protein, 111 aa, Setaria italica
  misc_feature (19)..(19): Xaa can be any naturally occurring amino acid
  Transcript Sequence Number=SeqID_61669
  Gene Ontology: Mol. function=voltage-gated ion channel activity; Cellular component=integral to membrane; Biological process =potassium ion transport
  Homolog annotation: Hit_ID=Q40648; Match level="QueryCoverage=99%, HitCoverage=33%, E-value=7e-56, Identity=92%"; Hit description =Probable voltage-gated potassium channel subunit beta
DNAEVYANGRAEEIMGQAXIRDLGWRRSDVVISTKLFWGGQGPNDKGLSRKHIVEGLKGSLKRLDMDYVDVVYCHRPDASTPIEETVRAMNWVIDQGWAFYWGTSEWSAQD

SEQ ID NO: 127644 - protein, 59 aa, Setaria italica
  Transcript Sequence Number=SeqID_61670
TTWEMFGTQHHDRDTENTQKHAYSSMTSNAGEVAWPKLNQMNAESLPGTHSAVCTTSPV

SEQ ID NO: 127645 - protein, 73 aa, Setaria italica
  Transcript Sequence Number=SeqID_61671
  Gene Ontology: Mol. function=formate-tetrahydrofolate ligase activity; Cellular component=plasma membrane; Biological process =folic acid and derivative biosynthetic process
  Homolog annotation: Hit_ID=P28723; Match level="QueryCoverage=79%, HitCoverage=9%, E-value=2e-24, Identity=87%"; Hit description =Formate--tetrahydrofolate ligase
LYPLESSIKEKIESIARSYGASGVEYSEQAEKQIEMYTKQGFSNLPICMAKTQYSFSHVPREMQNTHRTNCCL

SEQ ID NO: 127646 - protein, 50 aa, Setaria italica
  Transcript Sequence Number=SeqID_61672
  Gene Ontology: Mol. function=formate-tetrahydrofolate ligase activity; Cellular component=plasma membrane; Biological process =folic acid and derivative biosynthetic process
  Homolog annotation: Hit_ID=Q9SPK5; Match level="QueryCoverage=72%, HitCoverage=5%, E-value=1e-11, Identity=91%"; Hit description =Formate--tetrahydrofolate ligase
LKLVGKGGFVVTEAGFGADIGTEKFMDIKCRYSGLTHPASTRATFSLTYA

SEQ ID NO: 127647 - protein, 76 aa, Setaria italica
  Transcript Sequence Number=SeqID_61673
  Gene Ontology: Mol. function=formate-tetrahydrofolate ligase activity; Cellular component=plasma membrane; Biological process =folic acid and derivative biosynthetic process
  Homolog annotation: Hit_ID=B9T077; Match level="QueryCoverage=84%, HitCoverage=15%, E-value=4e-21, Identity=73%"; Hit description =Formate-tetrahydrofolate ligase, putative
NAAMAAGAFDAVVCTHHAHGGRGAVELGLAVQRACESQAEPLKFLYPLESSIKEKIESIARSYGASGVEITTRNKD

SEQ ID NO: 127648 - protein, 78 aa, Setaria italica
  misc_feature (39)..(39): Xaa can be any naturally occurring amino acid
  Transcript Sequence Number=SeqID_61674
  Gene Ontology: Mol. function=sequence-specific DNA binding; Cellular component=nucleus; Biological process=regulation of transcription, DNA-dependent
  Homolog annotation: Hit_ID=Q8RUM5; Match level="QueryCoverage=100%, HitCoverage=13%, E-value=1e-20, Identity=67%"; Hit description=QSH-1
KGMILNQLRNTSKVAANDGIGKEDMANFALMGGGSGLLXGNSVNAFGQPHNIWRPQRGLPERAVSVLRSWLFEHFLHP

SEQ ID NO: 127649 - protein, 88 aa, Setaria italica
  Transcript Sequence Number=SeqID_61675
  Subcellular localization annotation: CTP_CleavageSite=46; ConfidenceScore=5.51e-01
RPCCSSPCRRHPPRRPPSSPRRRWRRRGRSPLSRRRRSFAGCHTCTGTPKSQIMRIHNTQLRTIRCCYLLDTIKVKNDRICSRRAKNF

SEQ ID NO: 127650 - protein, 79 aa, Setaria italica
  Transcript Sequence Number=SeqID_61676
  Homolog annotation: Hit_ID=B6TS20; Match level="QueryCoverage=48%, HitCoverage=11%, E-value=2e-13, Identity=94%"; Hit description=Pirin- like protein
  Subcellular localization annotation: CTP_CleavageSite=47; ConfidenceScore=5.52e-01
GSATAEPPTRLLPVRTTAKHRPTTRVMSSSSSASDAAAAAVPFEKPRAVVKKLLAESQPEGQGATVRRSIGRHELRNLD

SEQ ID NO: 127651 - protein, 71 aa, Setaria italica
  Transcript Sequence Number=SeqID_61677
ELLFVLRDFSFSHSLVCVFVSFQADSISGFHSNTHIPVVIGAQMRYEVTGDPLCKAGVCIPSSHPIWAICS

SEQ ID NO: 127652 - protein, 59 aa, Setaria italica
  Transcript Sequence Number=SeqID_61678
  Gene Ontology: Mol. function=catalytic activity
AHLFDKPCFLGLLAVQADSISGFHSNTHIPVVIGAQMRYEVTGDPLCKVNSLRILLLQS

SEQ ID NO: 127653 - protein, 48 aa, Setaria italica
  Transcript Sequence Number=SeqID_61679
SISAETTSQSAKLNVRIPSWTFADGAGANLNGLKGCILRPVIFNCFSS

SEQ ID NO: 127654 - protein, 79 aa, Setaria italica
  misc_feature (11)..(11): Xaa can be any naturally occurring amino acid
  Transcript Sequence Number=SeqID_61680
  Gene Ontology: Mol. function=nucleic acid binding; Cellular component= chromatin; Biological process=chromatin assembly or disassembly
  Homolog annotation: Hit_ID=Q8LMQ2; Match level="QueryCoverage=98%, HitCoverage=6%, E-value=9e-13, Identity=51%"; Hit description =Putative plant disease resistance polyprotein
AWNCLTVKRLXKLSLGGASYIGLVDDILANCVQLTDFRVASSSFYRAKFLIFAPSSKLKNLQVDRCNFGKICLISLPCT

SEQ ID NO: 127655 - protein, 107 aa, Setaria italica
  Transcript Sequence Number=SeqID_61681
  Gene Ontology: Mol. function=nucleic acid binding; Cellular component= chromatin; Biological process=chromatin assembly or disassembly
  Homolog annotation: Hit_ID=Q8LMQ2; Match level="QueryCoverage=87%, HitCoverage=8%, E-value=2e-20, Identity=56%"; Hit description =Putative plant disease resistance polyprotein
AWNCLTAKRLTKLSLGEASYIGLVNDILANCVQLTDFRVASSSFYRAKFLIFAPSSKLKNLQVDRCNFGKICLISLPCLETFVCRGRPTKLSYGGHIHRANSSKGPR

SEQ ID NO: 127656 - protein, 66 aa, Setaria italica
  Transcript Sequence Number=SeqID_61682
KLSLGEASYIGLVNDILANCVQLTDFRVASSSFYRAKFLIFAPSSKLKNLQVDRCNFGKICLEYYD

SEQ ID NO: 127657 - protein, 54 aa, Setaria italica
  Transcript Sequence Number=SeqID_61683
PPLLVVSFVLLVIRGLNIHISEMHVHSRLKVQRITQFRCPPLLVVSFVLLVLSP

SEQ ID NO: 127658 - protein, 84 aa, Setaria italica
  Transcript Sequence Number=SeqID_61684
  Subcellular localization annotation: CTP_CleavageSite=43; ConfidenceScore=5.28e-01
KFPYLSYKDCVPLVSCSCTVSRQKEQKVKTAKTHHCSTNSFCRSNKQASKLCFQTNNNNAMTYNYPAFPKILGPRDHILVLYCR

SEQ ID NO: 127659 - protein, 82 aa, Setaria italica
  Transcript Sequence Number=SeqID_61685
AEEREAMLVASGRWVVIMEEPDSAEILLKLTGAVVDNGGLGWFFILIHNQVPILPVKSIFYNFLCVLFRGVKNRKRCKAQLV

SEQ ID NO: 127660 - protein, 68 aa, Setaria italica
  Transcript Sequence Number=SeqID_61686
  Gene Ontology: Mol. function=protein disulfide oxidoreductase activity; Cellular component=cytoplasm; Biological process=cell redox homeostasis
  Homolog annotation: Hit_ID=Q0D840; Match level="QueryCoverage=91%, HitCoverage=50%, E-value=1e-21, Identity=79%"; Hit description =Thioredoxin H-type
  Pfam annotation: Domain name=Thioredoxin; Domain location=5-68; Score= 26.8; E_value=1.4e-06; Accession=PF00085.12; Description=Thioredoxin
IRRRPTTKEEFDSQMKKAEEAKKLVVIDFTASWCGPCRFIAPIFAELAKKFAHIVFLKVDVDELKEVA

SEQ ID NO: 127661 - protein, 80 aa, Setaria italica
  Transcript Sequence Number=SeqID_61687
  Gene Ontology: Mol. function=protein disulfide oxidoreductase activity; Cellular component=cytoplasm; Biological process=glycerol ether metabolic process
  Homolog annotation: Hit_ID=Q6VBI4; Match level="QueryCoverage=86%, HitCoverage=56%, E-value=2e-25, Identity=75%"; Hit description =Thioredoxin H3
  Pfam annotation: Domain name=Thioredoxin; Domain location=5-80; Score= 73.2; E_value=9.8e-19; Accession=PF00085.12; Description=Thioredoxin
LWAFVNFFAPQVVIDFTASWCGPCRFIAPIFAELAKKFAHIVFLKVDVDELKEVAAEYKVEAMPTFLLIKEGKEVHKIVG

SEQ ID NO: 127662 - protein, 55 aa, Setaria italica
  Transcript Sequence Number=SeqID_61688
RCFLVQQEVAAEYKVEAMPTFLLIKEGKEVHKIVGARKEELQGKVAELGALTTSA

SEQ ID NO: 127663 - protein, 83 aa, Setaria italica
  Transcript Sequence Number=SeqID_61689
  Gene Ontology: Mol. function=catalytic activity; Cellular component =endoplasmic reticulum; Biological process=metabolic process
  Homolog annotation: Hit_ID=Q7XPZ4; Match level="QueryCoverage=68%, HitCoverage=9%, E-value=1e-24, Identity=89%"; Hit description =OSJNBa0004N05.14 protein
  Subcellular localization annotation: CTP_CleavageSite=31; ConfidenceScore=5.08e-01
RRPPRRRRPPRRRSPQLLGSRPPTRPFVPTSQFPLKKIRKDCTYLSTPAMKIPATMENVHTCENWLPRRVMSAWRIAGILHAV

SEQ ID NO: 127664 - protein, 92 aa, Setaria italica
  Transcript Sequence Number=SeqID_61690
  Gene Ontology: Mol. function=catalytic activity; Cellular component =endoplasmic reticulum; Biological process=metabolic process
  Homolog annotation: Hit_ID=Q7XPZ4; Match level="QueryCoverage=88%, HitCoverage=13%, E-value=3e-36, Identity=86%"; Hit description =OSJNBa0004N05.14 protein
TILYRDDQIIFNGLEFYLAYAMIPNVRLLPVWRTDGAIITVLLHMGPVEFLYYWFHRALHHHFLYSRYHSHHHASIVTEPITLANNSGEVEQ

SEQ ID NO: 127665 - protein, 131 aa, Setaria italica
  misc_feature (115)..(115): Xaa can be any naturally occurring amino acid
  Transcript Sequence Number=SeqID_61691
ILSHQDQLDPHLPLQWKRRVRDDPPKEADPTQSIAERVQHHEAIKESAPIAVPNPEEINSEVIWERMQKVYSEFLSSRETTFSELLEQAKKLVVASKHPNDEHIMLEQQVKDLKXNISLLKDMMTKAKQET

SEQ ID NO: 127666 - protein, 112 aa, Setaria italica
  Transcript Sequence Number=SeqID_61692
CINVRYVNQQLFSFNLSSEKCNCRYWLPNRQFKQCFTNHCICTEELDESCKCTLSSAIECWSAAKAIVNDDIDSFGDAIQNLSANTCSSDTETHNNIPLSLAPEESCITKNL

SEQ ID NO: 127667 - protein, 135 aa, Setaria italica
  Transcript Sequence Number=SeqID_61693
  Gene Ontology: Mol. function=N-acetyltransferase activity; Cellular component=intracellular; Biological process=metabolic process
  Homolog annotation: Hit_ID=B6TAD5; Match level="QueryCoverage=94%, HitCoverage=24%, E-value=2e-69, Identity=96%"; Hit description=KOB1
PFRTSGSPKVCVQTSTSAGLEQILPWLFYHKVVGVAQFLLFVEGRAAKPNVAGVLESIPGVKVVYRTKDLEEQQARSRIWNETWLSGFFYKPCNYELFVKQSLNMEMAIVMARDYGMDWIIHLDTDELLYPGGAS

SEQ ID NO: 127668 - protein, 78 aa, Setaria italica
  misc_feature (29)..(29): Xaa can be any naturally occurring amino acid
  Transcript Sequence Number=SeqID_61694
  Gene Ontology: Mol. function=N-acetyltransferase activity; Cellular component=intracellular; Biological process=metabolic process
  Homolog annotation: Hit_ID=B6TAD5; Match level="QueryCoverage=88%, HitCoverage=13%, E-value=2e-22, Identity=70%"; Hit description=KOB1
VELFLQYFWHITNSEIKLEEAAVLHYTYXKFSDLTSRRDRCGCKPTKEDVKRCFMLDFDRAVSRDASISNFESQKKYT

SEQ ID NO: 127669 - protein, 148 aa, Setaria italica
  misc_feature (22)..(22): Xaa can be any naturally occurring amino acid
  Transcript Sequence Number=SeqID_61695
  Gene Ontology: Mol. function=N-acetyltransferase activity; Cellular component=intracellular; Biological process=metabolic process
  Homolog annotation: Hit_ID=B6TAD5; Match level="QueryCoverage=100%, HitCoverage=32%, E-value=9e-75, Identity=80%"; Hit description=KOB1
TYFGMYKEATRGNPNYFLTYGXNGKSAARIQDHLRPNGAHRWHNYAKSPKRDRCGCKPTKEDVKRCFMLDFDRAAFIIASTASEEEMLRWYNERVVWNDKQLNLKLMRKGVLTRIYTPMAIVQGLRESGVFTSVIAGGQAAVNEKLSP

SEQ ID NO: 127670 - protein, 68 aa, Setaria italica
  misc_feature (18)..(18): Xaa can be any naturally occurring amino acid
  Transcript Sequence Number=SeqID_61696
  Gene Ontology: Mol. function=N-acetyltransferase activity; Cellular component=intracellular; Biological process=metabolic process
  Homolog annotation: Hit_ID=B6TAD5; Match level="QueryCoverage=98%, HitCoverage=12%, E-value=3e-32, Identity=97%"; Hit description=KOB1
PFSEVSMFKKNYDHLPKXDTYFGMYKEATRGNPNYFLTYGNGKSAARIQDHLRPNGAHRWHNYAKSPK

SEQ ID NO: 127671 - protein, 111 aa, Setaria italica
  Transcript Sequence Number=SeqID_61697
  Gene Ontology: Mol. function=peptidase activity; Biological process =protein catabolic process
  Homolog annotation: Hit_ID=B4FRF7; Match level="QueryCoverage=94%, HitCoverage=66%, E-value=7e-47, Identity=85%"; Hit description=ATP -dependent Clp protease adaptor protein ClpS containing protein
  Pfam annotation: Domain name=ClpS; Domain location=59-110; Score =37.9; E_value=3.5e-08; Accession=PF02617.9; Description=ATP -dependent Clp protease adaptor protein C
FPNRHAVAGDRSTIYRKVPKLAIPMALSAAAPGKGGVLDRPVEKTTPGRQSEFDVKKKRKMTPPYRVILHNDNYNRREYVVKVLMKVIPGMTVDNAVNIMQEAHVETGLVR

SEQ ID NO: 127672 - protein, 54 aa, Setaria italica
  Transcript Sequence Number=SeqID_61698
EAALNCYSRLLVVLNGFRIVFSSCQNYAVGLYFDPYFSSCPSTLYALNFFIPSY

SEQ ID NO: 127673 - protein, 44 aa, Setaria italica
  Transcript Sequence Number=SeqID_61699
VIIVHCCFAFWLCFCSRKGRVKEAVEKSQDRSRSRSPRPRAQRD

SEQ ID NO: 127674 - protein, 107 aa, Setaria italica
  misc_feature (68)..(68): Xaa can be any naturally occurring amino acid
  Transcript Sequence Number=SeqID_61700
  Gene Ontology: Mol. function=acyl-CoA thioesterase activity
  Homolog annotation: Hit_ID=Q7XPS0; Match level="QueryCoverage=68%, HitCoverage=16%, E-value=7e-35, Identity=93%"; Hit description =OSJNBa0065O17.11 protein
TFTISNILSKRVCLSFIYLLLDALQILDCVVICRQYRNLAAKKKFTPWPIEMRFCEDSASQYKPSLNXWFRARGKLSDDQALHRCVVAYASDLLYSGVSLNPHREKG

SEQ ID NO: 127675 - protein, 53 aa, Setaria italica
  misc_feature (35)..(35): Xaa can be any naturally occurring amino acid
  Transcript Sequence Number=SeqID_61701
  Gene Ontology: Mol. function=transferase activity, transferring glycosyl groups; Cellular component=integral to membrane; Biological process=protein amino acid glycosylation
  Homolog annotation: Hit_ID=Q9ZS49; Match level="QueryCoverage=69%, HitCoverage=9%, E-value=1e-10, Identity=89%"; Hit description=Avr9 elicitor response protein
QSVSPFSFYIPPNIVHFLRLDHVEGYHELSAKTKXIFFSTAVGIWDADFYVKV

SEQ ID NO: 127676 - protein, 49 aa, Setaria italica
  Transcript Sequence Number=SeqID_61702
  Homolog annotation: Hit_ID=Q7XPS0; Match level="QueryCoverage=100%, HitCoverage=10%, E-value=2e-15, Identity=83%"; Hit description =OSJNBa0065O17.11 protein
MDREEGKSAPAQSPPNLGPILANLRPGCHWCAVTEFLGQVPLLQCLPGS

SEQ ID NO: 127677 - protein, 84 aa, Setaria italica
  misc_feature (66)..(66): Xaa can be any naturally occurring amino acid
  Transcript Sequence Number=SeqID_61703
  Gene Ontology: Mol. function=acyl-CoA thioesterase activity; Biological process=acyl-CoA metabolic process
  Homolog annotation: Hit_ID=Q7XPS0; Match level="QueryCoverage=100%, HitCoverage=16%, E-value=6e-21, Identity=63%"; Hit description =OSJNBa0065O17.11 protein
TRKVEAKQKGLVIFTLIASFQKEEVGFQHQAATMPNVPPPEQLLNLEEIRERRLTDPRFPSFLTVXVICRQYRNLAAKKKFTPW

SEQ ID NO: 127678 - protein, 43 aa, Setaria italica
  misc_feature (25)..(25): Xaa can be any naturally occurring amino acid
  Transcript Sequence Number=SeqID_61704
  Gene Ontology: Mol. function=transferase activity, transferring glycosyl groups; Cellular component=integral to membrane; Biological process=protein amino acid glycosylation
  Homolog annotation: Hit_ID=Q9ZS49; Match level="QueryCoverage=95%, HitCoverage=10%, E-value=1e-11, Identity=87%"; Hit description=Avr9 elicitor response protein
SSRRDHVEGYHELSAKTKIFFSTAXVGIWDADFYVKVDDDVHV

SEQ ID NO: 127679 - protein, 61 aa, Setaria italica
  Transcript Sequence Number=SeqID_61705
AIEPASQSNIGNVLFAAVPDYIRWGMILGLVEFTRGVCLCRPTMRAYQLCTYPPFARKYVA

SEQ ID NO: 127680 - protein, 41 aa, Setaria italica
  Transcript Sequence Number=SeqID_61706
  Gene Ontology: Mol. function=metal ion binding
  Homolog annotation: Hit_ID=B4FDW4; Match level="QueryCoverage=100%, HitCoverage=23%, E-value=4e-14, Identity=85%"; Hit description =Protein binding protein
LEPFRHKCTLFSRNKNNEECVICKTTYKSRQKMIRLPCSHC

SEQ ID NO: 127681 - protein, 55 aa, Setaria italica
  misc_feature (29)..(29): Xaa can be any naturally occurring amino acid
  Transcript Sequence Number=SeqID_61707
LYLVLFDDGSMNPRVDKCVGTVLRLPVFXLCNQAGFLFHFSGEIKAGLVQCNGMF

SEQ ID NO: 127682 - protein, 59 aa, Setaria italica
  Transcript Sequence Number=SeqID_61708
ASSFTLGFIWAMLCDYVRLVGCIDRKLATEVLYPHIYQLVDSSTRHQTRPGTVNSACKP

SEQ ID NO: 127683 - protein, 50 aa, Setaria italica
  Transcript Sequence Number=SeqID_61709
FRSAVHLPNIRMEVVALCSVGWNLNQQIDLRIMLKVYNTTPSRSLGLPRN

SEQ ID NO: 127684 - protein, 59 aa, Setaria italica
  Transcript Sequence Number=SeqID_61710
IYVQSVFYLTCSVLNFLDHDVSGSVYKQRATTSILMFGRCTADLNLQIYGHKPKYVQNL

SEQ ID NO: 127685 - protein, 88 aa, Setaria italica
  Transcript Sequence Number=SeqID_61711
TPFVAHPKVAQEQIGKGGYLAGTRYSCAMVSSYNPSFAQYSTTCIKLYLHEFSKSAATKRFPNWLQPRKRSGYNMAKERRSKRLGCTY

SEQ ID NO: 127686 - protein, 65 aa, Setaria italica
  Transcript Sequence Number=SeqID_61712
KEKIACGLLNPFVAHPKVAQEQIGKGGYLAGTRYSCAMVSSYNPSFAQYSTTCIKLYLHSPPQHV

SEQ ID NO: 127687 - protein, 93 aa, Setaria italica
  Transcript Sequence Number=SeqID_61713
  Gene Ontology: Biological process=protein modification process
  Homolog annotation: Hit_ID=UPI0000196B48; Match level="QueryCoverage =50%, HitCoverage=12%, E-value=2e-11, Identity=63%"; Hit description =splicing factor-related
PQVEESADVNKSSPSEPLDLAKYGSAAELETLGLEKLKMELQTRGLKCGGTLQERAARLFLLKTTPLDKLPKKLLAKPAAGGKVSSSSKHITS

SEQ ID NO: 127688 - protein, 129 aa, Setaria italica
  Transcript Sequence Number=SeqID_61714
  Gene Ontology: Mol. function=protein serine/threonine kinase activity; Cellular component=plasma membrane; Biological process =protein amino acid phosphorylation
  Homolog annotation: Hit_ID=Q4LB28; Match level="QueryCoverage=83%, HitCoverage=20%, E-value=4e-59, Identity=98%"; Hit description =B0222C05.2 protein
  Pfam annotation: Domain name=Pkinase_Tyr; Domain location=1-118; Score=-169.2; E_value=0.018; Accession=PF07714.9; Description =Protein tyrosine kinase
LGYCAEGNQRMLVYEYVNNGNLEQWLHGDVGPVSPLTWDIRMKIILGTAKGLMYLHEGLEPKVVHRDVKSSNILLDKRWNAKLSDFGLAKLLGSERSYVTTRVMGTFGLDINSLPIKLDHKKEYNKEID

SEQ ID NO: 127689 - protein, 64 aa, Setaria italica
  Transcript Sequence Number=SeqID_61715
  Gene Ontology: Mol. function=protein serine/threonine kinase activity; Cellular component=plasma membrane; Biological process =protein amino acid phosphorylation
  Homolog annotation: Hit_ID=Q4LB28; Match level="QueryCoverage=84%, HitCoverage=10%, E-value=5e-23, Identity=98%"; Hit description =B0222C05.2 protein
NRKINNLGRVPVDYNRPPGEVNLVEWLKTMVSNRNSEGVLDPKMTEKPTSRALKKALLVAFPDS

SEQ ID NO: 127690 - protein, 75 aa, Setaria italica
  Transcript Sequence Number=SeqID_61716
  Gene Ontology: Mol. function=protein serine/threonine kinase activity
  Homolog annotation: Hit_ID=Q4LB28; Match level="QueryCoverage=60%, HitCoverage=9%, E-value=1e-11, Identity=68%"; Hit description =B0222C05.2 protein
FQILVKSKAIFFQNYTDLDCNFLLLSWQERRGGKAPTQARSVETPASDPGDSSGNNTPKDTPKGGEPFKWRTQET

SEQ ID NO: 127691 - protein, 65 aa, Setaria italica
  Transcript Sequence Number=SeqID_61717
  Gene Ontology: Mol. function=hydrolase activity
  Homolog annotation: Hit_ID=B4FRE0; Match level="QueryCoverage=87%, HitCoverage=16%, E-value=6e-20, Identity=75%"; Hit description =Monoglyceride lipase
IKFFCNHEQVRKNKLIYQDRPRLKSALELLRTSMDVEDNLSEVRVPFLVLHGEADTVTDPEVSRT

SEQ ID NO: 127692 - protein, 76 aa, Setaria italica
  Transcript Sequence Number=SeqID_61718
GQQLLLFSSLSQHQLERCKSNKAITLIIVRSSSHFLETKHFMSLSQLCSENRSVRPTLLKYYMVTTPSIYSMLHQT

SEQ ID NO: 127693 - protein, 34 aa, Setaria italica
  Transcript Sequence Number=SeqID_61719
MFCKVRDELEHLLDDEMDMAEMYLTEKLTQQEIS

SEQ ID NO: 127694 - protein, 69 aa, Setaria italica
  Transcript Sequence Number=SeqID_61720
NVLRRQRFFCAYGLLTTSRTCSEIISLAISHINKSKQDNSTMYIYISKRICKETARVNFMRSTLLTLSR

SEQ ID NO: 127695 - protein, 93 aa, Setaria italica
  misc_feature (12)..(12): Xaa can be any naturally occurring amino acid
  Transcript Sequence Number=SeqID_61721
RDNHVQEGDICXLFPQRWEKIHIYGLSFCASATHSIGRAGFQMVCPCPGRSSTKMASEVHIMEESTNDEHISLETDMREISDDFSWRVVSTSW

SEQ ID NO: 127696 - protein, 70 aa, Setaria italica
  Transcript Sequence Number=SeqID_61722
SRESSEISRMSVSKEMCSSFVDSSIICTSEAIFVLDRPGHGVCQRLFERRGFRITSCVSSLHVFLVARVF

SEQ ID NO: 127697 - protein, 122 aa, Setaria italica
  misc_feature (101)..(101): Xaa can be any naturally occurring amino acid
  misc_feature (112)..(112): Xaa can be any naturally occurring amino acid
  Transcript Sequence Number=SeqID_61723
  Gene Ontology: Mol. function=DNA binding
VSSLYSYCCRSSLSCIDHQMNGYKTTHSSRNAESISEMLNLGTRMYPPHNSFPEQLETMSKYHDGIKLEAPPAKPVTEVGEARQFAYTYARRKPHKRSTMXEDAVSPSVLNXMTNMKAKAIK

SEQ ID NO: 127698 - protein, 73 aa, Setaria italica
  Transcript Sequence Number=SeqID_61724
  Homolog annotation: Hit_ID=B9SYR4; Match level="QueryCoverage=97%, HitCoverage=13%, E-value=2e-16, Identity=58%"; Hit description=WD -repeat protein, putative
QGKIKIWDLRKYEVVNSYAARAQSLDFSQKGLLACSNGSLVEIYRDFGGHDYRLYMKHRMMKGYQVGKVLFRP

SEQ ID NO: 127699 - protein, 58 aa, Setaria italica
  misc_feature (14)..(14): Xaa can be any naturally occurring amino acid
  Transcript Sequence Number=SeqID_61725
RAGPSMAALSWAAXRLTRPRSFVYLVHVFPVVTSIPTPCEAILYYSYLICFNFPDLAI

SEQ ID NO: 127700 - protein, 44 aa, Setaria italica
  Transcript Sequence Number=SeqID_61726
LLYIQVTVDVYLIESDQIANAIIELVPVLHIKQLVLGISKSNVR

SEQ ID NO: 127701 - protein, 118 aa, Setaria italica
  misc_feature (31)..(31): Xaa can be any naturally occurring amino acid
  Transcript Sequence Number=SeqID_61727
  Gene Ontology: Mol. function=chalcone isomerase activity; Biological process=flavonoid biosynthetic process
  Homolog annotation: Hit_ID=Q84T92; Match level="QueryCoverage=100%, HitCoverage=47%, E-value=1e-50, Identity=84%"; Hit description =Chalcone--flavonone isomerase
  Pfam annotation: Domain name=Chalcone; Domain location=5-118; Score= -17.4; E_value=7.1e-07; Accession=PF02431.7; Description=Chalcone -flavanone isomerase
NGVVFPPVARPPGSARPHFLAGAGASRSLTXVRGLEIGGNFIKFTAIGVYLEEDAAVSALAKKWAGKSADELASDVAFFRDVVTGDFEKFTRVTMILPLTGEQYSDKVTENCVAYWKA

SEQ ID NO: 127702 - protein, 82 aa, Setaria italica
  misc_feature (52)..(52): Xaa can be any naturally occurring amino acid
  Transcript Sequence Number=SeqID_61728
GGDGGSEVQNTDHKQRRQVPACGISQPIAWFFFLLARCPLTRRPGRAPPAAXAIENRPLCEAVLESIIGKHGVSPAAKLSIA

SEQ ID NO: 127703 - protein, 59 aa, Setaria italica
  Transcript Sequence Number=SeqID_61729
AREGRRRRRRGGGERDEREGGVSPAAKLSIAARVSELLNGAETSPAGDAQQAEPVPVSA

SEQ ID NO: 127704 - protein, 73 aa, Setaria italica
  misc_feature (44)..(44): Xaa can be any naturally occurring amino acid
  Transcript Sequence Number=SeqID_61730
  Gene Ontology: Mol. function=metal ion binding
  Homolog annotation: Hit_ID=Q2QML2; Match level="QueryCoverage=90%, HitCoverage=21%, E-value=5e-19, Identity=56%"; Hit description=Zinc finger family protein, putative, expressed
AAQNEKKFSSIWFSLVASFDQDGNVPASSIQKYLMQKLSLPSEXEIKCCEQPVNPMQPLRNLVELWLKGKATQ

SEQ ID NO: 127705 - protein, 130 aa, Setaria italica
  misc_feature (38)..(38): Xaa can be any naturally occurring amino acid
  misc_feature (47)..(47): Xaa can be any naturally occurring amino acid
  misc_feature (64)..(64): Xaa can be any naturally occurring amino acid
  misc_feature (100)..(100): Xaa can be any naturally occurring amino acid
  Transcript Sequence Number=SeqID_61731
  Gene Ontology: Mol. function=transferase activity, transferring nitrogenous groups; Cellular component=endoplasmic reticulum membrane; Biological process=biosynthetic process
  Homolog annotation: Hit_ID=Q10P02; Match level="QueryCoverage=99%, HitCoverage=26%, E-value=3e-65, Identity=92%"; Hit description =Aminotransferase, classes I and II family protein, expressed
TEVVHWAVQNGLHLSRSTVVYFKHNDMASLASALEKLXRGNKRAEKXRRYIVVESIYQNSGQIXPLDEIVKLKEKYRFRVILEESHSFGVLGKSGRGLAXHYGVPIEKIDIITAGMGNALATDGGFCTGS

SEQ ID NO: 127706 - protein, 84 aa, Setaria italica
  Transcript Sequence Number=SeqID_61732
  Gene Ontology: Mol. function=glutamate-5-semialdehyde dehydrogenase activity; Cellular component=cytoplasm; Biological process=amino acid biosynthetic process
  Homolog annotation: Hit_ID=C1KGU7; Match level="QueryCoverage=95%, HitCoverage=20%, E-value=2e-36, Identity=91%"; Hit description=Delta- 1-pyrroline-5-carboxylate synthetase (Fragment)
SLSNCLIGNYLLVHKDLIKSPGLDDILLSLKTEGVAIYGGPVAHEVLSIPKADSFHHEYSSMACTVEFVDDVQSAIDHIHRYGS

SEQ ID NO: 127707 - protein, 60 aa, Setaria italica
  Transcript Sequence Number=SeqID_61733
  Subcellular localization annotation: CTP_CleavageSite=40; ConfidenceScore=5.27e-01
QYTLYIKTMYATSNSSKRPMHSQITPPRKDSTQKNCLTVTMMKYQEAETRNEGKARHTRG

SEQ ID NO: 127708 - protein, 79 aa, Setaria italica
  Transcript Sequence Number=SeqID_61734
  Gene Ontology: Mol. function=protein transporter activity; Cellular component=nuclear pore
  Homolog annotation: Hit_ID=A2Q1G7; Match level="QueryCoverage=74%, HitCoverage=6%, E-value=8e-14, Identity=57%"; Hit description=HEAT
LEICQLRWIPFAVYNNHSACRSDGEILGPQNQYLLKIISIFAEVLCPGTELATDETKNKMVNILRRFQQTLPPDFLRRS

SEQ ID NO: 127709 - protein, 56 aa, Setaria italica
  misc_feature (36)..(36): Xaa can be any naturally occurring amino acid
  Transcript Sequence Number=SeqID_61735
  Gene Ontology: Mol. function=protein transporter activity; Cellular component=nuclear pore
  Homolog annotation: Hit_ID=A2Q5W2; Match level="QueryCoverage=100%, HitCoverage=7%, E-value=3e-18, Identity=80%"; Hit description=HEAT (Fragment)
AAVYGVGVCAEFGGHVFRPLVGEALSKLNNVIRHPXEARLPDNIMAYDNAVSALGK

SEQ ID NO: 127710 - protein, 76 aa, Setaria italica
  Transcript Sequence Number=SeqID_61736
  Gene Ontology: Mol. function=protein transporter activity; Cellular component=nuclear pore; Biological process=interspecies interaction between organisms
  Homolog annotation: Hit_ID=B9T1E9; Match level="QueryCoverage=75%, HitCoverage=5%, E-value=6e-27, Identity=94%"; Hit description =Importin beta-3, putative
TNSTAKCLVPSSSCAASATCVLEEKATACNMLCCYADELKEGFFPWIDQVAPTLVPLLKFYFHEEVRRAAVAAMPN

SEQ ID NO: 127711 - protein, 65 aa, Setaria italica
  Transcript Sequence Number=SeqID_61737
  Gene Ontology: Mol. function=protein transporter activity; Cellular component=nuclear pore
  Homolog annotation: Hit_ID=B9T1E9; Match level="QueryCoverage=95%, HitCoverage=5%, E-value=7e-21, Identity=75%"; Hit description =Importin beta-3, putative
FFIVKQLSDYVIPALVEALHKEPETEMCSSMLDSLNECMQLSGRLLDETQVRAISDEIKNVIIAS

SEQ ID NO: 127712 - protein, 70 aa, Setaria italica
  misc_feature (23)..(23): Xaa can be any naturally occurring amino acid
  misc_feature (36)..(36): Xaa can be any naturally occurring amino acid
  Transcript Sequence Number=SeqID_61738
  Gene Ontology: Mol. function=sequence-specific DNA binding; Cellular component=nucleus; Biological process=regulation of transcription, DNA-dependent
  Homolog annotation: Hit_ID=Q2QQ47; Match level="QueryCoverage=100%, HitCoverage=13%, E-value=4e-17, Identity=61%"; Hit description=WRKY DNA binding domain containing protein, expressed
ASSDPKAVITTYEGKHNHEPPVXRGSNQNAGVSQQXGQNSISSNQASLSIADYSITNQRPIGLLQFKSEQ

SEQ ID NO: 127713 - protein, 52 aa, Setaria italica
  misc_feature (28)..(28): Xaa can be any naturally occurring amino acid
  Transcript Sequence Number=SeqID_61739
LLTVTKTFVGFSTGHITIKDLVTTGLPXLKIVGIASLTILLPSLGNSCTDHH

SEQ ID NO: 127714 - protein, 119 aa, Setaria italica
  misc_feature (22)..(22): Xaa can be any naturally occurring amino acid
  Transcript Sequence Number=SeqID_61740
  Gene Ontology: Mol. function=transporter activity; Cellular component= membrane; Biological process=sodium ion transport
  Homolog annotation: Hit_ID=A0FKR1; Match level="QueryCoverage=82%, HitCoverage=18%, E-value=3e-34, Identity=70%"; Hit description =Vacuolar citrate/H+ symporter
VNLGPFASGPAACALICALGNXGGHPAARNMLGVLAWVFLWWITDAVPLAVASMAPLFLFPAFGISSADDIAKAYMDDVIALVLGSFILALAVEHYSIHRRPALNVRAETKRFELATCT

SEQ ID NO: 127715 - protein, 130 aa, Setaria italica
  misc_feature (38)..(38): Xaa can be any naturally occurring amino acid
  misc_feature (77)..(77): Xaa can be any naturally occurring amino acid
  misc_feature (124)..(124): Xaa can be any naturally occurring amino acid
  Transcript Sequence Number=SeqID_61741
  Gene Ontology: Mol. function=transporter activity; Cellular component= membrane; Biological process=sodium ion transport
  Homolog annotation: Hit_ID=B6T0F4; Match level="QueryCoverage=100%, HitCoverage=21%, E-value=1e-32, Identity=59%"; Hit description =Tonoplast dicarboxylate transporter
VPCSFHLGEKLMDWNKCRKLQWDISLRRGGGLCPTGAXLLGAGFAIADGFSSSGLTDILSDGLRFLKDAQTVVIVPXACVVAAVITEFTSDDATTTLVLPLFAELAKSINVHPVLLMISGAVGXQLSYLL

SEQ ID NO: 127716 - protein, 135 aa, Setaria italica
  misc_feature (19)..(19): Xaa can be any naturally occurring amino acid
  misc_feature (65)..(65): Xaa can be any naturally occurring amino acid
  misc_feature (84)..(84): Xaa can be any naturally occurring amino acid
  Transcript Sequence Number=SeqID_61742
  Gene Ontology: Mol. function=transporter activity; Cellular component= membrane; Biological process=sodium ion transport
  Homolog annotation: Hit_ID=B6T0F4; Match level="QueryCoverage=99%, HitCoverage=23%, E-value=3e-44, Identity=71%"; Hit description =Tonoplast dicarboxylate transporter
SSHYQIHRRLALNMKRETXITALFCGDPVRPPLLLLGITGTTFFVSMWIHNTACTVMMMPVATGXILQRLPRGGAGAPRGARRXEEEEVRRFSKAVVLGVVYASAIGGMATLTGTGVNIILVGMWSTYFPDQEPI

SEQ ID NO: 127717 - protein, 42 aa, Setaria italica
  Transcript Sequence Number=SeqID_61743
  Gene Ontology: Mol. function=transporter activity; Cellular component= membrane
  Homolog annotation: Hit_ID=B6T0F4; Match level="QueryCoverage=97%, HitCoverage=7%, E-value=2e-12, Identity=82%"; Hit description =Tonoplast dicarboxylate transporter
TGHITIKDLVTTGLPLKIVGIASLTILLPSLGSQIFGTNSRS

SEQ ID NO: 127718 - protein, 76 aa, Setaria italica
  Transcript Sequence Number=SeqID_61744
TVSLLSLLKALSEGGYLPPEIHSGIITFKSDIYSLGVIIKEILTGRSISHSLISFQLFDYINFQPEVIYHRKFTVE

SEQ ID NO: 127719 - protein, 145 aa, Setaria italica
  misc_feature (117)..(117): Xaa can be any naturally occurring amino acid
  misc_feature (133)..(133): Xaa can be any naturally occurring amino acid
  Transcript Sequence Number=SeqID_61745
  Gene Ontology: Mol. function=oxidoreductase activity, acting on paired donors, with incorporation or reduction of molecular oxygen, NADH or NADPH as one donor, and incorporation of one atom of oxygen; Cellular component=...
  Gene Ontology: Cellular component=mitochondrion; Biological process =cellular aromatic compound metabolic process
  Homolog annotation: Hit_ID=B9RWL0; Match level="QueryCoverage=98%, HitCoverage=27%, E-value=2e-45, Identity=61%"; Hit description =Monoxygenase, putative
ILLQIGADGSKSNVRQIAGIKTTGWNYPQSAIICTVEHVVENDCAWQRFLPSGPIALLPIGNNFSNIVWTMSPEESLRHKSMSPEEFVKSVNHALDFGYGPHPRSSALDHYMEKFFXGIGNTAASTKECLKYXTKATGVVSERMA

SEQ ID NO: 127720 - protein, 60 aa, Setaria italica
  Transcript Sequence Number=SeqID_61746
FRFFPFVFVRPFVLTFVLLLHASPFSPSTRAPPTIRRKGSYHIYVDVELADAAGDRLKIY

SEQ ID NO: 127721 - protein, 49 aa, Setaria italica
  Transcript Sequence Number=SeqID_61747
  Gene Ontology: Mol. function=nucleic acid binding
  Homolog annotation: Hit_ID=Q6J735; Match level="QueryCoverage=61%, HitCoverage=3%, E-value=4e-11, Identity=96%"; Hit description=AML1
FHPGLTTLDAINRYNCKLLLAVIDENHRGTYDFIYLPIDFKVCYYFSQV

SEQ ID NO: 127722 - protein, 70 aa, Setaria italica
  Transcript Sequence Number=SeqID_61748
QMTIKQNEYIERHGSRQRELFEAIMQVQIKKPNYIRISLILNTCLGTKSQQKIDTTSSDVRPHQSPKIST

SEQ ID NO: 127723 - protein, 155 aa, Setaria italica
  misc_feature (121)..(121): Xaa can be any naturally occurring amino acid
  misc_feature (134)..(134): Xaa can be any naturally occurring amino acid
  Transcript Sequence Number=SeqID_61749
  Gene Ontology: Mol. function=ATP-dependent helicase activity; Cellular component=intracellular; Biological process=RNA processing
  Homolog annotation: Hit_ID=Q69LX2; Match level="QueryCoverage=93%, HitCoverage=10%, E-value=3e-45, Identity=61%"; Hit description =Endoribonuclease Dicer homolog 2b
LNKWIVPGLGYDNCGSTKSFLLPTNNMYSLKAISMKSKRIADTVEALIGAYLSASGEQAAFHFIKSLGMGVELHSEMQEERKIITKSEEIIDVRSLETMLDYVFNDRSLLIEALTHSSYNXAGPCYERLEFLGXDAVLDHIITDYFYNYTTLDVH

SEQ ID NO: 127724 - protein, 56 aa, Setaria italica
  Transcript Sequence Number=SeqID_61750
MENTSIGTYRGHCIFSSHTSLNLSSFLDCKLKERLSFSGCANSHTFGHSYGICFWW

SEQ ID NO: 127725 - protein, 68 aa, Setaria italica
  misc_feature (3)..(3): Xaa can be any naturally occurring amino acid
  misc_feature (16)..(16): Xaa can be any naturally occurring amino acid
  Transcript Sequence Number=SeqID_61751
PPXPGEQAGGILRGQXLVSTCDHRKSGVFTKYQHQCPSMKEQLAFRNCKNHLSGITSARSCLTAQSLC

SEQ ID NO: 127726 - protein, 73 aa, Setaria italica
  misc_feature (12)..(12): Xaa can be any naturally occurring amino acid
  Transcript Sequence Number=SeqID_61752
  Gene Ontology: Mol. function=nucleotide binding; Biological process =defense response
  Homolog annotation: Hit_ID=Q8RUA3; Match level="QueryCoverage=98%, HitCoverage=7%, E-value=6e-31, Identity=90%"; Hit description =Putative disease resistance protein
VGRRLVRLWVAXGFVRPRRGSTMEEVGQEYLKQLISRCMVQLVDKDDFGAVQTVVVHDRLHAFAQDEAQEASF

SEQ ID NO: 127727 - protein, 94 aa, Setaria italica
  misc_feature (15)..(15): Xaa can be any naturally occurring amino acid
  misc_feature (29)..(29): Xaa can be any naturally occurring amino acid
  Transcript Sequence Number=SeqID_61753
  Gene Ontology: Mol. function=aspartic-type endopeptidase activity; Cellular component=chromatin; Biological process=DNA integration
  Homolog annotation: Hit_ID=Q688L2; Match level="QueryCoverage=86%, HitCoverage=5%, E-value=2e-22, Identity=59%"; Hit description =Putative polyprotein
PLRLKSNTFATLANXFSSVSTQFGATIKXVQCDNGREFDNSHGVHFCMSYPYTLPQNGRAERIIRSTNNILCSLLFQASLPPALPPRYWLKLYN

SEQ ID NO: 127728 - protein, 80 aa, Setaria italica
  Transcript Sequence Number=SeqID_61754
  Gene Ontology: Mol. function=aspartic-type endopeptidase activity; Cellular component=chromatin; Biological process=chromatin assembly or disassembly
  Homolog annotation: Hit_ID=Q688L2; Match level="QueryCoverage=83%, HitCoverage=4%, E-value=8e-16, Identity=56%"; Hit description =Putative polyprotein
QFGATIKAVQCDNGREFDNSHGVHFCMSYPYTLPQNGRAERIIRSTNNILCSLLFQGHAGGIEVEALVEYLGDEAVGGYI

SEQ ID NO: 127729 - protein, 63 aa, Setaria italica
  Transcript Sequence Number=SeqID_61755
  Homolog annotation: Hit_ID=Q6K9U1; Match level="QueryCoverage=57%, HitCoverage=5%, E-value=1e-10, Identity=94%"; Hit description=C2 domain-containing protein-like
  Subcellular localization annotation: CTP_CleavageSite=25; ConfidenceScore=5.28e-01
LSRDPEQVGSGSGSADSVVSPAVANAETVSNSSTDTALVWLAAITSVVVLVSSNLGASGYFNP

SEQ ID NO: 127730 - protein, 82 aa, Setaria italica
  Transcript Sequence Number=SeqID_61756
  Homolog annotation: Hit_ID=Q6K9U1; Match level="QueryCoverage=78%, HitCoverage=9%, E-value=2e-21, Identity=79%"; Hit description=C2 domain-containing protein-like
KSNSLANNILTFAWTWCLSLLAIPVLVLMFLTKLLTEDLPRLFVRPKKIVLDFQKGRAMGPVSGSIASDIIQNVASDIIQDG

SEQ ID NO: 127731 - protein, 60 aa, Setaria italica
  misc_feature (59)..(59): Xaa can be any naturally occurring amino acid
  Transcript Sequence Number=SeqID_61757
TRYSLFITMVHLRNVNVQVTENMLGGKKVTVVFVLGMCSIFSNVWLFVFYLIEENELIXV

SEQ ID NO: 127732 - protein, 75 aa, Setaria italica
  misc_feature (50)..(50): Xaa can be any naturally occurring amino acid
  Transcript Sequence Number=SeqID_61758
  Gene Ontology: Mol. function=phosphotransferase activity, phosphate group as acceptor; Biological process=nucleobase, nucleoside, nucleotide and nucleic acid metabolic process
  Homolog annotation: Hit_ID=B6T904; Match level="QueryCoverage=96%, HitCoverage=33%, E-value=1e-31, Identity=93%"; Hit description=UMP -CMP kinase family protein
  Pfam annotation: Domain name=ADK; Domain location=1-64; Score=-61.8; E_value=0.0017; Accession=PF00406.14; Description=Adenylate kinase
MFQTKISPAFVLFFDCSEEEMERRLLGRNQGRVDDNIETIKKRFKTFVEXSSLPVIEHYNSKDKVKKIDAAKPIP

SEQ ID NO: 127733 - protein, 120 aa, Setaria italica
  misc_feature (18)..(18): Xaa can be any naturally occurring amino acid
  Transcript Sequence Number=SeqID_61759
  Gene Ontology: Mol. function=transaminase activity
  Homolog annotation: Hit_ID=Q6ZD13; Match level="QueryCoverage=85%, HitCoverage=12%, E-value=3e-13, Identity=43%"; Hit description =Aminotransferase-like protein
KDASTYEFYNPSVVARQXFGMGQLPIQVYFASRIKFRDELTSGLDYSRLGDRIPDSSTINLNDWLVAPFAVQPFKLWWADWKQFLFCNSASAYCNLLDPANIDPNAEVLYLADLYSFYRD

SEQ ID NO: 127734 - protein, 70 aa, Setaria italica
  Transcript Sequence Number=SeqID_61760
PFAVQPFKLWWADWKQFLFCNSASAYCNLLDPTNIDPNAEAENRTPPTHSRSGRLIESHPYTTYPLISYN

SEQ ID NO: 127735 - protein, 105 aa, Setaria italica
  Transcript Sequence Number=SeqID_61761
KNKSSKIHYYTRTDGCREGVQMPLPYWSPGVVLMISESPGSIMLRQHTRKYLPQAVPRSTLSGTRKHNYTQNSVIKTVRAHKNHNPISIKSPKLATEYRTCNYGA

SEQ ID NO: 127736 - protein, 33 aa, Setaria italica
  Transcript Sequence Number=SeqID_61762
  Gene Ontology: Mol. function=oxidoreductase activity; Cellular component=mitochondrion
  Homolog annotation: Hit_ID=Q2HTY1; Match level="QueryCoverage=93%, HitCoverage=5%, E-value=4e-12, Identity=93%"; Hit description=FAD -dependent pyridine nucleotide-disulphide oxidoreductase; Calcium -binding EF-hand
PLLGGEQTAAQLPGDWISIGHSSQWLWYSVYAT

SEQ ID NO: 127737 - protein, 83 aa, Setaria italica
  misc_feature (29)..(29): Xaa can be any naturally occurring amino acid
  misc_feature (49)..(49): Xaa can be any naturally occurring amino acid
  Transcript Sequence Number=SeqID_61763
  Gene Ontology: Mol. function=metal ion binding
  Homolog annotation: Hit_ID=B6T287; Match level="QueryCoverage=92%, HitCoverage=23%, E-value=2e-30, Identity=84%"; Hit description =Protein binding protein
CLSRRATVQEQISSSFMDSPPPPHLDAPXFGADLIPSGRLRRMRGYRHXPGGLEEEIMMFQTRVLLGGVARSRRQNWVCQHRV

SEQ ID NO: 127738 - protein, 54 aa, Setaria italica
  Transcript Sequence Number=SeqID_61764
  Gene Ontology: Cellular component=plasma membrane; Biological process= cell redox homeostasis
  Homolog annotation: Hit_ID=B6SUA0; Match level="QueryCoverage=94%, HitCoverage=38%, E-value=4e-19, Identity=90%"; Hit description =Thioredoxin H-type
ICDNLQDFSSSWDIRATPTFFFLKNGQQIDKLVGANKPELEKKVLAAADGSSSK

SEQ ID NO: 127739 - protein, 35 aa, Setaria italica
  misc_feature (21)..(21): Xaa can be any naturally occurring amino acid
  Transcript Sequence Number=SeqID_61765
  Homolog annotation: Hit_ID=B6SUA0; Match level="QueryCoverage=100%, HitCoverage=26%, E-value=9e-11, Identity=88%"; Hit description =Thioredoxin H-type
MGGCAGKARRDDEDKLDFKGXNVHIITSKEGWDQK

SEQ ID NO: 127740 - protein, 52 aa, Setaria italica
  Transcript Sequence Number=SeqID_61766
  Gene Ontology: Mol. function=acid phosphatase activity; Cellular component=chloroplast
  Homolog annotation: Hit_ID=B6UE38; Match level="QueryCoverage=100%, HitCoverage=7%, E-value=1e-21, Identity=90%"; Hit description =Hydrolase/ protein serine/threonine phosphatase
YPGAPVHLVIGMGGQDWQPIWQPRPDHPDVPIFPQPERSMFRGGVFGYTRLV

SEQ ID NO: 127741 - protein, 83 aa, Setaria italica
  Transcript Sequence Number=SeqID_61767
  Gene Ontology: Mol. function=protein serine/threonine kinase activity; Biological process=protein amino acid phosphorylation
  Homolog annotation: Hit_ID=Q94EN6; Match level="QueryCoverage=100%, HitCoverage=27%, E-value=1e-36, Identity=89%"; Hit description =Phosphoenolpyruvate carboxylase kinase
MYTLLSGGALPFGGESGAEVLAAVMRGSVRFPPRLFGGVSPAAKDLMRRMICRDEWRRFTAEQVLAHPWIVSGGGARAVGQPT

SEQ ID NO: 127742 - protein, 90 aa, Setaria italica
  Transcript Sequence Number=SeqID_61768
  Gene Ontology: Mol. function=hydrolase activity
  Homolog annotation: Hit_ID=Q9FX41; Match level="QueryCoverage=60%, HitCoverage=12%, E-value=2e-10, Identity=59%"; Hit description =Lysophospholipase homolog, putative
TKAVEMDAAVRRELAIRRLREEAEAEANEAGAGTGRSRRDFAVFETARGDALFTQSWTPAAADRVKGVVVLLHGLNEHSGRYSHFAKLLN

SEQ ID NO: 127743 - protein, 94 aa, Setaria italica
  Transcript Sequence Number=SeqID_61769
ERETGRTKAVEMDAAVRRELAIRRLREEAEAEANEAGAGTGRSRRDFAVFETARGDALFTQSWTPAAADRVKYSHLSYPQPPTTPANFALAFIV

SEQ ID NO: 127744 - protein, 127 aa, Setaria italica
  misc_feature (109)..(109): Xaa can be any naturally occurring amino acid
  Transcript Sequence Number=SeqID_61770
  Gene Ontology: Mol. function=isomerase activity; Cellular component =integral to membrane; Biological process=protein folding
  Homolog annotation: Hit_ID=B6T929; Match level="QueryCoverage=98%, HitCoverage=19%, E-value=3e-66, Identity=93%"; Hit description =Peptidyl-prolyl isomerase PASTICCINO1
  Pfam annotation: Domain name=FKBP_C; Domain location=7-102; Score =71.2; E_value=3.9e-18; Accession=PF00254.20; Description=FKBP-type peptidyl-prolyl cis-trans isomer
MSGEFPMDCPLHDSLLRVHYKGMLLDESKSIFYDTRVDNDGEPLEFCSGEGLVPEGFEMCVRLMLPGEKSIVTCPPDFAYDKFPRPANVPEGATVQWEIELLGFEMPKXWTGLTFKEIMDEADKIRT

SEQ ID NO: 127745 - protein, 165 aa, Setaria italica
  misc_feature (18)..(18): Xaa can be any naturally occurring amino acid
  misc_feature (27)..(27): Xaa can be any naturally occurring amino acid
  misc_feature (46)..(46): Xaa can be any naturally occurring amino acid
  Transcript Sequence Number=SeqID_61771
  Gene Ontology: Mol. function=isomerase activity; Cellular component =integral to membrane; Biological process=protein folding
  Homolog annotation: Hit_ID=B6T929; Match level="QueryCoverage=74%, HitCoverage=19%, E-value=6e-59, Identity=89%"; Hit description =Peptidyl-prolyl isomerase PASTICCINO1
GPKGLEMGIGTMTRKEKXAIIFVSSTXLTKASLMPHLEGLEEVHFXVELIQFVQVRDMLGDGRLIKRRVVDGKGEFPMDCPLHDSLLRVHYKGMLLDESKSIFYDTRVDNDGEPLEFCSGEGLVSNTTLTFLMLYNDQWNKILLLNLQIDEACCRFLKDSKCVFD

SEQ ID NO: 127746 - protein, 118 aa, Setaria italica
  misc_feature (72)..(72): Xaa can be any naturally occurring amino acid
  misc_feature (84)..(84): Xaa can be any naturally occurring amino acid
  Transcript Sequence Number=SeqID_61772
  Subcellular localization annotation: CTP_CleavageSite=50; ConfidenceScore=5.65e-01
SHRSLGLHCGGGGDSGGRPRAPARPTLRSPSWAVKRRPKLLRPRRPSSTRQSVLPQAFPSARPVPPHLPSPXPTSPSTPQPRIXPPAARTAPVGAAPPPAPPLHSSSSVAGSPPPTRS

SEQ ID NO: 127747 - protein, 119 aa, Setaria italica
  misc_feature (12)..(12): Xaa can be any naturally occurring amino acid
  Transcript Sequence Number=SeqID_61773
  Gene Ontology: Mol. function=isomerase activity; Cellular component =cytoplasm; Biological process=protein amino acid phosphorylation
  Homolog annotation: Hit_ID=Q8LDN5; Match level="QueryCoverage=99%, HitCoverage=58%, E-value=2e-47, Identity=65%"; Hit description =Topoisomerase-like protein
  Pfam annotation: Domain name=MA3; Domain location=24-118; Score =102.4; E_value=1.5e-27; Accession=PF02847.9; Description=MA3 domain
APHHAELIERRXWGGSTHITVEEVKKRIADLLKEYIRNGDTAEACRCIRELAVPFFHHEVVKRALTLGMESPAAEALIVKLLKEASEECLISSSQMMKGFSRVAESLDDLILDIPSAKY

SEQ ID NO: 127748 - protein, 151 aa, Setaria italica
  misc_feature (107)..(107): Xaa can be any naturally occurring amino acid
  misc_feature (115)..(115): Xaa can be any naturally occurring amino acid
  Transcript Sequence Number=SeqID_61774
  Gene Ontology: Mol. function=isomerase activity
  Homolog annotation: Hit_ID=Q9FMK4; Match level="QueryCoverage=98%, HitCoverage=51%, E-value=8e-43, Identity=55%"; Hit description =Topoisomerase-like protein
  Pfam annotation: Domain name=MA3; Domain location=1-84; Score=44.3; E_ value=4.8e-10; Accession=PF02847.9; Description=MA3 domain
RKSSLHHLVMKRALTLGMESPAAEALIVKLLKEASEECLISSSQMMKGFSRVAESLDDLILDIPSAKSEFQLLVSKATSEGWLDSSYMSSGANGSVEDDEHEKLARXYKREAVSXVHEYFLSDDTAEVIRSLKELGYPEYNPIFIKKLITI

SEQ ID NO: 127749 - protein, 115 aa, Setaria italica
  misc_feature (46)..(46): Xaa can be any naturally occurring amino acid
  misc_feature (59)..(59): Xaa can be any naturally occurring amino acid
  misc_feature (101)..(101): Xaa can be any naturally occurring amino acid
  Transcript Sequence Number=SeqID_61775
  Gene Ontology: Mol. function=isomerase activity
  Homolog annotation: Hit_ID=Q8LDN5; Match level="QueryCoverage=98%, HitCoverage=58%, E-value=2e-42, Identity=58%"; Hit description =Topoisomerase-like protein
VLALFIARAVVDDILPPAFLSKAKVTLSESSKGLQVVQIAEKSYLXAPHHAELIERRWXGSTHITVEEVKKRIADLLKEYIRNGDTAEACRCIRELAVPFXHHEVVKRALTLGNW

SEQ ID NO: 127750 - protein, 71 aa, Setaria italica
  Transcript Sequence Number=SeqID_61776
  Gene Ontology: Mol. function=isomerase activity
  Homolog annotation: Hit_ID=Q9FMK4; Match level="QueryCoverage=78%, HitCoverage=47%, E-value=2e-18, Identity=64%"; Hit description =Topoisomerase-like protein
  Pfam annotation: Domain name=MA3; Domain location=17-71; Score=-4.0; E_value=0.045; Accession=PF02847.9; Description=MA3 domain
CELNHPIVAQSTLHGEVKKRIADLLKEYIRNGDTAEACRCIRELAVPFFHHEVVKRALTLGMESPAAEALI

SEQ ID NO: 127751 - protein, 68 aa, Setaria italica
  Transcript Sequence Number=SeqID_61777
  Gene Ontology: Mol. function=isomerase activity
  Homolog annotation: Hit_ID=Q8LDN5; Match level="QueryCoverage=91%, HitCoverage=7%, E-value=6e-13, Identity=64%"; Hit description =Topoisomerase-like protein
SFDGGWYHPHWLIRAVLGDLKLVSMAMDRHDKEKEMASVLLSSLYGNVISSTQIRLGFVLLLEAVDDL

SEQ ID NO: 127752 - protein, 93 aa, Setaria italica
  misc_feature (57)..(57): Xaa can be any naturally occurring amino acid
  Transcript Sequence Number=SeqID_61778
  Gene Ontology: Mol. function=protein transporter activity; Cellular component=clathrin adaptor complex; Biological process=intracellular protein transport
  Homolog annotation: Hit_ID=Q10LA0; Match level="QueryCoverage=79%, HitCoverage=8%, E-value=3e-33, Identity=94%"; Hit description =Adapter-related protein complex 1 beta 1 subunit, putative, expressed
SLDTLDEPEAKASMIWIIGEYAERIDNADELLESFLETFPEEPALVQLQLLTATVKXFLKKPTEGPQQMIQVAIFRCYLVYLCVQYCLDIREH

SEQ ID NO: 127753 - protein, 74 aa, Setaria italica
  Transcript Sequence Number=SeqID_61779
GEGNRCGREGGWEGVGVEGRVTQGRRAKDRKGSAWCSNRYNLIGCQFCYNWLIQLTSSVAQLISADNFDGLLEA

SEQ ID NO: 127754 - protein, 49 aa, Setaria italica
  Transcript Sequence Number=SeqID_61780
ENRGKLNKALAAGDSKASASTYDSEDEESDDETTEEVLLTLFSYLYIFT

SEQ ID NO: 127755 - protein, 46 aa, Setaria italica
  Transcript Sequence Number=SeqID_61781
AYTCDPQKWPICQHLKFRPPRDHQNCLLRSTVPLNWSTELTSCKQN

SEQ ID NO: 127756 - protein, 85 aa, Setaria italica
  misc_feature (58)..(58): Xaa can be any naturally occurring amino acid
  misc_feature (85)..(85): Xaa can be any naturally occurring amino acid
  Transcript Sequence Number=SeqID_61782
HAPSHIYTRIPPGHTSPSITSSRAGSYEAKADQVLLHEAPQREDPGTAAAGVALRGAXARPPLLVHPEALRADLLDHVVDGLGVX

SEQ ID NO: 127757 - protein, 86 aa, Setaria italica
  Transcript Sequence Number=SeqID_61783
  Gene Ontology: Mol. function=amino acid binding; Biological process =metabolic process
  Homolog annotation: Hit_ID=B6TPR3; Match level="QueryCoverage=100%, HitCoverage=19%, E-value=6e-35, Identity=90%"; Hit description=ACR8
RVFRENSLSVTHAEITTRGDMAMNVFHVTDVAGRPADPKTIDDVIQKIGTESLRVDEERWPRLCSTEGDAGRGGAGIFSLGSLVKK

SEQ ID NO: 127758 - protein, 56 aa, Setaria italica
  misc_feature (30)..(30): Xaa can be any naturally occurring amino acid
  Transcript Sequence Number=SeqID_61784
PICSAAERRRVIQCLQAAIERRASEVRDRXISPFLSLHATPPQTKAHDSGISHSQA

SEQ ID NO: 127759 - protein, 53 aa, Setaria italica
  Transcript Sequence Number=SeqID_61785
SFFILFKWRLPVETAVCIAHNVFLLLDGWVWTCVLAADETARLLRSATQRSAS

SEQ ID NO: 127760 - protein, 81 aa, Setaria italica
  misc_feature (48)..(48): Xaa can be any naturally occurring amino acid
  Transcript Sequence Number=SeqID_61786
  Homolog annotation: Hit_ID=B6UEB3; Match level="QueryCoverage=72%, HitCoverage=16%, E-value=4e-24, Identity=91%"; Hit description=SF16 protein
QHHGAMLRDGGRWRAGSQDGGIWDDSRLTREEADARTKRKVEAVIKRXRALAYAYSHQVPSTQTRSPLSFSSQPWIEKPRA

SEQ ID NO: 127761 - protein, 74 aa, Setaria italica
  Transcript Sequence Number=SeqID_61787
EQEHLTGVSGRGSVSGRKPRPVRPGMFLETVSKVLGGVYASNTSGITAQHLEWVHQTTLKILPISKSLAFRCPA

SEQ ID NO: 127762 - protein, 44 aa, Setaria italica
  Transcript Sequence Number=SeqID_61788
SGSDTLILIYSVSCHALRSDDRRDDSGRRLYNPYQDLNIPYKQL

SEQ ID NO: 127763 - protein, 61 aa, Setaria italica
  Transcript Sequence Number=SeqID_61789
  Gene Ontology: Mol. function=protein serine/threonine kinase activity; Biological process=protein amino acid phosphorylation
  Homolog annotation: Hit_ID=Q5NDD1; Match level="QueryCoverage=68%, HitCoverage=12%, E-value=1e-14, Identity=85%"; Hit description =Putative serine-threonine protein kinase
WVNALLPGDPGGAGPARRAIRSQAEALQLQEWASEHCSDQYRAPELWECPSHADIDERTDI

SEQ ID NO: 127764 - protein, 49 aa, Setaria italica
  Transcript Sequence Number=SeqID_61790
HRSPASNQSKAADCAVEGPWRGQLCAGLKHMHSFDPPYAHNAVKPDNVL

SEQ ID NO: 127765 - protein, 79 aa, Setaria italica
  Transcript Sequence Number=SeqID_61791
  Gene Ontology: Mol. function=potassium ion transmembrane transporter activity; Cellular component=integral to membrane; Biological process=potassium ion transport
  Homolog annotation: Hit_ID=Q942X8; Match level="QueryCoverage=81%, HitCoverage=8%, E-value=1e-24, Identity=90%"; Hit description =Probable potassium transporter 2
VLLLVVLCGASMVIGDGVLTPAISVLSSMSGLQVRATGLEHRSVVLLSCIVLVGLFALQHRGTQTSREEHLCPSSPHCT

SEQ ID NO: 127766 - protein, 81 aa, Setaria italica
  misc_feature (10)..(10): Xaa can be any naturally occurring amino acid
  Transcript Sequence Number=SeqID_61792
  Gene Ontology: Mol. function=potassium ion transmembrane transporter activity; Cellular component=membrane; Biological process=potassium ion transport
  Homolog annotation: Hit_ID=B6U7Z6; Match level="QueryCoverage=97%, HitCoverage=8%, E-value=3e-26, Identity=77%"; Hit description =Potassium transporter 2
YGKFFRKTGXDGWISLGGILLSMTGSEAMFADLGHFTSASVRKECSSVPLFSPWLQVAFVTVIYPCLILQYMGHAAFLSKN

SEQ ID NO: 127767 - protein, 69 aa, Setaria italica
  Transcript Sequence Number=SeqID_61793
  Gene Ontology: Mol. function=serine-type endopeptidase activity; Cellular component=nucleus; Biological process=proteolysis
  Homolog annotation: Hit_ID=B9RV10; Match level="QueryCoverage=92%, HitCoverage=7%, E-value=3e-25, Identity=85%"; Hit description=WD -repeat protein, putative
FGSGVAANTSIGKYFTTLCYSADGSYILAGGNTKYICMYDVGEQVLLRRFQITRNLSLDGVLDFLNSKK

SEQ ID NO: 127768 - protein, 53 aa, Setaria italica
  Transcript Sequence Number=SeqID_61794
  Gene Ontology: Mol. function=serine O-acetyltransferase activity; Cellular component=cytoplasm; Biological process=cysteine biosynthetic process from serine
  Homolog annotation: Hit_ID=Q10S58; Match level="QueryCoverage=81%, HitCoverage=12%, E-value=9e-16, Identity=83%"; Hit description =Probable serine acetyltransferase 2
FLRLLFSFYFQSMAVGNPAKVVGYMEKEDPSLTMKHDARKDYFEHVAIRYSDD

SEQ ID NO: 127769 - protein, 76 aa, Setaria italica
  misc_feature (27)..(27): Xaa can be any naturally occurring amino acid
  Transcript Sequence Number=SeqID_61795
  Gene Ontology: Mol. function=serine O-acetyltransferase activity; Cellular component=cytoplasm; Biological process=cysteine biosynthetic process from serine
  Homolog annotation: Hit_ID=Q10S58; Match level="QueryCoverage=100%, HitCoverage=21%, E-value=7e-32, Identity=88%"; Hit description =Probable serine acetyltransferase 2
LIGAGATILGNINVGEGAMIAAGSLVXLKNVPPHSMAVGNPAKVVGYMEKEDPSLTMKHDARKDYFEHVAIRYSDD

SEQ ID NO: 127770 - protein, 114 aa, Setaria italica
  Transcript Sequence Number=SeqID_61796
  Gene Ontology: Mol. function=protein binding; Cellular component =chloroplast envelope
  Homolog annotation: Hit_ID=B6U0T3; Match level="QueryCoverage=100%, HitCoverage=25%, E-value=3e-61, Identity=96%"; Hit description =Translocon Tic40
LQNPMYRQQLQDMLNNMGSSPDQWDNRMVDHLKNFDLSSPEVRQQFAQVGMTPEEVVSKIMANPEVAVAFQNPKIQTAIMDCSQNPLNIVKYQNDKEVMDVFMKISQIFPQING

SEQ ID NO: 127771 - protein, 52 aa, Setaria italica
  Transcript Sequence Number=SeqID_61797
MHAAFVDVSPEELQQKNLQSSLETVDVKSDSTDSESKEDTEREVPTNGEAFK

SEQ ID NO: 127772 - protein, 47 aa, Setaria italica
  Transcript Sequence Number=SeqID_61798
  Homolog annotation: Hit_ID=B6U0T3; Match level="QueryCoverage=95%, HitCoverage=10%, E-value=2e-12, Identity=86%"; Hit description =Translocon Tic40
MADGAETPKPSKKFAFVDVSPEELQQKNLQSSLETVDVKSDSTDSES

SEQ ID NO: 127773 - protein, 73 aa, Setaria italica
  misc_feature (62)..(73): Xaa can be any naturally occurring amino acid
  Transcript Sequence Number=SeqID_61799
RSLDAAPAPPPDSNHRRRRAALIIHRLFGSSFLGPVIYLLGNCHHFMRKCRDHYINFNNKKXXXXXXXXXXXX

SEQ ID NO: 127774 - protein, 71 aa, Setaria italica
  Transcript Sequence Number=SeqID_61800
  Gene Ontology: Mol. function=caffeoyl-CoA O-methyltransferase activity; Biological process=lignin biosynthetic process
  Homolog annotation: Hit_ID=Q9XGD6; Match level="QueryCoverage=83%, HitCoverage=22%, E-value=1e-26, Identity=94%"; Hit description =Caffeoyl-CoA O-methyltransferase 1
  Pfam annotation: Domain name=Methyltransf_3; Domain location=1-70; Score=-84.0; E_value=8.8e-06; Accession=PF01596.9; Description=O -methyltransferase
ERTRDGPTIRTNDNTLWNGSVVLPNDAPMRKYIRYYRDFVLVLNKALAADERVEICQLPVGDGVTLCRRVK

SEQ ID NO: 127775 - protein, 83 aa, Setaria italica
  misc_feature (16)..(16): Xaa can be any naturally occurring amino acid
  misc_feature (21)..(21): Xaa can be any naturally occurring amino acid
  Transcript Sequence Number=SeqID_61801
  Gene Ontology: Mol. function=caffeoyl-CoA O-methyltransferase activity; Biological process=lignin biosynthetic process
  Homolog annotation: Hit_ID=Q9XGD5; Match level="QueryCoverage=100%, HitCoverage=31%, E-value=2e-38, Identity=97%"; Hit description =Caffeoyl-CoA O-methyltransferase 2
  Pfam annotation: Domain name=Methyltransf_3; Domain location=1-83; Score=-5.8; E_value=6.6e-12; Accession=PF01596.9; Description=O -methyltransferase
REPESMKELREITAKXPWNLXMTTSADEGQFLNMLIKLIGAKKTMEIGVYTGYSLLATALALPEDGTILAMDINRENYELGLP

SEQ ID NO: 127776 - protein, 118 aa, Setaria italica
  Transcript Sequence Number=SeqID_61802
  Gene Ontology: Mol. function=caffeoyl-CoA O-methyltransferase activity; Biological process=lignin biosynthetic process
  Homolog annotation: Hit_ID=Q9XGD6; Match level="QueryCoverage=83%, HitCoverage=38%, E-value=2e-44, Identity=85%"; Hit description =Caffeoyl-CoA O-methyltransferase 1
  Pfam annotation: Domain name=Methyltransf_3; Domain location=2-117; Score=80.6; E_value=5.5e-21; Accession=PF01596.9; Description=O -methyltransferase
MVFLAPMSLMSMLRNCPSSADEKNHGSFDFVFVDADKDNYLNYHERLLKLVKLGGLIGYDNTLWNGSVVLPNDAPMRKYIRYYRDFVLVLNKALAADERVEICQLPVGDGVTLCRRVK

SEQ ID NO: 127777 - protein, 100 aa, Setaria italica
  misc_feature (5)..(5): Xaa can be any naturally occurring amino acid
  misc_feature (16)..(16): Xaa can be any naturally occurring amino acid
  Transcript Sequence Number=SeqID_61803
  Gene Ontology: Mol. function=caffeoyl-CoA O-methyltransferase activity; Biological process=lignin biosynthetic process
  Homolog annotation: Hit_ID=Q9XGD6; Match level="QueryCoverage=100%, HitCoverage=38%, E-value=1e-49, Identity=96%"; Hit description =Caffeoyl-CoA O-methyltransferase 1
  Pfam annotation: Domain name=Methyltransf_3; Domain location=1-100; Score=65.6; E_value=1.7e-17; Accession=PF01596.9; Description=O -methyltransferase
ITAKXPWNLMTTSADXGQFLNMLIKLIGAKKTMEIGVYTGYSLLATALALPEDGTILAMDINRENYELGLPCIEKAGVAHKIDFREGPALPVLDDLIADE

SEQ ID NO: 127778 - protein, 90 aa, Setaria italica
  misc_feature (11)..(11): Xaa can be any naturally occurring amino acid
  misc_feature (75)..(75): Xaa can be any naturally occurring amino acid
  Transcript Sequence Number=SeqID_61804
  Gene Ontology: Mol. function=structural constituent of ribosome; Cellular component=intracellular; Biological process=translation
  Homolog annotation: Hit_ID=B6TK08; Match level="QueryCoverage=72%, HitCoverage=19%, E-value=8e-21, Identity=80%"; Hit description =Ribosomal protein S15 containing protein
  Pfam annotation: Domain name=Ribosomal_S15; Domain location=1-55; Score=8.2; E_value=0.001; Accession=PF00312.14; Description =Ribosomal protein S15
TLKIKHLSAVXLHKKDKHSRKGLQEMVQRRKKYLKYLRRTDWDSYCLVLSKLGLRDVPEYKAPDYKSKPTTKAKXSKKNKSKRKKRKMKA

SEQ ID NO: 127779 - protein, 36 aa, Setaria italica
  Transcript Sequence Number=SeqID_61805
DEGKLPTLCSSPPTPPICPTPVPSRPTLSVPPTFLR

SEQ ID NO: 127780 - protein, 41 aa, Setaria italica
  Transcript Sequence Number=SeqID_61806
  Gene Ontology: Mol. function=ATPase activity, coupled to transmembrane movement of substances; Cellular component=integral to membrane; Biological process=transport
  Homolog annotation: Hit_ID=Q8GU62; Match level="QueryCoverage=73%, HitCoverage=1%, E-value=6e-10, Identity=93%"; Hit description=MRP -like ABC transporter
ARSMYEDADIYLFDDPFSAVDAHTGSQIFKVGFVVPRNAQI

SEQ ID NO: 127781 - protein, 55 aa, Setaria italica
  Transcript Sequence Number=SeqID_61807
  Gene Ontology: Mol. function=ATPase activity, coupled to transmembrane movement of substances; Cellular component=integral to membrane; Biological process=transport
  Homolog annotation: Hit_ID=Q7F9Y8; Match level="QueryCoverage=80%, HitCoverage=5%, E-value=1e-18, Identity=97%"; Hit description =OSJNBa0086O06.1 protein
MPQCLSLTPHLGLVDNHSRPWFHNISSMEWLSFRLNMLSNFVFAFSLTLLVSLQA

SEQ ID NO: 127782 - protein, 110 aa, Setaria italica
  misc_feature (25)..(25): Xaa can be any naturally occurring amino acid
  Transcript Sequence Number=SeqID_61808
  Gene Ontology: Mol. function=protein binding; Cellular component =chromosome; Biological process=nucleosome assembly
  Homolog annotation: Hit_ID=A5AKG7; Match level="QueryCoverage=74%, HitCoverage=60%, E-value=6e-37, Identity=91%"; Hit description =Histone H2A
  Pfam annotation: Domain name=CBFD_NFYB_HMF; Domain location=38-103; Score=2.8; E_value=0.098; Accession=PF00808.15; Description=Histone -like transcription factor (CBFNF-Y) and archaeal histone
  Pfam annotation: Domain name=Histone; Domain location=32-106; Score =99.6; E_value=1.1e-26; Accession=PF00125.16; Description=Core histone H2AH2BH3H4
  Pfam module annotation: Pfam domain module=CBFD_NFYB_HMF::Histone; Domain location=38-103::32-106
  Subcellular localization annotation: CTP_CleavageSite=15; ConfidenceScore=5.38e-01
MAGKGGKGLLAAKTTAAKSAEKDKXKKAPVSRSSRAGLQFPVGRIHRQLKQRTQANGRVGATAAVYSAAILEYLTAEVLELAGNASKDLKVKRITPRHLQLAIRGDEELD

SEQ ID NO: 127783 - protein, 71 aa, Setaria italica
  Transcript Sequence Number=SeqID_61809
CEKTTLMLTWFNQGVERLMNDAAAVVFICRVYCFYDMSLLILPSHFQFPVGRIHRQLKQRTQANGRVGATA

SEQ ID NO: 127784 - protein, 84 aa, Setaria italica
  Transcript Sequence Number=SeqID_61810
  Homolog annotation: Hit_ID=B9IKT5; Match level="QueryCoverage=48%, HitCoverage=30%, E-value=4e-10, Identity=80%"; Hit description =Histone H2A
VGSRREAKTRERDSGFHSERRRWPGRGGKGLLAAKTTAAKSAEKDKGKKAPVSRSSRAGLQFPVGRIHRQLKQRTQANGRVGAT

SEQ ID NO: 127785 - protein, 44 aa, Setaria italica
  Transcript Sequence Number=SeqID_61811
RPGLTTQERTKVQFKLRCTSSLAPHSLEDLLIRDLWMCGMTPPP

SEQ ID NO: 127786 - protein, 126 aa, Setaria italica
  Transcript Sequence Number=SeqID_61812
GIRIRSFEVNDQSIYHSLGCLPIFPDFLCQPYLICYFKHNLTLLRVYFLVNHLIIPGVIIITHIGQAESSTNGNIRTKQCPMRWIDFSMPRNPTTSMSNWGYLGDSQIFVQFTPKIKVCLSLRRFL

SEQ ID NO: 127787 - protein, 66 aa, Setaria italica
  Transcript Sequence Number=SeqID_61813
LYTATINLAISTICKMHDLGDGLDLFLRCSCSSPSLSPFSIHRASLSAKLQFTKNRINTRRNLRRL

SEQ ID NO: 127788 - protein, 115 aa, Setaria italica
  Transcript Sequence Number=SeqID_61814
GIRIRSFEVNDQSIYHSLGCLPIFPDFLCQPYLICYFKHNLTLLRVYFLVNHLIIPGVIIITHIGQAESSTNGNIRTKQCPMRWIDFSMPRNPTTSMSNWGYLGGMFVAFKVQLL

SEQ ID NO: 127789 - protein, 58 aa, Setaria italica
  Transcript Sequence Number=SeqID_61815
PEVMGSDVEIPCSRVPYLIKMNGSPCTRILTVTGTVEAAQTGADNFVLSIDQIESLLK

SEQ ID NO: 127790 - protein, 91 aa, Setaria italica
  Transcript Sequence Number=SeqID_61816
YLAVLSFLNLIKRKRKKSIRVSYSYKIVDLLSPVHCILSLTSLSFARCYSDSQIFVQFTPKIKVASTRFSDYHFRNALAERLARWMENGAV

SEQ ID NO: 127791 - protein, 57 aa, Setaria italica
  Transcript Sequence Number=SeqID_61817
GTLEQGISTSEPMTSDSQIFVQFTPKIKVASTRFSDYHFRNALAERLARWMENGDSE

SEQ ID NO: 127792 - protein, 82 aa, Setaria italica
  Transcript Sequence Number=SeqID_61818
SGFPIAISIVDFTITCSLYFVTNLTQFCPLLFRFSDICSVHAKIKVASTRFSDYHFRNALAGCCTKIDLSRKLLVSLVVHFC

SEQ ID NO: 127793 - protein, 42 aa, Setaria italica
  Transcript Sequence Number=SeqID_61819
GWKFKGVRIRMSLPWRKLTGTSLGAVLGYHQHSSSPELQNLP

SEQ ID NO: 127794 - protein, 77 aa, Setaria italica
  Transcript Sequence Number=SeqID_61820
  Homolog annotation: Hit_ID=P50699; Match level="QueryCoverage=96%, HitCoverage=26%, E-value=7e-18, Identity=64%"; Hit description =Thaumatin-like protein
  Pfam annotation: Domain name=Thaumatin; Domain location=1-77; Score= -82.5; E_value=0.074; Accession=PF00314.9; Description=Thaumatin family
SGRRSACAAYGVQQYCGAPYAAQYCCTGNFGTPQQCKPTAYSRLFKSACPKAYSYAYDDPTSILTCSAGASYVVTFC

SEQ ID NO: 127795 - protein, 64 aa, Setaria italica
  Transcript Sequence Number=SeqID_61821
  Gene Ontology: Mol. function=nucleoside transmembrane transporter activity; Cellular component=membrane; Biological process=transport
  Homolog annotation: Hit_ID=B9RW85; Match level="QueryCoverage=85%, HitCoverage=13%, E-value=2e-17, Identity=74%"; Hit description =Nucleoside transporter, putative
MNISLVLCHIIMQIKLRSRKGLLVAVVSRLLLIPAFYYTAKYGDQGWMIMLTSLLGLSNGYLTV

SEQ ID NO: 127796 - protein, 64 aa, Setaria italica
  Transcript Sequence Number=SeqID_61822
GSIRCQMDQWPNLHAKQARMMHSLPLRSLQHCLHDVFGQSSNHLIHNHLFVLFKLPLTESLPTF

SEQ ID NO: 127797 - protein, 65 aa, Setaria italica
  Transcript Sequence Number=SeqID_61823
  Homolog annotation: Hit_ID=Q6EPR2; Match level="QueryCoverage=73%, HitCoverage=10%, E-value=2e-16, Identity=83%"; Hit description =Enhancer of polycomb-like protein
LDAPRRQPPAPVQSTEAGEAHPAPNKKNAQEIPTPQYDVVDTYERDYTRTFAQPTTYIRGRGARA

SEQ ID NO: 127798 - protein, 84 aa, Setaria italica
  Transcript Sequence Number=SeqID_61824
  Gene Ontology: Mol. function=substrate-specific transmembrane transporter activity; Cellular component=integral to membrane; Biological process=transmembrane transport
  Homolog annotation: Hit_ID=B6TZX8; Match level="QueryCoverage=100%, HitCoverage=16%, E-value=4e-23, Identity=65%"; Hit description =Carbohydrate transporter/ sugar porter
INATVSMTFVSLYKAMTIGGAFFLFAGLSVVAAVFFYFLCPETHCRPLEEIEEVFSHGWCAHRGEVPAVEMRGSSVGDGNAKTQ

SEQ ID NO: 127799 - protein, 144 aa, Setaria italica
  misc_feature (23)..(23): Xaa can be any naturally occurring amino acid
  misc_feature (50)..(50): Xaa can be any naturally occurring amino acid
  Transcript Sequence Number=SeqID_61825
  Gene Ontology: Mol. function=protein serine/threonine kinase activity; Biological process=protein amino acid phosphorylation
  Homolog annotation: Hit_ID=O82658; Match level="QueryCoverage=78%, HitCoverage=20%, E-value=1e-33, Identity=60%"; Hit description =Putative kinase (Fragment)
SDVFSFGIVLLEVATGRRAVDLXYPDDEIFMLDWVRRLSDEGKLLNAADXKLPEGAYSLFDINRLIHLGLLCSLHDPRARPTMKWVVENLSDGCSGDLPRLPSFVALPKYISLTSSSDSGNEQTNTTNGIRQRTNKLLIPKTRY

SEQ ID NO: 127800 - protein, 147 aa, Setaria italica
  misc_feature (16)..(16): Xaa can be any naturally occurring amino acid
  Transcript Sequence Number=SeqID_61826
  Gene Ontology: Mol. function=protein binding
  Homolog annotation: Hit_ID=B2LUR0; Match level="QueryCoverage=96%, HitCoverage=32%, E-value=2e-32, Identity=49%"; Hit description=F-box- containing protein 2
  Pfam annotation: Domain name=DUF525; Domain location=52-146; Score =39.5; E_value=1.4e-11; Accession=PF04379.6; Description=Protein of unknown function (DUF525)
WLEEHLRRLQNGMIKXRMLLKSRYISLYPEAPPLCTSAMTNGVKVRASAVFVPEHPQTQGHERSLLYTYSIRMSVPEACMLGGVYYSSCQLHSRHWTIRSRDRVVSVVSGEGVIGQYPVLSPGRDEFVYESCTPLPFWSAQLARHKL

SEQ ID NO: 127801 - protein, 128 aa, Setaria italica
  misc_feature (64)..(64): Xaa can be any naturally occurring amino acid
  Transcript Sequence Number=SeqID_61827
  Pfam annotation: Domain name=DUF525; Domain location=69-128; Score =14.4; E_value=6.8e-09; Accession=PF04379.6; Description=Protein of unknown function (DUF525)
VPKALVKPTDSDLPQDGLLLWLEEHLRRLQNGMIKTRMLLKSRYISLYPEAPPLCTSAMTNGVXEACMLGGVYYSSCQLHSRHWTIRSRDRVVSVVSGEGVIGQYPVLSPGRDEFVYESCTPLPKGPW

SEQ ID NO: 127802 - protein, 56 aa, Setaria italica
  Transcript Sequence Number=SeqID_61828
LKGTLATARYYSAIPQLFTWILPLCLTDENAFEVFEKLEEKHKVRTSPSSFFHSLV

SEQ ID NO: 127803 - protein, 80 aa, Setaria italica
  Transcript Sequence Number=SeqID_61829
  Gene Ontology: Mol. function=binding; Cellular component=cellular _component; Biological process=response to unfolded protein
  Homolog annotation: Hit_ID=B6U6S4; Match level="QueryCoverage=97%, HitCoverage=13%, E-value=6e-34, Identity=89%"; Hit description=Heat shock protein STI
  Pfam annotation: Domain name=TPR_1; Domain location=33-66; Score =28.8; E_value=2.1e-05; Accession=PF00515.20; Description =Tetratricopeptide repeat
  Pfam annotation: Domain name=TPR_1; Domain location=6-32; Score=16.6; E_value=0.06; Accession=PF00515.20; Description=Tetratricopeptide repeat
  Pfam annotation: Domain name=TPR_2; Domain location=3-32; Score=15.8; E_value=0.19; Accession=PF07719.9; Description=Tetratricopeptide repeat
  Pfam annotation: Domain name=TPR_2; Domain location=33-66; Score =20.8; E_value=0.0058; Accession=PF07719.9; Description =Tetratricopeptide repeat
  Pfam module annotation: Pfam domain module=TPR_1::TPR_1::TPR_2::TPR _2; Domain location=33-66::6-32::3-32::33-66
KEKEAGNAAYKKKDFETAIQHYTKALELDDEDISYLTNRAAVYIEMGKYDECIKDCDKAVERGRELRADFKILRALSKFD

SEQ ID NO: 127804 - protein, 65 aa, Setaria italica
  Transcript Sequence Number=SeqID_61830
  Gene Ontology: Mol. function=binding; Cellular component=cellular _component; Biological process=response to unfolded protein
  Homolog annotation: Hit_ID=B6U6S4; Match level="QueryCoverage=89%, HitCoverage=9%, E-value=4e-26, Identity=93%"; Hit description=Heat shock protein STI
  Pfam annotation: Domain name=TPR_1; Domain location=2-35; Score=24.5; E_value=0.00042; Accession=PF00515.20; Description=Tetratricopeptide repeat
  Pfam annotation: Domain name=TPR_1; Domain location=36-65; Score=9.3; E_value=0.45; Accession=PF00515.20; Description=Tetratricopeptide repeat
  Pfam annotation: Domain name=TPR_2; Domain location=2-35; Score=20.5; E_value=0.007; Accession=PF07719.9; Description=Tetratricopeptide repeat
  Pfam module annotation: Pfam domain module=TPR_1::TPR_1::TPR_2; Domain location=2-35::36-65::2-35
REDGGGWRGNEFFKEQKYPEAIKHYTEALRRNPKDPKAYSNRAACYTKLGAMPEGLKDAEKCLEL

SEQ ID NO: 127805 - protein, 71 aa, Setaria italica
  Transcript Sequence Number=SeqID_61831
  Gene Ontology: Mol. function=binding; Cellular component=cellular _component; Biological process=response to unfolded protein
  Homolog annotation: Hit_ID=B6U6S4; Match level="QueryCoverage=81%, HitCoverage=9%, E-value=2e-18, Identity=77%"; Hit description=Heat shock protein STI
  Pfam annotation: Domain name=TPR_1; Domain location=2-35; Score=28.8; E_value=2.1e-05; Accession=PF00515.20; Description=Tetratricopeptide repeat
  Pfam annotation: Domain name=TPR_2; Domain location=2-35; Score=20.8; E_value=0.0058; Accession=PF07719.9; Description=Tetratricopeptide repeat
  Pfam module annotation: Pfam domain module=TPR_1::TPR_2; Domain location=2-35::2-35
DISYLTNRAAVYIEMGKYDECIKDCDKAVERGRELRADFKMVSMATSKSLELLASLTRAVPFLVSALEIIL

SEQ ID NO: 127806 - protein, 63 aa, Setaria italica
  Transcript Sequence Number=SeqID_61832
KRKLFFWEKVYFSSVKYSKRVTFISHVSFGENQPHLSLTMVQCHLMTVYTTKLSAEDIKPIKN

SEQ ID NO: 127807 - protein, 37 aa, Setaria italica
  Transcript Sequence Number=SeqID_61833
KSVTFISHISFGENQIHLSLTMVECHLMTGYAMKLSG

SEQ ID NO: 127808 - protein, 96 aa, Setaria italica
  Transcript Sequence Number=SeqID_61834
  Subcellular localization annotation: CTP_CleavageSite=46; ConfidenceScore=5.24e-01
GRSSRRKRSNGSVSVRRRAPREGGKRRPRAPITPNASCCCPRRDPRAAGRSHRGRGGELFRRATAVRRRDPDPGTPPWTAPAPLFTPPVGDGLVPG

SEQ ID NO: 127809 - protein, 81 aa, Setaria italica
  misc_feature (23)..(23): Xaa can be any naturally occurring amino acid
  Transcript Sequence Number=SeqID_61835
  Gene Ontology: Mol. function=carbon-sulfur lyase activity; Cellular component=vacuole
  Homolog annotation: Hit_ID=B6THV4; Match level="QueryCoverage=93%, HitCoverage=15%, E-value=8e-24, Identity=71%"; Hit description =Alliin lyase
PGYAWVKCEMEEDDDCYEALLKXQRSITRSGARFEASSRYTRLSLLKTDDDFEVLMERVTDLVNAENYDEPASSSTTFGKC

SEQ ID NO: 127810 - protein, 35 aa, Setaria italica
  Transcript Sequence Number=SeqID_61836
HISCACITQVGTDQGRERGQEGQRLRAEQHHGRVP

SEQ ID NO: 127811 - protein, 50 aa, Setaria italica
  Transcript Sequence Number=SeqID_61837
  Gene Ontology: Mol. function=protein tyrosine phosphatase activity; Biological process=protein amino acid dephosphorylation
  Homolog annotation: Hit_ID=B6T2X9; Match level="QueryCoverage=84%, HitCoverage=15%, E-value=2e-15, Identity=88%"; Hit description=Low molecular weight protein-tyrosine-phosphatase slr0328
LVIYKNVKLMCSYCKRHTESEVPDPYYGGPQGFEKVLDLLEDAIKQRLAC

SEQ ID NO: 127812 - protein, 48 aa, Setaria italica
  misc_feature (10)..(10): Xaa can be any naturally occurring amino acid
  Transcript Sequence Number=SeqID_61838
  Gene Ontology: Mol. function=protein tyrosine phosphatase activity; Biological process=protein amino acid dephosphorylation
  Homolog annotation: Hit_ID=B6T2X9; Match level="QueryCoverage=95%, HitCoverage=16%, E-value=3e-17, Identity=91%"; Hit description=Low molecular weight protein-tyrosine-phosphatase slr0328
DSAGTIGYHXGNKADSRMRSASKKRGIEVTSISRPIKPSDFRDFNISS

SEQ ID NO: 127813 - protein, 77 aa, Setaria italica
  Transcript Sequence Number=SeqID_61839
LEDGDELVLAPAVAGAERAALDRFIDKIIDEHMKRGKSPDDADADMVDDMLAFLAEAKPANKSAAGGDVDDLQSTLR

SEQ ID NO: 127814 - protein, 56 aa, Setaria italica
  Transcript Sequence Number=SeqID_61840
ASFQGFSLFKRGYLKLKKNERKGLVTNLLEKWLAMAKCIMSSKRMQRTQLIMTLVN

SEQ ID NO: 127815 - protein, 42 aa, Setaria italica
  Transcript Sequence Number=SeqID_61841
NSDLDLSNFPSSGFLAPLLVPFHRFPLCMRRANNLCKHDLLN

SEQ ID NO: 127816 - protein, 76 aa, Setaria italica
  Transcript Sequence Number=SeqID_61842
ILVLRSLVWRQVEARTSRRRVGLLGVPGVSAPSAAAILPFRRSFFQPSPLGVVAAPRDKIPRVKSRPDVNMCAFII

SEQ ID NO: 127817 - protein, 59 aa, Setaria italica
  Transcript Sequence Number=SeqID_61843
LYGGSSSSLAVLACFRVCMFSASWLLFCCVYCLLKMCVLVVFACAVRCSYNTYNYTSLR

SEQ ID NO: 127818 - protein, 54 aa, Setaria italica
  Transcript Sequence Number=SeqID_61844
IFFRLVTIHTITPHCAGKATSTHIFSKQYTQQNNSQDAENIHTRKQAKTASDEL

SEQ ID NO: 127819 - protein, 82 aa, Setaria italica
  Transcript Sequence Number=SeqID_61845
  Gene Ontology: Mol. function=transferase activity; Cellular component= membrane
  Homolog annotation: Hit_ID=Q5VQN0; Match level="QueryCoverage=100%, HitCoverage=16%, E-value=2e-42, Identity=97%"; Hit description =Exostosin family protein-like
RQEEADIFYVPFFTTISYFLLEKQECKALYREALKWVTNQPAWQRSEGRDHVIPVHHPWSFKSVRSFVKKAIWLLPDMDSTG

SEQ ID NO: 127820 - protein, 48 aa, Setaria italica
  Transcript Sequence Number=SeqID_61846
SFRTTLFNLKKDTPYFVQTIRSLRNARAVCIFTIGDGITGTLTLGAAC

SEQ ID NO: 127821 - protein, 46 aa, Setaria italica
  Transcript Sequence Number=SeqID_61847
  Gene Ontology: Mol. function=hydrolase activity, acting on acid anhydrides, in phosphorus-containing anhydrides; Biological process =nucleobase, nucleoside, nucleotide and nucleic acid metabolic process
  Homolog annotation: Hit_ID=B6UDG6; Match level="QueryCoverage=97%, HitCoverage=7%, E-value=5e-13, Identity=86%"; Hit description =Regulator of telomere elongation helicase 1
QPVIEPRQSSNFPNAIEDYAAKLNDSSTSGAIFFAVCRGKVCSFSP

SEQ ID NO: 127822 - protein, 72 aa, Setaria italica
  Transcript Sequence Number=SeqID_61848
TSNSCHLSTLPLLPENSQSWACSSITAVPPNYHLQGPIANLSICTDSPTGHMHRDDRLAESETFICFMDRQQ

SEQ ID NO: 127823 - protein, 93 aa, Setaria italica
  Transcript Sequence Number=SeqID_61849
  Gene Ontology: Mol. function=acid-amino acid ligase activity; Cellular component=intracellular; Biological process=ubiquitin -dependent protein catabolic process
  Homolog annotation: Hit_ID=Q2QSH6; Match level="QueryCoverage=96%, HitCoverage=9%, E-value=1e-45, Identity=96%"; Hit description=E3 ubiquitin protein ligase UPL1, putative, expressed
  Pfam annotation: Domain name=HECT; Domain location=1-92; Score= -113.9; E_value=0.00046; Accession=PF00632.17; Description=HECT -domain (ubiquitin-transferase)
KELELLISGLPDIDLDDLKANTEYSGYSIASPVIQWFWEIVQGFSKEDKARFLQFVTGTSKVPLEGFSALQGISGPQRFQIHKAYGQDNETNT

SEQ ID NO: 127824 - protein, 52 aa, Setaria italica
  Transcript Sequence Number=SeqID_61850
  Gene Ontology: Mol. function=acid-amino acid ligase activity; Cellular component=intracellular; Biological process=ubiquitin -dependent protein catabolic process
  Homolog annotation: Hit_ID=Q2QSH6; Match level="QueryCoverage=94%, HitCoverage=4%, E-value=1e-21, Identity=95%"; Hit description=E3 ubiquitin protein ligase UPL1, putative, expressed
DPKHQTEHLSYFKFVGRVVGKALFDGQLLDAHFTRSFYKHILGVKVTYHDIE

SEQ ID NO: 127825 - protein, 70 aa, Setaria italica
  Transcript Sequence Number=SeqID_61851
  Gene Ontology: Mol. function=acid-amino acid ligase activity; Cellular component=intracellular; Biological process=ubiquitin -dependent protein catabolic process
  Homolog annotation: Hit_ID=Q2QSH6; Match level="QueryCoverage=97%, HitCoverage=6%, E-value=1e-29, Identity=85%"; Hit description=E3 ubiquitin protein ligase UPL1, putative, expressed
DKRLLFDGQLLDAHFTRSFYKHILGVKVTYHDIEAIDPAYYKNLKWMLENDITDVLDLTFSMDAERKKKL

SEQ ID NO: 127826 - protein, 51 aa, Setaria italica
  Transcript Sequence Number=SeqID_61852
LLDNASVNNKAVKDIRDALSEATKAFSANRHPTAHLFLKMLLAIRDVLLDG

SEQ ID NO: 127827 - protein, 50 aa, Setaria italica
  Transcript Sequence Number=SeqID_61853
NSLFVGCTDEKEPLCIFGSSKCLNPSLKRLYRSRNIPVPRPLPSLVRLLE

SEQ ID NO: 127828 - protein, 63 aa, Setaria italica
  misc_feature (16)..(16): Xaa can be any naturally occurring amino acid
  Transcript Sequence Number=SeqID_61854
  Gene Ontology: Mol. function=ligase activity
SSEQCNVWSSSEECTXLDISAIELKFVPSPPPEEPDITLFGRARFGSQAIDIMKEELCSQYND

SEQ ID NO: 127829 - protein, 57 aa, Setaria italica
  Transcript Sequence Number=SeqID_61855
FFFLRTIHSSYPIELSRKYNNTLYNNLKFVQSTCTRLYRYLFRNNLNYMKKQVGSLK

SEQ ID NO: 127830 - protein, 80 aa, Setaria italica
  Transcript Sequence Number=SeqID_61856
MSFLRLLPQRLPHLIRQVEQDVETVIHVLQPGPIGIVEHKFTDVEILEARATVKRAVDNWQRNWALERNLGSGSFDKWKK

SEQ ID NO: 127831 - protein, 55 aa, Setaria italica
  Transcript Sequence Number=SeqID_61857
  Gene Ontology: Mol. function=transferase activity, transferring glycosyl groups; Cellular component=endoplasmic reticulum membrane; Biological process=cell wall organization and biogenesis
  Homolog annotation: Hit_ID=Q651X7; Match level="QueryCoverage=90%, HitCoverage=6%, E-value=2e-19, Identity=80%"; Hit description =Cellulose synthase-like protein E1
GKRELSINKIEEKAKLLTTCTYEHNTQWGNEIGVKYGFPAEDVITGLTIHCRGWK

SEQ ID NO: 127832 - protein, 57 aa, Setaria italica
  Transcript Sequence Number=SeqID_61858
  Gene Ontology: Mol. function=isomerase activity; Cellular component =plasma membrane; Biological process=cell redox homeostasis
  Homolog annotation: Hit_ID=B9SSJ4; Match level="QueryCoverage=78%, HitCoverage=12%, E-value=3e-14, Identity=77%"; Hit description =Protein disulfide isomerase, putative
LLIHYYSTSRILQSLMSKYKVEGFPTILVFGADKESPFPYQGARVASAIESFALEQL

SEQ ID NO: 127833 - protein, 79 aa, Setaria italica
  misc_feature (9)..(9): Xaa can be any naturally occurring amino acid
  misc_feature (51)..(51): Xaa can be any naturally occurring amino acid
  Transcript Sequence Number=SeqID_61859
VLQMHKLFXETCISVILISLVLEGSTCDSHPKIYDFKTARMLAKISVGRLXLFYFAVGTTDFLRYELLECSYTNQSMVK

SEQ ID NO: 127834 - protein, 92 aa, Setaria italica
  Transcript Sequence Number=SeqID_61860
QKVDVLDEIPCVNFAACTRQTPSPNQEQPTEMRICSCLSSPSHGLMACPCAGCRCSRGARPPPTLRHRFPLPISPAVLLLLDLLAPAPLPVR

SEQ ID NO: 127835 - protein, 57 aa, Setaria italica
  misc_feature (34)..(34): Xaa can be any naturally occurring amino acid
  Transcript Sequence Number=SeqID_61861
  Gene Ontology: Cellular component=integral to membrane
  Homolog annotation: Hit_ID=B6SZP9; Match level="QueryCoverage=94%, HitCoverage=48%, E-value=1e-11, Identity=59%"; Hit description=Brain protein 44-like protein
  Pfam annotation: Domain name=UPF0041; Domain location=3-56; Score= -21.5; E_value=0.0024; Accession=PF03650.5; Description =Uncharacterised protein family (UPF0041)
HQGLVDMNKPPEMISGNMTAAMCVYSGLFMRFAXWMVQPRNYLLLACHASMKAFSLY

SEQ ID NO: 127836 - protein, 89 aa, Setaria italica
  Transcript Sequence Number=SeqID_61862
ALARRLDPAAAVGEICARYPSLPSPGWWILSRNPTIGSYVLSRPPPTIPRCFLPPEFDVVIRYAWPGQVISASAGSGFRHGDGAQVVPE

SEQ ID NO: 127837 - protein, 89 aa, Setaria italica
  Transcript Sequence Number=SeqID_61863
  Gene Ontology: Mol. function=molecular_function; Cellular component =cellular_component; Biological process=biological_process
  Homolog annotation: Hit_ID=B6SZP9; Match level="QueryCoverage=78%, HitCoverage=63%, E-value=1e-25, Identity=71%"; Hit description=Brain protein 44-like protein
  Pfam annotation: Domain name=UPF0041; Domain location=17-89; Score =59.8; E_value=1e-14; Accession=PF03650.5; Description=Uncharacterised protein family (UPF0041)
  Subcellular localization annotation: CTP_CleavageSite=62; ConfidenceScore=5.27e-01
VVFSSLSVGVVGFPSYWSYGCLKSFLNSPVGPKTTHFWGPVANWGFVIAGLVDMNKPPEMISGNMTAAMCVYSGLFMRFAWMVQPRNYL

SEQ ID NO: 127838 - protein, 58 aa, Setaria italica
  Transcript Sequence Number=SeqID_61864
FFFDQEEETSTPSMRTKIYATSISLHWLDANQITQYISFPFLCNLICIQPIYATSISL

SEQ ID NO: 127839 - protein, 57 aa, Setaria italica
  Transcript Sequence Number=SeqID_61865
  Gene Ontology: Mol. function=ubiquitin-protein ligase activity; Cellular component=ubiquitin ligase complex
  Homolog annotation: Hit_ID=B9RMH5; Match level="QueryCoverage=100%, HitCoverage=7%, E-value=3e-09, Identity=54%"; Hit description =Ubiquitin-protein ligase, putative
AIFREDVQSQEVGTMALFNLAVSNDRNKRQLLSAGVIPLIEQMIQKPETCEAAIAMY

SEQ ID NO: 127840 - protein, 77 aa, Setaria italica
  Transcript Sequence Number=SeqID_61866
  Subcellular localization annotation: CTP_CleavageSite=43; ConfidenceScore=5.23e-01
VVQVVYSQYQLSEPFKQYLPLYDASNPMRVPEKPLPTSWSSQRSMSDSQSSSVSSSDIDSTQSSDRSTSGGTSSDIA

SEQ ID NO: 127841 - protein, 148 aa, Setaria italica
  misc_feature (7)..(7): Xaa can be any naturally occurring amino acid
  misc_feature (22)..(22): Xaa can be any naturally occurring amino acid
  Transcript Sequence Number=SeqID_61867
  Homolog annotation: Hit_ID=B4FU94; Match level="QueryCoverage=87%, HitCoverage=30%, E-value=6e-34, Identity=60%"; Hit description =Calmodulin binding protein
EAAAKRXRAMAYALTHQWQAGXRKQKAASLQDQGLAGDENQWGRNWLERWMAARPWENRLLDSNAKESVTVGDDKVAEEDKTKAPNKPKGKVLVSTTQANGQQHKKGTSHKKSHSDVSGSSSGQSASVQPTASLDSSKVKEKPSDEIT

SEQ ID NO: 127842 - protein, 125 aa, Setaria italica
  Transcript Sequence Number=SeqID_61868
  Homolog annotation: Hit_ID=B4FU94; Match level="QueryCoverage=60%, HitCoverage=17%, E-value=2e-27, Identity=76%"; Hit description =Calmodulin binding protein
AGRTCYVCLLGSELTVRKLTVIIHSALGFLICTFLWQWQAGSRKQKAASLQDQGLAGDENQWGRNWLERWMAARPWENRLLDSNAKESVTVGDDKVAEEDKTKATKTNQKEKYLFNHTSKWTTAQ

SEQ ID NO: 127843 - protein, 84 aa, Setaria italica
  misc_feature (16)..(16): Xaa can be any naturally occurring amino acid
  misc_feature (37)..(37): Xaa can be any naturally occurring amino acid
  Transcript Sequence Number=SeqID_61869
GANAVRKQAAETLQCXCKALVRAQARVRARRVRVSLXSQGTQKKPPEKNVHEDHVRDIELHKPDLGSDLSSRKSEISACWSMLS

SEQ ID NO: 127844 - protein, 156 aa, Setaria italica
  Transcript Sequence Number=SeqID_61870
  Homolog annotation: Hit_ID=Q10RF6; Match level="QueryCoverage=100%, HitCoverage=5%, E-value=3e-41, Identity=58%"; Hit description=Viral A-type inclusion protein repeat containing protein, expressed
KNQTAKSYNTILEDNRIITKTVRRKVKSEYPSSELVRGRDLEINKLEVSKGAVEPHEVWSKSVLERLASDAQRLLSIQASIEELKRKMEEPPKGKSPMNSEYSSVSTQLHETDGYVLEQINFNNKLTRKAENYPALSDNMNTEREGYSSRRKISEQ

SEQ ID NO: 127845 - protein, 44 aa, Setaria italica
  Transcript Sequence Number=SeqID_61871
MTNYQSRGLQAAKMFYGSKDFKEMVSEFCFRQFLMRASETRTEP

SEQ ID NO: 127846 - protein, 69 aa, Setaria italica
  Transcript Sequence Number=SeqID_61872
ERILVPCCRTKWEYLPVGRQLMCLCEFKLILLGPSGLSFCTHRLPFATRQFLPVLRRLCTAVNLKHHLL

SEQ ID NO: 127847 - protein, 86 aa, Setaria italica
  misc_feature (64)..(64): Xaa can be any naturally occurring amino acid
  Transcript Sequence Number=SeqID_61873
  Homolog annotation: Hit_ID=Q10RF6; Match level="QueryCoverage=97%, HitCoverage=3%, E-value=2e-19, Identity=59%"; Hit description=Viral A-type inclusion protein repeat containing protein, expressed
MEEARYNKEERETLLMHNEKLRVGISQQMKVLNICKDLGPADLAEDEILLQTVSDETINILKLXDETEDVNRLMYIELSVLSTVLL

SEQ ID NO: 127848 - protein, 42 aa, Setaria italica
  Transcript Sequence Number=SeqID_61874
HHSLFQSSEPVTLCQPLRGASISISFYFFCRENKKVRAQFLV

SEQ ID NO: 127849 - protein, 51 aa, Setaria italica
  Transcript Sequence Number=SeqID_61875
  Subcellular localization annotation: CTP_CleavageSite=39; ConfidenceScore=5.20e-01
DSLKQDSFSSMTDTSVFSTFPFQLDFYPSKYLRPRRLVTITTLQTILGRIN

SEQ ID NO: 127850 - protein, 63 aa, Setaria italica
  Transcript Sequence Number=SeqID_61876
  Gene Ontology: Cellular component=integral to membrane
  Homolog annotation: Hit_ID=Q9LP26; Match level="QueryCoverage=66%, HitCoverage=17%, E-value=5e-11, Identity=76%"; Hit description =T9L6.9 protein
MALCHELKFAPCFKFCQVVVCGILLVVMAVGNFVNTVETLVLKLRFKAKMKRAKSRQDRPHQN

SEQ ID NO: 127851 - protein, 42 aa, Setaria italica
  Transcript Sequence Number=SeqID_61877
SSTACISCSDDEVKSEYPSSELVRGRDLEINKLEVSKGAVEP

SEQ ID NO: 127852 - protein, 58 aa, Setaria italica
  misc_feature (40)..(40): Xaa can be any naturally occurring amino acid
  Transcript Sequence Number=SeqID_61878
  Gene Ontology: Mol. function=inositol-1,3,4-trisphosphate 5/6-kinase activity; Cellular component=intracellular; Biological process =inositol trisphosphate metabolic process
  Homolog annotation: Hit_ID=B6TDJ5; Match level="QueryCoverage=81%, HitCoverage=13%, E-value=5e-15, Identity=91%"; Hit description =Inositol-tetrakisphosphate 1-kinase 3
TPSTKKKVKSFLQPKLLALARKKGIHFASIDETRPLSEQXGPFDIILHKVRRLVFILR

SEQ ID NO: 127853 - protein, 41 aa, Setaria italica
  Transcript Sequence Number=SeqID_61879
SMWAGMGVNLDRKCILEVKGEMQDAFKRELKRREACQDGDY

SEQ ID NO: 127854 - protein, 70 aa, Setaria italica
  Transcript Sequence Number=SeqID_61880
YGFQLQITTKTPEHENHIIRRQEPQSMQALRETQTKLLMVWSCNKCFKSLRYEPLWQSDQARPLCSLLSS

SEQ ID NO: 127855 - protein, 65 aa, Setaria italica
  Transcript Sequence Number=SeqID_61881
LITNSQLARAPGGIQDQPSGLSCTFKKSASLEVQVLKEIGIFKQPNLANTQELLLSAIQWVNHRF

SEQ ID NO: 127856 - protein, 65 aa, Setaria italica
  misc_feature (13)..(13): Xaa can be any naturally occurring amino acid
  Transcript Sequence Number=SeqID_61882
  Gene Ontology: Mol. function=oxidoreductase activity, acting on the CH-OH group of donors, NAD or NADP as acceptor; Biological process =malate metabolic process
  Homolog annotation: Hit_ID=Q9ZRH5; Match level="QueryCoverage=61%, HitCoverage=6%, E-value=7e-10, Identity=77%"; Hit description=Malic enzyme
NTCANEHEPLTTXSIKPTVLIGTSGVGRTSTKYVVETMASFNEELGGLGVKQSDGFIHSNSGSNS

SEQ ID NO: 127857 - protein, 59 aa, Setaria italica
  misc_feature (11)..(11): Xaa can be any naturally occurring amino acid
  Transcript Sequence Number=SeqID_61883
  Subcellular localization annotation: CTP_CleavageSite=37; ConfidenceScore=5.06e-01
ESQSSMLSQPXAPYPESTFILSNQPIPRPGPLTTITKAGRAAATNKRKKFTSKKRQQGI

SEQ ID NO: 127858 - protein, 82 aa, Setaria italica
  Transcript Sequence Number=SeqID_61884
SYLSMEVNMHCRHCSEARHNTATCNPKENRTSIQKMPKSWWQIQKLNCKLRQHKLGHHRSNHKICLSTRYVLLRFCSTRFNS

SEQ ID NO: 127859 - protein, 165 aa, Setaria italica
  misc_feature (52)..(52): Xaa can be any naturally occurring amino acid
  Transcript Sequence Number=SeqID_61885
  Gene Ontology: Mol. function=oxidoreductase activity; Cellular component=cytoplasm; Biological process=oxidation reduction
  Homolog annotation: Hit_ID=B6TKU7; Match level="QueryCoverage=84%, HitCoverage=49%, E-value=6e-52, Identity=73%"; Hit description=Sex determination protein tasselseed-2
  Pfam annotation: Domain name=adh_short; Domain location=31-161; Score= 24.8; E_value=3.2e-07; Accession=PF00106.17; Description=short chain dehydrogenase
TYQPYSQLAFTVFTVLNLIVCLLPSHRLEGKVALVTGGASGIGETIVRLFKXHGAKVCIADIQDEAGQKLRDALGGGDDVMFVHCDVTVEEDVSAAVDAVAQRFGALDVMVNNAGITGSKVTDIRNVDFAEVRKVFDINVHGVFMGMKHAARVMIPRKRGSIVSL

SEQ ID NO: 127860 - protein, 67 aa, Setaria italica
  misc_feature (63)..(63): Xaa can be any naturally occurring amino acid
  Transcript Sequence Number=SeqID_61886
  Gene Ontology: Mol. function=protein binding; Cellular component =viral envelope
  Homolog annotation: Hit_ID=Q9FWV2; Match level="QueryCoverage=95%, HitCoverage=6%, E-value=3e-18, Identity=70%"; Hit description =Putative chloroplast inner envelope protein
PSCSWPTPGELDDLYAIYLKGTPKPEKLSRLQYLLGISNETANKIRDTASEGTLPIAAADEKXELAF

SEQ ID NO: 127861 - protein, 118 aa, Setaria italica
  Transcript Sequence Number=SeqID_61887
  Gene Ontology: Mol. function=protein binding; Cellular component =viral envelope
  Homolog annotation: Hit_ID=Q9FWV2; Match level="QueryCoverage=88%, HitCoverage=10%, E-value=5e-38, Identity=76%"; Hit description =Putative chloroplast inner envelope protein
LYSSQLKSIGRGLDIGTLIDVRRAQLAYKLSDEIAAEMFREHAKKLVEENISSALDIMKSRIPDSLTKAVEEVKSVIRFNSLLTILSKHPQADRFARGLGPISLGKMVKFFVIQIFVS

SEQ ID NO: 127862 - protein, 130 aa, Setaria italica
  Transcript Sequence Number=SeqID_61888
  Gene Ontology: Mol. function=protein binding; Cellular component =viral envelope
  Homolog annotation: Hit_ID=Q7XD45; Match level="QueryCoverage=86%, HitCoverage=11%, E-value=8e-50, Identity=87%"; Hit description =Chloroplast inner envelope protein, putative, expressed
QDVHIKFTEKAFVQQAEVILADGKLTEAKAEQLAKIQKQFGLPTENAQKIIKGITTTKLSSAIEASVARGQIGIQQVRGLKDANFQLDSLIAEPLRESIYRKTVEEIFSSGAGRILNRKKESSNVKEYPR

SEQ ID NO: 127863 - protein, 143 aa, Setaria italica
  misc_feature (81)..(81): Xaa can be any naturally occurring amino acid
  misc_feature (96)..(96): Xaa can be any naturally occurring amino acid
  misc_feature (109)..(109): Xaa can be any naturally occurring amino acid
  misc_feature (130)..(130): Xaa can be any naturally occurring amino acid
  misc_feature (136)..(136): Xaa can be any naturally occurring amino acid
  Transcript Sequence Number=SeqID_61889
  Gene Ontology: Mol. function=protein binding; Cellular component =viral envelope
  Homolog annotation: Hit_ID=Q9FWV2; Match level="QueryCoverage=94%, HitCoverage=14%, E-value=4e-44, Identity=69%"; Hit description =Putative chloroplast inner envelope protein
TESQIDIAMRENAKNLYSSQLKSIGRGLDIGTLIDVRRAQLAYKLSDEIAAEMFREHAKKLVEENISSALDIMKSRIPALXIYLTEPCDYRDSLTXGCGRGGEYDHDRXRADDLKILYKAYATEVLSDGXCDDEKXISYIFHF

SEQ ID NO: 127864 - protein, 35 aa, Setaria italica
  Transcript Sequence Number=SeqID_61890
MQLAPLNELRNVFGLGKREAEGILSDVKAHIYRRT

SEQ ID NO: 127865 - protein, 91 aa, Setaria italica
  Transcript Sequence Number=SeqID_61891
  Gene Ontology: Mol. function=protein binding; Cellular component =viral envelope
  Homolog annotation: Hit_ID=Q9FWV2; Match level="QueryCoverage=80%, HitCoverage=7%, E-value=2e-30, Identity=87%"; Hit description =Putative chloroplast inner envelope protein
QLSPVSQRNVILEGLSLSGLKDANFQLDSLIAEPLRESIYRKTVEEIFSSGTGDFDEEEVYVKIPADLIISAEKAKSIVQDIAKVRLENSL

SEQ ID NO: 127866 - protein, 73 aa, Setaria italica
  misc_feature (63)..(63): Xaa can be any naturally occurring amino acid
  Transcript Sequence Number=SeqID_61892
  Gene Ontology: Mol. function=protein binding; Cellular component =viral envelope
  Homolog annotation: Hit_ID=Q9FWV2; Match level="QueryCoverage=71%, HitCoverage=5%, E-value=1e-18, Identity=88%"; Hit description =Putative chloroplast inner envelope protein
ANQTAFESLQAVQPWPLLTSHQQVRGLKDANFQLDSLIAEPLRESIYRKTVEEIFSSGTGDFXDEEEVYVKIP

SEQ ID NO: 127867 - protein, 37 aa, Setaria italica
  Transcript Sequence Number=SeqID_61893
FKYFNSLLTILSKHPQADRFARGLGPISLGGEYDHDR

SEQ ID NO: 127868 - protein, 57 aa, Setaria italica
  Transcript Sequence Number=SeqID_61894
  Gene Ontology: Cellular component=viral envelope
  Homolog annotation: Hit_ID=Q9FWV2; Match level="QueryCoverage=96%, HitCoverage=5%, E-value=3e-13, Identity=65%"; Hit description =Putative chloroplast inner envelope protein
LQGIIRQKVKVRKKLPLVQAIALLRQKKRDDVLSSLNDLLACDAAVPAPQPLSWPTP

SEQ ID NO: 127869 - protein, 47 aa, Setaria italica
  Transcript Sequence Number=SeqID_61895
KRQGNYINTQEESSSKNSEPNLGWFVCHPGLRGRMLELSLDGDRIMY

SEQ ID NO: 127870 - protein, 99 aa, Setaria italica
  Transcript Sequence Number=SeqID_61896
  Gene Ontology: Cellular component=integral to membrane
  Homolog annotation: Hit_ID=Q10I37; Match level="QueryCoverage=100%, HitCoverage=42%, E-value=1e-39, Identity=84%"; Hit description =Tobamovirus multiplication protein 3, putative, expressed
  Pfam annotation: Domain name=DUF1084; Domain location=1-99; Score= -27.0; E_value=2.7e-08; Accession=PF06454.3; Description=Protein of unknown function (DUF1084)
MLRHFPIESKGRRKKLYEVGTVTGICFTCFLIRCIVVSFSSFNPELSLEVLDHPVLDFFYYMLTEILPSALILPSALVLFILRKLPPKRVSAQQYHTIR

SEQ ID NO: 127871 - protein, 56 aa, Setaria italica
  Transcript Sequence Number=SeqID_61897
  Gene Ontology: Mol. function=pyruvate kinase activity; Biological process=glycolysis
  Homolog annotation: Hit_ID=B6TK43; Match level="QueryCoverage=96%, HitCoverage=10%, E-value=9e-21, Identity=88%"; Hit description =Pyruvate kinase
TSVWLEVVETSGENVNCLVKNTATLAGPIFTFHVSQVHINLPTLSEYDKQVMWTTS

SEQ ID NO: 127872 - protein, 85 aa, Setaria italica
  misc_feature (62)..(62): Xaa can be any naturally occurring amino acid
  Transcript Sequence Number=SeqID_61898
  Gene Ontology: Mol. function=pyruvate kinase activity; Biological process=glycolysis
  Homolog annotation: Hit_ID=B6TK43; Match level="QueryCoverage=90%, HitCoverage=14%, E-value=2e-28, Identity=84%"; Hit description =Pyruvate kinase
LGRTSGENVNCLVKNTATLAGPIFTFHVSQVHINLPTLSEYDKQVISTWGSRNSVDIISLSXHTRSAEDVREVSFLPSSANLVLD

SEQ ID NO: 127873 - protein, 51 aa, Setaria italica
  Transcript Sequence Number=SeqID_61899
  Gene Ontology: Mol. function=heat shock protein binding
  Homolog annotation: Hit_ID=Q2R8U4; Match level="QueryCoverage=92%, HitCoverage=18%, E-value=6e-10, Identity=68%"; Hit description=DNAJ heat shock N-terminal domain-containing protein, putative, expressed
FSDVLPDMVDRLGGRNMKLSDQAMTALTVDIVIIIFSVCCIIYAVFFKEQY

SEQ ID NO: 127874 - protein, 73 aa, Setaria italica
  Transcript Sequence Number=SeqID_61900
  Gene Ontology: Mol. function=pyruvate kinase activity; Biological process=glycolysis
  Homolog annotation: Hit_ID=B6TK43; Match level="QueryCoverage=98%, HitCoverage=13%, E-value=2e-34, Identity=97%"; Hit description =Pyruvate kinase
MFQKTAIHKCNLEGKPVIVTRVVDSMIDNLRPTRAEATDVANAVLDGTDGILLGAETLRGLYPVDAVSTVGKK

SEQ ID NO: 127875 - protein, 121 aa, Setaria italica
  misc_feature (14)..(14): Xaa can be any naturally occurring amino acid
  misc_feature (44)..(44): Xaa can be any naturally occurring amino acid
  Transcript Sequence Number=SeqID_61901
  Homolog annotation: Hit_ID=B6SZL5; Match level="QueryCoverage=97%, HitCoverage=24%, E-value=4e-56, Identity=88%"; Hit description=WD -repeat protein-like
PSEKHPGSLLEGFXHTQISTMAVKDNLLVAGGLQGELICKYHLXIMMQHLDREGISFCCRTTFDDNAITNALEIFNTSSGALHFIASNNDCGVREYDMERYQQYKHFRFDWPVNHTSFEDP

SEQ ID NO: 127876 - protein, 178 aa, Setaria italica
  misc_feature (132)..(132): Xaa can be any naturally occurring amino acid
  misc_feature (157)..(157): Xaa can be any naturally occurring amino acid
  Transcript Sequence Number=SeqID_61902
  Gene Ontology: Mol. function=hydrolase activity, hydrolyzing O -glycosyl compounds; Biological process=carbohydrate metabolic process
  Homolog annotation: Hit_ID=Q10P79; Match level="QueryCoverage=86%, HitCoverage=32%, E-value=6e-77, Identity=89%"; Hit description =Glycosyl hydrolase family 10 protein, expressed
  Pfam annotation: Domain name=Glyco_hydro_10; Domain location=4-177; Score=-111.0; E_value=3.6e-06; Accession=PF00331.12; Description =Glycosyl hydrolase family 10
GFGRIRPSYLFLGSNLGRYQQLVSLDRFNAAVFEDELKWYSTEPMSGLLRFDVPDQMLAFVRSHRVMVRGHNIFWENQDATPRWVKNLTADDLRSAVNTRIQSLMTRYRGEFAHWDVNNEMLHYNFYEQRLXGPNASMEFFSVAQDADPLATLFMNXYNVIETCDDPFSTVDTYVAKL

SEQ ID NO: 127877 - protein, 82 aa, Setaria italica
  Transcript Sequence Number=SeqID_61903
  Gene Ontology: Mol. function=ATPase activity, coupled to transmembrane movement of ions, phosphorylative mechanism; Cellular component=integral to membrane; Biological process=phospholipid transport
  Homolog annotation: Hit_ID=Q2R575; Match level="QueryCoverage=97%, HitCoverage=7%, E-value=2e-31, Identity=78%"; Hit description =Phospholipid-translocating P-type ATPase, flippase family protein, expressed
  Subcellular localization annotation: CTP_CleavageSite=44; ConfidenceScore=5.15e-01
RYSYNRTAFISQYSFYKSLLICFIQILFAFFSGLSGTSLFNSVSLMAYNVFYTSLPVMTIIFDKDISEATALQYPQILLHFF

SEQ ID NO: 127878 - protein, 73 aa, Setaria italica
  Transcript Sequence Number=SeqID_61904
ELISRLSTESSLLKKELELQSFYSTSQAQVTPTNNPLHPRNLSLSSSFIIHNPISNQSKLRLFPPSITNHRSP

SEQ ID NO: 127879 - protein, 56 aa, Setaria italica
  Transcript Sequence Number=SeqID_61905
SSSSFFSKLLSVESREISSQAKKCILLNYSFFLFCHSYLLLFDRYDIYFGFLRKKK

SEQ ID NO: 127880 - protein, 93 aa, Setaria italica
  misc_feature (7)..(7): Xaa can be any naturally occurring amino acid
  Transcript Sequence Number=SeqID_61906
  Gene Ontology: Mol. function=molecular_function; Cellular component =nucleus; Biological process=postreplication repair
  Homolog annotation: Hit_ID=B6SPQ9; Match level="QueryCoverage=97%, HitCoverage=13%, E-value=3e-48, Identity=97%"; Hit description=WD -repeat protein 33
  Pfam annotation: Domain name=WD40; Domain location=50-88; Score=35.6; E_value=2e-07; Accession=PF00400.24; Description=WD domain, G-beta repeat
  Pfam annotation: Domain name=WD40; Domain location=8-46; Score=26.3; E_value=0.00012; Accession=PF00400.24; Description=WD domain, G-beta repeat
  Pfam module annotation: Pfam domain module=WD40::WD40; Domain location=50-88::8-46
TLWNGQXFNFEMILQAHDQPVRSMVWSHNENWMVTGDDGGAIKYWQSNMNNVKVNKTAHRESVRGLSFSRTDLKFCSCSDDRTVKVWDFARLS

SEQ ID NO: 127881 - protein, 81 aa, Setaria italica
  Transcript Sequence Number=SeqID_61907
QKNQCTKSGLYISFQTREQQLQIILLAPAVCAIRRSIHQLHKYTPIYLVSVCLILHLPLSLSNAHHTHGQQSDSVSPCAVC

SEQ ID NO: 127882 - protein, 106 aa, Setaria italica
  Transcript Sequence Number=SeqID_61908
VSFISLLFYFILEVRADCCTAPALKSQKMYLLLDVQGNMVQMNLLHQLHITLRAEVHWQCLVSKYRLFRVLDDQAPDYSSLKQNRHHSMNRYNSGAPASTYCFCHD

SEQ ID NO: 127883 - protein, 35 aa, Setaria italica
  Transcript Sequence Number=SeqID_61909
EEQLAEDLALKRGISVGAAANLLVAGGEKDDDIIF

SEQ ID NO: 127884 - protein, 75 aa, Setaria italica
  Transcript Sequence Number=SeqID_61910
  Gene Ontology: Cellular component=integral to membrane
  Homolog annotation: Hit_ID=B6U4G5; Match level="QueryCoverage=96%, HitCoverage=24%, E-value=1e-33, Identity=95%"; Hit description=Beta -propeller domains of methanol dehydrogenase type
KEGAITGGPAFVQAVGDQILDATVSENLPVLATDEKYNEAIFSTAKRLAAAIDGLPDTGGPSFKENKRESNFLDT

SEQ ID NO: 127885 - protein, 43 aa, Setaria italica
  Transcript Sequence Number=SeqID_61911
NLEHIYRSYHKYNLIVNKFQVEILSLRGVDLPQLEMRPGVSSE

SEQ ID NO: 127886 - protein, 41 aa, Setaria italica
  Transcript Sequence Number=SeqID_61912
QKVADGLLRLILLKGPLGSCVFTGEYDRKALDETLHAFCNN

SEQ ID NO: 127887 - protein, 64 aa, Setaria italica
  Transcript Sequence Number=SeqID_61913
PSRVSRVHCIQRRNPKPRRISCCRMHEGFHLGFGFRLCILIGYIDPQGRECIVKFIPIEFCVRK

SEQ ID NO: 127888 - protein, 48 aa, Setaria italica
  Transcript Sequence Number=SeqID_61914
  Homolog annotation: Hit_ID=B6SM12; Match level="QueryCoverage=60%, HitCoverage=26%, E-value=8e-09, Identity=89%"; Hit description =Cytochrome c oxidase assembly protein COX19
MNKLASESYKSYIKIKQLFFSPVPPEKGVFPLDHLHECDFEKKDYLAC

SEQ ID NO: 127889 - protein, 119 aa, Setaria italica
  misc_feature (63)..(63): Xaa can be any naturally occurring amino acid
  Transcript Sequence Number=SeqID_61915
  Gene Ontology: Mol. function=transferase activity
  Homolog annotation: Hit_ID=B6TVD4; Match level="QueryCoverage=79%, HitCoverage=30%, E-value=7e-37, Identity=78%"; Hit description =Glutamine cyclotransferase
DGWGLATDGKVLFGSDGSSKLYQMDPKSFKVMKMVTVKYQDNEVPNINELEYIDGEVWANVWXDCIARVSPEDGQVLSWIFLHELRRNLLNSGYTVGSLFVIVPFLSRMDHQQLEQKGQ

SEQ ID NO: 127890 - protein, 77 aa, Setaria italica
  Transcript Sequence Number=SeqID_61916
  Gene Ontology: Mol. function=arginine-tRNA ligase activity; Cellular component=cytoplasm; Biological process=arginyl-tRNA aminoacylation
  Homolog annotation: Hit_ID=B9RCZ0; Match level="QueryCoverage=88%, HitCoverage=6%, E-value=1e-22, Identity=76%"; Hit description=Glycyl- tRNA synthetase 2, chloroplast/mitochondrial, putative
APMPILGQYDDSFLELPKDVLITVMQKHQKYFAVTSKSTGNLLPYFIAVANGAIKEEVVRRGNEAVLRLCKGPMIIL

SEQ ID NO: 127891 - protein, 93 aa, Setaria italica
  Transcript Sequence Number=SeqID_61917
  Gene Ontology: Mol. function=transferase activity
  Homolog annotation: Hit_ID=B6TVD4; Match level="QueryCoverage=91%, HitCoverage=26%, E-value=4e-36, Identity=85%"; Hit description =Glutamine cyclotransferase
FPTGKVLVHHQMDGDMFGEGLTLLGDRLFQVTWLKNDGFIYDRHNFTKRKSFTHKMRDGWGLATDGKVLFGSDGSSKLYQMDPKSFKGYCCCT

SEQ ID NO: 127892 - protein, 78 aa, Setaria italica
  misc_feature (3)..(3): Xaa can be any naturally occurring amino acid
  Transcript Sequence Number=SeqID_61918
MAXHYALRDGIPEEIAEALFEIALPRFSGDVFPRTDAGIVLAVADRYCARRLSPFSVYSIIDIEENNLYRVYVTSVSS

SEQ ID NO: 127893 - protein, 43 aa, Setaria italica
  Transcript Sequence Number=SeqID_61919
IVWQTDCIARVSPEDGQVLSWIFLHELRSKRLCHRRVACSVPT

SEQ ID NO: 127894 - protein, 51 aa, Setaria italica
  Transcript Sequence Number=SeqID_61920
CIARVSPEDGQVLSWIFLHELRRNLLNSGYTVGSLFVIVLFCPVVDGPFWN

SEQ ID NO: 127895 - protein, 41 aa, Setaria italica
  Transcript Sequence Number=SeqID_61921
ALILYFLLYSFLLGRGYTAPEYAIHGQLSEKVDTYSFGVVV

SEQ ID NO: 127896 - protein, 49 aa, Setaria italica
  Transcript Sequence Number=SeqID_61922
  Gene Ontology: Mol. function=protein serine/threonine kinase activity; Biological process=protein amino acid phosphorylation
  Homolog annotation: Hit_ID=Q2R4L1; Match level="QueryCoverage=77%, HitCoverage=5%, E-value=5e-11, Identity=86%"; Hit description =Protein kinase domain containing protein, expressed
FLTLVISLVSNYKPEEVKRIMEIALLCTQSAVAARPMMSEVVVLLLTRN

SEQ ID NO: 127897 - protein, 149 aa, Setaria italica
  misc_feature (99)..(99): Xaa can be any naturally occurring amino acid
  misc_feature (108)..(108): Xaa can be any naturally occurring amino acid
  misc_feature (124)..(124): Xaa can be any naturally occurring amino acid
  Transcript Sequence Number=SeqID_61923
  Gene Ontology: Mol. function=oxidoreductase activity; Cellular component=mitochondrial matrix; Biological process=response to cadmium ion
  Homolog annotation: Hit_ID=Q8LST5; Match level="QueryCoverage=93%, HitCoverage=25%, E-value=2e-65, Identity=89%"; Hit description =Mitochondrial aldehyde dehydrogenase
  Pfam annotation: Domain name=Aldedh; Domain location=1-149; Score= -255.9; E_value=1.2e-05; Accession=PF00171.14; Description=Aldehyde dehydrogenase family
RRLRRQPTTVFFNQGQCCCAGSRTFVHERVYDEFVEKSKARAQKRVVGDPFRNGVEQGPQIDEEQFKKILRYVQSGVDSGATLVAGGDRAGSRGFYIQXPTVFADAKXEMKIAREEIFGPVQTXILKFSGVEEVIRRANATQYGWRRGV

SEQ ID NO: 127898 - protein, 51 aa, Setaria italica
  Transcript Sequence Number=SeqID_61924
ADADGDGCISLPEFAALVRSADADAAAVEEDLRHAFMVFDADGNGLITRRS

SEQ ID NO: 127899 - protein, 68 aa, Setaria italica
  misc_feature (43)..(43): Xaa can be any naturally occurring amino acid
  Transcript Sequence Number=SeqID_61925
  Subcellular localization annotation: CTP_CleavageSite=45; ConfidenceScore=5.11e-01
MLFFYWHCHCILSSFSLFTATFYRIIIVFTYRKLQSRSFCNKXFQVMLLRSLELRYTCLWNLDVIPLA

SEQ ID NO: 127900 - protein, 69 aa, Setaria italica
  Transcript Sequence Number=SeqID_61926
  Gene Ontology: Mol. function=protein serine/threonine kinase activity; Cellular component=plasma membrane; Biological process =protein amino acid phosphorylation
  Homolog annotation: Hit_ID=Q7X8K7; Match level="QueryCoverage=72%, HitCoverage=5%, E-value=3e-19, Identity=80%"; Hit description=CTR1 -like kinase kinase kinase
KIRHHVFYFLISVQPYCVPGSFGEVYRGEWHGTEVAVKKFLQQDLSGDALEEFRTEVRIMKRLRHPNVV

SEQ ID NO: 127901 - protein, 65 aa, Setaria italica
  misc_feature (51)..(51): Xaa can be any naturally occurring amino acid
  Transcript Sequence Number=SeqID_61927
  Gene Ontology: Mol. function=protein serine/threonine kinase activity; Cellular component=myosin complex; Biological process =protein amino acid phosphorylation
  Homolog annotation: Hit_ID=Q8LPH3; Match level="QueryCoverage=100%, HitCoverage=6%, E-value=2e-27, Identity=87%"; Hit description=MAP kinase, putative
VRIMKRLRHPNVVLFMGAITRVPNLSIVTEFLPRGSLFRLIHRPNNQLDEXRKRLRMALDVARGM

SEQ ID NO: 127902 - protein, 35 aa, Setaria italica
  Transcript Sequence Number=SeqID_61928
IHGTPFHNFHLQITDAVVVARYLGATLVLPDIRGN

SEQ ID NO: 127903 - protein, 30 aa, Setaria italica
  Transcript Sequence Number=SeqID_61929
LSRSIFTALCCFCCYETCECCLDCLCCCCN

SEQ ID NO: 127904 - protein, 47 aa, Setaria italica
  Transcript Sequence Number=SeqID_61930
  Homolog annotation: Hit_ID=B5BSU2; Match level="QueryCoverage=72%, HitCoverage=61%, E-value=4e-11, Identity=91%"; Hit description =Cadmium tolerant 1
MYDAPSAQEMSYYDHVQRRHEEKGCLYACIFTALCCFCCYETCECCL

SEQ ID NO: 127905 - protein, 64 aa, Setaria italica
  Transcript Sequence Number=SeqID_61931
  Homolog annotation: Hit_ID=B6TEA9; Match level="QueryCoverage=60%, HitCoverage=12%, E-value=1e-13, Identity=89%"; Hit description=Phi-1- like phosphate-induced protein
MACSTASLAATLLAFALLFQACLAGRRLTALVQEPAITMKYHRGALLSGRIAVNFIWYGNFSAP

SEQ ID NO: 127906 - protein, 36 aa, Setaria italica
  Transcript Sequence Number=SeqID_61932
AAGGPGQRCQLQCQRGPRDQVPPPVGPVGIEAGTAG

SEQ ID NO: 127907 - protein, 45 aa, Setaria italica
  Transcript Sequence Number=SeqID_61933
  Homolog annotation: Hit_ID=Q0WTY4; Match level="QueryCoverage=95%, HitCoverage=19%, E-value=6e-13, Identity=88%"; Hit description =Vacuolar protein sorting-associated protein 2 homolog 2
AEEKKLVAEIKKTAKTGNEAATKILARQLVRLRQQILNLQGTQGI

SEQ ID NO: 127908 - protein, 35 aa, Setaria italica
  Transcript Sequence Number=SeqID_61934
VTLSEENKSGPLIVLLKDVEKSFTGITESLSSLLL

SEQ ID NO: 127909 - protein, 49 aa, Setaria italica
  Transcript Sequence Number=SeqID_61935
IIRDLSASVPPSRCQAFKDGMKQGIISPSDIDVTWTNNSLFQPVCLQVD

SEQ ID NO: 127910 - protein, 103 aa, Setaria italica
  misc_feature (7)..(7): Xaa can be any naturally occurring amino acid
  misc_feature (16)..(16): Xaa can be any naturally occurring amino acid
  misc_feature (75)..(75): Xaa can be any naturally occurring amino acid
  Transcript Sequence Number=SeqID_61936
  Gene Ontology: Mol. function=nucleoside-triphosphatase activity
  Homolog annotation: Hit_ID=Q2R029; Match level="QueryCoverage=97%, HitCoverage=14%, E-value=1e-46, Identity=92%"; Hit description=AAA -type ATPase family protein, putative, expressed
  Pfam annotation: Domain name=AAA; Domain location=1-101; Score=-39.2; E_value=0.069; Accession=PF00004.21; Description=ATPase family associated with various cellular activities (AAA)
RRENPGXHEAMRKMKXEFMVNWDGLRTKDKERVLVLGATNRPFDLDEAVIRRFPRRLMVNLPDASNREKILKVIXLAKEELGPDVDLDSLANMTDGYSGSRTL

SEQ ID NO: 127911 - protein, 46 aa, Setaria italica
  Transcript Sequence Number=SeqID_61937
  Gene Ontology: Mol. function=nucleoside-triphosphatase activity
  Homolog annotation: Hit_ID=Q2R029; Match level="QueryCoverage=91%, HitCoverage=6%, E-value=5e-17, Identity=97%"; Hit description=AAA -type ATPase family protein, putative, expressed
HPSEALENVKDTLKELVMLPLQGPELFCKGQLTKPCKGILLFGPPG

SEQ ID NO: 127912 - protein, 94 aa, Setaria italica
  Transcript Sequence Number=SeqID_61938
  Gene Ontology: Mol. function=nucleoside-triphosphatase activity
  Homolog annotation: Hit_ID=Q2R029; Match level="QueryCoverage=82%, HitCoverage=11%, E-value=3e-35, Identity=93%"; Hit description=AAA -type ATPase family protein, putative, expressed
ELSLTNLTKEGPRLDNQTSSVNADIVGTSTLHSASLPKQESSTATSKSYTFREGDRVRYVGPAQPTSLSQRGPSYGYRGRVMLAFEDNGSSKIG

SEQ ID NO: 127913 - protein, 132 aa, Setaria italica
  Transcript Sequence Number=SeqID_61939
  Gene Ontology: Mol. function=sequence-specific DNA binding; Cellular component=nucleus; Biological process=regulation of transcription, DNA-dependent
  Homolog annotation: Hit_ID=B3GAU7; Match level="QueryCoverage=93%, HitCoverage=20%, E-value=4e-42, Identity=66%"; Hit description =WRKY17 transcription factor
  Pfam annotation: Domain name=WRKY; Domain location=18-67; Score=64.5; E_value=4e-16; Accession=PF03106.7; Description=WRKY DNA -binding domain
FVCYSFLLRDDTLGSTFICDIFASVLDCRSYYKCTHMGCPVRKHVERASHDPKSVITTYEGKHNHEVPASRNASHEMSTAPMKPAVHPINSNMPGLGGMMRACDARAFTNQYSQAAESDTISLDLGVGYSSP

SEQ ID NO: 127914 - protein, 95 aa, Setaria italica
  misc_feature (69)..(69): Xaa can be any naturally occurring amino acid
  Transcript Sequence Number=SeqID_61940
  Gene Ontology: Mol. function=sequence-specific DNA binding; Cellular component=nucleus; Biological process=regulation of transcription, DNA-dependent
  Homolog annotation: Hit_ID=B3GAU7; Match level="QueryCoverage=100%, HitCoverage=42%, E-value=7e-39, Identity=72%"; Hit description =WRKY17 transcription factor
  Pfam annotation: Domain name=WRKY; Domain location=5-64; Score=155.5; E_value=1.6e-43; Accession=PF03106.7; Description=WRKY DNA -binding domain
KLIILDDGYRWRKYGQKVVKGNPNPRSYYKCTHMGCPVRKHVERASHDPKSVITTYEGKHNHEVPASRXNASHEMSTAPMKPAVHPINSNMARAL

SEQ ID NO: 127915 - protein, 63 aa, Setaria italica
  misc_feature (17)..(17): Xaa can be any naturally occurring amino acid
  Transcript Sequence Number=SeqID_61941
  Homolog annotation: Hit_ID=B3GAU7; Match level="QueryCoverage=98%, HitCoverage=10%, E-value=5e-19, Identity=73%"; Hit description =WRKY17 transcription factor
RRASHDPKSVITTYEGXHNHEVPASRNASHEMSTAPMKPAVHPINSNMPGLGGMMRACDAKGL

SEQ ID NO: 127916 - protein, 80 aa, Setaria italica
  Transcript Sequence Number=SeqID_61942
  Homolog annotation: Hit_ID=B3GAU7; Match level="QueryCoverage=76%, HitCoverage=9%, E-value=2e-15, Identity=76%"; Hit description=WRKY17 transcription factor
CFSFSFFFLTTHGLKRPCLVEPSPTTGTLSMAAILNKSTHLDILPSPRDKSAGSGHEDGGSRDFEFKPHLNSQSVAPAVN

SEQ ID NO: 127917 - protein, 99 aa, Setaria italica
  misc_feature (55)..(55): Xaa can be any naturally occurring amino acid
  Transcript Sequence Number=SeqID_61943
  Gene Ontology: Mol. function=RNA polymerase II transcription factor activity; Cellular component=transcription factor TFIIE complex; Biological process=transcription initiation from RNA polymerase II promoter
  Homolog annotation: Hit_ID=B9RC71; Match level="QueryCoverage=98%, HitCoverage=34%, E-value=5e-35, Identity=69%"; Hit description =Transcription initiation factor IIE subunit beta, putative
MTGTSPAVPARPSKPIKFSNDTERLQHINSIRKSPVGAQMKLVIELLYKTRQAFXAEQINEATYVDIHGNKNVFNSLRNNPKIQYDGRRFSYKSKHDLN

SEQ ID NO: 127918 - protein, 100 aa, Setaria italica
  misc_feature (13)..(13): Xaa can be any naturally occurring amino acid
  Transcript Sequence Number=SeqID_61944
  Gene Ontology: Mol. function=RNA polymerase II transcription factor activity; Cellular component=transcription factor TFIIE complex; Biological process=transcription initiation from RNA polymerase II promoter
  Homolog annotation: Hit_ID=B9RC71; Match level="QueryCoverage=88%, HitCoverage=31%, E-value=2e-33, Identity=76%"; Hit description =Transcription initiation factor IIE subunit beta, putative
SAPARPSQPIKFXNDTERLQHINSIRKSPVGAQMKLVIELLYKTRQAFTAEQINEATYVDIHGNKAVFDSLRNNPKVSYDGRRFSYKSKHCILVRVKVIS

SEQ ID NO: 127919 - protein, 34 aa, Setaria italica
  Transcript Sequence Number=SeqID_61945
MDLKDSLSRFKQQQERCQSSLASIALTSKPKHRA

SEQ ID NO: 127920 - protein, 57 aa, Setaria italica
  misc_feature (57)..(57): Xaa can be any naturally occurring amino acid
  Transcript Sequence Number=SeqID_61946
YLRSGRRFWKREAEALSPSSAAKFAGTSRRTVFADRRLLPRQGAKACTLTLSLSLLX

SEQ ID NO: 127921 - protein, 32 aa, Setaria italica
  Transcript Sequence Number=SeqID_61947
MDLKDSLSRFKQQQERCQSSLASIALTSKPKH

SEQ ID NO: 127922 - protein, 48 aa, Setaria italica
  Transcript Sequence Number=SeqID_61948
  Gene Ontology: Mol. function=RNA polymerase II transcription factor activity; Cellular component=transcription factor TFIIE complex; Biological process=transcription initiation from RNA polymerase II promoter
  Homolog annotation: Hit_ID=B9RC71; Match level="QueryCoverage=100%, HitCoverage=17%, E-value=3e-11, Identity=64%"; Hit description =Transcription initiation factor IIE subunit beta, putative
VFVQERFPEGLAVVEVKDAYPNVLEDLQALKASGEVWLLSNMDSQEDI

SEQ ID NO: 127923 - protein, 59 aa, Setaria italica
  misc_feature (32)..(32): Xaa can be any naturally occurring amino acid
  Transcript Sequence Number=SeqID_61949
  Gene Ontology: Mol. function=RNA polymerase II transcription factor activity; Cellular component=transcription factor TFIIE complex; Biological process=transcription initiation from RNA polymerase II promoter
  Homolog annotation: Hit_ID=B9RC71; Match level="QueryCoverage=89%, HitCoverage=18%, E-value=1e-15, Identity=77%"; Hit description =Transcription initiation factor IIE subunit beta, putative
LSNMDSQEDIVYPNDPKAKIKVDDDLKQLFRXIELPRDMVDMEKELQKNGFNPMYQLLV

SEQ ID NO: 127924 - protein, 55 aa, Setaria italica
  misc_feature (14)..(14): Xaa can be any naturally occurring amino acid
  Transcript Sequence Number=SeqID_61950
PLCALAVSFLGFFXFFVYTIWENCFSRPLATLHHYMALKNMNINVTTELPLLSFL

SEQ ID NO: 127925 - protein, 29 aa, Setaria italica
  Transcript Sequence Number=SeqID_61951
RPLATLHHYMALKNMNINVTTELPLLSFL

SEQ ID NO: 127926 - protein, 64 aa, Setaria italica
  misc_feature (9)..(9): Xaa can be any naturally occurring amino acid
  misc_feature (58)..(58): Xaa can be any naturally occurring amino acid
  Transcript Sequence Number=SeqID_61952
  Gene Ontology: Mol. function=transposase activity; Biological process= transposition, DNA-mediated
  Homolog annotation: Hit_ID=Q3EBY6; Match level="QueryCoverage=100%, HitCoverage=16%, E-value=5e-16, Identity=64%"; Hit description=Mca2
YTCCVRRKXLRQKLDIAGGCCDDFLSHLLCCCCALVQEWREVEIRGAYGEKTKTTPPXCQYMEH

SEQ ID NO: 127927 - protein, 63 aa, Setaria italica
  Transcript Sequence Number=SeqID_61953
DADLFLLIPDYMKPDTESYNWVIQAFTRASSYDRYIFTSIYNSVVIHYLFDSFCWSCLIEPSS

SEQ ID NO: 127928 - protein, 152 aa, Setaria italica
  misc_feature (15)..(15): Xaa can be any naturally occurring amino acid
  misc_feature (90)..(90): Xaa can be any naturally occurring amino acid
  Transcript Sequence Number=SeqID_61954
  Gene Ontology: Mol. function=nucleic acid binding; Cellular component= chloroplast
  Homolog annotation: Hit_ID=Q8H902; Match level="QueryCoverage=51%, HitCoverage=8%, E-value=3e-22, Identity=73%"; Hit description =Putative DNA binding domain containing protein
  Pfam annotation: Domain name=SAP; Domain location=15-49; Score=45.2; E_value=2.5e-10; Accession=PF02037.19; Description=SAP domain
VVGPKKNVAKPKAAXSKMVVSELKTELEAQGLPTDGTRQVLYQRVQKARRINRSRGIPLWVPPVEDEEEVDEGLDELISRIKLEDGNTEXFWKRRFQFAQQPLHHLSHLLLLLLWIRRHLHRRRHHPIHHLNLDHLHYYLLHKDSFESLPEN

SEQ ID NO: 127929 - protein, 88 aa, Setaria italica
  Transcript Sequence Number=SeqID_61955
FGRWLEEWGLLVVIGEGREWHEESCGGRRLVLELVEPRSVLDCTLSHSPNNSKSTLSSSLGGGAADSTGVAAVSDSSASAATEAHRGD

SEQ ID NO: 127930 - protein, 60 aa, Setaria italica
  Transcript Sequence Number=SeqID_61956
  Homolog annotation: Hit_ID=Q6H6L3; Match level="QueryCoverage=100%, HitCoverage=8%, E-value=1e-23, Identity=90%"; Hit description=Scl1 protein
PAELISTTGDEVVAVVLPVGCSARAPPLPAILRLVKQLGPKIVIAIDHGGDRADLPFSQH

SEQ ID NO: 127931 - protein, 82 aa, Setaria italica
  Transcript Sequence Number=SeqID_61957
  Subcellular localization annotation: CTP_CleavageSite=70; ConfidenceScore=5.51e-01
VPASLPPPRTTVQRQPKPRTDSRAPVTSQSIPRSIGPPPDTPSSKILSPPHPGRSYTSGRRHHLPPRRTRTSHRRTLGRRPP

SEQ ID NO: 127932 - protein, 75 aa, Setaria italica
  misc_feature (55)..(55): Xaa can be any naturally occurring amino acid
  Transcript Sequence Number=SeqID_61958
KPSGSSEKGNLDNLVKAIAGVTMSSNSESAKPSKVAKRRQKKAKEEAAREQRIQXEEQSNLVSRPHARKTISYES

SEQ ID NO: 127933 - protein, 82 aa, Setaria italica
  Transcript Sequence Number=SeqID_61959
  Gene Ontology: Mol. function=nucleotide binding; Cellular component =myosin complex
  Homolog annotation: Hit_ID=Q70AI6; Match level="QueryCoverage=82%, HitCoverage=37%, E-value=4e-22, Identity=73%"; Hit description =Putative myosin heavy chain class VIII A1 protein (Fragment)
VLQQLNIPPEMYQVGYTKLFFRTGQVAALENAKKQMLHGTLCIQKHFRGLHSRQGYQGLKKGAVTLQSCNTLYMHFFHSKYS

SEQ ID NO: 127934 - protein, 77 aa, Setaria italica
  Transcript Sequence Number=SeqID_61960
  Gene Ontology: Mol. function=nucleotide binding; Cellular component =myosin complex
  Homolog annotation: Hit_ID=Q9SNF0; Match level="QueryCoverage=68%, HitCoverage=4%, E-value=7e-12, Identity=64%"; Hit description=Myosin
NGHYPQQPVIKELEGRISKTEAALRDKEEENVMLKQQLEQYERKWSEYEAKMKSMEEAWKRQLSSLQSLASDDVAAR

SEQ ID NO: 127935 - protein, 53 aa, Setaria italica
  Transcript Sequence Number=SeqID_61961
MRYTFEHFLTVHILQCWCRISICSWWIICTNYPSISLVYHSTYTMTYIHGQLR

SEQ ID NO: 127936 - protein, 76 aa, Setaria italica
  Transcript Sequence Number=SeqID_61962
  Gene Ontology: Mol. function=nucleotide binding; Cellular component =myosin complex
  Homolog annotation: Hit_ID=B9SCN9; Match level="QueryCoverage=71%, HitCoverage=4%, E-value=1e-12, Identity=64%"; Hit description=Myosin vIII, putative
NEGLATAAKLLGCTANQLVTAMCTRKIRAGNDSIVKKLTLTQAIDARDALAKSILLLLLYFVLGICLLVKLTYSSW

SEQ ID NO: 127937 - protein, 114 aa, Setaria italica
  Transcript Sequence Number=SeqID_61963
  Subcellular localization annotation: CTP_CleavageSite=59; ConfidenceScore=5.53e-01
NLGASVQVPSSQGEITAASRLCLKSNGSSNSSSKSLTTTLHCFCYIYHSFRRFVNCIAYAFIDGCTSLFGREAADAVLTDHILVENIHLCNCLAVLQSENFKSKMYCVCIRADL

SEQ ID NO: 127938 - protein, 94 aa, Setaria italica
  misc_feature (71)..(71): Xaa can be any naturally occurring amino acid
  Transcript Sequence Number=SeqID_61964
  Gene Ontology: Mol. function=nucleic acid binding; Cellular component= nucleus
  Homolog annotation: Hit_ID=B6TK84; Match level="QueryCoverage=92%, HitCoverage=80%, E-value=7e-39, Identity=54%"; Hit description=Zinc finger CCCH type domain-containing protein ZFN-like 2
  Pfam annotation: Domain name=zf-CCCH; Domain location=28-54; Score =46.3; E_value=1.2e-10; Accession=PF00642.16; Description=Zinc finger C-x8-C-x5-C-x3-H type (and similar)
  Pfam annotation: Domain name=zf-CCCH; Domain location=55-80; Score =35.2; E_value=2.5e-07; Accession=PF00642.16; Description=Zinc finger C-x8-C-x5-C-x3-H type (and similar)
  Pfam module annotation: Pfam domain module=zf-CCCH::zf-CCCH; Domain location=28-54::55-80
NNNPNKNTSSFPVPQYALQRENVFPERPDQPECQYYMKTGDCKFGAVCKFHHPRGEELCKFYSRYGICKFXANCKFDHPMTAPMGVYAYGFSAS

SEQ ID NO: 127939 - protein, 127 aa, Setaria italica
  misc_feature (83)..(83): Xaa can be any naturally occurring amino acid
  misc_feature (114)..(114): Xaa can be any naturally occurring amino acid
  misc_feature (122)..(122): Xaa can be any naturally occurring amino acid
  Transcript Sequence Number=SeqID_61965
  Gene Ontology: Mol. function=serine-type carboxypeptidase activity; Cellular component=extracellular region; Biological process =proteolysis
  Homolog annotation: Hit_ID=B6U5K7; Match level="QueryCoverage=100%, HitCoverage=26%, E-value=2e-59, Identity=82%"; Hit description =Serine carboxypeptidase F13S12.6
PYCSYFLGSHGMISDEIFLAISHSCDFEDYTFNDPHNESKSCNDAISEANTIVGQYVNNYDVILDVCYPSIVMQELRLRKICXRKISVGVDVCMTYERFFYFNLPEVQQALHAXNRTHLKYXWGMCS

SEQ ID NO: 127940 - protein, 88 aa, Setaria italica
  misc_feature (49)..(49): Xaa can be any naturally occurring amino acid
  Transcript Sequence Number=SeqID_61966
  Gene Ontology: Mol. function=sterol 24-C-methyltransferase activity; Cellular component=vacuole; Biological process=metabolic process
  Homolog annotation: Hit_ID=O49215; Match level="QueryCoverage=100%, HitCoverage=51%, E-value=4e-25, Identity=93%"; Hit description=(S) -adenosyl-L-methionine:delta 24-sterol methyltransferase
RQCLQVKDAGFEVVWDKDLAEDSPLPWYLPLDPGMKVLDVGCGIGGPLXEIARFSSTSVTGLNNNEYQITRGKELNRLAGVSGTCDFV

SEQ ID NO: 127941 - protein, 37 aa, Setaria italica
  Transcript Sequence Number=SeqID_61967
  Gene Ontology: Mol. function=sterol 24-C-methyltransferase activity
  Homolog annotation: Hit_ID=O49215; Match level="QueryCoverage=100%, HitCoverage=10%, E-value=7e-11, Identity=91%"; Hit description=(S) -adenosyl-L-methionine:delta 24-sterol methyltransferase
MSKSGTLDLASGLGGKIDKEEVKSAVDEYEKYHGYYG

SEQ ID NO: 127942 - protein, 77 aa, Setaria italica
  Transcript Sequence Number=SeqID_61968
  Gene Ontology: Mol. function=sterol 24-C-methyltransferase activity; Cellular component=vacuole; Biological process=metabolic process
  Homolog annotation: Hit_ID=Q6ZIX2; Match level="QueryCoverage=80%, HitCoverage=18%, E-value=8e-19, Identity=75%"; Hit description =Cycloartenol-C-24-methyltransferase 1
YPLCALPIPFCVSHDKEEVKSAVDEYEKYHGYYGGKEEARKSNYTDMVNKYYDLATSFYEYGWGESFHFAHRWNGES

SEQ ID NO: 127943 - protein, 67 aa, Setaria italica
  misc_feature (1)..(8): Xaa can be any naturally occurring amino acid
  Transcript Sequence Number=SeqID_61969
XXXXXXXXNHHPKLFQHLLHQSKVVVYRHLFQHLLDQSKESCTGTYFVLLSLGQEKGIQTVSPRTAK

SEQ ID NO: 127944 - protein, 57 aa, Setaria italica
  Transcript Sequence Number=SeqID_61970
QLQTMLSVLVSMKEYDGFYFATPSYSFILISLPVSSCLPLLGNALNVWQLQTMLSVL

SEQ ID NO: 127945 - protein, 111 aa, Setaria italica
  misc_feature (11)..(11): Xaa can be any naturally occurring amino acid
  Transcript Sequence Number=SeqID_61971
  Gene Ontology: Mol. function=D-alanine-D-alanine ligase activity; Cellular component=cell wall; Biological process=peptidoglycan biosynthetic process
  Homolog annotation: Hit_ID=Q9SR84; Match level="QueryCoverage=97%, HitCoverage=20%, E-value=3e-30, Identity=58%"; Hit description =T16O11.23 protein
CTRFLTVPNFXVEKDKLAKRELEAWFQNHKFEQENGKVIVKPTRAGSSIGVVVAYGVNDAAQKAEEIISEGIDDRVIVEVFLEGGTEFTAIVVDVGAANNSEPVVLLPTEV

SEQ ID NO: 127946 - protein, 83 aa, Setaria italica
  Transcript Sequence Number=SeqID_61972
  Gene Ontology: Mol. function=D-alanine-D-alanine ligase activity; Cellular component=cell wall
  Homolog annotation: Hit_ID=B9T6C3; Match level="QueryCoverage=74%, HitCoverage=6%, E-value=4e-19, Identity=67%"; Hit description=D -alanine-D-alanine ligase, putative
  Pfam annotation: Domain name=Dala_Dala_lig_N; Domain location=16-76; Score=-49.3; E_value=0.044; Accession=PF01820.13; Description=D-ala D-ala ligase N-terminus
QPSKQAESIQKGTSRQKVFVIFGGDTSERQVSLMSGTNVWLNLQGFDDLDVTPCFLAPANGYFNSFWFSCLNTCSMNFFSGMS

SEQ ID NO: 127947 - protein, 115 aa, Setaria italica
  misc_feature (102)..(102): Xaa can be any naturally occurring amino acid
  Transcript Sequence Number=SeqID_61973
  Gene Ontology: Mol. function=D-alanine-D-alanine ligase activity; Cellular component=cell wall
  Homolog annotation: Hit_ID=UPI000034F03C; Match level="QueryCoverage =87%, HitCoverage=10%, E-value=1e-25, Identity=56%"; Hit description =D-alanine--D-alanine ligase family
FTTYPIEPKNFSDISREVWMLPYSLVLRHTTEEVHAACVEATEPERVEITSRLREQVMNELGPALSKHDWFAGFDIAYEQPIKYSLQQWINHAKEAGAVVFXAVHGGIGEDGTIQ

SEQ ID NO: 127948 - protein, 29 aa, Setaria italica
  Transcript Sequence Number=SeqID_61974
CLDLVVSCYYIDSGMNAFAISPAQLYSNT

SEQ ID NO: 127949 - protein, 81 aa, Setaria italica
  Transcript Sequence Number=SeqID_61975
  Gene Ontology: Mol. function=electron carrier activity; Cellular component=membrane; Biological process=oxidation reduction
  Homolog annotation: Hit_ID=C4PJN6; Match level="QueryCoverage=98%, HitCoverage=14%, E-value=4e-32, Identity=82%"; Hit description =Cytochrome P450 monooxygenase
FTLSSVVYLVAKHPEVEEKLLREIDAFGPRDSVPTADDLQTKFPYLDQVVKESMRFFMVSPLVARETSERVEIGGYVLPKG

SEQ ID NO: 127950 - protein, 111 aa, Setaria italica
  Transcript Sequence Number=SeqID_61976
  Gene Ontology: Mol. function=alpha-amylase activity; Cellular component=chloroplast; Biological process=carbohydrate metabolic process
  Homolog annotation: Hit_ID=Q5BLY3; Match level="QueryCoverage=92%, HitCoverage=12%, E-value=7e-15, Identity=40%"; Hit description =Plastid alpha-amylase
VTKPKYYLVVWPGDLGHLKKHEGSNAQPQETIPGGTGLSGKHISGFYQEFQIIKSEYTQNFVTVTVKRDNETHKRLVEFDTDIPGEVVIHWGVCKDNSMTWEIPPEPHPPT

SEQ ID NO: 127951 - protein, 49 aa, Setaria italica
  Transcript Sequence Number=SeqID_61977
YSRTFDMIQNYLLCRHIAHSFSSVVLICTSDMPPLCWSYVRSYTFSQRQ

SEQ ID NO: 127952 - protein, 85 aa, Setaria italica
  Transcript Sequence Number=SeqID_61978
LKELTTIPYTTVSFHPISNHQANYKEQSSPDTLSRWLTDSRHTILEINHRHKVPKLFFGVTMDAQELLLLDPEMASKHFFRRMSP

SEQ ID NO: 127953 - protein, 69 aa, Setaria italica
  Transcript Sequence Number=SeqID_61979
  Gene Ontology: Mol. function=protein tyrosine kinase activity; Cellular component=plasma membrane; Biological process=protein amino acid phosphorylation
  Homolog annotation: Hit_ID=B6T9Q6; Match level="QueryCoverage=86%, HitCoverage=12%, E-value=1e-23, Identity=88%"; Hit description =Protein kinase APK1B
CLNLLQTPSYELMDIPRGGASSIQSLTLSPLAEACSRKDLTAIHEILEKTGYKDDEGTANELSFSSIVG

SEQ ID NO: 127954 - protein, 86 aa, Setaria italica
  Transcript Sequence Number=SeqID_61980
LISCLRYLFTFGCLCHLFQGLSVVAFFHIYILHEVYGRDDFPNAQNLKKVNQPLAKLTNHQHLLPYTIIGPHNTVHEGRIYQLKLF

SEQ ID NO: 127955 - protein, 73 aa, Setaria italica
  misc_feature (67)..(67): Xaa can be any naturally occurring amino acid
  misc_feature (70)..(70): Xaa can be any naturally occurring amino acid
  Transcript Sequence Number=SeqID_61981
GIIPIRSKRIGIAKLQIMVHNKMVPSILVGTIIQYSSIYILLSFIFTSGSLRKFEHCLRIYCSAVLXMEXRYL

SEQ ID NO: 127956 - protein, 43 aa, Setaria italica
  Transcript Sequence Number=SeqID_61982
MQHYFSYFLQEVVCSYFGKACLVSSCIIYILPPACLAEPCEQE

SEQ ID NO: 127957 - protein, 74 aa, Setaria italica
  misc_feature (57)..(57): Xaa can be any naturally occurring amino acid
  Transcript Sequence Number=SeqID_61983
FVWSCRSVLHSQAHGRPSLRSLVIAWNKMLQKELDHTPTVKTDAAAAFLASLEDPKXLTSLGETEKKPPIEILP

SEQ ID NO: 127958 - protein, 79 aa, Setaria italica
  Transcript Sequence Number=SeqID_61984
  Homolog annotation: Hit_ID=A2Q1S0; Match level="QueryCoverage=98%, HitCoverage=73%, E-value=1e-28, Identity=78%"; Hit description=WD40 -like, putative
VKQVSFYDDDVRFWQHWRNCSAAAEAPTAVNQQASTFSAPAPSTRGRHFVVICCENKVIFLDLVTMRGRDVPKQELDNR

SEQ ID NO: 127959 - protein, 59 aa, Setaria italica
  Transcript Sequence Number=SeqID_61985
  Homolog annotation: Hit_ID=Q2HV05; Match level="QueryCoverage=77%, HitCoverage=4%, E-value=1e-17, Identity=91%"; Hit description =Peptidase S8 and S53, subtilisin, kexin, sedolisin; WD40-like
HVGWLILFFICVFVKAHDGGVVAVELSRVMGSAPQLITIGADKTLAIWDTVTFKEIRRI

SEQ ID NO: 127960 - protein, 50 aa, Setaria italica
  Transcript Sequence Number=SeqID_61986
LPTALPPIEILPPGMPPLSAPPIVIKKSATKPDLPNAAPASNGPIGAPMV

SEQ ID NO: 127961 - protein, 39 aa, Setaria italica
  Transcript Sequence Number=SeqID_61987
SLVIAWNKMLQKELDHTPTVKTDAAAAFLASLEDPKLTR

SEQ ID NO: 127962 - protein, 66 aa, Setaria italica
  misc_feature (2)..(2): Xaa can be any naturally occurring amino acid
  Transcript Sequence Number=SeqID_61988
SXKGGTYSGEMKSTNAKTFPETDCNQEDSKMRLDEERPRKNSGNQIQPSSSRHRPASNPIPKEPNK

SEQ ID NO: 127963 - protein, 120 aa, Setaria italica
  Transcript Sequence Number=SeqID_61989
  Gene Ontology: Mol. function=nucleotide binding; Cellular component =cytoskeleton; Biological process=cell division
  Homolog annotation: Hit_ID=Q39828; Match level="QueryCoverage=96%, HitCoverage=19%, E-value=3e-55, Identity=85%"; Hit description =Dynamin-related protein 5A
  Pfam annotation: Domain name=GED; Domain location=43-117; Score=71.6; E_value=2.8e-18; Accession=PF02212.10; Description=Dynamin GTPase effector domain
ESKKNTLKLVDMECSYLTVDFFRKLPQDVEKGGNPSHSIFDRYNDSYLRRIGQTVLSYVNMVCATLRNSIPKSIVYCQVREAKRSLLDHFFTELGAREMKQLSKLLDEDPAVMETKETKP

SEQ ID NO: 127964 - protein, 80 aa, Setaria italica
  Transcript Sequence Number=SeqID_61990
  Gene Ontology: Mol. function=nucleotide binding; Cellular component =cytoskeleton; Biological process=cell division
  Homolog annotation: Hit_ID=Q6I614; Match level="QueryCoverage=100%, HitCoverage=14%, E-value=2e-36, Identity=93%"; Hit description =Putative dynamin
PRKRYTDFAAVRKEIADETDRETGRSKQISPVPIHLSIYSPYVVNLTLIDLPGLTKVAVEGQPDSIVQDIENMVRSYIEK

SEQ ID NO: 127965 - protein, 74 aa, Setaria italica
  misc_feature (6)..(6): Xaa can be any naturally occurring amino acid
  Transcript Sequence Number=SeqID_61991
  Gene Ontology: Mol. function=nucleotide binding; Cellular component =cytoskeleton; Biological process=cell division
  Homolog annotation: Hit_ID=Q6S8F2; Match level="QueryCoverage=100%, HitCoverage=66%, E-value=1e-29, Identity=86%"; Hit description =Putative phragmoplastin 5 (Fragment)
  Pfam annotation: Domain name=GED; Domain location=1-70; Score=51.4; E_ value=3.4e-12; Accession=PF02212.10; Description=Dynamin GTPase effector domain
NSIPKXSIVYCQVREAKRSLLDHFFTELGAREMKQLSKLLDEDPAVMERRTNLAKRLELYRSAQAEIDAVAWSK

SEQ ID NO: 127966 - protein, 56 aa, Setaria italica
  Transcript Sequence Number=SeqID_61992
SNDLQGLFHQQSCSVRSIKYFLHPSQNIATFRFVLSQTILALTKSIYKHMKTYVPK

SEQ ID NO: 127967 - protein, 59 aa, Setaria italica
  Transcript Sequence Number=SeqID_61993
GCMVDLFSRAGLIHSTCLQFHGELSNRVFFVEHQTLWLHGGPFQQSEGLFTVLMNSLAL

SEQ ID NO: 127968 - protein, 47 aa, Setaria italica
  Transcript Sequence Number=SeqID_61994
CNDTQLSCVFEKNYHEVTTIGFSKMTDNVSLRIILAPSSSKNHKMPK

SEQ ID NO: 127969 - protein, 109 aa, Setaria italica
  Transcript Sequence Number=SeqID_61995
  Gene Ontology: Mol. function=endonuclease activity; Cellular component=nucleus; Biological process=response to DNA damage stimulus
  Homolog annotation: Hit_ID=Q60GC1; Match level="QueryCoverage=72%, HitCoverage=9%, E-value=2e-29, Identity=77%"; Hit description =Exonuclease 1
ETYAGRDTDDLDDANIRTEGRFGCNVSHVNMYSGIAEKSMDKFAALVSSFRYPGSRASGLRAPLKDVKNTLSVRSILRAPEKRQIQMRIKEIRSRPPSRSRYTSDNKET

SEQ ID NO: 127970 - protein, 89 aa, Setaria italica
  Transcript Sequence Number=SeqID_61996
  Subcellular localization annotation: CTP_CleavageSite=76; ConfidenceScore=5.98e-01
SASSSAGASAVASTSVFASTSTASSASTFSNPFGSSSSPPSTFTFGQSASSSGGFAFGAQPAPTFSSQPSVFSFTSANTGIKLRSYFRS

SEQ ID NO: 127971 - protein, 49 aa, Setaria italica
  misc_feature (19)..(19): Xaa can be any naturally occurring amino acid
  Transcript Sequence Number=SeqID_61997
QQAAQQNPSFPAAGSLEFXGGNFSLGSGGGGGDKSNRRMIKVKRAPKKR

SEQ ID NO: 127972 - protein, 70 aa, Setaria italica
  misc_feature (67)..(67): Xaa can be any naturally occurring amino acid
  Transcript Sequence Number=SeqID_61998
  Subcellular localization annotation: CTP_CleavageSite=57; ConfidenceScore=5.53e-01
STILFGLVLASYLLQPSAASTFFGSKPTQSEGTIQQPSQSPKPQFGSPFPSVTPGVGASSSGSGTLXFGI

SEQ ID NO: 127973 - protein, 62 aa, Setaria italica
  Transcript Sequence Number=SeqID_61999
NGKNIAATSDDKALSEVEHLLMRKTFTRVEFDRLTDLLRARTIEPDPPTSILISSFFSSRET

SEQ ID NO: 127974 - protein, 55 aa, Setaria italica
  Transcript Sequence Number=SeqID_62000
RGLERSLVQVVAYLMISGMSAAAPVTDYMRQKADNLFTDSAAAAISMAFFAFVAI

SEQ ID NO: 127975 - protein, 95 aa, Setaria italica
  misc_feature (59)..(59): Xaa can be any naturally occurring amino acid
  Transcript Sequence Number=SeqID_62001
  Gene Ontology: Mol. function=actin binding; Cellular component =cytoskeleton
  Homolog annotation: Hit_ID=Q84TX2; Match level="QueryCoverage=95%, HitCoverage=4%, E-value=1e-19, Identity=56%"; Hit description=SCAR -like protein 1
MASEDYRHDEYNLERENRHPPSNPGPLVAWPGDKNNFFSGLDEASFAHAEQPPVMGWTXVGPQMIHPKYGISAEESQFEPNITDNHLIKKPISIK

SEQ ID NO: 127976 - protein, 53 aa, Setaria italica
  Transcript Sequence Number=SeqID_62002
LCHLAASVDLSFSDAPGCMESTSTKGPDYENSFYQQPQHVESFSKTSDYGEHI

SEQ ID NO: 127977 - protein, 108 aa, Setaria italica
  misc_feature (8)..(8): Xaa can be any naturally occurring amino acid
  Transcript Sequence Number=SeqID_62003
  Gene Ontology: Mol. function=actin binding; Cellular component =cytoskeleton
  Homolog annotation: Hit_ID=Q84TX2; Match level="QueryCoverage=83%, HitCoverage=4%, E-value=7e-11, Identity=46%"; Hit description=SCAR -like protein 1
EDCKLDGXPLSNAAMLDQESEVCVPSGLDSRIALCSSTDENVHELDHPPLSSSVLINPESEDHVLGDTSSKVTMCSLVEDKIDESEDPQPNHNFPEKGLHRAMAGWNQ

SEQ ID NO: 127978 - protein, 89 aa, Setaria italica
  Transcript Sequence Number=SeqID_62004
TSEKDDSLMGKPVLVQESEVFAFGEFDSPIVPLSSIDDIEDNQDSASRTYVQTEQESECCTSGELDSTNHYQYPFRLRIEERIKKQKLR

SEQ ID NO: 127979 - protein, 60 aa, Setaria italica
  Transcript Sequence Number=SeqID_62005
RSHDVLFHLLLFLRFYTKCVGNIVKMVSSLMKLVSSHFINNIPCHKISYMAAYLLPIKPH

SEQ ID NO: 127980 - protein, 60 aa, Setaria italica
  Transcript Sequence Number=SeqID_62006
  Gene Ontology: Mol. function=Rab GTPase activator activity; Cellular component=intracellular
  Homolog annotation: Hit_ID=Q70AJ0; Match level="QueryCoverage=86%, HitCoverage=40%, E-value=1e-18, Identity=88%"; Hit description =Putative microtubule-associated protein (Fragment)
MRITLCVCNLQVIESAFQQDRGQPSAMENFSNNILGGKGQVTAMAALTELRKISNLLREM

SEQ ID NO: 127981 - protein, 114 aa, Setaria italica
  Transcript Sequence Number=SeqID_62007
  Gene Ontology: Mol. function=Rab GTPase activator activity; Cellular component=intracellular
MQVSPVIISAKNSVRRCLLNSYDDVVRAGEVAGKIEQDEFPISIHKERERPSRLKLRAASENLTLSSSVETANPLVDSPVKPTDESSIKGIEACSTGENSPVFYAASAGTEQDN

SEQ ID NO: 127982 - protein, 90 aa, Setaria italica
  misc_feature (69)..(69): Xaa can be any naturally occurring amino acid
  Transcript Sequence Number=SeqID_62008
  Gene Ontology: Mol. function=Rab GTPase activator activity; Cellular component=intracellular
LRNKEQIRPTNKRITRRRSSITSNSCAGDDDRDEVLQDESSSSIYEDQIVSEVAASEKDADPVGPSEKXAVSNERKPFINKLQWFLRFGR

SEQ ID NO: 127983 - protein, 75 aa, Setaria italica
  Transcript Sequence Number=SeqID_62009
GGEALLVRRSKGKKRPPAAAHAERDSGAGGRFRSLMRDYNDLLEVGSALAVFPWQFTSPVQSSIESFFLCFSCCS

SEQ ID NO: 127984 - protein, 79 aa, Setaria italica
  Transcript Sequence Number=SeqID_62010
TRQKTQNFDLNQGSAMNDEGNDYQGHRSHLELDNFDQVGVDEEMIAADVKLSVCRDSGNSPASDDKRTIPWQDRLALKA

SEQ ID NO: 127985 - protein, 159 aa, Setaria italica
  misc_feature (114)..(114): Xaa can be any naturally occurring amino acid
  misc_feature (153)..(153): Xaa can be any naturally occurring amino acid
  Transcript Sequence Number=SeqID_62011
  Gene Ontology: Cellular component=integral to peroxisomal membrane; Biological process=peroxisome organization and biogenesis
  Homolog annotation: Hit_ID=B6U9L1; Match level="QueryCoverage=99%, HitCoverage=34%, E-value=1e-62, Identity=75%"; Hit description=LHT1
KSIKLPYFIMIFASVQFVLSQLPNFHSISSISLVAAVMSVSYSAIAWIASADHHKKNSAEVDYNLRATTTPGKVFDFLGGLGDVAFTYAGHNVVLEIQATIPSTPDKPSKKPMXWKGVVVAYIIIAACYFPVALVGYWAFGNQVDENILITLXQPKWLI

SEQ ID NO: 127986 - protein, 35 aa, Setaria italica
  Transcript Sequence Number=SeqID_62012
GHNVVLEIQATIPSTPDKPSKKSNTFPGVVVARRL

SEQ ID NO: 127987 - protein, 92 aa, Setaria italica
  misc_feature (18)..(18): Xaa can be any naturally occurring amino acid
  Transcript Sequence Number=SeqID_62013
  Gene Ontology: Mol. function=translation initiation factor activity; Biological process=cellular metabolic process
  Homolog annotation: Hit_ID=B6U6N6; Match level="QueryCoverage=73%, HitCoverage=11%, E-value=3e-31, Identity=88%"; Hit description =Translation initiation factor eIF-2B delta subunit
GTASVAMVAHAFGVPVLXYKFHERVQLDSICANELGDPDVILKVPGKAEDHLKNWAENANLQLLNLTYVSKFHYTCLFFLVIFPLMEVIVYI

SEQ ID NO: 127988 - protein, 77 aa, Setaria italica
  Transcript Sequence Number=SeqID_62014
  Gene Ontology: Mol. function=translation initiation factor activity; Cellular component=cytosol; Biological process=cellular metabolic process
  Homolog annotation: Hit_ID=Q10G37; Match level="QueryCoverage=97%, HitCoverage=12%, E-value=1e-36, Identity=93%"; Hit description =Translation initiation factor eIF-2B delta subunit, putative, expressed
NAISYIMHEVTRVFLGASSILSNGTVYSRVGTASVAMVAHAFGVPVLVCCEAYKFHERVQLDSICANELGEPGIVQF

SEQ ID NO: 127989 - protein, 99 aa, Setaria italica
  Transcript Sequence Number=SeqID_62015
  Subcellular localization annotation: CTP_CleavageSite=48; ConfidenceScore=5.42e-01
GLFLSVDVVALTLPSSTNLSGLAIQRPFACARPRVPQPQSRSETHRCRASGEAWHRSHPSSDWSPRMSTMVGTAVARRGPRRERAEWQNSPSGPVKSLL

SEQ ID NO: 127990 - protein, 43 aa, Setaria italica
  Transcript Sequence Number=SeqID_62016
LLDLTNNLPLSLAAYIKENIIGDKVHLGTNHPRILVLTGTKCI

SEQ ID NO: 127991 - protein, 32 aa, Setaria italica
  Transcript Sequence Number=SeqID_62017
QLLHRKESIIGDKVHVGTNHPRILVLTGTKST

SEQ ID NO: 127992 - protein, 60 aa, Setaria italica
  Transcript Sequence Number=SeqID_62018
  Gene Ontology: Mol. function=O-methyltransferase activity
  Homolog annotation: Hit_ID=B6TG62; Match level="QueryCoverage=98%, HitCoverage=15%, E-value=3e-24, Identity=83%"; Hit description =Caffeic acid 3-O-methyltransferase
WQWVLTTWTNEECTAILGNCYSALPDGGKVIACEPVVPEETDGSTRTRALLENDIFVMTT

SEQ ID NO: 127993 - protein, 85 aa, Setaria italica
  misc_feature (63)..(63): Xaa can be any naturally occurring amino acid
  Transcript Sequence Number=SeqID_62019
  Gene Ontology: Mol. function=O-methyltransferase activity; Biological process=lignin biosynthetic process
  Homolog annotation: Hit_ID=B6TG62; Match level="QueryCoverage=89%, HitCoverage=20%, E-value=2e-28, Identity=83%"; Hit description =Caffeic acid 3-O-methyltransferase
TARDREANEVMLRAMTGVSEPFMEALLDGYAAGFEGVATLVDVGGSSGACLEMIMRRVDTIRXGINFDLPDVVAAAPPSSVRSTR

SEQ ID NO: 127994 - protein, 50 aa, Setaria italica
  Transcript Sequence Number=SeqID_62020
PHIKQCQSSRNNNSSKSKLVLPWTPMNQLLNLLNLLNWFIGVHGNTSLLL

SEQ ID NO: 127995 - protein, 133 aa, Setaria italica
  Transcript Sequence Number=SeqID_62021
  Gene Ontology: Mol. function=pyridoxal phosphate binding; Cellular component=chloroplast; Biological process=threonine biosynthetic process
  Homolog annotation: Hit_ID=B9RK44; Match level="QueryCoverage=96%, HitCoverage=23%, E-value=1e-60, Identity=84%"; Hit description =Threonine synthase, putative
EGQKTAAIEILQQFDWEVPDWVIVPGGNLGNIYAFYKGFEMCRVLGLVDRVPRLVCAQAANANPLYSYYKSGWTEFQPQVAKPTFASAIQIGDPVSVDRAVVALKATNGIVEEATEEELMNAMSLAESQLEIV

SEQ ID NO: 127996 - protein, 78 aa, Setaria italica
  misc_feature (27)..(27): Xaa can be any naturally occurring amino acid
  Transcript Sequence Number=SeqID_62022
  Gene Ontology: Mol. function=pyridoxal phosphate binding; Cellular component=chloroplast; Biological process=threonine biosynthetic process
  Homolog annotation: Hit_ID=Q9S7B5; Match level="QueryCoverage=75%, HitCoverage=10%, E-value=2e-15, Identity=69%"; Hit description =Threonine synthase 1, chloroplastic
RLVLGVVRTPARLRGPAQGFSAWYEPXPPAPGGDPNERYSIDEVVYRSSSGGLLDVRHDMEALARYPGSYWRDLFDSR

SEQ ID NO: 127997 - protein, 121 aa, Setaria italica
  Transcript Sequence Number=SeqID_62023
  Gene Ontology: Mol. function=hydrolase activity
  Homolog annotation: Hit_ID=Q75KE2; Match level="QueryCoverage=100%, HitCoverage=38%, E-value=9e-58, Identity=91%"; Hit description =Putative hydrolases
YKAWCSGFCTTMCWRDMESVAVQEFSRTLFNIRPDIALSVAQTIFQSDVRSLLPLVSVPCHIVQSTKDLAVPVVVSEYLHKHLGSDSIVEVMPSEGHLPQLSSPDIVVPVLLRHIQHDIAV

SEQ ID NO: 127998 - protein, 54 aa, Setaria italica
  Transcript Sequence Number=SeqID_62024
QIHRAAFVLPTFVRRELESYTTPSTSNEKEKPKESVSKSQKIKILPNNAIVTAS

SEQ ID NO: 127999 - protein, 119 aa, Setaria italica
  misc_feature (62)..(62): Xaa can be any naturally occurring amino acid
  Transcript Sequence Number=SeqID_62025
  Gene Ontology: Mol. function=transferase activity; Biological process= spermidine biosynthetic process
  Homolog annotation: Hit_ID=Q304Z5; Match level="QueryCoverage=96%, HitCoverage=29%, E-value=1e-50, Identity=85%"; Hit description =Spermidine synthase
  Pfam annotation: Domain name=Spermine_synth; Domain location=1-103; Score=-96.6; E_value=0.017; Accession=PF01564.9; Description =Sperminespermidine synthase
NLLRRNSPEGKYDAIIVDSSDPIGPAQALVEKPFFQTIARALKSGGVLCNLAESMWLHTHFXSQDMLAICRQTFKGAVHYAWTSVPTYPSGVIGFLLCAKRSTRELLNSCEPIEKIQGA

SEQ ID NO: 128000 - protein, 84 aa, Setaria italica
  misc_feature (54)..(54): Xaa can be any naturally occurring amino acid
  Transcript Sequence Number=SeqID_62026
  Gene Ontology: Mol. function=transferase activity; Biological process= spermidine biosynthetic process
  Homolog annotation: Hit_ID=Q304Z5; Match level="QueryCoverage=97%, HitCoverage=20%, E-value=7e-35, Identity=86%"; Hit description =Spermidine synthase
VLLLAICRQTFKGAVHYAWTSVPTYPSGVIGFLLCAKEGRPVNFLTPVNPIEKXIQGATKAGKELRFYNSEIHRAAFVCQHFVK

SEQ ID NO: 128001 - protein, 83 aa, Setaria italica
  Transcript Sequence Number=SeqID_62027
TILQTPPVSLISTDPLGHVEIYLARQLSCKNKDRSQIYRHEVDDVSGQMQNRIILHQQVLQVASWELVQLCTTNTRNRGEHII

SEQ ID NO: 128002 - protein, 60 aa, Setaria italica
  Transcript Sequence Number=SeqID_62028
  Gene Ontology: Mol. function=transferase activity; Biological process= spermidine biosynthetic process
  Homolog annotation: Hit_ID=Q304Z5; Match level="QueryCoverage=100%, HitCoverage=15%, E-value=3e-25, Identity=91%"; Hit description =Spermidine synthase
LGGGVDFLRNSPEGKYDAIIVDSSDPIGPAQALVEKPFFQTIARALKSGGVLCNLAESMW

SEQ ID NO: 128003 - protein, 109 aa, Setaria italica
  misc_feature (10)..(10): Xaa can be any naturally occurring amino acid
  misc_feature (76)..(76): Xaa can be any naturally occurring amino acid
  Transcript Sequence Number=SeqID_62029
  Gene Ontology: Mol. function=transferase activity; Biological process= spermidine biosynthetic process
  Homolog annotation: Hit_ID=Q304Z5; Match level="QueryCoverage=100%, HitCoverage=28%, E-value=6e-47, Identity=82%"; Hit description =Spermidine synthase
  Pfam annotation: Domain name=Spermine_synth; Domain location=1-109; Score=15.8; E_value=1.7e-09; Accession=PF01564.9; Description =Sperminespermidine synthase
KLEKILYQGXSPYQEILVFESSTYGNVLVLDGIVQLTDKDECAYQEMVTHLPLCSIPSPKNVLVVGGGDGGVLREXARHDSVETIDICEIDQLVIDVCKEFFPNLSIGY

SEQ ID NO: 128004 - protein, 75 aa, Setaria italica
  Transcript Sequence Number=SeqID_62030
NISYLTHCAYICSLRYMESWNNPLVPLLGALYFHHLSFYGIWSLGTTLWFPSWVPFIFTISASPGSTCGEGEALL

SEQ ID NO: 128005 - protein, 84 aa, Setaria italica
  Transcript Sequence Number=SeqID_62031
  Gene Ontology: Mol. function=inositol oxygenase activity; Cellular component=cytoplasm; Biological process=L-ascorbic acid biosynthetic process
  Homolog annotation: Hit_ID=Q5Z8T3; Match level="QueryCoverage=77%, HitCoverage=21%, E-value=1e-21, Identity=76%"; Hit description =Probable inositol oxygenase
  Pfam annotation: Domain name=DUF706; Domain location=1-79; Score= -143.6; E_value=3e-06; Accession=PF05153.7; Description=Family of unknown function (DUF706)
CIELLNEFVDDSDPDLDMPQIEHLLQTAEAIRKDYPDQDWLHLTGLIHGTLSSLLLGVPSVQWPVRFVTWETSLRFRPGQGAAP

SEQ ID NO: 128006 - protein, 46 aa, Setaria italica
  Transcript Sequence Number=SeqID_62032
  Gene Ontology: Mol. function=inositol oxygenase activity; Cellular component=cytoplasm; Biological process=L-ascorbic acid biosynthetic process
  Homolog annotation: Hit_ID=Q5Z8T3; Match level="QueryCoverage=100%, HitCoverage=15%, E-value=3e-12, Identity=73%"; Hit description =Probable inositol oxygenase
MTITIEQPQLDAVAERKVAAGANPAELVLDGGFIVPDANAFGKTFR

SEQ ID NO: 128007 - protein, 38 aa, Setaria italica
  Transcript Sequence Number=SeqID_62033
QAIARILDMHIYCALTVLNRINYPGARQPQQQMLNRIN

SEQ ID NO: 128008 - protein, 88 aa, Setaria italica
  Transcript Sequence Number=SeqID_62034
  Gene Ontology: Mol. function=ligase activity, forming aminoacyl-tRNA and related compounds; Cellular component=cytoplasm; Biological process=tRNA aminoacylation for protein translation
  Homolog annotation: Hit_ID=Q8LPC9; Match level="QueryCoverage=98%, HitCoverage=16%, E-value=2e-45, Identity=98%"; Hit description =Threonyl-tRNA synthetase (Fragment)
  Pfam annotation: Domain name=tRNA_SAD; Domain location=27-76; Score =80.3; E_value=6.8e-21; Accession=PF07973.6; Description=Threonyl and Alanyl tRNA synthetase s
RAEALEMFAENKFKVEIINELPEDKTITVYRCGPLVDLCRGPHIPNTSFVKAFACLKASSSYWRGKADRESLQRVYGISFPDSKRLQR

SEQ ID NO: 128009 - protein, 134 aa, Setaria italica
  misc_feature (62)..(62): Xaa can be any naturally occurring amino acid
  misc_feature (108)..(108): Xaa can be any naturally occurring amino acid
  Transcript Sequence Number=SeqID_62035
  Gene Ontology: Mol. function=ligase activity, forming aminoacyl-tRNA and related compounds; Cellular component=cytoplasm; Biological process=tRNA aminoacylation for protein translation
  Homolog annotation: Hit_ID=Q8LPC9; Match level="QueryCoverage=97%, HitCoverage=24%, E-value=2e-68, Identity=91%"; Hit description =Threonyl-tRNA synthetase (Fragment)
  Pfam annotation: Domain name=tRNA-synt_2b; Domain location=23-134; Score=47.1; E_value=7e-11; Accession=PF00587.17; Description=tRNA synthetase class II core domain (G, H, P, S and T)
VTSFFFHPLSPGSCFFLPHGARVYNKLMDFMRQQYRDRGYQEVLSPNIYNMQLWETSGHAAXNYKENMFVFEIEKQEFGLKPMNCPGHCLMFNNRVRSYRELPLAWLXFGVLHRNELSGALTGLTRVRRFQQDD

SEQ ID NO: 128010 - protein, 40 aa, Setaria italica
  Transcript Sequence Number=SeqID_62036
KTEQVSLFGITYVYNIYMVTTFSTNVPQKDHLAVSHENCK

SEQ ID NO: 128011 - protein, 74 aa, Setaria italica
  Transcript Sequence Number=SeqID_62037
  Gene Ontology: Mol. function=microtubule motor activity; Cellular component=microtubule associated complex; Biological process =microtubule-based movement
  Homolog annotation: Hit_ID=Q10MN5; Match level="QueryCoverage=98%, HitCoverage=7%, E-value=9e-27, Identity=78%"; Hit description =Kinesin-4, putative, expressed
  Subcellular localization annotation: CTP_CleavageSite=58; ConfidenceScore=5.25e-01
LALKDSGSEQIMSRDSDAFNMKMPSPGFSNRRQGSCDLLSSQTNFRQPMEDVGNIEVRANPTLEGQKKTKDFRT

SEQ ID NO: 128012 - protein, 61 aa, Setaria italica
  Transcript Sequence Number=SeqID_62038
  Gene Ontology: Mol. function=microtubule motor activity; Cellular component=microtubule associated complex; Biological process =microtubule-based movement
  Homolog annotation: Hit_ID=Q10MN5; Match level="QueryCoverage=63%, HitCoverage=3%, E-value=2e-14, Identity=97%"; Hit description =Kinesin-4, putative, expressed
NRIEAFAVHTHDHPFVLCYFSGIASLAQKNAHVPYRNSKLTQLLQDSLGGQAKTLMFVHIS

SEQ ID NO: 128013 - protein, 29 aa, Setaria italica
  Transcript Sequence Number=SeqID_62039
CVNLDGLTEAQIDKKLEELAKAGESANAK

SEQ ID NO: 128014 - protein, 54 aa, Setaria italica
  Transcript Sequence Number=SeqID_62040
QWFSCCHDFCAKNEMKSWICINFCKKRRLLFTCLPHILLMFISLCIFHWFTGIP

SEQ ID NO: 128015 - protein, 112 aa, Setaria italica
  Transcript Sequence Number=SeqID_62041
  Gene Ontology: Mol. function=nucleic acid binding
  Subcellular localization annotation: CTP_CleavageSite=37; ConfidenceScore=5.28e-01
IIFLLLFSDIQGWWSTGFSYGLWIASLVSSGFSVVPVASQTWKAYFGLSRSESPKDNSRQAASILFPDKALSLKLKKHHGRAEALLLAAYGKGLVLPSGKFSKPQLDIDVDC

SEQ ID NO: 128016 - protein, 52 aa, Setaria italica
  misc_feature (13)..(13): Xaa can be any naturally occurring amino acid
  Transcript Sequence Number=SeqID_62042
  Homolog annotation: Hit_ID=B6TSQ5; Match level="QueryCoverage=100%, HitCoverage=8%, E-value=2e-15, Identity=84%"; Hit description =Microtubule-associated protein MAP65-1a
VEIEVKRLTHLKXASKMKELVFKKMTELEEIYRSVHMEIDSDSERRILNDLI

SEQ ID NO: 128017 - protein, 37 aa, Setaria italica
  Transcript Sequence Number=SeqID_62043
  Subcellular localization annotation: CTP_CleavageSite=8; ConfidenceScore=5.01e-01
HTNKFYLQVTSKTSATPAFVPVHASSCTLTVRTDRNT

SEQ ID NO: 128018 - protein, 44 aa, Setaria italica
  Transcript Sequence Number=SeqID_62044
VYMKKHVLERMLEWQKHHAFTDQRIHSSSEEDFHRVKQHGINRR

SEQ ID NO: 128019 - protein, 65 aa, Setaria italica
  misc_feature (32)..(32): Xaa can be any naturally occurring amino acid
  Transcript Sequence Number=SeqID_62045
  Gene Ontology: Mol. function=substrate-specific transmembrane transporter activity; Cellular component=integral to membrane; Biological process=transmembrane transport
SWSWGPVTWLVPAEVFPLEVRSARQSVTGASXGFVLTAFIAQGFELTVFIHYDLYGRYHLSNKSH

SEQ ID NO: 128020 - protein, 59 aa, Setaria italica
  Transcript Sequence Number=SeqID_62046
SENDPWQNRAVENQRSILQSASEKLTIDDAIEVHMLNSCQYKELVTCDITGEHQLPTVY

SEQ ID NO: 128021 - protein, 46 aa, Setaria italica
  Transcript Sequence Number=SeqID_62047
  Homolog annotation: Hit_ID=B6TBM2; Match level="QueryCoverage=78%, HitCoverage=32%, E-value=2e-10, Identity=75%"; Hit description =Protein yippee-like OJ1003C07.11
  Pfam annotation: Domain name=Yippee; Domain location=1-46; Score= -18.6; E_value=4.9e-07; Accession=PF03226.6; Description=Yippee putative zinc-binding protein
SGVNVKSRVNVSFGPNEDRILMTGMHIVNDIYCSCCQRLLGWRYVS

SEQ ID NO: 128022 - protein, 33 aa, Setaria italica
  Transcript Sequence Number=SeqID_62048
QVHTGEEHDGQRMMVAEEINQLLCLQKQTFPTV

SEQ ID NO: 128023 - protein, 98 aa, Setaria italica
  misc_feature (27)..(27): Xaa can be any naturally occurring amino acid
  Transcript Sequence Number=SeqID_62049
  Gene Ontology: Cellular component=vacuole
  Pfam annotation: Domain name=NuA4; Domain location=2-65; Score=64.8; E_value=3.1e-16; Accession=PF09340.2; Description=Histone acetyltransferase subunit NuA4
  Subcellular localization annotation: CTP_CleavageSite=71; ConfidenceScore=5.08e-01
MLMSIRSQVYDMETTYLQESNQFGSVXLKGFESFLSSSKNTSNLKRSRKFQADERLFSLSSVTSPAVQIVVLNVAEQHMLSKCYFCPIAFAFWSLLIL

SEQ ID NO: 128024 - protein, 42 aa, Setaria italica
  Transcript Sequence Number=SeqID_62050
  Pfam annotation: Domain name=NuA4; Domain location=2-42; Score=-5.8; E_value=0.00029; Accession=PF09340.2; Description=Histone acetyltransferase subunit NuA4
MLMSIRSQVYDMETTYLQESNQFGSVLKGFESFLSSSKNTSK

SEQ ID NO: 128025 - protein, 57 aa, Setaria italica
  Transcript Sequence Number=SeqID_62051
  Gene Ontology: Mol. function=transferase activity, transferring glycosyl groups
MESASVKQIVVLYPVGGIGHVGPMTQLAKVFLDHGYDVTMVLIEPPIKSTDSGADFN

SEQ ID NO: 128026 - protein, 94 aa, Setaria italica
  Transcript Sequence Number=SeqID_62052
  Homolog annotation: Hit_ID=Q2R0L6; Match level="QueryCoverage=75%, HitCoverage=11%, E-value=4e-24, Identity=70%"; Hit description =Leucine Rich Repeat family protein, expressed
QNSVHIAPFPLDQPAGDDGSEHSCLTDVGLTHLSRGCRGLEKLSLIWCSAISSTVLVRIAENCKNLTSLDLQVIQCSLFFRFCCVSRSYSFFSF

SEQ ID NO: 128027 - protein, 87 aa, Setaria italica
  misc_feature (44)..(44): Xaa can be any naturally occurring amino acid
  Transcript Sequence Number=SeqID_62053
  Gene Ontology: Mol. function=methyltransferase activity; Biological process=metabolic process
  Homolog annotation: Hit_ID=Q8L9U0; Match level="QueryCoverage=100%, HitCoverage=24%, E-value=2e-34, Identity=71%"; Hit description =Coclaurine N-methyltransferase
MFMQEDVSVVNHWLVSGTHYARTSEEWLKRMDRSIVSIRPIFEXTYGKESTTKWIAYWRTFFISVAELFGYNNGDEWMVAHYLFQRK

SEQ ID NO: 128028 - protein, 92 aa, Setaria italica
  Transcript Sequence Number=SeqID_62054
  Gene Ontology: Mol. function=methyltransferase activity; Biological process=metabolic process
  Homolog annotation: Hit_ID=Q8L9U0; Match level="QueryCoverage=85%, HitCoverage=22%, E-value=1e-35, Identity=83%"; Hit description =Coclaurine N-methyltransferase
QSQLLTKISKWMKEDSLLFVHFFCHKTFAYHFEDNNDDDWITRYFFTGGTMPSANLLLYFQEDVSVVNHWLVSGTHYARTRYIPPKSKLSMP

SEQ ID NO: 128029 - protein, 107 aa, Setaria italica
  Transcript Sequence Number=SeqID_62055
  Gene Ontology: Mol. function=methyltransferase activity; Biological process=metabolic process
  Homolog annotation: Hit_ID=Q8L9U0; Match level="QueryCoverage=84%, HitCoverage=25%, E-value=6e-36, Identity=73%"; Hit description =Coclaurine N-methyltransferase
TNKTTYQVTYQLLLTKRCPIAIETDKAKAQHYELPTTFFKLVLGRNLKYSSCYFPDDSSTLEDAEVAMMELYCERAKIQDGQSILDVGCGWGSLSLHIAKKYRNCIV

SEQ ID NO: 128030 - protein, 53 aa, Setaria italica
  Transcript Sequence Number=SeqID_62056
MVAAAVAERAYAAATRSALAALERNLIPDAVTRRLTRLLLAQRLRQGYLPSAP

SEQ ID NO: 128031 - protein, 74 aa, Setaria italica
  Transcript Sequence Number=SeqID_62057
  Gene Ontology: Mol. function=3,4-dihydroxy-2-butanone-4-phosphate synthase activity; Cellular component=chloroplast; Biological process=riboflavin biosynthetic process
  Homolog annotation: Hit_ID=B6TBQ9; Match level="QueryCoverage=100%, HitCoverage=12%, E-value=6e-27, Identity=86%"; Hit description =Riboflavin biosynthesis protein ribAB
  Pfam annotation: Domain name=GTP_cyclohydro2; Domain location=1-68; Score=-55.8; E_value=1.1e-05; Accession=PF00925.12; Description=GTP cyclohydrolase II
DTVEANVELGLAVDAREYGIGAQDNGGNWETDILRDIGVRTMRLMTNNPAKFIGLKGYGLAVVGRVPVLSPITK

SEQ ID NO: 128032 - protein, 140 aa, Setaria italica
  misc_feature (26)..(26): Xaa can be any naturally occurring amino acid
  misc_feature (36)..(36): Xaa can be any naturally occurring amino acid
  misc_feature (82)..(82): Xaa can be any naturally occurring amino acid
  Transcript Sequence Number=SeqID_62058
  Gene Ontology: Mol. function=3,4-dihydroxy-2-butanone-4-phosphate synthase activity; Cellular component=chloroplast; Biological process=riboflavin biosynthetic process
  Homolog annotation: Hit_ID=B6TBQ9; Match level="QueryCoverage=100%, HitCoverage=27%, E-value=6e-52, Identity=73%"; Hit description =Riboflavin biosynthesis protein ribAB
  Pfam annotation: Domain name=DHBP_synthase; Domain location=71-140; Score=-118.0; E_value=0.0058; Accession=PF00926.11; Description=3,4 -dihydroxy-2-butanone 4-phosphate synthase
RCCAIGDELGGQGRINHPFNENNNGXVFQGINASGXSFRTVGAEITQETGDFFVSDAESDPDKPTDGFSSIDQAINALRQGXDDENGDNEGDLVMAATLVNPESIAFMIRNGSGIISVGMKEEDLTRLMIPMMSPITEIE

SEQ ID NO: 128033 - protein, 85 aa, Setaria italica
  Transcript Sequence Number=SeqID_62059
RKRPHFVGKRDTAISSTSFSRFLLYLNHTKCFVKTFRKDICKLELFVANMKPGTKLHKTDTVQFSGICLLLESYASSTIQKQKQR

SEQ ID NO: 128034 - protein, 56 aa, Setaria italica
  Transcript Sequence Number=SeqID_62060
LELSSVWLHLHFMGTMKQLIGVKRCLAALAFHGHHETIKSMAPTCLSRFPTTDSTY

SEQ ID NO: 128035 - protein, 82 aa, Setaria italica
  Transcript Sequence Number=SeqID_62061
  Subcellular localization annotation: CTP_CleavageSite=63; ConfidenceScore=5.43e-01
SATPRSDATVASMSSHVMTDSQPVHSPANQGFSLQHESVAAMENLMSSHMHDLSSHTTVSNVRQMSLEITENWGISGSSPVP

SEQ ID NO: 128036 - protein, 54 aa, Setaria italica
  Transcript Sequence Number=SeqID_62062
GNAWSIRELSGQAAPNWLAFLDAKPGETAPADVLSVEAATHQLEVSRLESADIL

SEQ ID NO: 128037 - protein, 72 aa, Setaria italica
  Transcript Sequence Number=SeqID_62063
YVFIFKAVKQLFGGVSKTASCLWLGSLRSHGTEEQSNSHDHHHTLKMQGIGSDKEQCSNDGWSPNELTDCTY

SEQ ID NO: 128038 - protein, 73 aa, Setaria italica
  Transcript Sequence Number=SeqID_62064
  Gene Ontology: Mol. function=nucleotide binding; Biological process =defense response
VWKWFEHLANFIIEKCDVLIYWPEEVFQSLVSLKNLWILSCNKLIGPTQETGGEPTQTTDQIYTNNRSKNMRM

SEQ ID NO: 128039 - protein, 65 aa, Setaria italica
  Transcript Sequence Number=SeqID_62065
SSFTNAIKQLLDSFEYEDVSHVHSSSSDEGTTFHFPLIQFVSFKFPCFACPPILLTNWCNPTYWC

SEQ ID NO: 128040 - protein, 56 aa, Setaria italica
  misc_feature (41)..(41): Xaa can be any naturally occurring amino acid
  Transcript Sequence Number=SeqID_62066
YWFVHLLFPISELELRVRDTEALPQIDYNWGFITELELSLXGTEAAPLSELSISGC

SEQ ID NO: 128041 - protein, 84 aa, Setaria italica
  misc_feature (9)..(9): Xaa can be any naturally occurring amino acid
  misc_feature (65)..(65): Xaa can be any naturally occurring amino acid
  misc_feature (82)..(82): Xaa can be any naturally occurring amino acid
  Transcript Sequence Number=SeqID_62067
  Gene Ontology: Mol. function=transferase activity; Cellular component= endoplasmic reticulum membrane; Biological process=GPI anchor biosynthetic process
  Homolog annotation: Hit_ID=Q6EUN5; Match level="QueryCoverage=100%, HitCoverage=10%, E-value=4e-31, Identity=84%"; Hit description =Putative phosphatidylinositolglycan class N short form
LPTQYLKLXSKADEVEAVLANTKQILNQFLQKSQLKQSGSLYFKPFKPLANYSSVLSQIEDLISXKRDYDTAMKHSEELRRXAL

SEQ ID NO: 128042 - protein, 42 aa, Setaria italica
  Transcript Sequence Number=SeqID_62068
  Gene Ontology: Mol. function=transferase activity; Cellular component= endoplasmic reticulum membrane; Biological process=GPI anchor biosynthetic process
  Homolog annotation: Hit_ID=Q6EUN5; Match level="QueryCoverage=85%, HitCoverage=4%, E-value=1e-10, Identity=88%"; Hit description =Putative phosphatidylinositolglycan class N short form
GSLPTQYLKLSKADEVEAVLANTKQILNQFLQKSRILFILEL

SEQ ID NO: 128043 - protein, 77 aa, Setaria italica
  Transcript Sequence Number=SeqID_62069
  Subcellular localization annotation: CTP_CleavageSite=22; ConfidenceScore=5.38e-01
SPPCLSSSPPCPAPAKPKKTAAAATKPKKTAAAGTKRKTPEKKKIVAKPKKSPAAKAKAKPKTVKSPASKKARKVAA

SEQ ID NO: 128044 - protein, 34 aa, Setaria italica
  misc_feature (8)..(8): Xaa can be any naturally occurring amino acid
  Transcript Sequence Number=SeqID_62070
CLTPHTLXISGTHFVCTTPRHNHHNQSYDLWNRL

SEQ ID NO: 128045 - protein, 65 aa, Setaria italica
  Transcript Sequence Number=SeqID_62071
  Subcellular localization annotation: CTP_CleavageSite=56; ConfidenceScore=5.28e-01
MPALAKPASRPAKTAAAPKPKPAAAKPKKTAAAATKPKKTAAAGTKRKTPEKKKIVAKPKKSPAA

SEQ ID NO: 128046 - protein, 38 aa, Setaria italica
  Transcript Sequence Number=SeqID_62072
RRTCRHVAAVSPLNAATCLHVLLQCMSSTLICSDYYHS

SEQ ID NO: 128047 - protein, 37 aa, Setaria italica
  Transcript Sequence Number=SeqID_62073
VVLPIIAGLVMALIGSLLSILVALIMPALCFLKIARN

SEQ ID NO: 128048 - protein, 76 aa, Setaria italica
  Transcript Sequence Number=SeqID_62074
  Gene Ontology: Cellular component=chloroplast
  Homolog annotation: Hit_ID=B9SLP1; Match level="QueryCoverage=76%, HitCoverage=11%, E-value=1e-16, Identity=63%"; Hit description=Amino acid transporter, putative
CSYTISEAGWASLVVLAFFAIVCCYTGVLLKYCFESKDGVKTFPDIGEAAFGRIGRLLISVSPVYLLYKMTRGKFI

SEQ ID NO: 128049 - protein, 101 aa, Setaria italica
  misc_feature (91)..(91): Xaa can be any naturally occurring amino acid
  Transcript Sequence Number=SeqID_62075
  Gene Ontology: Cellular component=chloroplast
  Homolog annotation: Hit_ID=Q6K4N7; Match level="QueryCoverage=97%, HitCoverage=34%, E-value=4e-25, Identity=61%"; Hit description=Amino acid transporter-like
  Subcellular localization annotation: CTP_CleavageSite=84; ConfidenceScore=5.12e-01
FVVPAGFLTDRVFSVTLRTALVASTVCIAFLLPFFGLVMALIGSLLSILVALIMPALCFLKIARNKATRSQVIASVVTVVLGTVCAVLGTXNSIVKIAENY

SEQ ID NO: 128050 - protein, 96 aa, Setaria italica
  Transcript Sequence Number=SeqID_62076
QQTVSNRNKRQLLQRKKIDRTETCYSEMIEKQLEKAHGYIIASDDTVFSRIYIVVRIIIYRNLRNSSKILIVRNISDHFQVPQAESGNDLHVLGCR

SEQ ID NO: 128051 - protein, 47 aa, Setaria italica
  Transcript Sequence Number=SeqID_62077
FTGNRKRWHHNIGHYQCYRGDVLLHRKDCRKLLSSTTNLEQRQTQIT

SEQ ID NO: 128052 - protein, 35 aa, Setaria italica
  Transcript Sequence Number=SeqID_62078
RCSGVASVSSVVSEAFFNGIKNQAGNGCEGKNFYT

SEQ ID NO: 128053 - protein, 62 aa, Setaria italica
  Transcript Sequence Number=SeqID_62079
CHVNNLFGSCLTKPPARSATASLTLPLSHQPNHDLPQSLLIPSPPPHPPPHRPLPPPPSAPA

SEQ ID NO: 128054 - protein, 62 aa, Setaria italica
  Transcript Sequence Number=SeqID_62080
DVPLAEKEELKDPQPVEEAVNVHEDVQSKEEPKCEAHPIDQQEELVPEEESVAMSLTPQATQ

SEQ ID NO: 128055 - protein, 68 aa, Setaria italica
  misc_feature (1)..(25): Xaa can be any naturally occurring amino acid
  Transcript Sequence Number=SeqID_62081
XXXXXXXXXXXXXXXXXXXXXXXXXNENERLFLVAGLNRMTRLIFSYKVFSPMVTVSLNHRRAPPLHL

SEQ ID NO: 128056 - protein, 86 aa, Setaria italica
  Transcript Sequence Number=SeqID_62082
  Homolog annotation: Hit_ID=B6SH19; Match level="QueryCoverage=100%, HitCoverage=64%, E-value=6e-25, Identity=67%"; Hit description =SAUR33-auxin-responsive SAUR family member
  Pfam annotation: Domain name=Auxin_inducible; Domain location=54-86; Score=-13.8; E_value=0.054; Accession=PF02519.6; Description=Auxin responsive protein
KGGLSKLRCMIRRWHSSSRIARAPPSPGEDDGAIAGVEEDARGASFHGADEVPKGLHPVYVGKSRRRYLIAEELVGHPLFRTLVDR

SEQ ID NO: 128057 - protein, 86 aa, Setaria italica
  misc_feature (53)..(53): Xaa can be any naturally occurring amino acid
  misc_feature (80)..(80): Xaa can be any naturally occurring amino acid
  Transcript Sequence Number=SeqID_62083
  Subcellular localization annotation: CTP_CleavageSite=10; ConfidenceScore=5.55e-01
MEAKKKSAASAAAAAGAGAAPPPANGYFSAVFSSSPAGNAKRKQTDLYAMLNXQSSRGQNGSSITDSKSHGRTTYKDGKXAYPNES

SEQ ID NO: 128058 - protein, 38 aa, Setaria italica
  Transcript Sequence Number=SeqID_62084
YSSSQQKQPANEPPRNYKEDNPDGSATRGDWWQGSLYY

SEQ ID NO: 128059 - protein, 82 aa, Setaria italica
  Transcript Sequence Number=SeqID_62085
SSRGQNGSSITDSKSHGRTTYKDGKHAYPNESSESPYFGSSVHYGGREFYSSSQQKQPANEPTKEINKEGTNTKNRTTRLTK

SEQ ID NO: 128060 - protein, 71 aa, Setaria italica
  Transcript Sequence Number=SeqID_62086
WELASGLHPSCRWRQYLDASSHLDRCGCRPCPSQFPFAFVFLWFRCSTETTNGLLGPETRNGDRQGTQGIG

SEQ ID NO: 128061 - protein, 34 aa, Setaria italica
  Transcript Sequence Number=SeqID_62087
SSQQKQPANEPPRNYKEDNPDGSATRGDWWQGSL

SEQ ID NO: 128062 - protein, 87 aa, Setaria italica
  Transcript Sequence Number=SeqID_62088
RVQVRLLCAFAFPAGDEEKTALKYPLAGGGAADFFLASMSTRLPASAASGDGPRLWRGDGSREHSRRRKIGHVKWSLQAAARGKQLV

SEQ ID NO: 128063 - protein, 87 aa, Setaria italica
  Transcript Sequence Number=SeqID_62089
PHGSERRRDRDGTAGDEEKTALKYPLAGGGAAPAPAAAAAEAADFFLASMSTRLPASAASGDGPRLWRGDGSREHSRRRKIGHVKWS

SEQ ID NO: 128064 - protein, 79 aa, Setaria italica
  Transcript Sequence Number=SeqID_62090
TTANLYDYINLDSHQNYYADTKKKQNGVLYVPCKTGSTLSNFLTTHTVLIQSVIKAGIHHFSVAFSFHETALEYVQLEG

SEQ ID NO: 128065 - protein, 73 aa, Setaria italica
  Transcript Sequence Number=SeqID_62091
FFCSLAGNIGHVNLEALGKHYGIIFKGPSHRAMPDVQALSKIFQKITLGLKLTRDGLMSEASIFYDFRKVSRI

SEQ ID NO: 128066 - protein, 62 aa, Setaria italica
  Transcript Sequence Number=SeqID_62092
AKQFDIPFLMQEFERCSAQVPADWLFVDSLCLARKLKKLDGTLLIALTYLFDHIVFASTLLR

SEQ ID NO: 128067 - protein, 74 aa, Setaria italica
  Transcript Sequence Number=SeqID_62093
TLFLLSALNFLHEHNVASVCLYLRLGTRSTRVASALSKAQLQDGYVAYPWEKKMRDTLRMPNSSCYLSMLVLPK

SEQ ID NO: 128068 - protein, 53 aa, Setaria italica
  Transcript Sequence Number=SeqID_62094
ITEPEITKRPKITKHYIIGLLDYKSLNYRIQNYQRPKITECCTAGLLDYPSLN

SEQ ID NO: 128069 - protein, 40 aa, Setaria italica
  Transcript Sequence Number=SeqID_62095
FHHSLLSLILISLFITECHFQASVILAFIFRLHVYPSTKN

SEQ ID NO: 128070 - protein, 44 aa, Setaria italica
  Transcript Sequence Number=SeqID_62096
  Gene Ontology: Mol. function=serine-type endopeptidase activity; Biological process=proteolysis
  Homolog annotation: Hit_ID=B9RKQ2; Match level="QueryCoverage=97%, HitCoverage=4%, E-value=3e-14, Identity=83%"; Hit description=Site-1 protease, putative
KRKSILNPAAMKQALVEGASKLSGPNMYEQGAGKLDLWQSYEIL

SEQ ID NO: 128071 - protein, 33 aa, Setaria italica
  misc_feature (30)..(30): Xaa can be any naturally occurring amino acid
  Transcript Sequence Number=SeqID_62097
LIFAGTCGYMAPELSSTMVLTEKCDVYSFXVVV

SEQ ID NO: 128072 - protein, 59 aa, Setaria italica
  Transcript Sequence Number=SeqID_62098
  Gene Ontology: Mol. function=binding; Biological process=cell redox homeostasis
  Homolog annotation: Hit_ID=B9SE65; Match level="QueryCoverage=72%, HitCoverage=6%, E-value=9e-12, Identity=79%"; Hit description=Small glutamine-rich tetratricopeptide repeat-containing protein A, putative
ILPIALKSSRGEEVSNMKFGGEVEAITGMEQFQMATSLPGVSVVHFMLDTSSPRDRLNE

SEQ ID NO: 128073 - protein, 114 aa, Setaria italica
  misc_feature (57)..(57): Xaa can be any naturally occurring amino acid
  Transcript Sequence Number=SeqID_62099
  Gene Ontology: Mol. function=hydrolase activity; Cellular component =nucleus; Biological process=mRNA transport
  Homolog annotation: Hit_ID=Q2QYE2; Match level="QueryCoverage=85%, HitCoverage=26%, E-value=1e-30, Identity=62%"; Hit description =GDA1/CD39 family protein, expressed
GVIDMGGGSVQMAYAISANAAARAPAAANGEDPYITKEYYKGKDYNVYVHSYLRYGXFAARAEILKSKNGPFSSCMLRGFSGNYTYHGKEYDATAKNQEGRQVIIEETRQGKEE

SEQ ID NO: 128074 - protein, 106 aa, Setaria italica
  misc_feature (40)..(40): Xaa can be any naturally occurring amino acid
  Transcript Sequence Number=SeqID_62100
  Gene Ontology: Mol. function=binding; Cellular component=plasma membrane
  Homolog annotation: Hit_ID=O49300; Match level="QueryCoverage=95%, HitCoverage=7%, E-value=1e-28, Identity=57%"; Hit description =T26J12.6 protein
QSPRAQVAIFVVLAMTLRRKPEVLTNIMPKIMGNNKYLGXEKLPIIVWVIAQASQGDLVTGMFCWAHSLFPTLCAKSSGNPQARDLVLQLLERILSVPQKTTNTNT

SEQ ID NO: 128075 - protein, 41 aa, Setaria italica
  Transcript Sequence Number=SeqID_62101
VWCLTQNTESYKQWERIYAENIEASVAVLSKIVIDWKDVSP

SEQ ID NO: 128076 - protein, 39 aa, Setaria italica
  Transcript Sequence Number=SeqID_62102
MRATFPVSNARIKATERFEAAYPTVKELALAGPPGSKTV

SEQ ID NO: 128077 - protein, 92 aa, Setaria italica
  misc_feature (52)..(52): Xaa can be any naturally occurring amino acid
  Transcript Sequence Number=SeqID_62103
  Gene Ontology: Mol. function=protein serine/threonine kinase activity; Cellular component=plasma membrane; Biological process =protein amino acid phosphorylation
  Homolog annotation: Hit_ID=Q6YXH0; Match level="QueryCoverage=86%, HitCoverage=21%, E-value=2e-31, Identity=77%"; Hit description =Putative calcium-dependent protein kinase
FYLVMELCRGGRLLDEVAREGRLSERRAAYVIRELMTVLEYCHEMGVVHRDXKPDNVLLTKAGRLKLADFGLAVRVADGRSRVQVVLFGSRS

SEQ ID NO: 128078 - protein, 80 aa, Setaria italica
  Transcript Sequence Number=SeqID_62104
  Gene Ontology: Mol. function=protein serine/threonine kinase activity; Cellular component=centrosome; Biological process=protein amino acid phosphorylation
  Homolog annotation: Hit_ID=B6UA37; Match level="QueryCoverage=72%, HitCoverage=14%, E-value=5e-26, Identity=94%"; Hit description =Calcium-dependent protein kinase
VFSEQRAAIVIKDLMAVLKYCHEMGVVHRDIKPENILLTKAGKMKLADFGLAARVTNGKFYAILLAFSLNLNKMVLVTLL

SEQ ID NO: 128079 - protein, 54 aa, Setaria italica
  Transcript Sequence Number=SeqID_62105
CFASCTLLHKKKCSQYVLREMSASCVFGVMSSQQVFIHVSSPLSRYDKIIETWC

SEQ ID NO: 128080 - protein, 123 aa, Setaria italica
  misc_feature (38)..(38): Xaa can be any naturally occurring amino acid
  Transcript Sequence Number=SeqID_62106
  Gene Ontology: Mol. function=protein serine/threonine kinase activity; Biological process=protein amino acid phosphorylation
  Homolog annotation: Hit_ID=B9S9E7; Match level="QueryCoverage=80%, HitCoverage=25%, E-value=3e-11, Identity=40%"; Hit description =Calcium-dependent protein kinase, putative
VQASKSAFALCFVGCLYLLMPISGHPWVLFYTECPLKXVTANLCVTNKIIAPIIPRGRLRSECESLSDLSQSSEEQDECGIVDALTAAITRVRISEPKRSRLCSPALQQECSSNLKSNLCTAF

SEQ ID NO: 128081 - protein, 88 aa, Setaria italica
  Transcript Sequence Number=SeqID_62107
  Gene Ontology: Mol. function=inositol or phosphatidylinositol phosphatase activity
  Homolog annotation: Hit_ID=B9SDQ6; Match level="QueryCoverage=100%, HitCoverage=23%, E-value=6e-26, Identity=64%"; Hit description=Myo inositol monophosphatase, putative
ILEVVMKNFKNHLILGEEGGLIGDSLSEYLWCIDPLDGTTNFAHGYPSFSVSIGVLFRGKPAASTVVEFCGGPFCWSTRTISASAGWG

SEQ ID NO: 128082 - protein, 76 aa, Setaria italica
  Transcript Sequence Number=SeqID_62108
CNGTTAVKSTTSICGQWESAAHQLTSIRTVHRDAAGSGSWPGEARTVDRHAAGSGSLAWRSSSSRPVNMTESVSWA

SEQ ID NO: 128083 - protein, 49 aa, Setaria italica
  misc_feature (41)..(41): Xaa can be any naturally occurring amino acid
  Transcript Sequence Number=SeqID_62109
LLAHSSELVCLLQEKVRRRVSQDDSSKGGSWSDIWGAPTRXQKNGKLTH

SEQ ID NO: 128084 - protein, 79 aa, Setaria italica
  misc_feature (16)..(16): Xaa can be any naturally occurring amino acid
  Transcript Sequence Number=SeqID_62110
  Gene Ontology: Mol. function=protein serine/threonine kinase activity; Biological process=protein amino acid phosphorylation
  Homolog annotation: Hit_ID=B9S365; Match level="QueryCoverage=96%, HitCoverage=22%, E-value=1e-25, Identity=68%"; Hit description =Protein kinase, putative
IQMLSKVEHLNLVKFXGYVEYEDERLILVEYVNNGTLRQHLDGSQGEPLEFAQRLNIAIDIVHAIAYLHGYTDHPIIHR

SEQ ID NO: 128085 - protein, 50 aa, Setaria italica
  Transcript Sequence Number=SeqID_62111
VCTLICIRFRGRDQGIRDFLGGRQDQFLLPLISDSLISASNSAIPLSLYH

SEQ ID NO: 128086 - protein, 50 aa, Setaria italica
  Transcript Sequence Number=SeqID_62112
SREHFELHDLDLSGKEFKAEVSVSGPFRTLKHEWGSAAWFQSTKLAVGEV

SEQ ID NO: 128087 - protein, 60 aa, Setaria italica
  Transcript Sequence Number=SeqID_62113
RYWSLCVGQFYLSRSQLSLMVYARISFKLSSDCWEMDQMSHTHIQEFWLNCIEDDKVCKS

SEQ ID NO: 128088 - protein, 62 aa, Setaria italica
  Transcript Sequence Number=SeqID_62114
LLSFISQKLQSRDNINLEVLYIETLWKLDRYMFVWDRRHHVCVALLKFPFRLSDRTMYTLLC

SEQ ID NO: 128089 - protein, 37 aa, Setaria italica
  Transcript Sequence Number=SeqID_62115
NLGKQHHLNGYKIQEFREKDIFNHSNSSAFFKVLHAD

SEQ ID NO: 128090 - protein, 128 aa, Setaria italica
  misc_feature (2)..(2): Xaa can be any naturally occurring amino acid
  misc_feature (12)..(12): Xaa can be any naturally occurring amino acid
  misc_feature (68)..(68): Xaa can be any naturally occurring amino acid
  Transcript Sequence Number=SeqID_62116
  Gene Ontology: Mol. function=two-component response regulator activity
  Homolog annotation: Hit_ID=Q2RAB7; Match level="QueryCoverage=99%, HitCoverage=17%, E-value=2e-35, Identity=60%"; Hit description=CCT motif family protein, expressed
DXFNHSNSSAFXKIWHKRIEPSAEHQFSPSLCITHQEPVHDKDPVSQPSGVLPPHEHNTGESTRQARXPLDSSTEGAAVLCSSSAREDAGASSSSHRQDSMSHPSYGFIPLPIPVGAAMPYHYGAILV

SEQ ID NO: 128091 - protein, 92 aa, Setaria italica
  misc_feature (6)..(6): Xaa can be any naturally occurring amino acid
  misc_feature (21)..(21): Xaa can be any naturally occurring amino acid
  misc_feature (39)..(39): Xaa can be any naturally occurring amino acid
  Transcript Sequence Number=SeqID_62117
  Gene Ontology: Mol. function=dolichyl-diphosphooligosaccharide -protein glycotransferase activity; Cellular component=endoplasmic reticulum membrane; Biological process=protein amino acid N-linked glycosylation via asparagine
  Homolog annotation: Hit_ID=B4FZ10; Match level="QueryCoverage=100%, HitCoverage=20%, E-value=8e-43, Identity=93%"; Hit description =Dolichyl-diphosphooligosaccharide--protein glycosyltransferase 48 kDasubunit
NDDLEXSVEIYEWSGTSWKPXYVADDVQLQFFMMSPYVXLKTMSTDKKGLYSISFKVPDVYGVFQFKVEYQRLGYTGLSFTKQIPVRPYRHN

SEQ ID NO: 128092 - protein, 65 aa, Setaria italica
  Transcript Sequence Number=SeqID_62118
  Gene Ontology: Mol. function=dolichyl-diphosphooligosaccharide -protein glycotransferase activity; Cellular component=endoplasmic reticulum membrane
  Homolog annotation: Hit_ID=B4FZ10; Match level="QueryCoverage=70%, HitCoverage=10%, E-value=4e-17, Identity=84%"; Hit description =Dolichyl-diphosphooligosaccharide--protein glycosyltransferase 48 kDasubunit
LFSNRFLKSGVQKAGSKKRYERAGNEQFVTETSKWIFHERGHLKVICCVTSQASLLFFLLQWVFC

SEQ ID NO: 128093 - protein, 75 aa, Setaria italica
  Transcript Sequence Number=SeqID_62119
  Gene Ontology: Mol. function=dolichyl-diphosphooligosaccharide -protein glycotransferase activity; Cellular component=endoplasmic reticulum membrane; Biological process=protein amino acid N-linked glycosylation via asparagine
  Homolog annotation: Hit_ID=B4FZ10; Match level="QueryCoverage=70%, HitCoverage=12%, E-value=6e-24, Identity=98%"; Hit description =Dolichyl-diphosphooligosaccharide--protein glycosyltransferase 48 kDasubunit
GVFQFKVEYQRLGYTGLSFTKQIPVRPYRHNEYERFITSAYPYYTASFSSMGACRGMPPARGSPARRRAAPRRRS

SEQ ID NO: 128094 - protein, 38 aa, Setaria italica
  Transcript Sequence Number=SeqID_62120
  Homolog annotation: Hit_ID=Q10P98; Match level="QueryCoverage=100%, HitCoverage=13%, E-value=1e-10, Identity=86%"; Hit description =Senescence-associated protein, expressed
GDITAEGLRRGEDVVKKSVGPSAKPTQVKPSTLRRMKR

SEQ ID NO: 128095 - protein, 58 aa, Setaria italica
  Transcript Sequence Number=SeqID_62121
NTRTRIAFIAEHSKRTSFKYHLEQSWTQFLQGWSHHRSEQERGGGAWRADKKIFSYHI

SEQ ID NO: 128096 - protein, 43 aa, Setaria italica
  Transcript Sequence Number=SeqID_62122
FYLDLIHGFSFHSHDLPLIRPSKTMNYRHNLMSVCRDTITGGC

SEQ ID NO: 128097 - protein, 67 aa, Setaria italica
  Transcript Sequence Number=SeqID_62123
  Gene Ontology: Mol. function=protein binding
  Homolog annotation: Hit_ID=B6T1P5; Match level="QueryCoverage=100%, HitCoverage=64%, E-value=1e-20, Identity=71%"; Hit description =p8MTCP1
  Pfam annotation: Domain name=CHCH; Domain location=24-65; Score=35.4; E_value=2.4e-07; Accession=PF06747.5; Description=CHCH domain
MGPRTIQHETVVSEAAAAAPAAPMMNGADSCGNHSKAFQDCLNHYGSDISKCQFYLDMLNECRRGGA

SEQ ID NO: 128098 - protein, 54 aa, Setaria italica
  Transcript Sequence Number=SeqID_62124
  Gene Ontology: Mol. function=glutamate-cysteine ligase activity; Cellular component=chloroplast; Biological process=glutathione biosynthetic process
  Homolog annotation: Hit_ID=B7U9Z4; Match level="QueryCoverage=100%, HitCoverage=14%, E-value=2e-23, Identity=96%"; Hit description=Gamma- glutamylcysteine synthetase
HLYQVKAVGEEMGIGFLGLGFQPKWALSDIPIMPKGRYEIMRNYMPKVGTLGHD

SEQ ID NO: 128099 - protein, 95 aa, Setaria italica
  Transcript Sequence Number=SeqID_62125
  Gene Ontology: Mol. function=glutamate-cysteine ligase activity; Cellular component=chloroplast; Biological process=glutathione biosynthetic process
  Homolog annotation: Hit_ID=B7U9Z4; Match level="QueryCoverage=100%, HitCoverage=25%, E-value=7e-42, Identity=86%"; Hit description=Gamma- glutamylcysteine synthetase
MTFDWTKEEREMLRRKVPVTGFKTPFRDGYVRHLAEEVLTLAKNGLERRGYKEVGFLREVEQVVSTGVTPAERLLNLYETKWQRNVDHVFQHLLY

SEQ ID NO: 128100 - protein, 33 aa, Setaria italica
  Transcript Sequence Number=SeqID_62126
MRGEEKGLPKYRKYWSRHVDFDQVFLRECNINP

SEQ ID NO: 128101 - protein, 44 aa, Setaria italica
  Transcript Sequence Number=SeqID_62127
MDQDEIVYQNTQSASTSSVQRSSSHQYRRDRMKQGRTSFLECTL

SEQ ID NO: 128102 - protein, 82 aa, Setaria italica
  Transcript Sequence Number=SeqID_62128
  Gene Ontology: Mol. function=binding; Cellular component=plasma membrane
  Homolog annotation: Hit_ID=B9R701; Match level="QueryCoverage=69%, HitCoverage=8%, E-value=2e-11, Identity=59%"; Hit description =Calmodulin binding protein, putative
  Pfam annotation: Domain name=TPR_1; Domain location=35-68; Score =17.4; E_value=0.048; Accession=PF00515.20; Description =Tetratricopeptide repeat
  Pfam annotation: Domain name=TPR_2; Domain location=35-68; Score =18.4; E_value=0.031; Accession=PF07719.9; Description=Tetratricopepti de repeat
  Pfam module annotation: Pfam domain module=TPR_1::TPR_2; Domain location=35-68::35-68
NKGKLLPKIIRKGKYVNQIARTFLRNALRLEPTNHRAWLSLGLVLKAEGSLVEAADCFQAAYELRELSPIQDFSEQLPIMLH

SEQ ID NO: 128103 - protein, 94 aa, Setaria italica
  Transcript Sequence Number=SeqID_62129
SILVSSVYSTRPVAVYEVNKVLLPMQIFKSDPPLAPAPAPAPDAKASDVAPSPTSGKAASAKAKAEEKNSSYQVSVSIVNYLVLAVSGGLMLLW

SEQ ID NO: 128104 - protein, 92 aa, Setaria italica
  misc_feature (82)..(82): Xaa can be any naturally occurring amino acid
  Transcript Sequence Number=SeqID_62130
  Gene Ontology: Cellular component=anchored to membrane
  Homolog annotation: Hit_ID=B6SHU5; Match level="QueryCoverage=98%, HitCoverage=34%, E-value=8e-17, Identity=50%"; Hit description =Fasciclin-like arabinogalactan protein 7
MMGFKAGIFTVTMLVIVLSSPAIAQKAKSPPAPASPILPPSPAPAPAPHHVDLADLLSVAGPFHTFLDYLQKTNVIETFQNXANNTKEASLS

SEQ ID NO: 128105 - protein, 78 aa, Setaria italica
  Transcript Sequence Number=SeqID_62131
WSDAYTEVSSIDVARDSKGELFRCLGNPCRCNVTCETSLFIEEHNIFLPHRQLYSHRIGVIGKIGITSLSFLPFPKIC

SEQ ID NO: 128106 - protein, 77 aa, Setaria italica
  Transcript Sequence Number=SeqID_62132
RERSRTSQRVVETDPEKMMMQTPHLIVGSNEFVELAACVVVCRTAAVPSYYIPLKFFKGIVSSSAPSIECTPVVVWV

SEQ ID NO: 128107 - protein, 91 aa, Setaria italica
  Transcript Sequence Number=SeqID_62133
  Subcellular localization annotation: CTP_CleavageSite=11; ConfidenceScore=5.34e-01
SKAMALSPRPLAAYSAYRSLRSSGRFVSLQNPHILCHPRRAAPPPPPPPRRLHNRHNHRTHLAPPFVGRSSVSRHASARTHPRAPPAPSFL

SEQ ID NO: 128108 - protein, 83 aa, Setaria italica
  Transcript Sequence Number=SeqID_62134
  Gene Ontology: Biological process=intracellular transport
  Homolog annotation: Hit_ID=Q10FH4; Match level="QueryCoverage=98%, HitCoverage=22%, E-value=6e-35, Identity=91%"; Hit description =RanBP1 domain containing protein, expressed
VKKAEEKGIVVVHEAKCKVYVKHDDATKGWKDIGVGQLSIRSKEGAEKASKESTPTIVIRNDVGKILLNALIYKGIKMNVQKK

SEQ ID NO: 128109 - protein, 86 aa, Setaria italica
  misc_feature (18)..(18): Xaa can be any naturally occurring amino acid
  Transcript Sequence Number=SeqID_62135
  Gene Ontology: Mol. function=carbonate dehydratase activity; Biological process=one-carbon compound metabolic process
  Homolog annotation: Hit_ID=B4G0V7; Match level="QueryCoverage=90%, HitCoverage=28%, E-value=1e-32, Identity=82%"; Hit description =Carbonic anhydrase
TSSATTPADEHGPAHWGXIKAEWANCSAGGMQSPIDLAHERVTLVRALGYLDHSYRPAQASIVNRGHDIMVRFKGDAGSVVINGTA

SEQ ID NO: 128110 - protein, 70 aa, Setaria italica
  Transcript Sequence Number=SeqID_62136
EQKRKTKKEEPYLQLHLLMLSLVLEDKSKQDCHHQPKQTQDKPIQHLLVITITPDPILQSRAGCLSKKSP

SEQ ID NO: 128111 - protein, 57 aa, Setaria italica
  misc_feature (34)..(34): Xaa can be any naturally occurring amino acid
  Transcript Sequence Number=SeqID_62137
  Gene Ontology: Mol. function=hydrolase activity, acting on ester bonds; Biological process=nucleobase, nucleoside, nucleotide and nucleic acid metabolic process
MRLLQAEELFRKVLEGGSKKKAARLLGLDVGSKXVGLAVSDEKNRIALPLSVLSRTK

SEQ ID NO: 128112 - protein, 65 aa, Setaria italica
  Transcript Sequence Number=SeqID_62138
LRVAVKHIVLVHSLNMLVINVFKTDLYLKFYFTLYYLEHWKYICLFLTKELKTILVDPCTDCIWQ

SEQ ID NO: 128113 - protein, 84 aa, Setaria italica
  Transcript Sequence Number=SeqID_62139
KYRFSAHHTTKPTPNCPCAACLECNPALSKESSYYWPAKKGKKKVLPVWNKVQDIHSQQQTDAWSKKGHQDVLDIIPVDSKSRA

SEQ ID NO: 128114 - protein, 97 aa, Setaria italica
  Transcript Sequence Number=SeqID_62140
STAAMTLHAFALCTVLLKPYGCCHYGTKAAVYISIHDIMQLCKVEMQNAYISIVVSISHETADPDLFSLSVIGQQRIDVTKETFCKITEGQRKSIPK

SEQ ID NO: 128115 - protein, 50 aa, Setaria italica
  Transcript Sequence Number=SeqID_62141
HHIISQTYQSLWVLSFISKIQALDNSLMQENDKMNWICTCSAVLELLTSA

SEQ ID NO: 128116 - protein, 73 aa, Setaria italica
  Transcript Sequence Number=SeqID_62142
  Gene Ontology: Mol. function=transferase activity; Biological process= isoprenoid biosynthetic process
  Homolog annotation: Hit_ID=Q9FET8; Match level="QueryCoverage=72%, HitCoverage=12%, E-value=1e-12, Identity=64%"; Hit description =Geranyl diphosphat synthase
ISMDIADGLENKPRARHMHLAEITEMIHISSLIHDDVLDDADTRRGMDSLNFKVGKKVISYAFSTMANLYIWG

SEQ ID NO: 128117 - protein, 42 aa, Setaria italica
  Transcript Sequence Number=SeqID_62143
CLANNRSTSSCLSVWQTLGTSASLGKASLSDIHQGIVIARVL

SEQ ID NO: 128118 - protein, 59 aa, Setaria italica
  Transcript Sequence Number=SeqID_62144
LIDDILDFTGTSASLGKASLSDIHQVIQLFTQYFFSSILLFKISMTCKESYMPCMDREL

SEQ ID NO: 128119 - protein, 78 aa, Setaria italica
  misc_feature (17)..(17): Xaa can be any naturally occurring amino acid
  Transcript Sequence Number=SeqID_62145
  Gene Ontology: Mol. function=structural molecule activity; Cellular component=clathrin coat of trans-Golgi network vesicle; Biological process=intracellular protein transport
ISELIPHEIATIEKRGXKKDKDKKPSITVIQGPKPGKPTDLSRMRQVLVKLKHAPPPHMLQPPPLRHATEDRQGTQGI

SEQ ID NO: 128120 - protein, 55 aa, Setaria italica
  Transcript Sequence Number=SeqID_62146
MEACFISDLQTMYPVAIFCRDLHQDGFISAKNIHVSITAAVSLLFSTLPNQVVCL

SEQ ID NO: 128121 - protein, 70 aa, Setaria italica
  Transcript Sequence Number=SeqID_62147
  Homolog annotation: Hit_ID=P51431; Match level="QueryCoverage=44%, HitCoverage=39%, E-value=1e-09, Identity=96%"; Hit description=40S ribosomal protein S27a
  Pfam annotation: Domain name=Ribosomal_S27; Domain location=41-70; Score=21.3; E_value=0.00033; Accession=PF01599.11; Description =Ribosomal protein S27a
PIPCVPCLSPVACLSGAKKRKKKTYTKPKKIKHKHKKVKLAVLQFYKVDDATGKVTRLRKECPNADCGAG

SEQ ID NO: 128122 - protein, 90 aa, Setaria italica
  Transcript Sequence Number=SeqID_62148
  Subcellular localization annotation: CTP_CleavageSite=50; ConfidenceScore=5.54e-01
RRRRPHRRRGPSSAGRNLQRPYPYLAGSADPSFGSRSGSSFAARLGSFFSARHQSPLVSRRIRNVVQPWRYFPAPLRLMHHFRMDQSSQF

SEQ ID NO: 128123 - protein, 75 aa, Setaria italica
  Transcript Sequence Number=SeqID_62149
  Gene Ontology: Cellular component=integral to membrane
  Homolog annotation: Hit_ID=B9S7D1; Match level="QueryCoverage=89%, HitCoverage=11%, E-value=9e-18, Identity=76%"; Hit description =Transporter, putative
EPFSFRLCYESNFEMILTSNKRFLFHSAIFIFLLALVGVFYPYNRGALFTALVVIYALTSGIAGYTATSFYLQLE

SEQ ID NO: 128124 - protein, 135 aa, Setaria italica
  Transcript Sequence Number=SeqID_62150
  Gene Ontology: Mol. function=protein phosphatase type 2A regulator activity; Cellular component=protein phosphatase type 2A complex; Biological process=signal transduction
  Homolog annotation: Hit_ID=B9SH46; Match level="QueryCoverage=78%, HitCoverage=19%, E-value=4e-39, Identity=71%"; Hit description =Protein phosphatase 2a, regulatory subunit, putative
MNSSHFQVAERALFLWNNDHIENLIKQNYKVLLPIIYPALERNTRDHWNQAVRSLTLNVRKIFSDHDSAFFGECVQRFNDEELKQEESDLKREALWKRLEEMATSKPEFQAQGSKSCKANGCHCGCPSQQFDWIC

SEQ ID NO: 128125 - protein, 52 aa, Setaria italica
  Transcript Sequence Number=SeqID_62151
TDPTKKPEGKRKVKRQTLMELVDYVTSANGKFSEVLIHNLQVRPCRVHEGLI

SEQ ID NO: 128126 - protein, 83 aa, Setaria italica
  Transcript Sequence Number=SeqID_62152
  Gene Ontology: Mol. function=peptide-methionine-(S)-S-oxide reductase activity
  Homolog annotation: Hit_ID=A7U629; Match level="QueryCoverage=78%, HitCoverage=34%, E-value=1e-25, Identity=80%"; Hit description =Chloroplast methionine sulfoxide reductase B2
  Pfam annotation: Domain name=SelR; Domain location=2-83; Score=33.2; E_value=1.5e-12; Accession=PF01641.10; Description=SelR domain
TDSAHGQSNGRHVNVHAEYKSYSSFCSAFFEGLPGAINRTPDPDGRRVEITCAACGGHLGHVFKGEGFKTPTDERHCVNSVSI

SEQ ID NO: 128127 - protein, 52 aa, Setaria italica
  Transcript Sequence Number=SeqID_62153
  Gene Ontology: Mol. function=peptide-methionine-(S)-S-oxide reductase activity
  Homolog annotation: Hit_ID=A7U629; Match level="QueryCoverage=92%, HitCoverage=23%, E-value=2e-17, Identity=83%"; Hit description =Chloroplast methionine sulfoxide reductase B2
  Pfam annotation: Domain name=SelR; Domain location=5-51; Score=-17.5; E_value=2.1e-07; Accession=PF01641.10; Description=SelR domain
MFRLPGTGEYNKFKADGVYNCAGCGTPLYKSDTKFDSGCGWPAFFEGLPGAI

SEQ ID NO: 128128 - protein, 52 aa, Setaria italica
  Transcript Sequence Number=SeqID_62154
  Gene Ontology: Mol. function=binding; Cellular component =intracellular; Biological process=RNA processing
  Homolog annotation: Hit_ID=Q10MH5; Match level="QueryCoverage=88%, HitCoverage=8%, E-value=2e-15, Identity=86%"; Hit description=TPR Domain containing protein, expressed
WPAASVKQGGSGWRARELFDAATVADAKHIAAWHGWAILEIKQGNVKKARNL

SEQ ID NO: 128129 - protein, 73 aa, Setaria italica
  misc_feature (14)..(14): Xaa can be any naturally occurring amino acid
  Transcript Sequence Number=SeqID_62155
FAIPVSRVNSKKEXIIMKLLDFIAEPRANDDSTLSDDQGSNSRKRKREGGSAAKNSEGTHKRSRKSFIITKKF

SEQ ID NO: 128130 - protein, 52 aa, Setaria italica
  Transcript Sequence Number=SeqID_62156
WLPRAAVFVLVDLMVVMVGRPKGIFKECGKRIDSGLRLIHDVAKLTMTATGL

SEQ ID NO: 128131 - protein, 42 aa, Setaria italica
  Transcript Sequence Number=SeqID_62157
  Homolog annotation: Hit_ID=Q7XVZ2; Match level="QueryCoverage=100%, HitCoverage=6%, E-value=5e-17, Identity=97%"; Hit description =OSJNBa0020I02.8 protein
ALELVGPAYRTMDSFVGVREKTCIIFVYGLLLMRQHNPQEAR

SEQ ID NO: 128132 - protein, 98 aa, Setaria italica
  Transcript Sequence Number=SeqID_62158
  Gene Ontology: Mol. function=argininosuccinate lyase activity; Cellular component=cytoplasm; Biological process=arginine biosynthetic process via ornithine
  Homolog annotation: Hit_ID=B9RJX6; Match level="QueryCoverage=77%, HitCoverage=15%, E-value=2e-34, Identity=89%"; Hit description =Argininosuccinate lyase, putative
LGIRKELELTQLEQGLQEPRKDLKFTAPMKNSIDAVSDRDFVLEFLAANSIAAVHLSRIGEEWVLWASEEFGFLTPSDKVSTGSSIMPQKKNPDPMEL

SEQ ID NO: 128133 - protein, 56 aa, Setaria italica
  Transcript Sequence Number=SeqID_62159
  Gene Ontology: Mol. function=argininosuccinate lyase activity; Biological process=arginine biosynthetic process via ornithine
  Homolog annotation: Hit_ID=C4P7J4; Match level="QueryCoverage=64%, HitCoverage=15%, E-value=3e-13, Identity=94%"; Hit description =Argininosuccinate lyase (Fragment)
SFILLIHHVSLVLLASKYVDLIVPGYTHLQRAQPVLLPHLLLSYVEQLERDAGRLV

SEQ ID NO: 128134 - protein, 73 aa, Setaria italica
  Transcript Sequence Number=SeqID_62160
  Subcellular localization annotation: CTP_CleavageSite=36; ConfidenceScore=5.08e-01
ASTLYETSILSGPRVRKYPSSSCAYYTCPMISPQVRTTAPVSQLVADHSCSRVLGQSLAQHPAQYRTARRLLE

SEQ ID NO: 128135 - protein, 96 aa, Setaria italica
  Transcript Sequence Number=SeqID_62161
  Gene Ontology: Mol. function=transferase activity; Cellular component= cytoplasm; Biological process='de novo' pyrimidine base biosynthetic process
  Homolog annotation: Hit_ID=B6TC37; Match level="QueryCoverage=94%, HitCoverage=26%, E-value=2e-41, Identity=87%"; Hit description =Uridylate kinase
TKLFDGVYDADPRHNPNAHLLETVSYHEVTTRDLSVMDMTAITLCQENNIPVVVFNLQKPGNIAKAIVGEKVGTFIGCTRNQEQNGNAMGEERRLG

SEQ ID NO: 128136 - protein, 56 aa, Setaria italica
  Transcript Sequence Number=SeqID_62162
  Gene Ontology: Mol. function=pyridoxal phosphate binding
  Homolog annotation: Hit_ID=Q338J0; Match level="QueryCoverage=100%, HitCoverage=10%, E-value=5e-16, Identity=78%"; Hit description =Pyridoxal-dependent decarboxylase conserved domain containing protein, expressed
MGSLPLDASLRPLDPEAFSGESRAVVDFLAEYYRGVDKYPVRAADLEPGLLRKLLP

SEQ ID NO: 128137 - protein, 61 aa, Setaria italica
  Transcript Sequence Number=SeqID_62163
  Gene Ontology: Mol. function=pyridoxal phosphate binding; Biological process=cellular amino acid and derivative metabolic process
  Homolog annotation: Hit_ID=Q338J0; Match level="QueryCoverage=100%, HitCoverage=11%, E-value=1e-20, Identity=83%"; Hit description =Pyridoxal-dependent decarboxylase conserved domain containing protein, expressed
MGSLPLDAPVQPLDPEAFAGDSRAVVDFLAEYYRDVDKYPVRAADLEPGRLRKLLPDSAPE

SEQ ID NO: 128138 - protein, 69 aa, Setaria italica
  Transcript Sequence Number=SeqID_62164
  Gene Ontology: Mol. function=peroxidase activity
YPLCALPSPVACLRAVEDVQDELVIWKRISDEATRMQASARAEELMDPEILEQLVAPVEAPKLDVEYSA

SEQ ID NO: 128139 - protein, 67 aa, Setaria italica
  Transcript Sequence Number=SeqID_62165
GDARGGAGKCLEADRVYGEGGRVVEFRGGGGGGCGGLLYVMEAALNLCFPDQIQTARLLTSVLIVES

SEQ ID NO: 128140 - protein, 81 aa, Setaria italica
  Transcript Sequence Number=SeqID_62166
  Subcellular localization annotation: CTP_CleavageSite=44; ConfidenceScore=5.24e-01
TTNRPNRSTDRIASSPEPLPVSRHRPRRPLHQSRACPCPGRPFPAAGLDALKVLVVLHRLIQRITTASRQSVPESMLASVY

SEQ ID NO: 128141 - protein, 65 aa, Setaria italica
  misc_feature (13)..(13): Xaa can be any naturally occurring amino acid
  Transcript Sequence Number=SeqID_62167
  Gene Ontology: Mol. function=lipid binding; Cellular component=plasma membrane
  Homolog annotation: Hit_ID=B6SYE1; Match level="QueryCoverage=76%, HitCoverage=9%, E-value=2e-18, Identity=80%"; Hit description=Lipid binding protein
LLFTKVEGMEVGXSMGMKNQNGSLKLSVMECGCYMKELDITLNGGASWFYQVYVVHKFVLQALCC

SEQ ID NO: 128142 - protein, 67 aa, Setaria italica
  Transcript Sequence Number=SeqID_62168
  Gene Ontology: Mol. function=transporter activity; Cellular component= integral to membrane; Biological process=transport
  Homolog annotation: Hit_ID=Q9ATN1; Match level="QueryCoverage=53%, HitCoverage=11%, E-value=1e-11, Identity=94%"; Hit description =Aquaporin NIP3-1
SSECRTFRRPFLLISSFAIIRGSACCSEFQIKLGAEFMGTFILIFFATAAPIVNQKYGGVISPFGNA

SEQ ID NO: 128143 - protein, 32 aa, Setaria italica
  Transcript Sequence Number=SeqID_62169
EGTPLEFATESTGDKITLSSASALLKRLRLFF

SEQ ID NO: 128144 - protein, 53 aa, Setaria italica
  Transcript Sequence Number=SeqID_62170
MNADGDQSEYVNGISSILSSSIPVLGSLLSPTYFQYFLDKLAASLGPRFYLNI

SEQ ID NO: 128145 - protein, 122 aa, Setaria italica
  misc_feature (27)..(27): Xaa can be any naturally occurring amino acid
  misc_feature (115)..(115): Xaa can be any naturally occurring amino acid
  Transcript Sequence Number=SeqID_62171
  Homolog annotation: Hit_ID=Q9LPS3; Match level="QueryCoverage=99%, HitCoverage=15%, E-value=2e-38, Identity=59%"; Hit description =F11F12.15 protein
CRFFLVIRKSLKRCSALTKNQTLFNLXFRLPKGGTGIVAAATGTDGQIRTSDRDERMICYIVNTAEYCHQTSGELAENVSKMINPQFADKVDMSEVQDEFSAVITKALMTLVHGXETKFDAE

SEQ ID NO: 128146 - protein, 80 aa, Setaria italica
  Transcript Sequence Number=SeqID_62172
  Gene Ontology: Cellular component=mitochondrion
  Homolog annotation: Hit_ID=B9SJ81; Match level="QueryCoverage=97%, HitCoverage=27%, E-value=6e-15, Identity=48%"; Hit description =Pentatricopeptide repeat-containing protein, putative
  Pfam annotation: Domain name=PPR; Domain location=15-49; Score=44.9; E_value=3.2e-10; Accession=PF01535.12; Description=PPR repeat
LLKDMLDEGLTPDAVTYSMLINMFAKLGDLEEAETVLKQMTASGFVPDIAVFDSLIKGYSAEGQINKVLKLVHELRDKNC

SEQ ID NO: 128147 - protein, 79 aa, Setaria italica
  Transcript Sequence Number=SeqID_62173
SNVMIYICKHCGFVWMQPSSKLPGQAILQAIADSLQAVARMEWILQWSELAISIDTFPWSKIRTQDTSFSFFLLVHVFL

SEQ ID NO: 128148 - protein, 51 aa, Setaria italica
  Transcript Sequence Number=SeqID_62174
MLSMEAFPSLVVIISVLASFLFARNCRLLRHGVDNHPPYVKKHVVEKLPCS

SEQ ID NO: 128149 - protein, 63 aa, Setaria italica
  Transcript Sequence Number=SeqID_62175
FFGPLDGRFYPVYYTLSYFFSRIWRKFRTKVKRFEFKSLLPKREKHAVPPAGERRLASSGVRR

SEQ ID NO: 128150 - protein, 52 aa, Setaria italica
  Transcript Sequence Number=SeqID_62176
  Gene Ontology: Cellular component=plasma membrane
  Homolog annotation: Hit_ID=Q9XI89; Match level="QueryCoverage=98%, HitCoverage=10%, E-value=6e-18, Identity=80%"; Hit description =F7A19.6 protein
RFSFISRKGLETFRERLKHGVLDLGLTIQAQKTEELPEHVLCCMRLNKIDFA

SEQ ID NO: 128151 - protein, 80 aa, Setaria italica
  Transcript Sequence Number=SeqID_62177
QCNASNMIERLASSRGRGRRRTYDVGHGLPSPVVAGGTVVVVGEVPLLHVIAIRDDGKGVRLVLVLRLIAGGGFVHHNIC

SEQ ID NO: 128152 - protein, 50 aa, Setaria italica
  Transcript Sequence Number=SeqID_62178
  Gene Ontology: Cellular component=integral to membrane; Biological process=protein transport
  Homolog annotation: Hit_ID=Q6Z8F5; Match level="QueryCoverage=100%, HitCoverage=17%, E-value=5e-21, Identity=100%"; Hit description =Secretory carrier-associated membrane protein 5
LTGILAAIDTFSDHAIVGIFYFVGFALFCLETLVSIWVLQKVYMYFRGHK

SEQ ID NO: 128153 - protein, 109 aa, Setaria italica
  misc_feature (37)..(37): Xaa can be any naturally occurring amino acid
  misc_feature (52)..(52): Xaa can be any naturally occurring amino acid
  misc_feature (60)..(60): Xaa can be any naturally occurring amino acid
  Transcript Sequence Number=SeqID_62179
  Gene Ontology: Cellular component=integral to membrane; Biological process=protein transport
  Homolog annotation: Hit_ID=Q6Z8F5; Match level="QueryCoverage=100%, HitCoverage=45%, E-value=2e-46, Identity=77%"; Hit description =Secretory carrier-associated membrane protein 5
  Pfam annotation: Domain name=SCAMP; Domain location=1-109; Score =66.4; E_value=1e-16; Accession=PF04144.5; Description=SCAMP family
IIHHDIANEIPANAQKLQYLAFASWLGIVLCLFWNFXIAVIVCWIRGGDSKXFSWLLSMXTDSAFSFGWFFLCYLLHIGFCVFAAIAPPIIFRGKSLTGILAAIDTFSD

SEQ ID NO: 128154 - protein, 83 aa, Setaria italica
  Transcript Sequence Number=SeqID_62180
PARSRSRCPMARRRNRARQAARTCGEWIDQHWMRIAISPASDVAGRRFTPRRTGGGSSWHPGAAAATCPRRGRAARTPWRGPA

SEQ ID NO: 128155 - protein, 122 aa, Setaria italica
  misc_feature (101)..(101): Xaa can be any naturally occurring amino acid
  Transcript Sequence Number=SeqID_62181
  Gene Ontology: Mol. function=protein binding; Biological process=RNA metabolic process
  Homolog annotation: Hit_ID=Q00V28; Match level="QueryCoverage=91%, HitCoverage=10%, E-value=3e-09, Identity=33%"; Hit description =Protein involved in high osmolarity signaling pathway (ISS)
LTTRKIRPTLFRSVPRSVGSQIIGDEVLASCSRGPRGNEQYAAVFAAFVAGMSCLVGIDFSAKILASIAKTFEDEYSKEDGLSLRNLTLLFCYLCIFGVIXSSDLVYDLLSTLSKRLTELDV

SEQ ID NO: 128156 - protein, 55 aa, Setaria italica
  Transcript Sequence Number=SeqID_62182
  Gene Ontology: Mol. function=metal ion binding
  Homolog annotation: Hit_ID=B6SW07; Match level="QueryCoverage=81%, HitCoverage=6%, E-value=1e-18, Identity=84%"; Hit description=Zinc finger, C3HC4 type family protein
  Pfam annotation: Domain name=zf-C3HC4; Domain location=12-48; Score =19.9; E_value=0.00055; Accession=PF00097.17; Description=Zinc finger, C3HC4 type (RING finger)
GIIYLCSFFLVQEEYVDGDNLGRLDCGHDFHVGCIKQWLVLKNVCPICKSTALKT

SEQ ID NO: 128157 - protein, 69 aa, Setaria italica
  misc_feature (3)..(3): Xaa can be any naturally occurring amino acid
  misc_feature (41)..(41): Xaa can be any naturally occurring amino acid
  Transcript Sequence Number=SeqID_62183
QPXKIQPTKVGPVFSPFSTHFSEFREANPLTESNQIQAISXGKNRVLKQPKLLVIQIPYLFQLLVPSCI

SEQ ID NO: 128158 - protein, 124 aa, Setaria italica
  misc_feature (37)..(37): Xaa can be any naturally occurring amino acid
  Transcript Sequence Number=SeqID_62184
  Gene Ontology: Mol. function=protein domain specific binding; Cellular component=endosome membrane; Biological process=protein transport
  Homolog annotation: Hit_ID=B3TM11; Match level="QueryCoverage=98%, HitCoverage=54%, E-value=7e-30, Identity=60%"; Hit description =Breast adenocarcinoma marker-like
  Pfam annotation: Domain name=Snf7; Domain location=4-92; Score=-21.1; E_value=0.00045; Accession=PF03357.13; Description=Snf7
VLLGDAMKGVTKAMAQMNRQLNLPGLQKIMQEFERQXNERMEMVSEVMGDAIDDALEGDEEEEETEELVNQVLDEIGIDINQELVGAPSAAVAQPASAGKVAQAESAGAADGGIDADLQARLDN

SEQ ID NO: 128159 - protein, 65 aa, Setaria italica
  misc_feature (21)..(21): Xaa can be any naturally occurring amino acid
  Transcript Sequence Number=SeqID_62185
  Gene Ontology: Biological process=protein transport
  Homolog annotation: Hit_ID=B3TM11; Match level="QueryCoverage=73%, HitCoverage=21%, E-value=2e-12, Identity=79%"; Hit description =Breast adenocarcinoma marker-like
ESCRPQEKKLITEIKKTAKRXAQMGAVKVMAKDLIRTRHQITKFYQLKILQDYQRKFTTKEVTRT

SEQ ID NO: 128160 - protein, 100 aa, Setaria italica
  misc_feature (32)..(32): Xaa can be any naturally occurring amino acid
  Transcript Sequence Number=SeqID_62186
  Gene Ontology: Mol. function=nucleic acid binding; Cellular component= intracellular
  Homolog annotation: Hit_ID=Q69IN3; Match level="QueryCoverage=100%, HitCoverage=19%, E-value=7e-44, Identity=83%"; Hit description =ARIADNE-like protein
  Pfam annotation: Domain name=IBR; Domain location=1-60; Score=71.3; E_ value=3.4e-18; Accession=PF01485.13; Description=IBR domain
YARFLLRTYVEGSKKTKWCPAPDCTCAVEFLXDENYDVSCNCKFNFCWNCTEEAHRPVNCETVSKWILKNSAESENMNWILANSKPCPKCKRPIEKNQGC

SEQ ID NO: 128161 - protein, 75 aa, Setaria italica
  Transcript Sequence Number=SeqID_62187
  Subcellular localization annotation: CTP_CleavageSite=64; ConfidenceScore=5.75e-01
YFGGINRATSQFFFTGPPSFFSQVSQKVRQNPTHKTQITTSQLIFTRNNRHRLANQMNPHAHFSASIPFATETLR

SEQ ID NO: 128162 - protein, 84 aa, Setaria italica
  Transcript Sequence Number=SeqID_62188
LILVALTKQREVSVLQGGDPAERLARGNELEISARISLEMTTNCYSRGASESARTLRARWCGAFCSHAAMSRGTPRRRRRPPPG

SEQ ID NO: 128163 - protein, 76 aa, Setaria italica
  Transcript Sequence Number=SeqID_62189
  Subcellular localization annotation: CTP_CleavageSite=42; ConfidenceScore=5.33e-01
VPCSWIKEKERGKKRALFLRPAVSLSLAGSHSSGSSAPSWFVAQRLRSLSLSSWEFRVTSRGVGGERMIAGYLSWF

SEQ ID NO: 128164 - protein, 76 aa, Setaria italica
  Transcript Sequence Number=SeqID_62190
  Gene Ontology: Mol. function=protein serine/threonine kinase activity; Biological process=protein amino acid phosphorylation
LGFLGVTWLYLTARPGVLSGAVDTYVLAPLQLALDSVLGRRSLKMSDFVVGERIGEGSFGVVYAGAVVPKNGAVRW

SEQ ID NO: 128165 - protein, 67 aa, Setaria italica
  Transcript Sequence Number=SeqID_62191
  Gene Ontology: Mol. function=protein serine/threonine kinase activity; Biological process=protein amino acid phosphorylation
STSVGRPDLQILDLDSGRGWDLATKLISERGANGGGRLSAAAALRHPYFLLGGDQAAAVLSKLSLIK

SEQ ID NO: 128166 - protein, 68 aa, Setaria italica
  Transcript Sequence Number=SeqID_62192
TDLRIGKNYVPDRALLDPDYCPPELYVLPEETPEPPPEPIAAILSPILWQGARASPRGGRRARAVHDA

SEQ ID NO: 128167 - protein, 144 aa, Setaria italica
  Transcript Sequence Number=SeqID_62193
  Homolog annotation: Hit_ID=B9T6B8; Match level="QueryCoverage=95%, HitCoverage=65%, E-value=3e-24, Identity=32%"; Hit description =Pentatricopeptide repeat-containing protein, putative
  Pfam annotation: Domain name=PPR; Domain location=27-61; Score=32.6; E_value=1.6e-06; Accession=PF01535.12; Description=PPR repeat
  Pfam annotation: Domain name=PPR; Domain location=97-131; Score=5.4; E_value=2.1; Accession=PF01535.12; Description=PPR repeat
  Pfam module annotation: Pfam domain module=PPR::PPR; Domain location =27-61::97-131
SLDMYCKCGNVVSAEYVFATMPLRTVVTWNCMIGGYALNERPVDAFDCFMQMGAEGFQVEVVTAINLLAACAQTESSLYGRSAHAYVIRRHFLPHVVLETALLDMYGKVGKVESSEKVFDQITDKTLVSWNNMIAAYMYKENSN

SEQ ID NO: 128168 - protein, 72 aa, Setaria italica
  misc_feature (10)..(10): Xaa can be any naturally occurring amino acid
  Transcript Sequence Number=SeqID_62194
  Homolog annotation: Hit_ID=B9S5I4; Match level="QueryCoverage=98%, HitCoverage=14%, E-value=6e-10, Identity=42%"; Hit description =Pentatricopeptide repeat-containing protein, putative
  Pfam annotation: Domain name=PPR; Domain location=20-54; Score=24.7; E_value=0.00037; Accession=PF01535.12; Description=PPR repeat
VGKVESSEKXFDQITDKTLVSWNNMIAAYMYKEMYWEAIALFLELLNQPLYPDYFTMTTVVPAFVLLGSLRQ

SEQ ID NO: 128169 - protein, 50 aa, Setaria italica
  misc_feature (45)..(45): Xaa can be any naturally occurring amino acid
  Transcript Sequence Number=SeqID_62195
  Gene Ontology: Mol. function=transporter activity; Cellular component= mitochondrial inner membrane; Biological process=transport
  Homolog annotation: Hit_ID=Q6H6J3; Match level="QueryCoverage=88%, HitCoverage=10%, E-value=2e-13, Identity=81%"; Hit description =Putative mitochondrial solute carrier protein
  Pfam annotation: Domain name=Mito_carr; Domain location=2-49; Score= -13.0; E_value=0.052; Accession=PF00153.19; Description=Mitochondrial carrier protein
MNAKAARSITAPQGLNSFYRGNGASVARIVPYAALHYMAYEEYRXWIILG

SEQ ID NO: 128170 - protein, 96 aa, Setaria italica
  Transcript Sequence Number=SeqID_62196
  Gene Ontology: Mol. function=protein binding; Cellular component =signalosome; Biological process=red or far red light signaling pathway
  Homolog annotation: Hit_ID=B6TDB7; Match level="QueryCoverage=87%, HitCoverage=19%, E-value=2e-32, Identity=79%"; Hit description=COP9 signalosome complex subunit 3
LNAIAVEAYKKYILVSLIQNGQVPSFPKYTSATAQRNMKNHAQIYVELSTCYGNGRYTDLETFVESNAAVFQSDNNLGLAKQYLQVTELSRSGLVR

SEQ ID NO: 128171 - protein, 92 aa, Setaria italica
  misc_feature (62)..(62): Xaa can be any naturally occurring amino acid
  Transcript Sequence Number=SeqID_62197
  Gene Ontology: Mol. function=tRNA (guanine-N7-)-methyltransferase activity
  Homolog annotation: Hit_ID=C0PGS2; Match level="QueryCoverage=88%, HitCoverage=11%, E-value=6e-18, Identity=61%"; Hit description =Phosphoglycerate kinase
FHSCHVNTLSSAGNGLFLFQMAKSYESSNFLGLEMNEKVSTAFYSMESHFFYNLFSNSHLLXLVIRCLQGMAWDEKRNLHFVATNATSTFHS

SEQ ID NO: 128172 - protein, 39 aa, Setaria italica
  Transcript Sequence Number=SeqID_62198
  Gene Ontology: Mol. function=ubiquitin-protein ligase activity; Cellular component=ubiquitin ligase complex; Biological process =ubiquitin-dependent protein catabolic process
  Homolog annotation: Hit_ID=B9SUD5; Match level="QueryCoverage=92%, HitCoverage=6%, E-value=2e-09, Identity=72%"; Hit description=E3 ubiquitin ligase PUB14, putative
LVQLLLSSFQTYERPCIQKWLDSGHKTCPKTQQPLSHTS

SEQ ID NO: 128173 - protein, 112 aa, Setaria italica
  Transcript Sequence Number=SeqID_62199
  Gene Ontology: Mol. function=ubiquitin-protein ligase activity; Cellular component=ubiquitin ligase complex; Biological process =ubiquitin-dependent protein catabolic process
  Homolog annotation: Hit_ID=B9T786; Match level="QueryCoverage=90%, HitCoverage=15%, E-value=1e-20, Identity=51%"; Hit description =Spotted leaf protein, putative
EVQEQVALVHSQFKRAATRMDPPDAQLSKDISSALADKTFDPLVFTRISEKLQLQTMADIKKESVALHEMVISSGGEPDGCVEEMSSLLKKLKDCVITEPPAPEDDYGRPRL

SEQ ID NO: 128174 - protein, 90 aa, Setaria italica
  Transcript Sequence Number=SeqID_62200
  Gene Ontology: Mol. function=signal transducer activity; Cellular component=plasma membrane; Biological process=response to light stimulus
  Homolog annotation: Hit_ID=B9T0N5; Match level="QueryCoverage=100%, HitCoverage=18%, E-value=4e-31, Identity=61%"; Hit description=Root phototropism protein, putative
  Pfam annotation: Domain name=NPH3; Domain location=1-90; Score= -101.8; E_value=0.00081; Accession=PF03000.6; Description=NPH3 family
LQLEMASLDDLLIPSTQTSDSMFDVDTCGYDSDGLKSPSHSSVLKVGRLMDGYLAEIAPDPYLKLQKFMALIELLPDYARIVDDGLYRAI

SEQ ID NO: 128175 - protein, 96 aa, Setaria italica
  Transcript Sequence Number=SeqID_62201
  Gene Ontology: Mol. function=nucleotide binding
  Homolog annotation: Hit_ID=B6SVC7; Match level="QueryCoverage=93%, HitCoverage=15%, E-value=8e-43, Identity=94%"; Hit description=Auxin- independent growth promoter
LASKEELAPFLPYSSRMAALDFIVCDRSDVFVTNNNGNMARMLAGRRRYFGHRRTIRPNAKKLYSLFLNRTSMSWDRFASKVQTFQKGFLLGVVPN

SEQ ID NO: 128176 - protein, 32 aa, Setaria italica
  Transcript Sequence Number=SeqID_62202
QLIDVSRTQLNHIKRLKQSGDGIQTKHVSRVI

SEQ ID NO: 128177 - protein, 80 aa, Setaria italica
  misc_feature (22)..(22): Xaa can be any naturally occurring amino acid
  Transcript Sequence Number=SeqID_62203
ETFSLESLRGVLSYESLFLIVXWSTCLTETERKFLKQFLPSETDAEENVHLLLTGKNHHFGNPFLSWSSSLCYGDIHPDA

SEQ ID NO: 128178 - protein, 46 aa, Setaria italica
  misc_feature (30)..(30): Xaa can be any naturally occurring amino acid
  Transcript Sequence Number=SeqID_62204
  Gene Ontology: Mol. function=5'-3' exonuclease activity; Cellular component=nucleus
  Homolog annotation: Hit_ID=B4FJZ1; Match level="QueryCoverage=80%, HitCoverage=8%, E-value=1e-14, Identity=94%"; Hit description=DNA polymerase I
LDMLEFIPSHAAVVFDHDGVPYGHYTAMPXKECHMDKRNRTLFVHY

SEQ ID NO: 128179 - protein, 43 aa, Setaria italica
  misc_feature (15)..(15): Xaa can be any naturally occurring amino acid
  misc_feature (38)..(38): Xaa can be any naturally occurring amino acid
  Transcript Sequence Number=SeqID_62205
  Gene Ontology: Mol. function=glucose-6-phosphate dehydrogenase activity; Cellular component=chloroplast; Biological process =carbohydrate metabolic process
  Homolog annotation: Hit_ID=B7ZXD2; Match level="QueryCoverage=100%, HitCoverage=9%, E-value=3e-15, Identity=90%"; Hit description =Glucose-6-phosphate 1-dehydrogenase
VKVLRSMKPLQLEDXVVIGQYKSHTKGGTTYPGYTDEXTVPKD

SEQ ID NO: 128180 - protein, 108 aa, Setaria italica
  misc_feature (6)..(6): Xaa can be any naturally occurring amino acid
  misc_feature (41)..(41): Xaa can be any naturally occurring amino acid
  Transcript Sequence Number=SeqID_62206
  Gene Ontology: Mol. function=glucose-6-phosphate dehydrogenase activity; Cellular component=chloroplast; Biological process =carbohydrate metabolic process
  Homolog annotation: Hit_ID=B7ZXD2; Match level="QueryCoverage=88%, HitCoverage=22%, E-value=4e-50, Identity=96%"; Hit description =Glucose-6-phosphate 1-dehydrogenase
IVEKPXGRDSESSAALTRGLKQYLVEDQIFRIDHYLGKELXENLSVLRFSNLVFEPLWSRQYIRNVQLIFSEDFGTEGRGGYFDGYGIIRDIMQNHLLLVLLSPLFCS

SEQ ID NO: 128181 - protein, 95 aa, Setaria italica
  Transcript Sequence Number=SeqID_62207
IVCSSSLQADITDGVDIKFELCQVACQEGIQQICETTAYKVTFYDLGHVLWDTLYVGDTASNRVEVLLRELDPVLETISGTVHNKVRNRAFISAV

SEQ ID NO: 128182 - protein, 72 aa, Setaria italica
  Transcript Sequence Number=SeqID_62208
  Gene Ontology: Cellular component=integral to membrane
LGRPTHKPPVTIGFEFDWRSGVSAKDWPSVAKKGKVDVSISPSRFLPSFCSNRYQSGQAVVLVSDSVCRINQ

SEQ ID NO: 128183 - protein, 29 aa, Setaria italica
  Transcript Sequence Number=SeqID_62209
MVAQVTSPYGNSMHYAENVQSGHFAFTAT

SEQ ID NO: 128184 - protein, 35 aa, Setaria italica
  Transcript Sequence Number=SeqID_62210
GVTFLCERLIYVTEREAHFSSMTHIVSYMGSRSVT

SEQ ID NO: 128185 - protein, 38 aa, Setaria italica
  Transcript Sequence Number=SeqID_62211
DTRHQGHIWNHTATAGVCTGAVVQEDDVRLSGYPPLLP

SEQ ID NO: 128186 - protein, 53 aa, Setaria italica
  Transcript Sequence Number=SeqID_62212
  Homolog annotation: Hit_ID=A5A153; Match level="QueryCoverage=98%, HitCoverage=36%, E-value=1e-11, Identity=73%"; Hit description =Apomixis-related protein Pca21
CGCGNGARADVARKTKEVEHMLANLEKEGVEIDGKIASIIDDEVARIKAEAAR

SEQ ID NO: 128187 - protein, 83 aa, Setaria italica
  misc_feature (10)..(10): Xaa can be any naturally occurring amino acid
  misc_feature (13)..(13): Xaa can be any naturally occurring amino acid
  Transcript Sequence Number=SeqID_62213
  Homolog annotation: Hit_ID=A5A153; Match level="QueryCoverage=100%, HitCoverage=59%, E-value=3e-13, Identity=56%"; Hit description =Apomixis-related protein Pca21
  Subcellular localization annotation: CTP_CleavageSite=38; ConfidenceScore=5.10e-01
MALRSPSSTXPRXLGPGDSPPADSPPPTSQCGCGNGARADVARKTKEVEHMLANLEKEGVEIDGKIASIIDDEVARIKAEAAR

SEQ ID NO: 128188 - protein, 121 aa, Setaria italica
  misc_feature (53)..(53): Xaa can be any naturally occurring amino acid
  misc_feature (65)..(65): Xaa can be any naturally occurring amino acid
  misc_feature (90)..(90): Xaa can be any naturally occurring amino acid
  Transcript Sequence Number=SeqID_62214
  Gene Ontology: Mol. function=protein binding; Cellular component =protein complex; Biological process=anaphase-promoting complex -dependent proteasomal ubiquitin-dependent protein catabolic process
  Homolog annotation: Hit_ID=Q9LT08; Match level="QueryCoverage=94%, HitCoverage=36%, E-value=1e-41, Identity=76%"; Hit description=26S proteasome non-ATPase regulatory subunit 14
NTQQSFEALNPRAVAVVIDPIQSVKGKVVIDAFRLINPQTMMLGQEPRQTTSXMFGHLNKPSIQXLIHGLNRHYYSIAINYRKNELEEKXMLLNLHKKKWTDGLILKRFDTHSKNQIEDKN

SEQ ID NO: 128189 - protein, 57 aa, Setaria italica
  Transcript Sequence Number=SeqID_62215
  Gene Ontology: Mol. function=protein binding; Cellular component =protein complex; Biological process=anaphase-promoting complex -dependent proteasomal ubiquitin-dependent protein catabolic process
  Homolog annotation: Hit_ID=Q1M303; Match level="QueryCoverage=100%, HitCoverage=24%, E-value=2e-25, Identity=98%"; Hit description=26S proteasome subunit 11 (Fragment)
VKYNKAVQEEDELPPEKLAIANVGRQDAKKHLEEHVSNLMSSNIVQTLGTMLDTVVF

SEQ ID NO: 128190 - protein, 61 aa, Setaria italica
  Transcript Sequence Number=SeqID_62216
  Gene Ontology: Mol. function=protein binding; Cellular component =protein complex; Biological process=anaphase-promoting complex -dependent proteasomal ubiquitin-dependent protein catabolic process
  Homolog annotation: Hit_ID=Q1M303; Match level="QueryCoverage=100%, HitCoverage=26%, E-value=5e-27, Identity=96%"; Hit description=26S proteasome subunit 11 (Fragment)
LNLAVKYNKAVQEEDELPPEKLAIANVGRQDAKKHLEEHVSNLMSSNIVQTLGTMLDTVVF

SEQ ID NO: 128191 - protein, 83 aa, Setaria italica
  Transcript Sequence Number=SeqID_62217
  Subcellular localization annotation: CTP_CleavageSite=40; ConfidenceScore=5.45e-01
RTPGGGLRWRCARPLACVPIAATTPPPGASPSPTSASPPEASSRGPQVPMPPLPSPPPSAPRVHGRPAGATLGRRVSRAASTP

SEQ ID NO: 128192 - protein, 78 aa, Setaria italica
  misc_feature (36)..(36): Xaa can be any naturally occurring amino acid
  Transcript Sequence Number=SeqID_62218
SWHLEEALQLFYIDGESALAARPAAPSAAAAMAAAXGVEEALRFAPPPAAALGDPMLQGLGVGEDDDVRAPLPCCKSG

SEQ ID NO: 128193 - protein, 159 aa, Setaria italica
  misc_feature (37)..(37): Xaa can be any naturally occurring amino acid
  Transcript Sequence Number=SeqID_62219
  Homolog annotation: Hit_ID=Q10BK1; Match level="QueryCoverage=97%, HitCoverage=28%, E-value=1e-30, Identity=47%"; Hit description =Transposon protein, putative, CACTA, En/Spm sub-class
AFKRQYKDWRKLKNKSGTGWNSSTRTIDCDDEWWTAXIEENEANKYFRGKAFPFYDELTTLFGTTDIEGGPMLCVGGIGDRTPSSGSEGNPDTAADENVAWLEDNVGRSSVGRVSQRSGKEHVVDSPPPKRTKSMEYYVERISESMMQRTMTERNLNQP

SEQ ID NO: 128194 - protein, 43 aa, Setaria italica
  misc_feature (13)..(13): Xaa can be any naturally occurring amino acid
  Transcript Sequence Number=SeqID_62220
  Homolog annotation: Hit_ID=Q10BK1; Match level="QueryCoverage=100%, HitCoverage=8%, E-value=1e-10, Identity=69%"; Hit description =Transposon protein, putative, CACTA, En/Spm sub-class
MDAGRANWDDNTXKIFLDLCIDEKNKLNYNKRGLTKVGWHNLY

SEQ ID NO: 128195 - protein, 111 aa, Setaria italica
  misc_feature (58)..(59): Xaa can be any naturally occurring amino acid
  misc_feature (86)..(86): Xaa can be any naturally occurring amino acid
  Transcript Sequence Number=SeqID_62221
  Gene Ontology: Mol. function=double-stranded RNA binding; Cellular component=intracellular; Biological process=RNA processing
  Homolog annotation: Hit_ID=B6TB30; Match level="QueryCoverage=41%, HitCoverage=13%, E-value=1e-15, Identity=89%"; Hit description =Endoribonuclease Dicer
YDGKVFRTYRTLPPGPLTRLRAANVDTEKLARVAVVRGLHRFLRHKAPQRRKGRFMFXXKKCASIRFTQMDYWILLKFCQILWNLXLVLYTSTPTLIKRKFGGSSEIWLIH

SEQ ID NO: 128196 - protein, 72 aa, Setaria italica
  Transcript Sequence Number=SeqID_62222
  Subcellular localization annotation: CTP_CleavageSite=59; ConfidenceScore=5.09e-01
QLCRWRFLQQQQPVGPRGAADPDPPPASALLPLPSSGSGFATRGTAAPEEGTDGASSARSEEEAEAINDSFS

SEQ ID NO: 128197 - protein, 67 aa, Setaria italica
  misc_feature (9)..(9): Xaa can be any naturally occurring amino acid
  misc_feature (40)..(40): Xaa can be any naturally occurring amino acid
  Transcript Sequence Number=SeqID_62223
  Homolog annotation: Hit_ID=B9R7B1; Match level="QueryCoverage=76%, HitCoverage=8%, E-value=2e-15, Identity=88%"; Hit description=DNA binding protein, putative
  Pfam annotation: Domain name=Remorin_C; Domain location=1-67; Score= -20.9; E_value=0.06; Accession=PF03763.5; Description=Remorin, C -terminal region
EAKITAWEXNLQKAKAEAAIRKLEMKLEKKRSSSMDKIFXKLRSAQKKGQERTIDESRQVYLPNRKN

SEQ ID NO: 128198 - protein, 86 aa, Setaria italica
  Transcript Sequence Number=SeqID_62224
MICLSTLIQQISRDVWDLKQSFDGKAVLLQGVPRNALPEDIERFLCGTNFEPPPFESFLRPGVPEPIKMVLVKFRTKTDAMNAFIT

SEQ ID NO: 128199 - protein, 90 aa, Setaria italica
  Transcript Sequence Number=SeqID_62225
  Gene Ontology: Mol. function=aspartic-type endopeptidase activity; Biological process=proteolysis
  Homolog annotation: Hit_ID=Q94D20; Match level="QueryCoverage=80%, HitCoverage=14%, E-value=2e-33, Identity=95%"; Hit description =Nucleoid DNA-binding protein cnd41-like
GRSTCRRARTRWGRGGAPLFDTCYDLGGRKVVKVPTVSMHFAGGAEAALPPENYLIPVDSKGTFCFAFAGTDGGVSIIGNIQQQGFRVVF

SEQ ID NO: 128200 - protein, 86 aa, Setaria italica
  Transcript Sequence Number=SeqID_62226
FSQALVPEQQCILQLVCYICMLHFTNSAQFFILDSFTRNKGFWCKRKADVISASTKPTELQNGISATTEPAELQNGVSTSTCNLSS

SEQ ID NO: 128201 - protein, 91 aa, Setaria italica
  Transcript Sequence Number=SeqID_62227
GLHLCDNKSDKGAGPSDAPKKIHILVKGAIHEVVQKSDFLTFATTEPTEQQNAISGTAETAELQNVTSATTEPTELQNAARYWSCAVCQVR

SEQ ID NO: 128202 - protein, 84 aa, Setaria italica
  Transcript Sequence Number=SeqID_62228
  Gene Ontology: Mol. function=transporter activity; Cellular component= integral to membrane; Biological process=transport
  Homolog annotation: Hit_ID=O64964; Match level="QueryCoverage=100%, HitCoverage=33%, E-value=1e-39, Identity=98%"; Hit description =Aquaporin TIP1-1
  Pfam annotation: Domain name=MIP; Domain location=1-84; Score=-46.7; E_value=1.1e-06; Accession=PF00230.12; Description=Major intrinsic protein
MTFGLVYTVYATAVDPKKGSLGTIAPIAIGFIVGANILVGGAFDGASMNPAVSFGPALVSWSWGYQWVYWVGPLIGGGLAGVIY

SEQ ID NO: 128203 - protein, 70 aa, Setaria italica
  Transcript Sequence Number=SeqID_62229
LKRWLSMASATAPRHEVNRLHCFSGGTITGTLCCARGNSSLAYEVSTNSLLSVSYVVDLVSDQLICICCN

SEQ ID NO: 128204 - protein, 82 aa, Setaria italica
  misc_feature (10)..(10): Xaa can be any naturally occurring amino acid
  misc_feature (15)..(15): Xaa can be any naturally occurring amino acid
  Transcript Sequence Number=SeqID_62230
LSMGHVSYEXLLPVXLDMWEPAVLAIKREGYSIKCNGQRGVVVTEKFQQSMTINVPYGRPTEFSIVSADGAEYNLKPAENAP

SEQ ID NO: 128205 - protein, 73 aa, Setaria italica
  Transcript Sequence Number=SeqID_62231
RKKKGHILQVVSVVVLGSGMACCVFVFTYVRESLYVEGKCELSLECAGICKGSIRFNSIQLAPHPILSRCKEG

SEQ ID NO: 128206 - protein, 78 aa, Setaria italica
  Transcript Sequence Number=SeqID_62232
MFFNLSKKILWKEVASSPVRARRDWDLLGNESRQAIQSEVATTNAEHDNIGRTSPSTSNHNMKDVPQGTEHDSRAVRF

SEQ ID NO: 128207 - protein, 117 aa, Setaria italica
  Transcript Sequence Number=SeqID_62233
RWLPTAGTPRGGMGWDQRQGPPPHPSYQGGGSDYYKQGSQPYDSQPPSYPPGPGNFNSYGQSQAPGYGQPPYPQHAPQQNYGHGYGDPRYNAPPPNQYYGQPPMGPQQGYPQQPDPY

SEQ ID NO: 128208 - protein, 106 aa, Setaria italica
  misc_feature (35)..(35): Xaa can be any naturally occurring amino acid
  misc_feature (97)..(97): Xaa can be any naturally occurring amino acid
  Transcript Sequence Number=SeqID_62234
  Gene Ontology: Mol. function=RNA binding
  Homolog annotation: Hit_ID=B9SHQ3; Match level="QueryCoverage=100%, HitCoverage=14%, E-value=5e-21, Identity=52%"; Hit description =Nucleic acid binding protein, putative
  Pfam annotation: Domain name=KH_1; Domain location=26-85; Score=42.2; E_value=2e-09; Accession=PF00013.21; Description=KH domain
IAEAEAGGSPALIARGFGSGQSGSEQFEMTVPDNXGGETIKGLQTRSGARIQLIPQHPPEGVTLTERTVRVTGNKKQIEAAKDLIKQAMNQNFSKHXNQSGGYGSQ

SEQ ID NO: 128209 - protein, 57 aa, Setaria italica
  Transcript Sequence Number=SeqID_62235
TERKQKLYGIGRQQQVYPCHEKATASPCNFSKHTNQSGGYGSQGYRPQGHGAASQWG

SEQ ID NO: 128210 - protein, 114 aa, Setaria italica
  misc_feature (113)..(113): Xaa can be any naturally occurring amino acid
  Transcript Sequence Number=SeqID_62236
ELERLDKRNLEYKDKANRNQNFSKHTNQSGGYGSQGYRPQGHGAASQWGPRSQSQPGYGYPPRGMPPPQNYNPPYGGYPPQGPPRGGMGWDQRQGPPPHPSYQGGGSDYYKQXS

SEQ ID NO: 128211 - protein, 69 aa, Setaria italica
  Transcript Sequence Number=SeqID_62237
  Subcellular localization annotation: CTP_CleavageSite=37; ConfidenceScore=5.13e-01
SSVNVTLNILFSFSKTMVLLKLNRMFKVTLTELLGTTVMHVLQVGGLQSLPDNKTQAPPIASTETSKRS

SEQ ID NO: 128212 - protein, 51 aa, Setaria italica
  Transcript Sequence Number=SeqID_62238
MSSGAKIQITKDVDADSNALTRSVELVGHQPCYWALRFYEMSPAMHPLHQL

SEQ ID NO: 128213 - protein, 33 aa, Setaria italica
  Transcript Sequence Number=SeqID_62239
MTVLKQTNTLPDKPSPTTAPVTEQASTNLPATG

SEQ ID NO: 128214 - protein, 61 aa, Setaria italica
  Transcript Sequence Number=SeqID_62240
TGTGGNSIVLDQYAPEVQSHDASFKSEIAEDGNLLPYLFDTFVRVYPVLVFAFVVLGSSLF

SEQ ID NO: 128215 - protein, 123 aa, Setaria italica
  misc_feature (31)..(31): Xaa can be any naturally occurring amino acid
  Transcript Sequence Number=SeqID_62241
  Pfam annotation: Domain name=DUF292; Domain location=4-122; Score =188.8; E_value=1.5e-53; Accession=PF03398.6; Description=Eukaryotic protein of unknown function, DUF292
AIKCTRTRLDLLRRKKQAMVKFLKKDVADLXLNGLESHAFARMEGLIVEMNQASCYDMIEQYCEYIVKQLNNLQKESDCPQEALEAVSTLIFAAARFPDLPELCDLRHIFTERYGSSVGRPFS

SEQ ID NO: 128216 - protein, 78 aa, Setaria italica
  Transcript Sequence Number=SeqID_62242
  Gene Ontology: Mol. function=receptor activity; Cellular component =peroxisomal membrane; Biological process=positive regulation of multicellular organism growth
  Homolog annotation: Hit_ID=Q32Y70; Match level="QueryCoverage=100%, HitCoverage=11%, E-value=3e-36, Identity=93%"; Hit description =Peroxisomal targeting signal 1 receptor short form
  Pfam annotation: Domain name=TPR_1; Domain location=26-59; Score =35.2; E_value=2.6e-07; Accession=PF00515.20; Description =Tetratricopeptide repeat
  Pfam annotation: Domain name=TPR_2; Domain location=26-59; Score =27.4; E_value=5.9e-05; Accession=PF07719.9; Description =Tetratricopeptide repeat
  Pfam module annotation: Pfam domain module=TPR_1::TPR_2; Domain location=26-59::26-59
QSTDSLYGPDVVRLFNEAAQMSPEDADVHIVLGVLYNLSREYDKAIASFKTALQLKPQDYSLWNKLGATQANSIQSAE

SEQ ID NO: 128217 - protein, 77 aa, Setaria italica
  Transcript Sequence Number=SeqID_62243
ALNCLFAQVWAKYSYLFLGIFGVIFHSSCRREVKLNFSQKIGRSGSRSKRGRPEISTGKIIFDLKVLNLDGVYEQQF

SEQ ID NO: 128218 - protein, 60 aa, Setaria italica
  Transcript Sequence Number=SeqID_62244
  Gene Ontology: Mol. function=heat shock protein binding
  Homolog annotation: Hit_ID=B6T437; Match level="QueryCoverage=75%, HitCoverage=9%, E-value=4e-17, Identity=97%"; Hit description=DnaJ subfamily C member 7
LLSVSWDIWCHFSFFLPQRGEAKLLSEDWEGAVQDLKEAAQKSPQDMGIREALMRAEKQL

SEQ ID NO: 128219 - protein, 99 aa, Setaria italica
  misc_feature (10)..(10): Xaa can be any naturally occurring amino acid
  Transcript Sequence Number=SeqID_62245
  Gene Ontology: Mol. function=heat shock protein binding; Cellular component=plasma membrane
  Homolog annotation: Hit_ID=B6T437; Match level="QueryCoverage=76%, HitCoverage=16%, E-value=3e-30, Identity=87%"; Hit description=DnaJ subfamily C member 7
LKKTKSAEDXCQGKLRVSAEDYKAALAMDPDHTAYNVHLYLGLCKTLVKLGRGKEAISSCTEALNIDSDLVDALTQVTLPAWNHIEHQCKFRMQIPAFS

SEQ ID NO: 128220 - protein, 72 aa, Setaria italica
  Transcript Sequence Number=SeqID_62246
  Gene Ontology: Mol. function=heat shock protein binding; Cellular component=plasma membrane
  Homolog annotation: Hit_ID=B6T437; Match level="QueryCoverage=95%, HitCoverage=14%, E-value=3e-24, Identity=82%"; Hit description=DnaJ subfamily C member 7
  Pfam annotation: Domain name=TPR_1; Domain location=19-52; Score =19.0; E_value=0.019; Accession=PF00515.20; Description =Tetratricopeptide repeat
  Pfam annotation: Domain name=TPR_2; Domain location=19-52; Score =20.1; E_value=0.0095; Accession=PF07719.9; Description =Tetratricopeptide repeat
  Pfam module annotation: Pfam domain module=TPR_1::TPR_2; Domain location=19-52::19-52
EKFSFTSLCKCINIDSDLVDALTQRGEAKLLSEDWEGAVQDLKEAAQKSPQDMGIREALMRAEKQLKLSKEE

SEQ ID NO: 128221 - protein, 49 aa, Setaria italica
  Transcript Sequence Number=SeqID_62247
  Gene Ontology: Mol. function=calcium-dependent phospholipid binding
  Homolog annotation: Hit_ID=B4FY63; Match level="QueryCoverage=69%, HitCoverage=10%, E-value=6e-13, Identity=97%"; Hit description =Annexin A4
HANIVFYFVLVDGLPGFGCDSTAVINILTHRDSVQRGLIQQEYRAMYHE

SEQ ID NO: 128222 - protein, 43 aa, Setaria italica
  Transcript Sequence Number=SeqID_62248
  Gene Ontology: Mol. function=shikimate kinase activity
  Homolog annotation: Hit_ID=Q01HY3; Match level="QueryCoverage=90%, HitCoverage=13%, E-value=6e-10, Identity=82%"; Hit description =OSIGBa0138H21-OSIGBa0138E01.13 protein
PTFLISSCFIRLVKSEVLRDLSSMHRLVVATGGGAVIRPINWY

SEQ ID NO: 128223 - protein, 77 aa, Setaria italica
  Transcript Sequence Number=SeqID_62249
  Subcellular localization annotation: CTP_CleavageSite=39; ConfidenceScore=5.22e-01
GQYVMDYLIMLFQSLFHSFHNFFFSSGLPHFILVNCMSSCSESENLIALNSSPAEWKCHSSTWQRARESCSSHGQWP

SEQ ID NO: 128224 - protein, 70 aa, Setaria italica
  Transcript Sequence Number=SeqID_62250
ILLSPKEYKFSLNSFLFFWALDCMSVEISFLAFCHHAVCASQLVYVGCCYLWWYQVFHWGGRRKTRQRYF

SEQ ID NO: 128225 - protein, 58 aa, Setaria italica
  Transcript Sequence Number=SeqID_62251
HFFLFDIVAWPQKGGTTLVQPTMPPVLEPPLPCLPSSLYLLVFAPSPSPVHADGAATD

SEQ ID NO: 128226 - protein, 60 aa, Setaria italica
  Transcript Sequence Number=SeqID_62252
PACLCGVLLWKDPMSPSKWKEEHFVLASLSMWGAVIYGGIKFFTGGKKEDKAEAAPAQAA

SEQ ID NO: 128227 - protein, 67 aa, Setaria italica
  Transcript Sequence Number=SeqID_62253
  Gene Ontology: Mol. function=protein binding; Cellular component =anaphase-promoting complex; Biological process=regulation of mitotic metaphase/anaphase transition
  Homolog annotation: Hit_ID=B6T5J2; Match level="QueryCoverage=92%, HitCoverage=30%, E-value=2e-28, Identity=93%"; Hit description =Anaphase-promoting complex subunit 10
  Pfam annotation: Domain name=APC10; Domain location=2-67; Score= -51.7; E_value=0.00026; Accession=PF03256.8; Description=Anaphase -promoting complex, subunit 10 (APC10)
MIPGIKTVELAKPIGWVHISLSGADPRETFIHTFMLQIAVLSNHLNGRDTHIRQIKIYGPRPNPVPL

SEQ ID NO: 128228 - protein, 52 aa, Setaria italica
  Transcript Sequence Number=SeqID_62254
LCAVGSHRDMPWRHLRTANLIVCSPPCWSCLLKIGECLTAYTVSTLKAPVKA

SEQ ID NO: 128229 - protein, 83 aa, Setaria italica
  Transcript Sequence Number=SeqID_62255
SMGDLICRCSTLEPMAAGLDPRSIQKKIRNLNTPIFCCAQIHLDYVGPSAATTHTSWTAAEVERGKLIESVVKKYIQLISNVR

SEQ ID NO: 128230 - protein, 70 aa, Setaria italica
  Transcript Sequence Number=SeqID_62256
LMSMGEFNLPLLNSGAYGRRAGSPINPKENQKPEYSNLLLRPDPPGLCRTIGCTAPRNPRRSLPLSHHKA

SEQ ID NO: 128231 - protein, 107 aa, Setaria italica
  misc_feature (28)..(28): Xaa can be any naturally occurring amino acid
  Transcript Sequence Number=SeqID_62257
  Gene Ontology: Mol. function=oxidoreductase activity, acting on the CH-OH group of donors, NAD or NADP as acceptor; Cellular component =glycerol-3-phosphate dehydrogenase complex; Biological process =glycerol-3-phosphate catabolic process
  Homolog annotation: Hit_ID=B9S4F6; Match level="QueryCoverage=66%, HitCoverage=17%, E-value=1e-24, Identity=77%"; Hit description =Glycerol-3-phosphate dehydrogenase, putative
  Pfam annotation: Domain name=NAD_Gly3P_dh_N; Domain location=1-95; Score=-46.7; E_value=0.011; Accession=PF01210.15; Description=NAD -dependent glycerol-3-phosphate deh
  Subcellular localization annotation: CTP_CleavageSite=80; ConfidenceScore=5.08e-01
SIVLSAGISSFFDSDIFLRQFSSSFLEXFSTHVDPKLPFISLSKGLELNTLRTMSKIIPRALGNRRQPFIVLSGPSFAVELMNKLPTGLLSFFILLTCFIFFRLYVD

SEQ ID NO: 128232 - protein, 46 aa, Setaria italica
  Transcript Sequence Number=SeqID_62258
  Gene Ontology: Mol. function=microtubule motor activity; Cellular component=microtubule associated complex
  Homolog annotation: Hit_ID=Q2QM62; Match level="QueryCoverage=91%, HitCoverage=4%, E-value=5e-14, Identity=92%"; Hit description =Kinesin motor protein, putative, expressed
VGKAKQDSKNKDAQIKSMEEIIQSLEAKNKAKDLLTMNLQEKVHQA

SEQ ID NO: 128233 - protein, 54 aa, Setaria italica
  Transcript Sequence Number=SeqID_62259
  Gene Ontology: Mol. function=microtubule motor activity; Cellular component=microtubule associated complex; Biological process =microtubule-based movement
  Homolog annotation: Hit_ID=Q2QM62; Match level="QueryCoverage=100%, HitCoverage=5%, E-value=5e-23, Identity=94%"; Hit description =Kinesin motor protein, putative, expressed
SPNENDVGETLCSLNFASRVRGIELGQARKQVDIGELSRYKLMVGKAKQDSKNK

SEQ ID NO: 128234 - protein, 86 aa, Setaria italica
  misc_feature (13)..(13): Xaa can be any naturally occurring amino acid
  misc_feature (17)..(17): Xaa can be any naturally occurring amino acid
  Transcript Sequence Number=SeqID_62260
  Gene Ontology: Mol. function=GTP cyclohydrolase I activity; Cellular component=cytoplasm; Biological process=aromatic compound biosynthetic process
  Homolog annotation: Hit_ID=B6TEC8; Match level="QueryCoverage=93%, HitCoverage=17%, E-value=2e-37, Identity=91%"; Hit description=GTP cyclohydrolase I 1
VKLNGFTLGNVSXYERXGGGKADHGAIHSELHLPFCAQCEHHLLPFYGVVHIGYFDDGSGEGIDRSHFQALVHFYGCKLQGYKEKE

SEQ ID NO: 128235 - protein, 67 aa, Setaria italica
  Transcript Sequence Number=SeqID_62261
YNLRGRPTAGESNKLAVSCRFFIITGVILLVSSTRLIARLPRPVQKFLKSNMERSHSIKEGPGSARG

SEQ ID NO: 128236 - protein, 127 aa, Setaria italica
  misc_feature (53)..(53): Xaa can be any naturally occurring amino acid
  Transcript Sequence Number=SeqID_62262
  Gene Ontology: Mol. function=hydrolase activity, hydrolyzing O -glycosyl compounds; Cellular component=beta-galactosidase complex; Biological process=carbohydrate metabolic process
  Homolog annotation: Hit_ID=B9RGA7; Match level="QueryCoverage=91%, HitCoverage=10%, E-value=1e-21, Identity=42%"; Hit description=Beta -galactosidase, putative
ERTGDSVIISKNDAWKIKVNSQLGTIDSWKVSNVELMSKGIFPCFWRAPTDNXKGGFYTKPYVSQWREASLDNVSFYSSQFSVKELPDNTVELSTVYYGLPGKLNPKTRTNRLDYFTTKTTRSTNYL

SEQ ID NO: 128237 - protein, 71 aa, Setaria italica
  misc_feature (11)..(11): Xaa can be any naturally occurring amino acid
  Transcript Sequence Number=SeqID_62263
  Gene Ontology: Mol. function=hydrolase activity, hydrolyzing O -glycosyl compounds; Cellular component=beta-galactosidase complex; Biological process=carbohydrate metabolic process
  Homolog annotation: Hit_ID=B9RGA7; Match level="QueryCoverage=98%, HitCoverage=6%, E-value=1e-30, Identity=84%"; Hit description=Beta -galactosidase, putative
HAMGNSNGNIXDAYWMAIDNTFGLQGGFIWDWVDQGLLKEDSDGSKFWAYGGDFGDTPNDLNFCLNGIVWT

SEQ ID NO: 128238 - protein, 79 aa, Setaria italica
  Transcript Sequence Number=SeqID_62264
  Gene Ontology: Mol. function=transporter activity; Cellular component= integral to membrane; Biological process=transport
  Homolog annotation: Hit_ID=Q8GX78; Match level="QueryCoverage=84%, HitCoverage=12%, E-value=5e-16, Identity=60%"; Hit description =Probable anion transporter 2, chloroplastic
SACVHLEYRVPIRRRADCKAEQYGITGSPLSPSDGPADTILVGDTSNISPWWQQFPKRWTIVLLCFFAFLLCNMDRVNL

SEQ ID NO: 128239 - protein, 62 aa, Setaria italica
  misc_feature (17)..(17): Xaa can be any naturally occurring amino acid
  Transcript Sequence Number=SeqID_62265
  Gene Ontology: Mol. function=nucleotide binding; Cellular component =endoplasmic reticulum lumen
  Homolog annotation: Hit_ID=B6SP66; Match level="QueryCoverage=82%, HitCoverage=10%, E-value=2e-13, Identity=70%"; Hit description =Oxygen-regulated protein
VVSDAEKVRDWLEEKEXLQKSTPAHSPPAFTSEEVVDKILDLQDKVASINRIPKPKPKIEKE

SEQ ID NO: 128240 - protein, 40 aa, Setaria italica
  Transcript Sequence Number=SeqID_62266
SKVQFRTKNCIAVLNSETIDQHLVFIKILHSLVFWSPNKT

SEQ ID NO: 128241 - protein, 88 aa, Setaria italica
  Transcript Sequence Number=SeqID_62267
  Gene Ontology: Mol. function=nucleotide binding; Cellular component =endoplasmic reticulum lumen
GCFQVLALWYESEDGLWEKETLQKSTPAHSPPAFTSEEVVDKILDLQDKVASINRIPKPKPKIEKKPAKEEEPANKEKTANENESTGT

SEQ ID NO: 128242 - protein, 74 aa, Setaria italica
  Transcript Sequence Number=SeqID_62268
  Gene Ontology: Mol. function=nucleotide binding; Cellular component =endoplasmic reticulum lumen; Biological process=response to stress
  Homolog annotation: Hit_ID=B6SP66; Match level="QueryCoverage=70%, HitCoverage=11%, E-value=3e-19, Identity=86%"; Hit description =Oxygen-regulated protein
AGVLFCRVSFSSNQSLTFSASLKNNLESYIYSMKEKLEESTDMLTVSTEQERESFTEKLNEVQDWLYMDGLKLI

SEQ ID NO: 128243 - protein, 57 aa, Setaria italica
  Transcript Sequence Number=SeqID_62269
  Gene Ontology: Mol. function=nucleotide binding; Cellular component =endoplasmic reticulum lumen
  Homolog annotation: Hit_ID=B6SP66; Match level="QueryCoverage=59%, HitCoverage=7%, E-value=3e-09, Identity=88%"; Hit description=Oxygen- regulated protein
VKALDKKDAERRKTAELKNNLESYIYSMKEKLEQFFRRSCILKQKVGWRHLIRRMLS

SEQ ID NO: 128244 - protein, 79 aa, Setaria italica
  misc_feature (60)..(60): Xaa can be any naturally occurring amino acid
  Transcript Sequence Number=SeqID_62270
  Gene Ontology: Mol. function=nucleotide binding; Cellular component =endoplasmic reticulum lumen
  Homolog annotation: Hit_ID=B6SP66; Match level="QueryCoverage=69%, HitCoverage=11%, E-value=2e-18, Identity=83%"; Hit description =Oxygen-regulated protein
GGCCTVHNRNSGVECSQWQQYQKLLQARPAACENARLYLSELQKIVKNWETNKPWLPKKXVDEVVSDAEKVRDWLEEKE

SEQ ID NO: 128245 - protein, 69 aa, Setaria italica
  misc_feature (60)..(60): Xaa can be any naturally occurring amino acid
  Transcript Sequence Number=SeqID_62271
GQFCNSVPHEEVNGIFMRNTVAELVETVEYFLAEAIQSYRAESDTELNLAAGDYIVVRKXVSNNGWARR

SEQ ID NO: 128246 - protein, 86 aa, Setaria italica
  Transcript Sequence Number=SeqID_62272
SSVDLPFFCRTTLFKLLHGNFKFTQHAILFKITLWFLQAIEVSKRQMKLREASGNGDMISRLEAAETKLQELKSNMGVLGKEAVAA

SEQ ID NO: 128247 - protein, 58 aa, Setaria italica
  Transcript Sequence Number=SeqID_62273
  Gene Ontology: Mol. function=RNA binding; Cellular component=nucleus
  Homolog annotation: Hit_ID=Q32SG5; Match level="QueryCoverage=96%, HitCoverage=9%, E-value=8e-22, Identity=85%"; Hit description =Protein RIK
YSSSSGQAVYPFSASIFLGFDADPSLNIAARIRGPNDQYINHIMKETGATVVIRRKKF

SEQ ID NO: 128248 - protein, 53 aa, Setaria italica
  Transcript Sequence Number=SeqID_62274
EVNFISTPLSQAVYPFSASIFLGFDADPSLNIAARIRGPNVCSCITICDAGLI

SEQ ID NO: 128249 - protein, 124 aa, Setaria italica
  misc_feature (73)..(73): Xaa can be any naturally occurring amino acid
  Transcript Sequence Number=SeqID_62275
  Gene Ontology: Mol. function=phosphatase activity
  Homolog annotation: Hit_ID=B6TE36; Match level="QueryCoverage=64%, HitCoverage=17%, E-value=3e-25, Identity=75%"; Hit description=CTD -phosphatase-like protein
  Subcellular localization annotation: CTP_CleavageSite=40; ConfidenceScore=5.09e-01
RIVSSGSSVVWSTGTSLLVLFDSGVSSRDKRATDSETESSSSATGDVVETEYLDQKLLSRGLPDLMDVDSPSXLNKTPVRTKHVTLVLDLDETLVHSTLDHCDNADFTLEVFFNMKNHTVYVRK

SEQ ID NO: 128250 - protein, 39 aa, Setaria italica
  Transcript Sequence Number=SeqID_62276
ILEKVAQMFEVVIFTASQRIYAEQLIDRLDPSENKQESR

SEQ ID NO: 128251 - protein, 72 aa, Setaria italica
  misc_feature (38)..(38): Xaa can be any naturally occurring amino acid
  Transcript Sequence Number=SeqID_62277
ERGEPVVLPQDYKQRGVGGAASSLLPGWPFPTGTAVLXTCFLQILALRMNKMLSNDCLGTQELHTFCKTTDT

SEQ ID NO: 128252 - protein, 52 aa, Setaria italica
  Transcript Sequence Number=SeqID_62278
ATFSRIYAEQLIDRLDPDGKYISKRIYRDSCGVLSTIATFAKSTPRIVKSFV

SEQ ID NO: 128253 - protein, 162 aa, Setaria italica
  misc_feature (104)..(104): Xaa can be any naturally occurring amino acid
  misc_feature (146)..(146): Xaa can be any naturally occurring amino acid
  Transcript Sequence Number=SeqID_62279
  Gene Ontology: Mol. function=transferase activity, transferring glycosyl groups; Cellular component=integral to membrane; Biological process=protein amino acid glycosylation
  Homolog annotation: Hit_ID=Q2WBM0; Match level="QueryCoverage=98%, HitCoverage=31%, E-value=8e-64, Identity=75%"; Hit description=3 -alpha-L-fucosyltransferase
TRPLLVGAAFLAEIAFLGRLDMAKNAEAVESWTTSFYSRSTHWGEGARGGGGDEGDDEIRRCQERLEREDAVPYDRDFDREPVLVGGAAKDWNKCSVGCEFGFXASKTPDATFGIAPDRSVDSILRSMESSQYYSENNIDVARGWXEGTKIVMTTSLSSDVP

SEQ ID NO: 128254 - protein, 59 aa, Setaria italica
  Transcript Sequence Number=SeqID_62280
  Gene Ontology: Mol. function=transferase activity, transferring glycosyl groups; Cellular component=integral to membrane; Biological process=protein amino acid glycosylation
  Homolog annotation: Hit_ID=Q2WBM0; Match level="QueryCoverage=100%, HitCoverage=11%, E-value=2e-27, Identity=98%"; Hit description=3 -alpha-L-fucosyltransferase
GAILHIKELDDVASVAKTMKNIASNPDAFNQSLRWKYDGPSDSFKALIDMAAVHSSCRL

SEQ ID NO: 128255 - protein, 66 aa, Setaria italica
  Transcript Sequence Number=SeqID_62281
KVNSCMNMGNSAPIFMAPPRAGDLMQIISKLAQPPALAPMPLLTDSDVAEPPLPTASVTRTGMCVA

SEQ ID NO: 128256 - protein, 79 aa, Setaria italica
  misc_feature (11)..(11): Xaa can be any naturally occurring amino acid
  misc_feature (31)..(31): Xaa can be any naturally occurring amino acid
  misc_feature (72)..(72): Xaa can be any naturally occurring amino acid
  Transcript Sequence Number=SeqID_62282
  Gene Ontology: Mol. function=cytochrome-c oxidase activity; Cellular component=mitochondrial envelope
  Subcellular localization annotation: CTP_CleavageSite=36; ConfidenceScore=5.49e-01
MWRRLQTLAPXLRRAATAAASSPAAPASSAXRAAPLSSAAAAFRRTSPLLSGDKPATVEDVMPIATGLEREXLEAELQG

SEQ ID NO: 128257 - protein, 44 aa, Setaria italica
  Transcript Sequence Number=SeqID_62283
CSERNAWVKSQKAFVWTKSLGENYHLLDGQLSIHKQGPRRAVWC

SEQ ID NO: 128258 - protein, 43 aa, Setaria italica
  misc_feature (43)..(43): Xaa can be any naturally occurring amino acid
  Transcript Sequence Number=SeqID_62284
FSPRDFVQTKAFCDLTHAFLSEHHRIKDDCIRLLSLLSNAHRX

SEQ ID NO: 128259 - protein, 89 aa, Setaria italica
  Transcript Sequence Number=SeqID_62285
  Subcellular localization annotation: CTP_CleavageSite=73; ConfidenceScore=5.03e-01
SLLAWPYRRCPRTVALLGLAAAVTLPAATGGAGIGTLLMSTTAAAVTKARESPYLLALAANPTFVSGLVAWAVAQAAKALLTSVVERRW

SEQ ID NO: 128260 - protein, 57 aa, Setaria italica
  Transcript Sequence Number=SeqID_62286
ISVIFPCASARRDGIHPQGCRCCYFTRNGIWIQCGKPAVARTSDDLLVASQDNSSHR

SEQ ID NO: 128261 - protein, 45 aa, Setaria italica
  Transcript Sequence Number=SeqID_62287
  Subcellular localization annotation: CTP_CleavageSite=48; ConfidenceScore=5.35e-01
RFPLSFSLTQPFSPQMSALKIRTRRSRALSRLALCGRCISVRSPR

SEQ ID NO: 128262 - protein, 102 aa, Setaria italica
  Transcript Sequence Number=SeqID_62288
  Homolog annotation: Hit_ID=B9S8E5; Match level="QueryCoverage=83%, HitCoverage=7%, E-value=2e-24, Identity=67%"; Hit description =Replication factor C / DNA polymerase III gamma-tau subunit, putative
NGNKKENKLSKKKDKGNTLAHVINQAEACSQQGGWSRHKAVSIAEKLEQDNLRLEPRSSLLCWKASSTSRRKMSALKIRTRRSRALSRLALCGRCISVRSPR

SEQ ID NO: 128263 - protein, 62 aa, Setaria italica
  Transcript Sequence Number=SeqID_62289
  Gene Ontology: Mol. function=DNA-directed DNA polymerase activity; Cellular component=DNA polymerase III complex; Biological process =DNA replication
DALKLNLLPGSDGSLRDAEMTLDQLSLLGQRISMSLVQELVSYPTTVIKIAVLFPLLFFLLC

SEQ ID NO: 128264 - protein, 122 aa, Setaria italica
  Transcript Sequence Number=SeqID_62290
  Homolog annotation: Hit_ID=Q7XPL9; Match level="QueryCoverage=86%, HitCoverage=12%, E-value=1e-26, Identity=61%"; Hit description =OSJNBa0085I10.7 protein
RGRYYGLTGIIDKDEVDELAKSTPNCFGIKGHLQKFTQEQVQQMINQALQGLNETWEKKFKSLEQSLRGAPPLGTGPEHAPGSSAAREGGQEDQSRHHQDASDAQTGESREDDDEEVVSTSV

SEQ ID NO: 128265 - protein, 39 aa, Setaria italica
  Transcript Sequence Number=SeqID_62291
PMDIYFLSYNLKVNLWISLDELLSSYCIHCSASKVRHCS

SEQ ID NO: 128266 - protein, 103 aa, Setaria italica
  misc_feature (92)..(92): Xaa can be any naturally occurring amino acid
  Transcript Sequence Number=SeqID_62292
  Gene Ontology: Mol. function=serine-type endopeptidase activity; Cellular component=chloroplast envelope; Biological process =proteolysis
  Homolog annotation: Hit_ID=B8AMH6; Match level="QueryCoverage=93%, HitCoverage=20%, E-value=3e-47, Identity=92%"; Hit description=ATP -dependent Clp protease proteolytic subunit
  Pfam annotation: Domain name=CLP_protease; Domain location=6-91; Score=56.7; E_value=8.7e-14; Accession=PF00574.15; Description=Clp protease
WIIILELGKLYRFPNSRIMIHQPLGGAQGQETDLEIQANEMLHHKANLNGYLAYHTGQPLDKINVDTDRDYFMSAKEAKEYGLIDGVIMNPXSRPLQPLPASS

SEQ ID NO: 128267 - protein, 59 aa, Setaria italica
  misc_feature (14)..(14): Xaa can be any naturally occurring amino acid
  Transcript Sequence Number=SeqID_62293
  Gene Ontology: Mol. function=structural constituent of ribosome; Cellular component=ribonucleoprotein complex; Biological process =translation
  Homolog annotation: Hit_ID=P49689; Match level="QueryCoverage=100%, HitCoverage=93%, E-value=6e-15, Identity=76%"; Hit description=40S ribosomal protein S30
  Pfam annotation: Domain name=Ribosomal_S30; Domain location=1-58; Score=104.6; E_value=3.4e-28; Accession=PF04758.6; Description =Ribosomal protein S30
  Subcellular localization annotation: CTP_CleavageSite=43; ConfidenceScore=5.24e-01
HGSLARAGKVRGQXRPKVAKQDKKKKPRGRAHKRMQYNRRFVTAVVGFGKKRGPNSSEK

SEQ ID NO: 128268 - protein, 86 aa, Setaria italica
  Transcript Sequence Number=SeqID_62294
MFWTGSMKYAPRCSTYEYIRLRRPHPRPVASPRRARHPPMPILAHSLAGDEVGGVGPGVVVDGAVEGYRIAGGPLGEVVDPLYPGG

SEQ ID NO: 128269 - protein, 78 aa, Setaria italica
  Transcript Sequence Number=SeqID_62295
LIINYLQRGAYFIDPVQNMRTNTLLVQQPVVPGFLPSQILVHVAVHTNTYVYGDPHPRPVASPRRARHPTHAHPRSLT

SEQ ID NO: 128270 - protein, 87 aa, Setaria italica
  Transcript Sequence Number=SeqID_62296
  Gene Ontology: Mol. function=aspartic-type endopeptidase activity; Biological process=proteolysis
  Homolog annotation: Hit_ID=Q94D20; Match level="QueryCoverage=100%, HitCoverage=16%, E-value=7e-30, Identity=75%"; Hit description =Nucleoid DNA-binding protein cnd41-like
VRDAFRAAAAAAGGLRPSPGGFSLFDTCYDLGMRRVVKVPTLSVHLAGGAAVALPPENYLIPVDTRGTFCFALAGTDGGVSILGNIQ

SEQ ID NO: 128271 - protein, 60 aa, Setaria italica
  misc_feature (53)..(53): Xaa can be any naturally occurring amino acid
  Transcript Sequence Number=SeqID_62297
  Gene Ontology: Mol. function=aspartic-type endopeptidase activity; Biological process=proteolysis
  Homolog annotation: Hit_ID=Q94D20; Match level="QueryCoverage=96%, HitCoverage=11%, E-value=4e-19, Identity=77%"; Hit description =Nucleoid DNA-binding protein cnd41-like
TNDLGRRRVVKVPTLSVHLAGGAAVALPPENYLIPVDTRGTFCFALAGTDGGXSILGNIQ

SEQ ID NO: 128272 - protein, 84 aa, Setaria italica
  Transcript Sequence Number=SeqID_62298
ARLEVSELGCSGRCATSLCGGGAQAQKASTSDGRPGSPGAAFRVAEFLSCCDMCRYHAIVSDEFQEEKERKRRAAAAVSPAAAD

SEQ ID NO: 128273 - protein, 129 aa, Setaria italica
  Transcript Sequence Number=SeqID_62299
DNSSAVVIIIDIPIWITSSPTTIFGLYQKYNNNLDFNTLSNKDVSVSCFEYFRLSILMYLDVWLADTSSSARVAIVEFKNHYLEVQKAEEALTEGKADEAVCKSWHFTHTSDQGRRSNKNEREDASAGF

SEQ ID NO: 128274 - protein, 112 aa, Setaria italica
  misc_feature (20)..(20): Xaa can be any naturally occurring amino acid
  Transcript Sequence Number=SeqID_62300
  Gene Ontology: Mol. function=structural constituent of ribosome; Cellular component=ribonucleoprotein complex; Biological process =translation
  Homolog annotation: Hit_ID=Q9LX88; Match level="QueryCoverage=95%, HitCoverage=82%, E-value=7e-55, Identity=95%"; Hit description=40S ribosomal protein S15a-4
  Pfam annotation: Domain name=Ribosomal_S8; Domain location=6-112; Score=134.4; E_value=3.5e-37; Accession=PF00410.11; Description =Ribosomal protein S8
QVVDYNDALKSMYNAEKRGXRQVMIRPSSKVIIKFLIVMQRHGYIGEFEYVDDHRAGKIVVELNGRLNKCGVISPRFDVGVKEIEGWTARLLPSRQFGYIVLTTSAGIMDHE

SEQ ID NO: 128275 - protein, 84 aa, Setaria italica
  Transcript Sequence Number=SeqID_62301
  Gene Ontology: Mol. function=structural constituent of ribosome; Cellular component=ribonucleoprotein complex; Biological process =translation
  Homolog annotation: Hit_ID=Q9LX88; Match level="QueryCoverage=100%, HitCoverage=64%, E-value=4e-40, Identity=95%"; Hit description=40S ribosomal protein S15a-4
  Pfam annotation: Domain name=Ribosomal_S8; Domain location=5-84; Score=50.0; E_value=9.3e-12; Accession=PF00410.11; Description =Ribosomal protein S8
MVRVSVLNDALKSMYNAEKRGKRQVMIRPSSKVIIKFLIVMQRHGYIGEFEYVDDHRAGKIVVELNGRLNKCGVISPRFDVGVK

SEQ ID NO: 128276 - protein, 56 aa, Setaria italica
  Transcript Sequence Number=SeqID_62302
  Gene Ontology: Mol. function=structural constituent of ribosome; Cellular component=ribonucleoprotein complex; Biological process =translation
  Homolog annotation: Hit_ID=Q9LX88; Match level="QueryCoverage=91%, HitCoverage=39%, E-value=2e-21, Identity=96%"; Hit description=40S ribosomal protein S15a-4
  Pfam annotation: Domain name=Ribosomal_S8; Domain location=1-56; Score=-27.4; E_value=0.00024; Accession=PF00410.11; Description =Ribosomal protein S8
MLTSTDGGVKEIEGWTARLLPSRQFGYIVLTTSAGIMDHEEARRKNVGGKVLGFFY

SEQ ID NO: 128277 - protein, 148 aa, Setaria italica
  Transcript Sequence Number=SeqID_62303
  Gene Ontology: Cellular component=nucleus; Biological process =ribosome biogenesis
  Homolog annotation: Hit_ID=Q9Y324; Match level="QueryCoverage=81%, HitCoverage=60%, E-value=9e-57, Identity=85%"; Hit description=rRNA -processing protein FCF1 homolog
  Pfam annotation: Domain name=Fcf1; Domain location=20-118; Score =246.9; E_value=4.8e-71; Accession=PF04900.4; Description=Fcf1
DTNFINFSIQNKLDLEKGMMDCLYAKCTPCITDCVMAELEKLGQKYRVALRIAKDPRFQRLACTHKGTYADDCIVDRVTQHKCYIVATCDRDLKRRIRKVPGVPIMYITQHRYSIERLPEATIGGACNILILLQHQESDEHKHKKMVN

SEQ ID NO: 128278 - protein, 104 aa, Setaria italica
  misc_feature (43)..(43): Xaa can be any naturally occurring amino acid
  Transcript Sequence Number=SeqID_62304
  Gene Ontology: Mol. function=protein serine/threonine kinase activity; Biological process=protein amino acid phosphorylation
  Homolog annotation: Hit_ID=Q2L3S0; Match level="QueryCoverage=67%, HitCoverage=16%, E-value=1e-14, Identity=54%"; Hit description =Putative vesicle associated membrane protein
RGLQWHTRYQIIRGICEGLRYLHKKREIVHMYLRPACILLDDXMVPKITEFGISSELVMTSTNHHQQREYYWMILWFQRSQKFGISSELVMTSTNHHQQPNILA

SEQ ID NO: 128279 - protein, 96 aa, Setaria italica
  Transcript Sequence Number=SeqID_62305
LPLYSFIYYPFLLQTAALAQKNSEATCILAAQEVLLEKEIGAIQKVLYAMQEQQQKQLDLILAIGEASTILDGEQDMLDRDSARSSSVDPAPEIEN

SEQ ID NO: 128280 - protein, 52 aa, Setaria italica
  Transcript Sequence Number=SeqID_62306
LMGFSSIRFDMAKENLTDEVIYDLVYMVQTANEHRRHVGPCSGAHQGPAERT

SEQ ID NO: 128281 - protein, 75 aa, Setaria italica
  Transcript Sequence Number=SeqID_62307
  Subcellular localization annotation: CTP_CleavageSite=46; ConfidenceScore=5.32e-01
SMPRNFASGQNGTILHALKTQYLRRSKPYPRLTLPCLIQTCRVRPVLNQVVGPTWQVGCWYFSRGGTNGESRSVV

SEQ ID NO: 128282 - protein, 88 aa, Setaria italica
  Transcript Sequence Number=SeqID_62308
  Gene Ontology: Mol. function=transcription regulator activity; Cellular component=nucleus; Biological process=regulation of transcription
  Subcellular localization annotation: CTP_CleavageSite=27; ConfidenceScore=5.22e-01
VVDNGYPGSKGAGGSGGAFPPGLVGDRAGESSSSGGGAAAARSFSGGFSIVGPWEESRDIIATLGAYDSQFSGAMAGTALEMAGMDRY

SEQ ID NO: 128283 - protein, 89 aa, Setaria italica
  Transcript Sequence Number=SeqID_62309
  Subcellular localization annotation: CTP_CleavageSite=60; ConfidenceScore=5.52e-01
VSKANATLPDSNLPCPASAKPSGGSHMAGYPGSKGAGGSGGAEASGSGRKMKPSQFNFTRPQPGGAAGHLSQISEDGAFPPGLVGDPRW

SEQ ID NO: 128284 - protein, 63 aa, Setaria italica
  Transcript Sequence Number=SeqID_62310
NLCSAHALTILGNLMIFNYTRLVGLNYAGYPGSKGAGGSGGAEASGSGRKMKPSSSTSTRPQP

SEQ ID NO: 128285 - protein, 143 aa, Setaria italica
  misc_feature (17)..(17): Xaa can be any naturally occurring amino acid
  misc_feature (28)..(28): Xaa can be any naturally occurring amino acid
  misc_feature (123)..(123): Xaa can be any naturally occurring amino acid
  Transcript Sequence Number=SeqID_62311
  Gene Ontology: Mol. function=catalytic activity; Cellular component =nucleus; Biological process=metabolic process
  Homolog annotation: Hit_ID=Q6PNA1; Match level="QueryCoverage=90%, HitCoverage=25%, E-value=5e-54, Identity=80%"; Hit description =Putative ubiquitin-activating enzyme
PVVHKHTPYIVILVRLXEKWADAHDGNXPSTSQEKREFKDLIRAHMLNVDEENYKEAVESSYKVSATPGIRNEIQQIIDDNSAEVNSSSTDFWILVAALKEFVANEGNGELVLLRRVTNFLVXMTSLTEYYVSLQKIYQAKAE

SEQ ID NO: 128286 - protein, 53 aa, Setaria italica
  Transcript Sequence Number=SeqID_62312
  Gene Ontology: Mol. function=catalytic activity; Cellular component =nucleus; Biological process=metabolic process
  Homolog annotation: Hit_ID=Q6PNA1; Match level="QueryCoverage=96%, HitCoverage=10%, E-value=3e-17, Identity=84%"; Hit description =Putative ubiquitin-activating enzyme
NYKEAVESSYKVSATPGIRNEIQQIIDDNSAEVNSSSTDFWILVAALKVYIIL

SEQ ID NO: 128287 - protein, 97 aa, Setaria italica
  misc_feature (62)..(62): Xaa can be any naturally occurring amino acid
  Transcript Sequence Number=SeqID_62313
  Gene Ontology: Mol. function=ubiquitin-protein ligase activity; Cellular component=ubiquitin ligase complex; Biological process =ubiquitin-dependent protein catabolic process
  Homolog annotation: Hit_ID=Q6K5K9; Match level="QueryCoverage=58%, HitCoverage=13%, E-value=3e-16, Identity=72%"; Hit description =Avr9/Cf-9 rapidly elicited protein-like
  Pfam annotation: Domain name=Arm; Domain location=19-59; Score=32.7; E_value=1.5e-06; Accession=PF00514.15; Description=Armadillobeta -catenin-like repeat
MRPLVAPNSPILALLLLRADKLKMAAAELGAMRPLVDLLEHGSMIAKKDAASAIFNLCMLHXNKSRASKMTLKAIADDLLVDESLAILVLLVALALV

SEQ ID NO: 128288 - protein, 68 aa, Setaria italica
  Transcript Sequence Number=SeqID_62314
  Gene Ontology: Mol. function=cation transmembrane transporter activity; Cellular component=membrane; Biological process=cation transport
  Homolog annotation: Hit_ID=B9SXJ6; Match level="QueryCoverage=91%, HitCoverage=19%, E-value=1e-18, Identity=67%"; Hit description =Cation efflux protein/ zinc transporter, putative
MYILQITACEDVSEVWQGRFWELVPGQAVGSLSIRVKSGADDRAVLEHAHGLYQDLGIQDLTVQTDES

SEQ ID NO: 128289 - protein, 133 aa, Setaria italica
  misc_feature (123)..(123): Xaa can be any naturally occurring amino acid
  Transcript Sequence Number=SeqID_62315
  Gene Ontology: Mol. function=nucleic acid binding; Cellular component= spindle; Biological process=response to DNA damage stimulus
  Homolog annotation: Hit_ID=A4PBL4; Match level="QueryCoverage=100%, HitCoverage=13%, E-value=1e-58, Identity=83%"; Hit description =OsRad54 protein
  Pfam annotation: Domain name=Helicase_C; Domain location=41-120; Score=82.1; E_value=2e-21; Accession=PF00271.23; Description =Helicase conserved C-terminal domain
VELSGKMHVLARLLGHLRQKTDDRIVLVSNYTQTLDLFVQLCRERRYPYVRLDGATSISKRQKLVNQFNDLSRDEFVFLLSSKAGGCGLNLVGGNRLVLFDPDWNPANDKQAAARVWRDGQKXRVHIYRFLST

SEQ ID NO: 128290 - protein, 57 aa, Setaria italica
  Transcript Sequence Number=SeqID_62316
  Gene Ontology: Mol. function=nucleic acid binding
  Homolog annotation: Hit_ID=A4PBL4; Match level="QueryCoverage=71%, HitCoverage=3%, E-value=2e-12, Identity=80%"; Hit description =OsRad54 protein
YICRLPVFILQLIYDTIKSNNSGGSGFDDCLRFFPPELFSGRYFTLLYLFILLNQLT

SEQ ID NO: 128291 - protein, 100 aa, Setaria italica
  Transcript Sequence Number=SeqID_62317
  Gene Ontology: Mol. function=nucleic acid binding; Cellular component= membrane; Biological process=small GTPase mediated signal transduction
  Homolog annotation: Hit_ID=A4PBL4; Match level="QueryCoverage=100%, HitCoverage=10%, E-value=6e-41, Identity=82%"; Hit description =OsRad54 protein
AKQSKILAYITALKKLCNHPKLIYDTIKSNNSGGSGFDDCLRFFPPELFSGRSGSWTGGGGMWVELSGKMHVLARLLGHLRQKTDDRIVLVSNYTQVRHL

SEQ ID NO: 128292 - protein, 35 aa, Setaria italica
  Transcript Sequence Number=SeqID_62318
LLPFFLLHQTLDLFVQLCRERRYPYVRLDGATSIK

SEQ ID NO: 128293 - protein, 69 aa, Setaria italica
  Transcript Sequence Number=SeqID_62319
HLILDNCQKCDHAKMYEMISDENLTLMRERLMETVIWPTDDTNTGEDRLMRRRRILLVVIKLSSLGMLS

SEQ ID NO: 128294 - protein, 104 aa, Setaria italica
  Transcript Sequence Number=SeqID_62320
  Gene Ontology: Mol. function=protein tyrosine kinase activity; Cellular component=plasma membrane; Biological process=protein amino acid phosphorylation
  Homolog annotation: Hit_ID=B6SNZ9; Match level="QueryCoverage=83%, HitCoverage=15%, E-value=7e-39, Identity=91%"; Hit description =Serine/threonine-protein kinase NAK
FKLTTNPKKTNSSRSFGVVLLELITGRKNLDVSSSKEERNIVKWSRPFLTDDSRLSLIMDSRIKGRFPTKAARIVADIILKCLHNDPSERPTMRDVVEALTGGP

SEQ ID NO: 128295 - protein, 56 aa, Setaria italica
  Transcript Sequence Number=SeqID_62321
  Gene Ontology: Mol. function=protein tyrosine kinase activity; Biological process=protein amino acid phosphorylation
  Homolog annotation: Hit_ID=Q94CI5; Match level="QueryCoverage=62%, HitCoverage=6%, E-value=5e-12, Identity=85%"; Hit description =Protein kinase AtSIK
IEEKEIKEQYGQSKAFHARPTHDEGPFQAMYSEFSTSNIQIDKDFTAKLSGYGCAG

SEQ ID NO: 128296 - protein, 85 aa, Setaria italica
  Transcript Sequence Number=SeqID_62322
  Gene Ontology: Mol. function=protein tyrosine kinase activity; Biological process=protein amino acid phosphorylation
  Homolog annotation: Hit_ID=B6SNZ9; Match level="QueryCoverage=77%, HitCoverage=12%, E-value=7e-28, Identity=92%"; Hit description =Serine/threonine-protein kinase NAK
FQAPSLVPLALTCICISFCFQAMYSEFSTSNIQIDKDFTAKLSGYGCAGFNTEEISNAPVSAAHLSVETLAKGLLTPKSNVWSFG

SEQ ID NO: 128297 - protein, 97 aa, Setaria italica
  misc_feature (83)..(83): Xaa can be any naturally occurring amino acid
  Transcript Sequence Number=SeqID_62323
  Pfam annotation: Domain name=AT_hook; Domain location=10-22; Score =6.8; E_value=1.7; Accession=PF02178.11; Description=AT hook motif
  Pfam annotation: Domain name=AT_hook; Domain location=51-63; Score =11.1; E_value=0.33; Accession=PF02178.11; Description=AT hook motif
  Pfam annotation: Domain name=AT_hook; Domain location=77-89; Score =0.9; E_value=19; Accession=PF02178.11; Description=AT hook motif
  Pfam module annotation: Pfam domain module=AT_hook::AT_hook::AT_hook; Domain location=10-22::51-63::77-89
LTPTVHESGTRKRGRPKCLQDSSDTPTPPIHSKDNEPTFQTPATTSPESGKRKRGRPRRVSDGSATPSSIDDDTVDATKRGRXRKIDTTLCSFIIVF

SEQ ID NO: 128298 - protein, 95 aa, Setaria italica
  Transcript Sequence Number=SeqID_62324
  Gene Ontology: Mol. function=nucleic acid binding
  Homolog annotation: Hit_ID=Q6K4V3; Match level="QueryCoverage=77%, HitCoverage=22%, E-value=2e-35, Identity=94%"; Hit description=Zinc finger CCCH domain-containing protein 15
  Pfam annotation: Domain name=zf-CCCH; Domain location=50-76; Score =43.7; E_value=7.2e-10; Accession=PF00642.16; Description=Zinc finger C-x8-C-x5-C-x3-H type (and similar)
GYSYGITTVPTKVRVSVRVVYYGCSSEKAGGSHGPLRASAHIRLSARFDYQPDICKDYKETGYCGYGDSCKFMHDRGDYKSGWQMEKEWEEAEKA

SEQ ID NO: 128299 - protein, 88 aa, Setaria italica
  Transcript Sequence Number=SeqID_62325
  Gene Ontology: Mol. function=histone-lysine N-methyltransferase activity; Cellular component=nucleus; Biological process=chromatin modification
  Homolog annotation: Hit_ID=B9IHH8; Match level="QueryCoverage=78%, HitCoverage=13%, E-value=5e-21, Identity=66%"; Hit description=SET domain protein (Fragment)
  Pfam annotation: Domain name=YDG_SRA; Domain location=1-58; Score= -10.6; E_value=1.4e-06; Accession=PF02182.9; Description=YDGSRA domain
SLHRGNPIRVIRSVKDLACPTGKIYVYDGLYKIKEAWMEKGKSGFNVFKHKLLREPGQPDGIAVWKKTEMPSGFNVFKHEVAQRTWPT

SEQ ID NO: 128300 - protein, 108 aa, Setaria italica
  misc_feature (87)..(87): Xaa can be any naturally occurring amino acid
  misc_feature (97)..(97): Xaa can be any naturally occurring amino acid
  Transcript Sequence Number=SeqID_62326
  Gene Ontology: Mol. function=histone-lysine N-methyltransferase activity; Cellular component=nucleus; Biological process=chromatin modification
  Homolog annotation: Hit_ID=Q8LPU2; Match level="QueryCoverage=92%, HitCoverage=15%, E-value=3e-32, Identity=60%"; Hit description=SET domain protein 105
  Pfam annotation: Domain name=SET; Domain location=35-105; Score=1.6; E_value=0.0016; Accession=PF00856.20; Description=SET domain
GRSPAFRCILVSRMPMLYECNDSCTCSQNCRNRVVQKGTQIRFEVFKTGDRGWGLRSWDPIRAGTFICEYAGEIIDRNSGNSEDDFXFETSPSEQNXRWNYAPELLGE

SEQ ID NO: 128301 - protein, 49 aa, Setaria italica
  Transcript Sequence Number=SeqID_62327
MDHPISLPLVACSVIVLDSLSSMRKMQGCKCTSVCLPGDNNCSCMPEAL

SEQ ID NO: 128302 - protein, 67 aa, Setaria italica
  Transcript Sequence Number=SeqID_62328
QGKSVWSCSGRHNGRSKNEKQENSWVNLTGRPVCLTVLPLHDFMQRSCVMYRRRCIGPRRYLLTSTS

SEQ ID NO: 128303 - protein, 60 aa, Setaria italica
  Transcript Sequence Number=SeqID_62329
TGVSGEDWSCVRIIQIKTCWLRGNDEVPFTGYTCGDWSCVRIIKIMRDVPTTLHWSSSLT

SEQ ID NO: 128304 - protein, 78 aa, Setaria italica
  Transcript Sequence Number=SeqID_62330
  Homolog annotation: Hit_ID=B4FBP8; Match level="QueryCoverage=84%, HitCoverage=32%, E-value=4e-29, Identity=85%"; Hit description =Cation transport protein chaC
  Pfam annotation: Domain name=ChaC; Domain location=3-78; Score=0.5; E_ value=1.1e-08; Accession=PF04752.4; Description=ChaC-like protein
MVLWVFGYGSLIWNPGFDFDDKILGFIKGYKRTFNLACIYHRGTPEHPARTCTLETDEEAYYCLGGNSSIICRSKGCI

SEQ ID NO: 128305 - protein, 106 aa, Setaria italica
  misc_feature (9)..(9): Xaa can be any naturally occurring amino acid
  misc_feature (24)..(24): Xaa can be any naturally occurring amino acid
  Transcript Sequence Number=SeqID_62331
  Homolog annotation: Hit_ID=B4FBP8; Match level="QueryCoverage=97%, HitCoverage=47%, E-value=6e-49, Identity=90%"; Hit description =Cation transport protein chaC
  Pfam annotation: Domain name=ChaC; Domain location=1-106; Score=17.7; E_value=4.7e-10; Accession=PF04752.4; Description=ChaC-like protein
VKGDTDKEXKAMQYLERRECEYDXKISVDFFKEGDSLKPAVTGVLVFVSTPDPIGNKYYLGPAPLQDMARQIATANGPTGYNRDYLFSMEKALASIIHEDDSISDT

SEQ ID NO: 128306 - protein, 43 aa, Setaria italica
  misc_feature (11)..(11): Xaa can be any naturally occurring amino acid
  Transcript Sequence Number=SeqID_62332
  Homolog annotation: Hit_ID=B4FBP8; Match level="QueryCoverage=100%, HitCoverage=19%, E-value=2e-13, Identity=81%"; Hit description =Cation transport protein chaC
NEVRKVLNRTXEAKITGSDVSLQSHVPLVHLSALPEGTVVDSR

SEQ ID NO: 128307 - protein, 107 aa, Setaria italica
  Transcript Sequence Number=SeqID_62333
  Homolog annotation: Hit_ID=B4FBP8; Match level="QueryCoverage=86%, HitCoverage=41%, E-value=3e-38, Identity=86%"; Hit description =Cation transport protein chaC
  Pfam annotation: Domain name=ChaC; Domain location=1-68; Score=-30.4; E_value=3.4e-06; Accession=PF04752.4; Description=ChaC-like protein
VFVSTPDPIGNKYYLGPAPLQDMARQIATANGPTGYNRDYLFSMEKALASIIHEDDSIIELANEVRKVLNRTKEAKILLGLLDVSLQSHVSLVEQHQECSYWFGRYY

SEQ ID NO: 128308 - protein, 61 aa, Setaria italica
  Transcript Sequence Number=SeqID_62334
VFYLVFLYVFLCNSSCSSGAPVCASRRHCCGLEIARSLKPSWISGEMECPPTILTLDVVPP

SEQ ID NO: 128309 - protein, 44 aa, Setaria italica
  Transcript Sequence Number=SeqID_62335
  Gene Ontology: Cellular component=integral to membrane; Biological process=vesicle-mediated transport
  Homolog annotation: Hit_ID=A9TFG8; Match level="QueryCoverage=100%, HitCoverage=19%, E-value=4e-12, Identity=75%"; Hit description=R -SNARE, VAMP72-family
MNKQALIYSFVAKGSVVLAEHTAFSGNFSTVAVQCLQKLAPQQH

SEQ ID NO: 128310 - protein, 68 aa, Setaria italica
  Transcript Sequence Number=SeqID_62336
  Gene Ontology: Mol. function=signal transducer activity; Biological process=response to light stimulus
TSMRKAIEKMDRRGGAAADRGAPSAATDGRWGSMVTKRFGCKFPAQVCQSQQRTVVARPRRPRIEQSP

SEQ ID NO: 128311 - protein, 76 aa, Setaria italica
  Transcript Sequence Number=SeqID_62337
  Gene Ontology: Mol. function=nucleotidyltransferase activity; Biological process=biosynthetic process
  Homolog annotation: Hit_ID=Q9AYG1; Match level="QueryCoverage=97%, HitCoverage=11%, E-value=7e-11, Identity=48%"; Hit description =Putative phospholipid cytidylyltransferase
AQPSLLMHMHQCHQVEDKVGRYKQIKRTEGVSSTDIVGRILLTFKQKDADTDFNIDVDEKAGAKPNDEVKSHLSHF

SEQ ID NO: 128312 - protein, 61 aa, Setaria italica
  Transcript Sequence Number=SeqID_62338
  Gene Ontology: Mol. function=nucleotidyltransferase activity; Biological process=biosynthetic process
  Homolog annotation: Hit_ID=A9XU51; Match level="QueryCoverage=93%, HitCoverage=15%, E-value=1e-17, Identity=72%"; Hit description =Ethanolamine-phosphate cytidylyltransferase 1 (Fragment)
LSIFSEIIVGAPWEVSKDMITTFNISLVVHGTVAEGNPAGEIDPYAVPKSMGIFKTITSPK

SEQ ID NO: 128313 - protein, 41 aa, Setaria italica
  Transcript Sequence Number=SeqID_62339
AAITPVGRRSMLKLAQRMTDNFCVGVCAPTLCRAIMRTFFS

SEQ ID NO: 128314 - protein, 84 aa, Setaria italica
  misc_feature (22)..(22): Xaa can be any naturally occurring amino acid
  Transcript Sequence Number=SeqID_62340
  Gene Ontology: Mol. function=sequence-specific DNA binding; Cellular component=nucleus; Biological process=regulation of transcription, DNA-dependent
  Homolog annotation: Hit_ID=Q9LEE8; Match level="QueryCoverage=84%, HitCoverage=8%, E-value=2e-32, Identity=91%"; Hit description=OCL3 protein
PRGRPPGVVLSATTSVRLPSSXPQRVFDYLRDEQRRGEWDILANGEAMQEMDHIAKGQHHGNAVSLLRPNVSSPLLFFTIVISE

SEQ ID NO: 128315 - protein, 79 aa, Setaria italica
  Transcript Sequence Number=SeqID_62341
KTCLLKRLEPSARFVLDLIPVYLTPIYCSMQYIYTPHYITYFSFLSFTAPQAPADPLQHMAIFFLCHFVELASPIIASS

SEQ ID NO: 128316 - protein, 55 aa, Setaria italica
  Transcript Sequence Number=SeqID_62342
CCRLRCCVMKVETIRLMMCHAESVVRLAAWHIISLIVSTFITQHAVNKLSESILS

SEQ ID NO: 128317 - protein, 38 aa, Setaria italica
  Transcript Sequence Number=SeqID_62343
EHQAASLTTDSAWHIISLIVSTFITQHAVNKLSESILS

SEQ ID NO: 128318 - protein, 50 aa, Setaria italica
  Transcript Sequence Number=SeqID_62344
AMPAGISRAPSGSSSGGVGIIYPLITRVRQRANTIGNDERNGQSPNEPAS

SEQ ID NO: 128319 - protein, 59 aa, Setaria italica
  Transcript Sequence Number=SeqID_62345
FASMVRQIMPFISQVETQNQSAPPDTSSTHAQAASGSANRARDDPRDSTSSHQHNRDQI

SEQ ID NO: 128320 - protein, 57 aa, Setaria italica
  Transcript Sequence Number=SeqID_62346
RPKLLKRTKELQDELELQNLDLRDENLASSCLTHQIVKSGVEANGDGIETNGSSCSI

SEQ ID NO: 128321 - protein, 68 aa, Setaria italica
  Transcript Sequence Number=SeqID_62347
LKNEELGQSILNAELEWFGIFCSPMSTFRLCLLLPPDVQQPPSLSKVIGRQLSSSLLPDSPPSLSCWW

SEQ ID NO: 128322 - protein, 46 aa, Setaria italica
  Transcript Sequence Number=SeqID_62348
VGGDYGGARERSSSKQATGTILPCGPSEKLPPTAQRRRRVRQQRRR

SEQ ID NO: 128323 - protein, 41 aa, Setaria italica
  Transcript Sequence Number=SeqID_62349
  Gene Ontology: Mol. function=nucleoside-triphosphatase activity; Cellular component=microtubule
  Homolog annotation: Hit_ID=Q7XXR9; Match level="QueryCoverage=92%, HitCoverage=9%, E-value=1e-15, Identity=100%"; Hit description =Katanin
LFGPPGTGKTMLAKAVATECKTTFFNISASSIVSKWRGIVS

SEQ ID NO: 128324 - protein, 57 aa, Setaria italica
  Transcript Sequence Number=SeqID_62350
SSGRIKCLLLKRVYSHLIVLLKSDCNKTVTLEPHLHVCIQLFSACSSDIFPYTTDIY

SEQ ID NO: 128325 - protein, 54 aa, Setaria italica
  Transcript Sequence Number=SeqID_62351
  Gene Ontology: Mol. function=nucleoside-triphosphatase activity; Cellular component=microtubule
  Homolog annotation: Hit_ID=Q7XXR9; Match level="QueryCoverage=66%, HitCoverage=9%, E-value=3e-14, Identity=100%"; Hit description =Katanin
KAVATECKTTFFNIGPPGTGKTMLAKAVATECKTTFFNISASSIVSKWRGWCIE

SEQ ID NO: 128326 - protein, 44 aa, Setaria italica
  Transcript Sequence Number=SeqID_62352
  Gene Ontology: Mol. function=transferase activity
  Homolog annotation: Hit_ID=Q2R2S1; Match level="QueryCoverage=100%, HitCoverage=7%, E-value=9e-18, Identity=90%"; Hit description =Ankryin repeat S-palmitoyl transferase, putative, expressed
GPDGRFRNPYSRGCQRNCTDFLVNGYTNDEEIAWPTLQQTVQRS

SEQ ID NO: 128327 - protein, 60 aa, Setaria italica
  Transcript Sequence Number=SeqID_62353
LVFVNFAQHWLNCEVAGSSHIFVGDIFARLRSFAKPYSKKLIHCLITCRNKCLVPQKSTV

SEQ ID NO: 128328 - protein, 89 aa, Setaria italica
  misc_feature (6)..(6): Xaa can be any naturally occurring amino acid
  misc_feature (28)..(28): Xaa can be any naturally occurring amino acid
  misc_feature (34)..(34): Xaa can be any naturally occurring amino acid
  Transcript Sequence Number=SeqID_62354
  Gene Ontology: Mol. function=protein serine/threonine kinase activity; Cellular component=plasma membrane; Biological process =protein amino acid phosphorylation
  Homolog annotation: Hit_ID=B9SKY3; Match level="QueryCoverage=87%, HitCoverage=15%, E-value=1e-23, Identity=70%"; Hit description=ATP binding protein, putative
EVADPXLEVRPSIRSLKRALLVALRCVXPDSEKXPKMGQVVRMLESEEVPYREDRRNRRSRTGSMDIESIAEGSNSAEFGKKVREELKK

SEQ ID NO: 128329 - protein, 54 aa, Setaria italica
  Transcript Sequence Number=SeqID_62355
VEFWSGAAPPGVGAMPNRALDALQMLCLASKPLVGLYVSQNPFVGVSMKKINLG

SEQ ID NO: 128330 - protein, 54 aa, Setaria italica
  Transcript Sequence Number=SeqID_62356
  Gene Ontology: Mol. function=hydrolase activity, acting on carbon -nitrogen (but not peptide) bonds; Cellular component=cytosol; Biological process=nitrogen compound metabolic process
  Homolog annotation: Hit_ID=Q8W3L6; Match level="QueryCoverage=100%, HitCoverage=6%, E-value=3e-19, Identity=87%"; Hit description=Urease
  Pfam annotation: Domain name=Urease_gamma; Domain location=1-33; Score=-27.8; E_value=0.0003; Accession=PF00547.10; Description =Urease, gamma subunit
RQVLPAVPYLLHTVQVEGTFVDGTKLITVHDPISLDDGNMELALHGSFLPGPRL

SEQ ID NO: 128331 - protein, 73 aa, Setaria italica
  Transcript Sequence Number=SeqID_62357
  Gene Ontology: Mol. function=hydrolase activity, acting on carbon -nitrogen (but not peptide) bonds; Cellular component=cytosol; Biological process=nitrogen compound metabolic process
  Homolog annotation: Hit_ID=Q8W3L6; Match level="QueryCoverage=84%, HitCoverage=7%, E-value=4e-18, Identity=76%"; Hit description=Urease
  Pfam annotation: Domain name=Urease_alpha; Domain location=4-73; Score=47.0; E_value=7.2e-12; Accession=PF00449.12; Description =Urease alpha-subunit, N-terminal doma
EKGGEERRREGISSSARYPESSCLDTVITNAVVIDYTGIYKADIGIKGGLIVAIGKGGNPDVMDGVHSNMIGG

SEQ ID NO: 128332 - protein, 55 aa, Setaria italica
  Transcript Sequence Number=SeqID_62358
  Gene Ontology: Mol. function=hydrolase activity, acting on carbon -nitrogen (but not peptide) bonds; Cellular component=cytoplasm; Biological process=nitrogen compound metabolic process
  Homolog annotation: Hit_ID=Q9SR52; Match level="QueryCoverage=85%, HitCoverage=5%, E-value=1e-17, Identity=97%"; Hit description =Putative urease
KTIPEDVAFAESRIRAETIAAEDILHDMGAISIISSDSQAMGRIGEVCYMIILNP

SEQ ID NO: 128333 - protein, 55 aa, Setaria italica
  Transcript Sequence Number=SeqID_62359
VFQEYFISGKKNCTPYYLTDAVPSPEKFSGGDVEDYPGEIHYSSGRIVLNLHRKG

SEQ ID NO: 128334 - protein, 152 aa, Setaria italica
  Transcript Sequence Number=SeqID_62360
  Gene Ontology: Mol. function=protein binding; Cellular component =snRNP U1; Biological process=response to stress
  Homolog annotation: Hit_ID=Q10AS2; Match level="QueryCoverage=98%, HitCoverage=35%, E-value=8e-66, Identity=81%"; Hit description=RNA -binding protein Luc7-like 2, putative, expressed
  Pfam annotation: Domain name=LUC7; Domain location=1-152; Score=24.0; E_value=3.9e-10; Accession=PF03194.7; Description=LUC7 N_terminus
MDAIRKQLDQLMGANRNGDVREVSRKFYDRDVCRLYLAGLCPHDLFQLTKMDMGPCPKLHSLQLRKEYEEAKAKGTDNYDRELEETIERLIVECERKIQRALKRLEEDDAKAAIAISVTEVTQTKEVMELSKQIRQKMKDYSIVFLYSFVRV

SEQ ID NO: 128335 - protein, 56 aa, Setaria italica
  Transcript Sequence Number=SeqID_62361
IEETRKRTEELGESGMIDEAQKLLDEAEALKKLSARPQSVPDSSKMTAHVQIVSLV

SEQ ID NO: 128336 - protein, 75 aa, Setaria italica
  misc_feature (11)..(11): Xaa can be any naturally occurring amino acid
  Transcript Sequence Number=SeqID_62362
  Gene Ontology: Mol. function=nucleoside-triphosphatase activity; Cellular component=protein complex; Biological process=protein catabolic process
  Homolog annotation: Hit_ID=Q9SSB5; Match level="QueryCoverage=100%, HitCoverage=17%, E-value=3e-37, Identity=98%"; Hit description=26S protease regulatory subunit 7
TRTMNCERDIXFELLARLCPNSTGADIRSVCTEAGMYAIRARRKTVTEKDFLDAVNKVIKGYQKFSATPKYMVYN

SEQ ID NO: 128337 - protein, 79 aa, Setaria italica
  Transcript Sequence Number=SeqID_62363
  Gene Ontology: Mol. function=nucleoside-triphosphatase activity; Cellular component=protein complex; Biological process=protein catabolic process
  Homolog annotation: Hit_ID=Q9SSB5; Match level="QueryCoverage=97%, HitCoverage=18%, E-value=6e-38, Identity=98%"; Hit description=26S protease regulatory subunit 7
  Pfam annotation: Domain name=AAA; Domain location=1-75; Score=-40.0; E_value=0.081; Accession=PF00004.21; Description=ATPase family associated with various cellular activities (AAA)
MRTLDPALLRPGRLDRKVEFGLPDLEGRTQIFKIHTRTMNCERDIRFELLARLCPNSTGADIRSVCTEAGMYAIRARRK

SEQ ID NO: 128338 - protein, 66 aa, Setaria italica
  Transcript Sequence Number=SeqID_62364
  Gene Ontology: Mol. function=nucleoside-triphosphatase activity; Cellular component=protein complex; Biological process=protein catabolic process
  Homolog annotation: Hit_ID=Q9SSB5; Match level="QueryCoverage=66%, HitCoverage=10%, E-value=3e-18, Identity=97%"; Hit description=26S protease regulatory subunit 7
SIGSSTTSRIFSICSLHPPTSLYVREGARMVRELFQMARSKKACIVFFDEVDAIGGARFDDGVGGD

SEQ ID NO: 128339 - protein, 50 aa, Setaria italica
  Transcript Sequence Number=SeqID_62365
RSGLNIGGPALKSASDEYLHRPWYTDEAFMFSTNAAQTVSNASSIMYVSS

SEQ ID NO: 128340 - protein, 79 aa, Setaria italica
  Transcript Sequence Number=SeqID_62366
  Gene Ontology: Mol. function=signal transducer activity
  Homolog annotation: Hit_ID=B9RPM7; Match level="QueryCoverage=74%, HitCoverage=10%, E-value=4e-10, Identity=54%"; Hit description=Root phototropism protein, putative
WWQVHARLTDEEKMKICRGLSYEKLSPECCKHLARNGGFPTRAAVQALASQHTVLKSLVLRDPAQLKPVSPSPSPVPTG

SEQ ID NO: 128341 - protein, 82 aa, Setaria italica
  Transcript Sequence Number=SeqID_62367
  Gene Ontology: Mol. function=RNA binding; Cellular component =cytoplasm; Biological process=regulation of transcription, DNA -dependent
  Homolog annotation: Hit_ID=B6SUK1; Match level="QueryCoverage=59%, HitCoverage=27%, E-value=8e-21, Identity=95%"; Hit description =Ligatin
  Pfam annotation: Domain name=PUA; Domain location=19-71; Score=15.0; E_value=0.0019; Accession=PF01472.12; Description=PUA domain
WLVLKLIKLLFLGICTFTLAVVLDDEVEEETPVAIMAEGKQHALAIGFTKMSAKDIRTINKGIGVDNMHYLNDGLWKMEKLE

SEQ ID NO: 128342 - protein, 58 aa, Setaria italica
  misc_feature (32)..(32): Xaa can be any naturally occurring amino acid
  Transcript Sequence Number=SeqID_62368
  Homolog annotation: Hit_ID=B6SUK1; Match level="QueryCoverage=94%, HitCoverage=42%, E-value=1e-09, Identity=50%"; Hit description =Ligatin
MFKKFSSEDISGQNQVKASVQRRIRQSIADEXQNHLNLVVVNNVPLFFNIRDGPYTSR

SEQ ID NO: 128343 - protein, 38 aa, Setaria italica
  Transcript Sequence Number=SeqID_62369
SAGNTAPDYFCRRTINKGIGVDNMHYLNDGLWKMEKLE

SEQ ID NO: 128344 - protein, 79 aa, Setaria italica
  Transcript Sequence Number=SeqID_62370
NWTEQKKSRVQKLHGWTWLGGAHVFLLDLSRVYKLIHGGKKQGQADQFYIEHLSAVKNQKTNYGLPDWKVISSVLISTS

SEQ ID NO: 128345 - protein, 58 aa, Setaria italica
  Transcript Sequence Number=SeqID_62371
  Gene Ontology: Mol. function=DNA binding
  Homolog annotation: Hit_ID=B4FB11; Match level="QueryCoverage=87%, HitCoverage=18%, E-value=7e-15, Identity=82%"; Hit description=Myb -like DNA-binding domain containing protein
IIHLFCLSAAIGGPTGEILETNAQVLGQISINLSNMQVSFYFKIQDNISLLCQTRDNI

SEQ ID NO: 128346 - protein, 78 aa, Setaria italica
  Transcript Sequence Number=SeqID_62372
  Gene Ontology: Mol. function=DNA binding
  Homolog annotation: Hit_ID=B4FB11; Match level="QueryCoverage=97%, HitCoverage=29%, E-value=2e-29, Identity=88%"; Hit description=Myb -like DNA-binding domain containing protein
LPMDDDEISSKAIGGPTGEILETNAQVLGQISINLSNMQVSFYFKIQDNISLLCQTRDNILRVLKEINDAPEIMKQMP

SEQ ID NO: 128347 - protein, 84 aa, Setaria italica
  misc_feature (72)..(72): Xaa can be any naturally occurring amino acid
  Transcript Sequence Number=SeqID_62373
  Homolog annotation: Hit_ID=B6SSZ8; Match level="QueryCoverage=80%, HitCoverage=12%, E-value=2e-21, Identity=79%"; Hit description =Nonsense-mediated mRNA decay protein 3
CRCARGGSARTCWPELMQILLRRINRPLARLRVSLSGAEFVFSEPHSKRLRLKLRLRREVLHGVVLEQTHPXEFVVHDRLCRLL

SEQ ID NO: 128348 - protein, 48 aa, Setaria italica
  Transcript Sequence Number=SeqID_62374
AMPATASSPSSSSSSPRVRWNDQYCYFVSSLLTGKAWRSLQAYAYDLQ

SEQ ID NO: 128349 - protein, 91 aa, Setaria italica
  Transcript Sequence Number=SeqID_62375
  Homolog annotation: Hit_ID=B6SSZ8; Match level="QueryCoverage=76%, HitCoverage=13%, E-value=6e-29, Identity=87%"; Hit description =Nonsense-mediated mRNA decay protein 3
GNRILLMDANLNDDDMDTAMTRYSLPEVVLVKKSYEKRPRTRRWKLKRLPVEEDAANKAKGEEEKRLDEYESFLKDLEQDPELRFTINLYK

SEQ ID NO: 128350 - protein, 99 aa, Setaria italica
  Transcript Sequence Number=SeqID_62376
  Gene Ontology: Mol. function=CTP synthase activity; Biological process=pyrimidine nucleotide biosynthetic process
  Homolog annotation: Hit_ID=Q2QNR8; Match level="QueryCoverage=97%, HitCoverage=17%, E-value=1e-45, Identity=89%"; Hit description=CTP synthase, putative, expressed
TRRRNKVPYLGICLGMQISVIEMSRHVLGLGDADSEEFNKDTPNHVVMYMPEVSKTHMGNTMRLGCRRTFFRKPDCLTSKLYGSPPHVDERHRHRYEVN

SEQ ID NO: 128351 - protein, 54 aa, Setaria italica
  Transcript Sequence Number=SeqID_62377
  Gene Ontology: Mol. function=CTP synthase activity; Cellular component=cytosol; Biological process=pyrimidine nucleotide biosynthetic process
  Homolog annotation: Hit_ID=Q2QNR8; Match level="QueryCoverage=90%, HitCoverage=8%, E-value=4e-20, Identity=97%"; Hit description=CTP synthase, putative, expressed
LKIALVGKYTNLTDSYLSVVKALLHASVACSLKPSIQWIAASDLEDATAINVSH

SEQ ID NO: 128352 - protein, 151 aa, Setaria italica
  misc_feature (8)..(8): Xaa can be any naturally occurring amino acid
  Transcript Sequence Number=SeqID_62378
  Homolog annotation: Hit_ID=B9T2E2; Match level="QueryCoverage=92%, HitCoverage=31%, E-value=4e-30, Identity=50%"; Hit description =Catalytic, putative
  Pfam annotation: Domain name=DUF676; Domain location=1-151; Score =33.0; E_value=2e-10; Accession=PF05057.6; Description=Protein of unknown function (DUF676)
VKRLPGKXFVHRSQSNHSKLTYDGVDLMGERLAEEVRQVVQRRRNLKKISFVAHSLGGLVTRYAIGKLYEPATNETSSLDTDKLSYEPATNETSSLDTDKLSDEQETPGAGKIAGLEPINFITSATPHLGSRWNKQVSFIGLFYFRLVKLI

SEQ ID NO: 128353 - protein, 56 aa, Setaria italica
  misc_feature (37)..(37): Xaa can be any naturally occurring amino acid
  Transcript Sequence Number=SeqID_62379
  Homolog annotation: Hit_ID=B9T2E2; Match level="QueryCoverage=96%, HitCoverage=13%, E-value=3e-16, Identity=72%"; Hit description =Catalytic, putative
CRSALRSFKRRVAYANVTYDHIVGWRTSSIRRQHELXPKLKLTAKDEKYPHVINVD

SEQ ID NO: 128354 - protein, 67 aa, Setaria italica
  Transcript Sequence Number=SeqID_62380
  Homolog annotation: Hit_ID=B9T2E2; Match level="QueryCoverage=97%, HitCoverage=17%, E-value=3e-15, Identity=63%"; Hit description =Catalytic, putative
LFLNFITLSPSIDMDKQLPFLFGVPVLERTAAGTAHFIVGRTGTHLFLTDRDDGKPPLLVRMVEDCD

SEQ ID NO: 128355 - protein, 59 aa, Setaria italica
  misc_feature (18)..(18): Xaa can be any naturally occurring amino acid
  Transcript Sequence Number=SeqID_62381
  Homolog annotation: Hit_ID=B9R9Y4; Match level="QueryCoverage=100%, HitCoverage=14%, E-value=1e-10, Identity=52%"; Hit description =Catalytic, putative
KPTSLDTDKLSDEQETTXAGKIAGLEPINFITSATPHLGSRWNKQLPFLFGVPVLERTA

SEQ ID NO: 128356 - protein, 79 aa, Setaria italica
  Transcript Sequence Number=SeqID_62382
  Gene Ontology: Mol. function=nucleotide binding; Cellular component =ER-Golgi intermediate compartment membrane; Biological process=small GTPase mediated signal transduction
  Homolog annotation: Hit_ID=Q43596; Match level="QueryCoverage=100%, HitCoverage=51%, E-value=7e-34, Identity=66%"; Hit description=Small GTP-binding protein
  Pfam annotation: Domain name=Ras; Domain location=1-79; Score=29.3; E_ value=1.5e-11; Accession=PF00071.14; Description=Ras family
GSRMITIDNKPIKLQIWDTAGQESFRSITRSYYRGAAGALLVYDITRRAVSYEEGEQFAKEHGLIFMEASAKTAQNVEE

SEQ ID NO: 128357 - protein, 104 aa, Setaria italica
  misc_feature (50)..(50): Xaa can be any naturally occurring amino acid
  Transcript Sequence Number=SeqID_62383
MLIFTLISSWHMFSDPIMPFFHLHVKLTQPPLDFRLRDWGPAPRWAAIVXDFFLASRARYAVITGAHPRVGTTYAQLIAALAAANTYDLKPSGANFTFLSSIHS

SEQ ID NO: 128358 - protein, 120 aa, Setaria italica
  misc_feature (61)..(61): Xaa can be any naturally occurring amino acid
  Transcript Sequence Number=SeqID_62384
  Gene Ontology: Mol. function=binding; Cellular component=endoplasmic reticulum; Biological process=intracellular protein transport
  Homolog annotation: Hit_ID=B6UFA9; Match level="QueryCoverage=94%, HitCoverage=38%, E-value=6e-45, Identity=83%"; Hit description=Alpha- soluble NSF attachment protein
  Pfam annotation: Domain name=NSF; Domain location=29-40; Score=14.3; E_value=0.53; Accession=PF02071.12; Description=Aromatic-di-Alanine (AdAR) repeat
  Pfam annotation: Domain name=NSF; Domain location=48-59; Score=9.0; E_ value=15; Accession=PF02071.12; Description=Aromatic-di-Alanine (AdAR) repeat
  Pfam annotation: Domain name=NSF; Domain location=89-100; Score=10.1; E_value=9.7; Accession=PF02071.12; Description=Aromatic-di-Alanine (AdAR) repeat
  Pfam annotation: Domain name=NSF; Domain location=9-20; Score=7.7; E _value=23; Accession=PF02071.12; Description=Aromatic-di-Alanine (AdAR) repeat
  Pfam annotation: Domain name=TPR_1; Domain location=10-43; Score=3.7; E_value=2.1; Accession=PF00515.20; Description=Tetratricopeptide repeat
  Pfam annotation: Domain name=TPR_1; Domain location=70-103; Score =15.5; E_value=0.08; Accession=PF00515.20; Description=Tetratricopepti de repeat
  Pfam annotation: Domain name=TPR_2; Domain location=10-43; Score=9.8; E_value=2; Accession=PF07719.9; Description=Tetratricopeptide repeat
  Pfam annotation: Domain name=TPR_2; Domain location=70-103; Score =17.3; E_value=0.064; Accession=PF07719.9; Description=Tetratricopepti de repeat
  Pfam module annotation: Pfam domain module=NSF::NSF::NSF::NSF::TPR _1::TPR_1::TPR_2::TPR_2; Domain location=29-40::48-59::89-100::9 -20::10-43::70-103::10-43::70-103
KLAKNWSRAASVYIKIANCHLKGDSKHEAASAYVEAANCYKKFSPQEAAQALNQAVNLFLXEIGRLNMAARYSKDIGEIYQQEQDLEKATDYLERAADLFDSEGQSSQAISATFCLMVFA

SEQ ID NO: 128359 - protein, 104 aa, Setaria italica
  misc_feature (84)..(84): Xaa can be any naturally occurring amino acid
  misc_feature (91)..(91): Xaa can be any naturally occurring amino acid
  misc_feature (97)..(97): Xaa can be any naturally occurring amino acid
  Transcript Sequence Number=SeqID_62385
  Gene Ontology: Mol. function=binding; Cellular component=endoplasmic reticulum; Biological process=intracellular protein transport
  Homolog annotation: Hit_ID=B3TM19; Match level="QueryCoverage=84%, HitCoverage=30%, E-value=2e-40, Identity=88%"; Hit description=Alpha- soluble NSF attachment protein
FFLKYSVRGILLNAGICQLCRGDPVAITNSLERYQEIDPTFSGTREYKLLADLAASMDEGDIAKFTDAIKEFDSMTRLDPWKTXLLLRAKXELKKKXDDEDDLT

SEQ ID NO: 128360 - protein, 84 aa, Setaria italica
  Transcript Sequence Number=SeqID_62386
  Gene Ontology: Mol. function=actin binding; Cellular component =intracellular
  Homolog annotation: Hit_ID=B6UA35; Match level="QueryCoverage=90%, HitCoverage=66%, E-value=5e-38, Identity=98%"; Hit description=Actin- depolymerizing factor 5
  Pfam annotation: Domain name=Cofilin_ADF; Domain location=1-79; Score= 18.1; E_value=3.8e-06; Accession=PF00241.12; Description =Cofilintropomyosin-type actin-binding pr
PGDDCRYAVFDFDFVTVDNCQKSKIFFIAWSPTASRIRAKILYATSKQGLRRLLDGVHYEVQATDPSEMGFDVIRGRATNRRTR

SEQ ID NO: 128361 - protein, 85 aa, Setaria italica
  misc_feature (32)..(32): Xaa can be any naturally occurring amino acid
  Transcript Sequence Number=SeqID_62387
  Subcellular localization annotation: CTP_CleavageSite=28; ConfidenceScore=5.01e-01
STQPPVAEKKVTDLITSSSRKQKPVGVTSKKXSKGGRKLLAACDSADTENDAPQVAPSIPADQQHSDWSVGCLSYLFIFVFRFNF

SEQ ID NO: 128362 - protein, 76 aa, Setaria italica
  Transcript Sequence Number=SeqID_62388
TEGLQDLPTGEHAGTSPPVPQASGGKASEKNEGHQRNSRTLLRKSFMLPNITSMFHKKKGHAGSSSPSYLPGEKSV

SEQ ID NO: 128363 - protein, 72 aa, Setaria italica
  Transcript Sequence Number=SeqID_62389
  Subcellular localization annotation: CTP_CleavageSite=9; ConfidenceScore=5.09e-01
RLRLRLRLRLAAAAAETTSSDLAVDFLRKTKSGSFDPCPRSRSNKQATFLLLCPLSSVLRRPLLLSNVGQSD

SEQ ID NO: 128364 - protein, 66 aa, Setaria italica
  Transcript Sequence Number=SeqID_62390
GWPENSFDIFQRLQTLYSRLYPQIVVAPASGTWIKTTGLRLSQKVNRQVAAGSLRRRRRQPQPQPQ

SEQ ID NO: 128365 - protein, 33 aa, Setaria italica
  Transcript Sequence Number=SeqID_62391
IFTLLKPKSTLEEHSLLITDVRFSPGMTRLATS

SEQ ID NO: 128366 - protein, 90 aa, Setaria italica
  Transcript Sequence Number=SeqID_62392
  Gene Ontology: Mol. function=transporter activity; Cellular component= mitochondrial membrane; Biological process=transport
  Homolog annotation: Hit_ID=B9T601; Match level="QueryCoverage=87%, HitCoverage=14%, E-value=7e-28, Identity=79%"; Hit description=Inner membrane transport protein yjjL, putative
LVVTVIISIVIYDCRKVLEVGVVTWSLATATIPVVAGFMPGLVLSRILVGIGEGVSPSAATDLIARYIPLQERSRAVAVVFGGLSFGSVL

SEQ ID NO: 128367 - protein, 82 aa, Setaria italica
  misc_feature (7)..(7): Xaa can be any naturally occurring amino acid
  misc_feature (21)..(21): Xaa can be any naturally occurring amino acid
  Transcript Sequence Number=SeqID_62393
  Gene Ontology: Mol. function=transporter activity; Cellular component= mitochondrial membrane; Biological process=transport
  Homolog annotation: Hit_ID=B9T601; Match level="QueryCoverage=100%, HitCoverage=15%, E-value=2e-30, Identity=81%"; Hit description=Inner membrane transport protein yjjL, putative
  Subcellular localization annotation: CTP_CleavageSite=34; ConfidenceScore=5.15e-01
SSFFWGXTALSQLPGGWLAKXFGGRKVLEVGVVTWSLATATIPVVAGFMPGLVLSRILVGIGEGVSPSAATDLIARYIPLQE

SEQ ID NO: 128368 - protein, 84 aa, Setaria italica
  Transcript Sequence Number=SeqID_62394
  Gene Ontology: Mol. function=hydrolase activity, acting on glycosyl bonds; Cellular component=vacuole; Biological process=cell wall organization and biogenesis
  Homolog annotation: Hit_ID=Q2R052; Match level="QueryCoverage=65%, HitCoverage=12%, E-value=2e-21, Identity=87%"; Hit description =Glycoside hydrolase family 28 protein, putative, expressed
LYLEKGAVIIGSKDSSQWPIVEPLPSYGQGLDLPGPRHRSLINGYNLTDVVITGSYFFLSCVTDCRVLFCFLVKILITPACPIL

SEQ ID NO: 128369 - protein, 65 aa, Setaria italica
  Transcript Sequence Number=SeqID_62395
KTDFFRIRELNATSKNDFKYLCYLNKKRQNNAPRLGKKIHTWNYAISQWSIQCSLNRHIVNLYIT

SEQ ID NO: 128370 - protein, 81 aa, Setaria italica
  Transcript Sequence Number=SeqID_62396
  Subcellular localization annotation: CTP_CleavageSite=20; ConfidenceScore=5.36e-01
HKTQSLVYYTVIQDPAALCFCSTSSRFRNNLTCAGFLKGNLAQGSPAVLYPHQFFRFLRLLIPGCLFMIVLQVAERIGVEV

SEQ ID NO: 128371 - protein, 73 aa, Setaria italica
  Transcript Sequence Number=SeqID_62397
  Gene Ontology: Mol. function=phosphoglycolate phosphatase activity; Biological process=metabolic process
  Homolog annotation: Hit_ID=Q4F886; Match level="QueryCoverage=86%, HitCoverage=27%, E-value=6e-30, Identity=96%"; Hit description=DT -related protein
FAISAEVAAEKPNPTIFLKACELLGVKPEEAVHIGDDRRNDLWGARDAGCDAWLWGSDVYSFKEVAERIGVEV

SEQ ID NO: 128372 - protein, 101 aa, Setaria italica
  misc_feature (92)..(92): Xaa can be any naturally occurring amino acid
  Transcript Sequence Number=SeqID_62398
  Gene Ontology: Mol. function=phosphoglycolate phosphatase activity; Biological process=metabolic process
  Homolog annotation: Hit_ID=B9SZX9; Match level="QueryCoverage=99%, HitCoverage=32%, E-value=5e-43, Identity=89%"; Hit description=N -acylneuraminate-9-phosphatase, putative
DPFWQYIVSSSTGCSDLQYFEELYQYYTTEKAWHLCDPDAGRVFQALRRAGVKTAVVSNFDTRLRPLLQALKCDHWFDAVAISAEVAAEKPXPTIFLKACE

SEQ ID NO: 128373 - protein, 59 aa, Setaria italica
  Transcript Sequence Number=SeqID_62399
  Gene Ontology: Mol. function=phosphoglycolate phosphatase activity; Biological process=metabolic process
  Homolog annotation: Hit_ID=Q4F886; Match level="QueryCoverage=64%, HitCoverage=16%, E-value=2e-15, Identity=100%"; Hit description=DT -related protein
RKAKTQTNNYLERTIVEDCWDVKPEEAVHIGDDRRNDLWGARDAGCDAWLWGSDVYSFK

SEQ ID NO: 128374 - protein, 47 aa, Setaria italica
  Transcript Sequence Number=SeqID_62400
ALTYSSTYRIICNREATNKKKLKLAQRYSSTTHHIENAQKLNHSHCL

SEQ ID NO: 128375 - protein, 40 aa, Setaria italica
  Transcript Sequence Number=SeqID_62401
  Homolog annotation: Hit_ID=B6TS67; Match level="QueryCoverage=92%, HitCoverage=6%, E-value=7e-09, Identity=83%"; Hit description=Amino acid permease
MSVAGGVIASILVVICLLWVGVVDDVGFENKGTVLNLPGI

SEQ ID NO: 128376 - protein, 33 aa, Setaria italica
  misc_feature (21)..(21): Xaa can be any naturally occurring amino acid
  Transcript Sequence Number=SeqID_62402
LQIAACSFIIVVGVCCACVGXYSSLSRIIQNYT

SEQ ID NO: 128377 - protein, 69 aa, Setaria italica
  Transcript Sequence Number=SeqID_62403
  Gene Ontology: Cellular component=chloroplast
  Homolog annotation: Hit_ID=B6TS67; Match level="QueryCoverage=86%, HitCoverage=10%, E-value=2e-17, Identity=71%"; Hit description=Amino acid permease
YKMFGEATKSQFTLNLPENLVVSKVAVWTTVANPITKYALTIIPLSMSLEELLPPNQQKYSNTETRNRG

SEQ ID NO: 128378 - protein, 32 aa, Setaria italica
  Transcript Sequence Number=SeqID_62404
QVAACSFIMAVGVCCACVGTYSSLSRIIQSYT

SEQ ID NO: 128379 - protein, 70 aa, Setaria italica
  Transcript Sequence Number=SeqID_62405
  Gene Ontology: Cellular component=chloroplast
  Homolog annotation: Hit_ID=B6TS67; Match level="QueryCoverage=84%, HitCoverage=10%, E-value=1e-24, Identity=93%"; Hit description=Amino acid permease
CCIEYLILESDNLSKLFPNAHLTIGSLTLNSHVFFAILTTIIVMPTTWLRDLSCLSYLSGIHLHVALHFV

SEQ ID NO: 128380 - protein, 145 aa, Setaria italica
  Transcript Sequence Number=SeqID_62406
  Gene Ontology: Mol. function=transferase activity, transferring glycosyl groups; Biological process=metabolic process
  Homolog annotation: Hit_ID=Q69IU8; Match level="QueryCoverage=99%, HitCoverage=33%, E-value=3e-49, Identity=63%"; Hit description =Putative UDP-glucose:salicylic acid glucosyltransferase
PADFPTFLTEPDGGCRAYLDLVLQQCQGYEVADHVLVNSFYDLEIETVGPTVPSAYLDNRLPDDVSHGFHLYTPMTEESKAWLDARPDHSVVYVSFGSLAAPGAGQMAEVAEGLYNSGKDFLWVVRASETSKIPQGFSDKVKGRG

SEQ ID NO: 128381 - protein, 118 aa, Setaria italica
  misc_feature (22)..(22): Xaa can be any naturally occurring amino acid
  Transcript Sequence Number=SeqID_62407
  Gene Ontology: Mol. function=iron-sulfur cluster binding; Biological process=biotin biosynthetic process
  Homolog annotation: Hit_ID=Q2XPR6; Match level="QueryCoverage=88%, HitCoverage=27%, E-value=4e-50, Identity=89%"; Hit description =Biotin synthase
  Pfam annotation: Domain name=BATS; Domain location=15-107; Score =143.9; E_value=5.1e-40; Accession=PF06968.5; Description=Biotin and Thiamin Synthesis associate
LHTLATLPTHPESVPINALVAXKGTPLEDQKPVEIWEMIRMVATARIVMPKAMVRLSAGRVRFSMPEQALCFLAGANSIFAGEKLLTTANNDFDADKAMFKILGPRITQRTNQKNLNK

SEQ ID NO: 128382 - protein, 38 aa, Setaria italica
  Transcript Sequence Number=SeqID_62408
DKAMFKILGLIPKAPSFSDEEAAAPDSDTERPEQAASM

SEQ ID NO: 128383 - protein, 137 aa, Setaria italica
  misc_feature (111)..(111): Xaa can be any naturally occurring amino acid
  Transcript Sequence Number=SeqID_62409
  Homolog annotation: Hit_ID=Q00RL5; Match level="QueryCoverage=90%, HitCoverage=23%, E-value=1e-21, Identity=45%"; Hit description =OSIGBa0117N13.2 protein
LLLNIHSDISCIPMQIAQPTIRRDSVIEDSNGYSRPQCLQEQCHDNLKNVMITGFCSAKSMIELTICIIEKTKALACLTLDTTRGYDRRLVKFDKCLQLGKEALVEAKKGXVAIQRYIEGRVPPAVNLKVIEPCSKC

SEQ ID NO: 128384 - protein, 48 aa, Setaria italica
  Transcript Sequence Number=SeqID_62410
RSSSSLPRLSCRVLFLLFDASRTPLGLGVPNFTRIFSLIINVLPPLFP

SEQ ID NO: 128385 - protein, 49 aa, Setaria italica
  Transcript Sequence Number=SeqID_62411
CDGRSVAHFLMKSFLKSQRSSEERKQATKDSLYKSKARTMHRLSCQQKP

SEQ ID NO: 128386 - protein, 145 aa, Setaria italica
  misc_feature (94)..(94): Xaa can be any naturally occurring amino acid
  misc_feature (129)..(129): Xaa can be any naturally occurring amino acid
  Transcript Sequence Number=SeqID_62412
  Homolog annotation: Hit_ID=Q9ZVM5; Match level="QueryCoverage=98%, HitCoverage=40%, E-value=9e-21, Identity=41%"; Hit description =T22H22.9 protein
VSLLRSSESITVFACDCSKDTLEKANEIISNTKGIDIKDRFQPFLMDVSKETFPDWLCCIACKSSHDASHHKMRKEHPGFLRENQCCVGGMDFXITMIFTLSAIPFAIMPSTIEQCVSVLKPGGLLLFXDYGLYDMTMLRFLPHQ

SEQ ID NO: 128387 - protein, 70 aa, Setaria italica
  Transcript Sequence Number=SeqID_62413
  Pfam annotation: Domain name=GATA; Domain location=39-68; Score=14.7; E_value=0.0055; Accession=PF00320.19; Description=GATA zinc finger
MEKEGFFSTVLLVHLPGCLFQVIGIAAAPAVAEAGRPCCVECRTTATPMWRGGPTGPRVSATTLSISLPT

SEQ ID NO: 128388 - protein, 68 aa, Setaria italica
  Transcript Sequence Number=SeqID_62414
  Gene Ontology: Mol. function=protein binding; Cellular component =cytoplasm; Biological process=protein transport
  Homolog annotation: Hit_ID=B9RXZ5; Match level="QueryCoverage=82%, HitCoverage=23%, E-value=2e-21, Identity=89%"; Hit description =Charged multivesicular body protein, putative
YPLCALPIHCCVSQDEKIKKLDAELARYKDQIKKTRPGPAQEAVKARAMRVLKQRRMYEGQRDMLYNQ

SEQ ID NO: 128389 - protein, 57 aa, Setaria italica
  Transcript Sequence Number=SeqID_62415
SVAIYYLLGLALNCLLFTLSLQGASESKPLVEPHGAAAEDKKRGIMRVFTFRSGHVN

SEQ ID NO: 128390 - protein, 79 aa, Setaria italica
  Transcript Sequence Number=SeqID_62416
PTLFDLILRKVYRLFGWEYRRPERAPPACPYKPAAQKNDEVRLHAHATLLTISCCKMHAGSQLLILASRLFKELTNYRR

SEQ ID NO: 128391 - protein, 42 aa, Setaria italica
  Transcript Sequence Number=SeqID_62417
ILRKVYRLFGWEYRRPERAPPACPYKPGVLIHSHLHRSSEQQ

SEQ ID NO: 128392 - protein, 42 aa, Setaria italica
  Transcript Sequence Number=SeqID_62418
KKAAKGNKPGKGGNRFWKSIGLGFKTPREAIEGLPYILSNRY

SEQ ID NO: 128393 - protein, 53 aa, Setaria italica
  Transcript Sequence Number=SeqID_62419
MKYLSWLFWHFGVICKLHCSNFRPLSKTVRFNVLKVIPAGSKSGAVKKAFTAA

SEQ ID NO: 128394 - protein, 92 aa, Setaria italica
  Transcript Sequence Number=SeqID_62420
  Gene Ontology: Mol. function=structural constituent of ribosome; Cellular component=ribonucleoprotein complex; Biological process =translation
  Homolog annotation: Hit_ID=Q9M5M1; Match level="QueryCoverage=93%, HitCoverage=54%, E-value=1e-43, Identity=94%"; Hit description=40S ribosomal protein S11
  Pfam annotation: Domain name=Ribosomal_S17; Domain location=28-92; Score=115.0; E_value=2.6e-31; Accession=PF00366.12; Description =Ribosomal protein S17
MLLGAGTYIDKKCPFTGTVSIRGRIIAGTCHSAKMNRTIIVRRNYLHFVKKYQRYEKRHSNIPAHISPCFRVKEGDHVIIGQCRPLSKNIRH

SEQ ID NO: 128395 - protein, 61 aa, Setaria italica
  Transcript Sequence Number=SeqID_62421
  Gene Ontology: Mol. function=structural constituent of ribosome; Cellular component=ribonucleoprotein complex; Biological process =translation
  Homolog annotation: Hit_ID=Q9M5M1; Match level="QueryCoverage=95%, HitCoverage=35%, E-value=8e-24, Identity=94%"; Hit description=40S ribosomal protein S11
  Pfam annotation: Domain name=Ribosomal_S17; Domain location=2-44; Score=48.8; E_value=2.2e-11; Accession=PF00366.12; Description =Ribosomal protein S17
VIEKRHSNIPAHISPCFRVKEGDHVIIGQCRPLSKTVRFNVLKVIPAGSKSGAVKKAFTAA

SEQ ID NO: 128396 - protein, 55 aa, Setaria italica
  Transcript Sequence Number=SeqID_62422
MPGVEERADLKRRRRRRRELWRRRNAREKFGPFLDLCVSSLRRGHANLLCIVPIL

SEQ ID NO: 128397 - protein, 142 aa, Setaria italica
  Transcript Sequence Number=SeqID_62423
  Gene Ontology: Mol. function=methylcrotonoyl-CoA carboxylase activity; Cellular component=mitochondrial matrix; Biological process=metabolic process
  Homolog annotation: Hit_ID=B6SKB7; Match level="QueryCoverage=100%, HitCoverage=18%, E-value=3e-75, Identity=93%"; Hit description =Methylcrotonoyl-CoA carboxylase subunit alpha
  Pfam annotation: Domain name=Biotin_carb_C; Domain location=29-136; Score=180.1; E_value=6.4e-51; Accession=PF02785.11; Description =Biotin carboxylase C-terminal domain
LVEWQIRVANGERLPLSQEQVPLNGHAFEARIYAENVPRGFLPATGTLHHYRPVPSASTVRVETGVEEGDTVSIHYDPMIAKLVVWGESRSAALVKLKKCLSNFQIAGLPTNVGFLQELASHSSFEEGIVDTHFIERYKDDL

SEQ ID NO: 128398 - protein, 72 aa, Setaria italica
  Transcript Sequence Number=SeqID_62424
  Subcellular localization annotation: CTP_CleavageSite=49; ConfidenceScore=5.53e-01
WFLLLSVRAQEQSTGSFARTRGRPAHRARPAAASPASGSRLPSSSTPCLCFAGQASRPTVAGLASTAAQPGG

SEQ ID NO: 128399 - protein, 70 aa, Setaria italica
  Transcript Sequence Number=SeqID_62425
DAASQKLSDYSSIKQFTDDPGVDRQRWHSDRKQMNKQLVPFLGSFCYLFERRSNRPAASHGRGAGQLIGP

SEQ ID NO: 128400 - protein, 71 aa, Setaria italica
  Transcript Sequence Number=SeqID_62426
CPFLLLRTILRTEMQHPRSCPTTAVSNNSRMIQELIDKLVSITNCGINMNYDAPFVPQDYERAVPSMVQDT

SEQ ID NO: 128401 - protein, 142 aa, Setaria italica
  misc_feature (114)..(114): Xaa can be any naturally occurring amino acid
  Transcript Sequence Number=SeqID_62427
  Gene Ontology: Mol. function=methylcrotonoyl-CoA carboxylase activity; Cellular component=mitochondrial matrix; Biological process=metabolic process
  Homolog annotation: Hit_ID=B6SKB7; Match level="QueryCoverage=100%, HitCoverage=18%, E-value=2e-75, Identity=93%"; Hit description =Methylcrotonoyl-CoA carboxylase subunit alpha
  Pfam annotation: Domain name=Biotin_carb_C; Domain location=29-136; Score=179.9; E_value=7.2e-51; Accession=PF02785.11; Description =Biotin carboxylase C-terminal domain
LVEWQIRVANGERLPLSQEQVPLNGHAFEARIYAENVPRGFLPATGTLHHYRPVPSASTVRVETGVEEGDTVSIHYDPMIAKLVVWGESRSAALVKLKKCLSNFQIAGLPTNVXFLQELASHSSFEEGIVDTHFIERYKDDL

SEQ ID NO: 128402 - protein, 51 aa, Setaria italica
  Transcript Sequence Number=SeqID_62428
  Gene Ontology: Mol. function=methylcrotonoyl-CoA carboxylase activity; Cellular component=mitochondrial matrix; Biological process=metabolic process
  Homolog annotation: Hit_ID=B6SKB7; Match level="QueryCoverage=96%, HitCoverage=6%, E-value=7e-20, Identity=95%"; Hit description =Methylcrotonoyl-CoA carboxylase subunit alpha
PTIISVLSAQREAAASFGVNTLLIEKYITQPRHVEVQVFGDQHGNAIYLYE

SEQ ID NO: 128403 - protein, 77 aa, Setaria italica
  Transcript Sequence Number=SeqID_62429
  Gene Ontology: Mol. function=methylcrotonoyl-CoA carboxylase activity; Cellular component=mitochondrial matrix; Biological process=metabolic process
  Homolog annotation: Hit_ID=B6SKB7; Match level="QueryCoverage=100%, HitCoverage=10%, E-value=2e-30, Identity=83%"; Hit description =Methylcrotonoyl-CoA carboxylase subunit alpha
  Pfam annotation: Domain name=CPSase_L_D2; Domain location=1-77; Score= -77.3; E_value=1.2e-05; Accession=PF02786.9; Description=Carbamoyl -phosphate synthase L chain, ATP binding domain
TLLIEKYITQPRHVEVQVFGDQHGNAIYLYERDCSLQRRHQKIIEEAPAPNVTAEFRSHIGGAAVSAAKAVGYYNAG

SEQ ID NO: 128404 - protein, 79 aa, Setaria italica
  Transcript Sequence Number=SeqID_62430
  Gene Ontology: Mol. function=methylcrotonoyl-CoA carboxylase activity; Cellular component=mitochondrial matrix; Biological process=metabolic process
  Homolog annotation: Hit_ID=B6SKB7; Match level="QueryCoverage=98%, HitCoverage=10%, E-value=5e-31, Identity=83%"; Hit description =Methylcrotonoyl-CoA carboxylase subunit alpha
  Pfam annotation: Domain name=CPSase_L_D2; Domain location=1-79; Score= -70.5; E_value=3.6e-06; Accession=PF02786.9; Description=Carbamoyl -phosphate synthase L chain, ATP binding domain
RTLLIEKYITQPRHVEVQVFGDQHGNAIYLYERDCSLQRRHQKIIEEAPAPNVTAEFRSHIGGAAVSAAKAVGYYNAGT

SEQ ID NO: 128405 - protein, 75 aa, Setaria italica
  misc_feature (46)..(46): Xaa can be any naturally occurring amino acid
  Transcript Sequence Number=SeqID_62431
  Gene Ontology: Mol. function=methylcrotonoyl-CoA carboxylase activity; Cellular component=mitochondrial matrix; Biological process=metabolic process
  Homolog annotation: Hit_ID=B6SKB7; Match level="QueryCoverage=84%, HitCoverage=8%, E-value=1e-27, Identity=95%"; Hit description =Methylcrotonoyl-CoA carboxylase subunit alpha
  Pfam annotation: Domain name=CPSase_L_D2; Domain location=1-75; Score= -102.8; E_value=0.00091; Accession=PF02786.9; Description=Carbamoyl -phosphate synthase L chain, ATP binding domain
VNTLLIEKYITQPRHVEVQVFGDQHGNAIYLYERDCSLQRRHQKIXFEEAPAPNVTAEFRSHIGGAAVSAAKAVG

SEQ ID NO: 128406 - protein, 133 aa, Setaria italica
  misc_feature (118)..(118): Xaa can be any naturally occurring amino acid
  Transcript Sequence Number=SeqID_62432
  Gene Ontology: Mol. function=methylcrotonoyl-CoA carboxylase activity; Cellular component=mitochondrial matrix; Biological process=metabolic process
  Homolog annotation: Hit_ID=B6SKB7; Match level="QueryCoverage=100%, HitCoverage=17%, E-value=1e-68, Identity=92%"; Hit description =Methylcrotonoyl-CoA carboxylase subunit alpha
  Pfam annotation: Domain name=Biotin_carb_C; Domain location=29-133; Score=156.3; E_value=8.9e-44; Accession=PF02785.11; Description =Biotin carboxylase C-terminal domain
LVEWQIRVANGERLPLSQEQVPLNGHAFEARIYAENVPRGFLPATGTLHHYRPVPSASTVRVETGVEEGDTVSIHYDPMIAKLVVWGESRSAALVKLKKCLSNFQIAGLPTNVGFLQXLASHSSFEEGIVDTH

SEQ ID NO: 128407 - protein, 77 aa, Setaria italica
  Transcript Sequence Number=SeqID_62433
  Gene Ontology: Mol. function=methylcrotonoyl-CoA carboxylase activity; Cellular component=mitochondrial matrix; Biological process=metabolic process
  Homolog annotation: Hit_ID=B6SKB7; Match level="QueryCoverage=100%, HitCoverage=10%, E-value=8e-31, Identity=83%"; Hit description =Methylcrotonoyl-CoA carboxylase subunit alpha
  Pfam annotation: Domain name=CPSase_L_D2; Domain location=1-77; Score= -72.2; E_value=4.9e-06; Accession=PF02786.9; Description=Carbamoyl -phosphate synthase L chain, ATP binding domain
QPRHVEVQVFGDQHGNAIYLYERDCSLQRRHQKIIEEAPAPNVTAEFRSHIGGAAVSAAKAVGYYNAGTVEFIVDTL

SEQ ID NO: 128408 - protein, 114 aa, Setaria italica
  misc_feature (43)..(43): Xaa can be any naturally occurring amino acid
  Transcript Sequence Number=SeqID_62434
  Gene Ontology: Mol. function=methylcrotonoyl-CoA carboxylase activity; Cellular component=mitochondrial matrix; Biological process=metabolic process
  Homolog annotation: Hit_ID=B6SKB7; Match level="QueryCoverage=100%, HitCoverage=13%, E-value=3e-51, Identity=88%"; Hit description =Methylcrotonoyl-CoA carboxylase subunit alpha
  Pfam annotation: Domain name=CPSase_L_D2; Domain location=1-110; Score=-17.5; E_value=4.3e-10; Accession=PF02786.9; Description =Carbamoyl-phosphate synthase L chain, ATP binding domain
LQRRHQKIIEEAPAPNVTAEFRSHIGGAAVSAAKGHLLDSLCXKAVGYYNAGTVEFIVDTLSGEFYFMEMNTRLQVEHPVTEMIVGQDLVEWQIRVANGERLPLSQEQVPLNWY

SEQ ID NO: 128409 - protein, 82 aa, Setaria italica
  Transcript Sequence Number=SeqID_62435
  Gene Ontology: Mol. function=methylcrotonoyl-CoA carboxylase activity; Cellular component=mitochondrial matrix; Biological process=metabolic process
  Homolog annotation: Hit_ID=B6SKB7; Match level="QueryCoverage=92%, HitCoverage=10%, E-value=9e-40, Identity=100%"; Hit description =Methylcrotonoyl-CoA carboxylase subunit alpha
  Pfam annotation: Domain name=CPSase_L_D2; Domain location=2-73; Score= -84.0; E_value=3.6e-05; Accession=PF02786.9; Description=Carbamoyl -phosphate synthase L chain, ATP binding domain
IGFFVLKAVGYYNAGTVEFIVDTLSGEFYFMEMNTRLQVEHPVTEMIVGQDLVEWQIRVANGERLPLSQEQVPLNGHAFEAR

SEQ ID NO: 128410 - protein, 79 aa, Setaria italica
  misc_feature (59)..(59): Xaa can be any naturally occurring amino acid
  Transcript Sequence Number=SeqID_62436
  Gene Ontology: Mol. function=methylcrotonoyl-CoA carboxylase activity; Cellular component=mitochondrial matrix; Biological process=metabolic process
  Homolog annotation: Hit_ID=B6SKB7; Match level="QueryCoverage=100%, HitCoverage=9%, E-value=7e-31, Identity=86%"; Hit description =Methylcrotonoyl-CoA carboxylase subunit alpha
  Pfam annotation: Domain name=CPSase_L_D2; Domain location=1-77; Score= -126.1; E_value=0.049; Accession=PF02786.9; Description=Carbamoyl -phosphate synthase L chain, ATP binding domain
GDQHGNAIYLYERDCSLQRRHQKIIEEAPAPNVTAEFRSHIGGAAVSAAKGHLLDSLCXKAVGYYNAGTVEFIVDTLSG

SEQ ID NO: 128411 - protein, 76 aa, Setaria italica
  misc_feature (6)..(6): Xaa can be any naturally occurring amino acid
  misc_feature (20)..(20): Xaa can be any naturally occurring amino acid
  misc_feature (56)..(56): Xaa can be any naturally occurring amino acid
  Transcript Sequence Number=SeqID_62437
  Gene Ontology: Mol. function=methylcrotonoyl-CoA carboxylase activity; Cellular component=mitochondrial matrix; Biological process=metabolic process
  Homolog annotation: Hit_ID=B6SKB7; Match level="QueryCoverage=96%, HitCoverage=8%, E-value=4e-25, Identity=82%"; Hit description =Methylcrotonoyl-CoA carboxylase subunit alpha
MEIAIXLYERDCSLQRRHQXIIEEAPAPNVTAEFRSHIGGAAVSAAKGHLLDSLCXKAVGYYNAGTVEFIVDTLSG

SEQ ID NO: 128412 - protein, 52 aa, Setaria italica
  Transcript Sequence Number=SeqID_62438
IIHEMDLIFSAYYCSLSYFFTLHTSTAKLPTTFFIPIYGMINAQVIFFTSTR

SEQ ID NO: 128413 - protein, 81 aa, Setaria italica
  misc_feature (22)..(22): Xaa can be any naturally occurring amino acid
  misc_feature (73)..(73): Xaa can be any naturally occurring amino acid
  Transcript Sequence Number=SeqID_62439
  Gene Ontology: Mol. function=methylcrotonoyl-CoA carboxylase activity; Cellular component=mitochondrial matrix; Biological process=metabolic process
  Homolog annotation: Hit_ID=B6SKB7; Match level="QueryCoverage=100%, HitCoverage=9%, E-value=4e-32, Identity=86%"; Hit description =Methylcrotonoyl-CoA carboxylase subunit alpha
  Pfam annotation: Domain name=CPSase_L_D2; Domain location=1-81; Score= -87.1; E_value=6.2e-05; Accession=PF02786.9; Description=Carbamoyl -phosphate synthase L chain, ATP binding domain
RSHIGGAAVSAAKGHLLDSLCXKAVGYYNAGTVEFIVDTLSGEFYFMEMNTRLQVEHPVTEMIVGQDLVEWQXRVANGERL

SEQ ID NO: 128414 - protein, 57 aa, Setaria italica
  Transcript Sequence Number=SeqID_62440
  Gene Ontology: Mol. function=methylcrotonoyl-CoA carboxylase activity; Cellular component=mitochondrial matrix
  Homolog annotation: Hit_ID=B6SKB7; Match level="QueryCoverage=100%, HitCoverage=7%, E-value=5e-23, Identity=89%"; Hit description =Methylcrotonoyl-CoA carboxylase subunit alpha
MHHFARQPLELEFEEHDGFSEKLLKLFITYKPDGSYFIETEDGTSGLDVKVDHKGDH

SEQ ID NO: 128415 - protein, 77 aa, Setaria italica
  misc_feature (67)..(67): Xaa can be any naturally occurring amino acid
  Transcript Sequence Number=SeqID_62441
  Gene Ontology: Mol. function=methylcrotonoyl-CoA carboxylase activity; Cellular component=mitochondrial matrix; Biological process=metabolic process
  Homolog annotation: Hit_ID=B6SKB7; Match level="QueryCoverage=79%, HitCoverage=8%, E-value=6e-30, Identity=98%"; Hit description =Methylcrotonoyl-CoA carboxylase subunit alpha
  Pfam annotation: Domain name=CPSase_L_D2; Domain location=1-77; Score= -96.3; E_value=0.0003; Accession=PF02786.9; Description=Carbamoyl -phosphate synthase L chain, ATP binding domain
SCCVCSKGSLIGFFVLKAVGYYNAGTVEFIVDTLSGEFYFMEMNTRLQVEHPVTEMIVGQDLVEWQXRVANGERLPL

SEQ ID NO: 128416 - protein, 77 aa, Setaria italica
  misc_feature (29)..(29): Xaa can be any naturally occurring amino acid
  misc_feature (48)..(48): Xaa can be any naturally occurring amino acid
  Transcript Sequence Number=SeqID_62442
  Gene Ontology: Mol. function=methylcrotonoyl-CoA carboxylase activity; Cellular component=mitochondrial matrix; Biological process=metabolic process
  Homolog annotation: Hit_ID=B6SKB7; Match level="QueryCoverage=100%, HitCoverage=8%, E-value=1e-28, Identity=84%"; Hit description =Methylcrotonoyl-CoA carboxylase subunit alpha
  Pfam annotation: Domain name=CPSase_L_D2; Domain location=2-77; Score= -123.6; E_value=0.032; Accession=PF02786.9; Description=Carbamoyl -phosphate synthase L chain, ATP binding domain
PNVTAEFRSHIGGAAVSAAKGHLLDSLCXKAVGYYNAGTVEFIVDTLXGEFYFMEMNTRLQVEHPVTEMIVGQDLVE

SEQ ID NO: 128417 - protein, 36 aa, Setaria italica
  Transcript Sequence Number=SeqID_62443
  Homolog annotation: Hit_ID=B6SKB7; Match level="QueryCoverage=77%, HitCoverage=3%, E-value=8e-10, Identity=100%"; Hit description =Methylcrotonoyl-CoA carboxylase subunit alpha
QHGNAIYLYERDCSLQRRHQKIIEEAPAVRLCLLLP

SEQ ID NO: 128418 - protein, 122 aa, Setaria italica
  Transcript Sequence Number=SeqID_62444
APRLTHQGWGDCCETSPLQVPAYQERGPQAYMDEAMSASIFFCTFLSSTQQLAYWQKEVCSFFWKMPCSGSPVVLPEIDDSIDSSTWTSESACAVLKSVNSDHLTSCAAENSACRMWMIVLF

SEQ ID NO: 128419 - protein, 71 aa, Setaria italica
  misc_feature (37)..(37): Xaa can be any naturally occurring amino acid
  misc_feature (60)..(60): Xaa can be any naturally occurring amino acid
  Transcript Sequence Number=SeqID_62445
  Gene Ontology: Mol. function=endonuclease activity
  Homolog annotation: Hit_ID=B9SFL5; Match level="QueryCoverage=88%, HitCoverage=12%, E-value=9e-22, Identity=71%"; Hit description =Hydrolase, putative
MRGVIGCRNVLRATIEVPEAGEINFHCTHLDHLDEGXRMKQVDAIIRSGDGPHILAGGLXALDGTDYSADA

SEQ ID NO: 128420 - protein, 55 aa, Setaria italica
  Transcript Sequence Number=SeqID_62446
  Homolog annotation: Hit_ID=B9RSW0; Match level="QueryCoverage=81%, HitCoverage=9%, E-value=1e-14, Identity=73%"; Hit description =Hydrolase, putative
MLCSSLTALQYYEEIGKPTPKVEVMKYLKGKQYVDAKDFAGECEAVVVVAKGQGR

SEQ ID NO: 128421 - protein, 60 aa, Setaria italica
  Transcript Sequence Number=SeqID_62447
  Homolog annotation: Hit_ID=B9SFL5; Match level="QueryCoverage=98%, HitCoverage=12%, E-value=4e-10, Identity=55%"; Hit description =Hydrolase, putative
KFVPGSYSVISSKGTSDHHIVRVDVTIPQVKETDTETVNRKQRVLRVNKKSSRKGIWGAK

SEQ ID NO: 128422 - protein, 64 aa, Setaria italica
  Transcript Sequence Number=SeqID_62448
DLMAGQALFRRGAAQVESRSFYPRRCHCQKWPDRQSWTKYFRNMVQPSRYGNVLIDSKITSFLY

SEQ ID NO: 128423 - protein, 88 aa, Setaria italica
  Transcript Sequence Number=SeqID_62449
  Gene Ontology: Mol. function=protein binding
IPTSVRIERLSFNKDLNVLDLRDCRSLGDEAVRALSCLPKLQTLVCNLDGTDISDEALKYLGLGTCPLTSLSLRGCREANKGIQSFVS

SEQ ID NO: 128424 - protein, 78 aa, Setaria italica
  misc_feature (16)..(16): Xaa can be any naturally occurring amino acid
  Transcript Sequence Number=SeqID_62450
  Gene Ontology: Mol. function=alpha-mannosidase activity; Biological process=carbohydrate metabolic process
  Homolog annotation: Hit_ID=Q9LFR0; Match level="QueryCoverage=76%, HitCoverage=5%, E-value=8e-13, Identity=50%"; Hit description=Alpha -mannosidase-like protein
LPCDVHIVNLKVPQPXLRFPHSEAADPRFAILLQRRGWDASYCKRGGLQCTTVGEEPVNLFYIVLKYSCSVLFVSLFV

SEQ ID NO: 128425 - protein, 69 aa, Setaria italica
  Transcript Sequence Number=SeqID_62451
  Gene Ontology: Mol. function=sequence-specific DNA binding; Cellular component=nucleus; Biological process=regulation of transcription, DNA-dependent
  Homolog annotation: Hit_ID=Q2QMN5; Match level="QueryCoverage=62%, HitCoverage=11%, E-value=5e-19, Identity=100%"; Hit description=WRKY DNA binding domain containing protein, expressed
  Pfam annotation: Domain name=Plant_zn_clust; Domain location=12-40; Score=17.3; E_value=0.012; Accession=PF10533.1; Description=Plant zinc cluster domain
  Pfam annotation: Domain name=WRKY; Domain location=42-69; Score=-5.6; E_value=0.004; Accession=PF03106.7; Description=WRKY DNA -binding domain
  Pfam module annotation: Pfam domain module=Plant_zn_clust::WRKY; Domain location=12-40::42-69
MLFLSLAGWDITQSDDALFDRKLRIKRSIKVPAISNKIADIPPDEYSWRKYGQKPIKGSPHPRYELNKN

SEQ ID NO: 128426 - protein, 78 aa, Setaria italica
  Transcript Sequence Number=SeqID_62452
  Gene Ontology: Mol. function=transferase activity; Cellular component= nucleus; Biological process=regulation of transcription, DNA-dependent
  Homolog annotation: Hit_ID=Q338B9; Match level="QueryCoverage=94%, HitCoverage=14%, E-value=3e-25, Identity=74%"; Hit description =Histone acetyltransferase GCN5
  Pfam annotation: Domain name=Bromodomain; Domain location=1-78; Score= 109.6; E_value=1e-29; Accession=PF00439.17; Description=Bromodomain
KKTIPDAWPFKEPVDSRDVPDYYDIIKDPIDLRTMSRRVESEQYYVTLEMFVADMKRMFNNARTYNSPDTIYYKCATR

SEQ ID NO: 128427 - protein, 91 aa, Setaria italica
  misc_feature (32)..(32): Xaa can be any naturally occurring amino acid
  Transcript Sequence Number=SeqID_62453
  Gene Ontology: Mol. function=binding
  Homolog annotation: Hit_ID=Q5CAF8; Match level="QueryCoverage=89%, HitCoverage=3%, E-value=8e-26, Identity=70%"; Hit description =OSJNBa0065H10.9 protein
MLQFSCFALLVLSKLQDTELIFELEADDAANXIQGSLGALMEEVVLCTVYTKDKKRDISGDIIKELRDSANTILKTITGWMSASTYFRGIY

SEQ ID NO: 128428 - protein, 36 aa, Setaria italica
  Transcript Sequence Number=SeqID_62454
SISHAHYLYITSIICSLICSVTIYSLALNCRTWLMF

SEQ ID NO: 128429 - protein, 90 aa, Setaria italica
  Transcript Sequence Number=SeqID_62455
GGAVQKYGYKQDVYGGKAAGGLQRGAYGYGAHGKAGRTDFAGGYNYNLKAYDSENESRTRRRSRRTTRAGSCFSSRLQPEAQGCLRRRSG

SEQ ID NO: 128430 - protein, 71 aa, Setaria italica
  misc_feature (3)..(3): Xaa can be any naturally occurring amino acid
  Transcript Sequence Number=SeqID_62456
SYXENGAGYGAHHYGGGGVEQHGYNQKHKDAYGGGAVKKSNYQHESYGDCDAGYGSHYGGGAVQKYGTSRT

SEQ ID NO: 128431 - protein, 63 aa, Setaria italica
  Transcript Sequence Number=SeqID_62457
LPMVESMWYGHGFFSFPLFLGDGINYGEISDGLAVRESASNLFLGAFLCFLRWGSTEQRRIQP

SEQ ID NO: 128432 - protein, 50 aa, Setaria italica
  Transcript Sequence Number=SeqID_62458
SHQDIAWQDFVSSSCTDFSRNPFPADLLPISLAQSNLKAHCPRLSPMLLM

SEQ ID NO: 128433 - protein, 54 aa, Setaria italica
  Transcript Sequence Number=SeqID_62459
RSSLKDNRCIGNKYPINAAHAFVVHNYCSYFRASDFLCSLAAFSSSRFFAASAL

SEQ ID NO: 128434 - protein, 65 aa, Setaria italica
  Transcript Sequence Number=SeqID_62460
IEQLDQRIPLPPTTRDTHIIQSLYGNPAAPTKSRNLSRDKLPRRFEFRATTQGRQNHLAPETSDQ

SEQ ID NO: 128435 - protein, 76 aa, Setaria italica
  Transcript Sequence Number=SeqID_62461
RWPKGRGKFKGKPTGRRNFSTPEEIASGTSGRPRTFKKKEEEEEEEEEEREESEEEESEDESDDKPKHKGTRRYYS

SEQ ID NO: 128436 - protein, 73 aa, Setaria italica
  Transcript Sequence Number=SeqID_62462
  Subcellular localization annotation: CTP_CleavageSite=48; ConfidenceScore=5.23e-01
PSAIVTFHFPSFLPLPPFFTPSRTCQTHAASPSTQQGEIERETGEGAEAVEVSQAIHLPTSKLSPMTPPPAPP

SEQ ID NO: 128437 - protein, 71 aa, Setaria italica
  Transcript Sequence Number=SeqID_62463
KILFFIRYSSYYGCNIQIGHDPSTMSIAIQRLTRKKTRKGYNNRNNTRNGTFTKYNKYNRRTVRTKEGIGR

SEQ ID NO: 128438 - protein, 85 aa, Setaria italica
  Transcript Sequence Number=SeqID_62464
DSAVLLADRLTVRESAYEVFLESSAYFLLQSKITQSYLVTFNWTMLIMTPKARSDVHVNLPALQKLDAMLIVRCHCLCYYIHSSN

SEQ ID NO: 128439 - protein, 87 aa, Setaria italica
  misc_feature (74)..(74): Xaa can be any naturally occurring amino acid
  Transcript Sequence Number=SeqID_62465
  Gene Ontology: Mol. function=Rho guanyl-nucleotide exchange factor activity
MRMKTLACCRRRPQDFSIDMDQEPDRVMTYNGLETCIINSSAYDDDSGISATTGGDGCVTTDSLDDEVSSCSSXKDASGSSFSSQLP

SEQ ID NO: 128440 - protein, 37 aa, Setaria italica
  Transcript Sequence Number=SeqID_62466
KARSDVHVNLPALQKLDAMLIVLGSCPNLYCCSHSMR

SEQ ID NO: 128441 - protein, 86 aa, Setaria italica
  Transcript Sequence Number=SeqID_62467
  Gene Ontology: Biological process=response to biotic stimulus
  Homolog annotation: Hit_ID=B6T5Z3; Match level="QueryCoverage=81%, HitCoverage=41%, E-value=2e-29, Identity=87%"; Hit description=Major latex protein 22
RYSVVDGELVNFYKNFKITLKVSPAKEGEAGAVVNWSMEFDKASEQVPDPDVIKETATKTFHDLDDYLLKNQAEIVPSAEAEIAVV

SEQ ID NO: 128442 - protein, 78 aa, Setaria italica
  Transcript Sequence Number=SeqID_62468
  Homolog annotation: Hit_ID=Q19VG6; Match level="QueryCoverage=92%, HitCoverage=46%, E-value=8e-31, Identity=88%"; Hit description=Major latex protein 22
PAEKLWAALRDSTELFPKIFPQQYKSIETVEGDGKSAGTVRLLKYAEGVPMLTFAKEKVELVDDENRVVSYSRWLVRS

SEQ ID NO: 128443 - protein, 31 aa, Setaria italica
  Transcript Sequence Number=SeqID_62469
LLLLGQSVPEGYVFVLGDNRNNSFDSHNWYA

SEQ ID NO: 128444 - protein, 104 aa, Setaria italica
  Transcript Sequence Number=SeqID_62470
  Gene Ontology: Mol. function=transferase activity, transferring glycosyl groups; Cellular component=cytoskeleton; Biological process= metabolic process
  Homolog annotation: Hit_ID=Q53KJ5; Match level="QueryCoverage=99%, HitCoverage=18%, E-value=1e-13, Identity=40%"; Hit description=UDP -glucoronosyl and UDP-glucosyl transferase family protein
LANTFDAMEPEAVASLREHGVDIVPVGPVLCFLDGATAAAGAKSGGGNDLFKQDEGYLEWLDAQAPGSVVYISFGSLSMMSTRQIEEVARGMSEEDGPDRYLVG

SEQ ID NO: 128445 - protein, 110 aa, Setaria italica
  Transcript Sequence Number=SeqID_62471
ILWGPHRSRHKCHRWGALYRNTALTHGRGARVPRRDLRSFRAAHCCHDCTGLQLHRPTPPPVAFVIGYSCPMFQGAPPGFPAQPGSKGKSAAPPQKSTRGNNGHPSSPDV

SEQ ID NO: 128446 - protein, 53 aa, Setaria italica
  misc_feature (46)..(46): Xaa can be any naturally occurring amino acid
  Transcript Sequence Number=SeqID_62472
LGSMGDECPMTNVTGGGLGWCSCSPVQSWQQCADPKTPAGHVEDAXPLRVSDA

SEQ ID NO: 128447 - protein, 109 aa, Setaria italica
  misc_feature (29)..(29): Xaa can be any naturally occurring amino acid
  misc_feature (86)..(86): Xaa can be any naturally occurring amino acid
  Transcript Sequence Number=SeqID_62473
CSENDDGIAPLDEREDGWLCFYEILANHXVRVPESGRRILELIVQLWSQSFASNIFSLLLHKWLFEAPLDGKEIPLRYSSALVQGXDIQTNTRHFLSLYHYLLEDVALV

SEQ ID NO: 128448 - protein, 97 aa, Setaria italica
  Transcript Sequence Number=SeqID_62474
  Gene Ontology: Mol. function=identical protein binding
  Homolog annotation: Hit_ID=B9RKD6; Match level="QueryCoverage=96%, HitCoverage=41%, E-value=9e-21, Identity=55%"; Hit description =Meiotic coiled-coil protein, putative
  Pfam annotation: Domain name=Mnd1; Domain location=2-95; Score=5.4; E_ value=4.2e-06; Accession=PF03962.7; Description=Mnd1 family
LKDKIGTSVYFWSLPSCAGNQLRSTYNKLEFDLSSSKKRYMELVEQRDNLRRGREDSEEREAALEELKAVELHHKKLKEELAAYADSDPAALEAMSV

SEQ ID NO: 128449 - protein, 78 aa, Setaria italica
  Transcript Sequence Number=SeqID_62475
FDLSSSKKRYMELVEQRDNLRRGREDSVRFFCVFLRYLHCNKHIVPTHAFPQEEREAALEELKAVELHHKKLKEELAA

SEQ ID NO: 128450 - protein, 31 aa, Setaria italica
  Transcript Sequence Number=SeqID_62476
SLVTTLQAPARDVVAVLSAYVRKLEEEAGSA

SEQ ID NO: 128451 - protein, 121 aa, Setaria italica
  misc_feature (17)..(17): Xaa can be any naturally occurring amino acid
  Transcript Sequence Number=SeqID_62477
  Gene Ontology: Mol. function=translation initiation factor activity; Cellular component=eukaryotic translation initiation factor 3 complex; Biological process=translational initiation
  Homolog annotation: Hit_ID=B9RNS0; Match level="QueryCoverage=97%, HitCoverage=16%, E-value=2e-53, Identity=83%"; Hit description =Eukaryotic translation initiation factor 3 subunit, putative
ERLMRFAHPMVKLIDFXSPGERYLITYSSHEPSNPRDTHRVVLNIFDVRTGKVMRDFKGSADEFTAGGNIGVSGVSWPIFRWGGGKDDKYFARLGKNIISVYETDTFSLLDKKSLKVENSK

SEQ ID NO: 128452 - protein, 70 aa, Setaria italica
  misc_feature (20)..(20): Xaa can be any naturally occurring amino acid
  Transcript Sequence Number=SeqID_62478
  Gene Ontology: Mol. function=translation initiation factor activity; Biological process=translational initiation
  Homolog annotation: Hit_ID=B9RNS0; Match level="QueryCoverage=91%, HitCoverage=8%, E-value=6e-17, Identity=56%"; Hit description =Eukaryotic translation initiation factor 3 subunit, putative
VNYNYLCFTYCQEAELAREXTNGYKLDKSHIFAVNMLDDFEKYMKVPDTWTPAEIKPYTPGVSLYGFSTP

SEQ ID NO: 128453 - protein, 82 aa, Setaria italica
  Transcript Sequence Number=SeqID_62479
  Gene Ontology: Mol. function=translation initiation factor activity; Cellular component=eukaryotic translation initiation factor 3 complex; Biological process=translational initiation
  Homolog annotation: Hit_ID=B9RNS0; Match level="QueryCoverage=100%, HitCoverage=11%, E-value=2e-36, Identity=82%"; Hit description =Eukaryotic translation initiation factor 3 subunit, putative
FARLGKNIISVYETDTFSLLDKKSLKVENVVDFSWSPTDPIISLFVPEMGGGNQPARVSLVQIPGKEELRQKNLFSVSDCKM

SEQ ID NO: 128454 - protein, 87 aa, Setaria italica
  misc_feature (16)..(16): Xaa can be any naturally occurring amino acid
  Transcript Sequence Number=SeqID_62480
  Gene Ontology: Mol. function=translation initiation factor activity; Biological process=translational initiation
  Homolog annotation: Hit_ID=P56821; Match level="QueryCoverage=83%, HitCoverage=10%, E-value=7e-12, Identity=47%"; Hit description =Eukaryotic translation initiation factor 3 subunit B
HFYQFIWRPRPPSLLXTLRRKREISKNLKKYSKKYEQEDQDAFNQLSEQERKRRTQLQEEWDSWVAKWKQIHKPFTPDPGRMRELLP

SEQ ID NO: 128455 - protein, 117 aa, Setaria italica
  misc_feature (106)..(106): Xaa can be any naturally occurring amino acid
  Transcript Sequence Number=SeqID_62481
  Gene Ontology: Mol. function=translation initiation factor activity; Cellular component=eukaryotic translation initiation factor 3 complex; Biological process=translational initiation
  Homolog annotation: Hit_ID=A6ZEA0; Match level="QueryCoverage=81%, HitCoverage=40%, E-value=3e-44, Identity=85%"; Hit description =Eukaryotic translation initiation factor (Fragment)
  Pfam annotation: Domain name=eIF2A; Domain location=1-77; Score= -41.2; E_value=6.5e-08; Accession=PF08662.3; Description=Eukaryotic translation initiation factor eIF
LAGLKGFNGQLEFYNVDELETMATGEHFMATDIMWDPTGRYLATAVTSVHEMENGFQIWSFNGKHLYKVSKDHFYQFIWRPRPPSLLTPEKEEEISKNLKKYSKKXYEQEDLGIVYF

SEQ ID NO: 128456 - protein, 43 aa, Setaria italica
  Transcript Sequence Number=SeqID_62482
SSAQFADRFTCCLYTCCLNLRIMHSDIKFCCWITNLCLGLLVY

SEQ ID NO: 128457 - protein, 122 aa, Setaria italica
  misc_feature (42)..(42): Xaa can be any naturally occurring amino acid
  misc_feature (86)..(86): Xaa can be any naturally occurring amino acid
  Transcript Sequence Number=SeqID_62483
  Gene Ontology: Mol. function=binding
  Homolog annotation: Hit_ID=Q2R300; Match level="QueryCoverage=65%, HitCoverage=7%, E-value=4e-23, Identity=77%"; Hit description =Importin, putative, expressed
RSLSSAIHSCGQHFHILLPKVLECLSTNFLLFQRHDCFLRTXEAIVASSSLLELSFQKAAICSTAMHRGAALASMSYISFICHLQXFLEVVLAAVLESPECIPDGSPGVVLIQILARCGEGL

SEQ ID NO: 128458 - protein, 62 aa, Setaria italica
  Transcript Sequence Number=SeqID_62484
MSFTETRYKILPAYEGDKQQLQRFYHACCGMVQVTYGNIFLSHLASHGVSLMHLNHILSYIF

SEQ ID NO: 128459 - protein, 71 aa, Setaria italica
  Transcript Sequence Number=SeqID_62485
  Homolog annotation: Hit_ID=B4F8Z4; Match level="QueryCoverage=74%, HitCoverage=10%, E-value=5e-10, Identity=58%"; Hit description =Protein binding protein
VRTSRGKTTAQIFRCHKLRASKPRAIVKLWKSQIEEPKLNLADPSVVIFDKGTSMYHAYSFQFADLACLNA

SEQ ID NO: 128460 - protein, 51 aa, Setaria italica
  misc_feature (34)..(34): Xaa can be any naturally occurring amino acid
  Transcript Sequence Number=SeqID_62486
  Subcellular localization annotation: CTP_CleavageSite=30; ConfidenceScore=5.06e-01
VSNTVPAPPANLPVPNPVPANSSVAPSEVSAPTXEDVELAMAINASIQSAI

SEQ ID NO: 128461 - protein, 123 aa, Setaria italica
  Transcript Sequence Number=SeqID_62487
  Gene Ontology: Mol. function=metal ion binding
  Homolog annotation: Hit_ID=B4F8Z4; Match level="QueryCoverage=100%, HitCoverage=23%, E-value=9e-65, Identity=93%"; Hit description =Protein binding protein
  Pfam annotation: Domain name=Ank; Domain location=2-35; Score=24.3; E_ value=0.0005; Accession=PF00023.22; Description=Ankyrin repeat
  Pfam annotation: Domain name=Ank; Domain location=38-70; Score=31.0; E_value=4.9e-06; Accession=PF00023.22; Description=Ankyrin repeat
  Pfam module annotation: Pfam domain module=Ank::Ank; Domain location =2-35::38-70
KEGKTPLMVACMRPDLLGVAKVLIELGANVNAYRPGSHCGTALHHAAKKGLEQTVHLLLTHGANPFIPNDDCNTALELAREKGHVNVVRAIEGRISLFCGWMRENYAPAFLDAIAPQFMTRKM

SEQ ID NO: 128462 - protein, 65 aa, Setaria italica
  Transcript Sequence Number=SeqID_62488
  Gene Ontology: Mol. function=metal ion binding
  Homolog annotation: Hit_ID=B4F8Z4; Match level="QueryCoverage=100%, HitCoverage=13%, E-value=5e-29, Identity=88%"; Hit description =Protein binding protein
MHILAANPFIPNDDCNTALELAREKGHVNVVRAIEGRISLFCGWMRENYAPAFLDAIAPQFMTRK

SEQ ID NO: 128463 - protein, 121 aa, Setaria italica
  Transcript Sequence Number=SeqID_62489
EQIQGSQGAEHHTLVFFRMRLEILKKKNKIFKYLRMYNFALIVLSLAYQSPYVGQFSSGMCDQIDYLYEIIGFYKYDYGFKITSRSAFVEIVIFLLVSVQSYIFSSGEFDYVSRYLEAEQI

SEQ ID NO: 128464 - protein, 50 aa, Setaria italica
  Transcript Sequence Number=SeqID_62490
PKLNEYLAAHQEEFGASCQAVPSVKYPIYDQTVYLNNYHKKTLKDQYGKY

SEQ ID NO: 128465 - protein, 63 aa, Setaria italica
  Transcript Sequence Number=SeqID_62491
  Gene Ontology: Mol. function=zinc ion binding
  Homolog annotation: Hit_ID=Q10LJ3; Match level="QueryCoverage=69%, HitCoverage=4%, E-value=4e-16, Identity=86%"; Hit description=JmjC domain containing protein, expressed
WYHYPQKIYIYISCFVTPVQVDIELKQFIKGYSDGNKGGDGRLLMLKLKEWPRPSVLEEFLLC

SEQ ID NO: 128466 - protein, 128 aa, Setaria italica
  misc_feature (45)..(45): Xaa can be any naturally occurring amino acid
  Transcript Sequence Number=SeqID_62492
  Gene Ontology: Cellular component=nuclear pore; Biological process =transport
  Homolog annotation: Hit_ID=Q2R0I9; Match level="QueryCoverage=88%, HitCoverage=10%, E-value=9e-48, Identity=84%"; Hit description =Nuclear pore protein 84/107 containing protein, expressed
LIINMYVRYLFSEDQEELVGVYASQLQRDLCIDLFVEMMELRLNXSSLHTMYKLFLSAVEYLPFSSGDASKACFEEIIERVLSRSRQTKPSKYDEDFSDVAHQHHLQSLTKRTNRLITSRTLDLQQPT

SEQ ID NO: 128467 - protein, 133 aa, Setaria italica
  Transcript Sequence Number=SeqID_62493
  Gene Ontology: Cellular component=nuclear pore; Biological process =transport
  Homolog annotation: Hit_ID=Q2R0I9; Match level="QueryCoverage=90%, HitCoverage=11%, E-value=2e-53, Identity=87%"; Hit description =Nuclear pore protein 84/107 containing protein, expressed
AAHVVLVLRYIFISDEMEDELEEKLVAVGDLIINMYVRYLFSEDQEELVGVYASQLQRDLCIDLFVEMMELRLNSSLHTMYNLFLSAVEYLPFSSGDASKACFEEIIERVLSRSRQTKPSKLRIVGIFFPFIF

SEQ ID NO: 128468 - protein, 48 aa, Setaria italica
  Transcript Sequence Number=SeqID_62494
SSATFNEFIVQSHILYSGNSLHTMYKLFLSAVEYLPFSSGDASKAVLK

SEQ ID NO: 128469 - protein, 51 aa, Setaria italica
  Transcript Sequence Number=SeqID_62495
  Gene Ontology: Cellular component=nuclear pore
  Homolog annotation: Hit_ID=Q2R0I9; Match level="QueryCoverage=78%, HitCoverage=3%, E-value=8e-10, Identity=80%"; Hit description =Nuclear pore protein 84/107 containing protein, expressed
ISLSAAGDSLDDCDKLIELVGSSESGMMHLFSQQQLQVYFCDLWFVRPRSA

SEQ ID NO: 128470 - protein, 68 aa, Setaria italica
  Transcript Sequence Number=SeqID_62496
  Homolog annotation: Hit_ID=Q9SHK3; Match level="QueryCoverage=91%, HitCoverage=7%, E-value=4e-10, Identity=54%"; Hit description =F12K11.7
QIAGPLGLPYALASQSFCKSFNLDLLEASATLTLAELWLALGSSHAKRALSLVHQSLPMILGHGGLED

SEQ ID NO: 128471 - protein, 80 aa, Setaria italica
  misc_feature (59)..(59): Xaa can be any naturally occurring amino acid
  Transcript Sequence Number=SeqID_62497
  Homolog annotation: Hit_ID=Q9SHK3; Match level="QueryCoverage=73%, HitCoverage=8%, E-value=8e-09, Identity=48%"; Hit description =F12K11.7
ATLITGMQGLFGRSVSPVQDIVVGNYESALLCLGNLHCYFGHPKKALEAFAEAVRVSQXGAISNLLSKIGMSNTVGVISS

SEQ ID NO: 128472 - protein, 116 aa, Setaria italica
  misc_feature (35)..(35): Xaa can be any naturally occurring amino acid
  misc_feature (43)..(43): Xaa can be any naturally occurring amino acid
  Transcript Sequence Number=SeqID_62498
  Subcellular localization annotation: CTP_CleavageSite=58; ConfidenceScore=5.10e-01
STYSYSLLSKSITSLVGILVVHVPYVSRMRRGRPXRKDFIFIXVDKEPSVQCNVQTTVGMLSKECEEGNHVRKASEVPPTVNPERGHLEAVDRKGVQNLQANVYKAASKPKIKRGL

SEQ ID NO: 128473 - protein, 113 aa, Setaria italica
  misc_feature (9)..(9): Xaa can be any naturally occurring amino acid
  misc_feature (72)..(72): Xaa can be any naturally occurring amino acid
  Transcript Sequence Number=SeqID_62499
  Gene Ontology: Mol. function=DNA binding; Biological process =regulation of transcription
  Homolog annotation: Hit_ID=Q6YZ60; Match level="QueryCoverage=100%, HitCoverage=34%, E-value=2e-25, Identity=50%"; Hit description=MYB transcription factor-like
FSTIYPTRXDTLGGFSVHVPYVSRMRRGRPRKDFISFVVNPERGHLEAVDRKGVQNLQANVYKAASKPKIKXGLTRKRQYNRSNGQLCEVVKLVDGVARYGAGKWSEIRKLSF

SEQ ID NO: 128474 - protein, 53 aa, Setaria italica
  Transcript Sequence Number=SeqID_62500
MADFSKESCPSVKNILLLDSEGKRVAVKYFSKESCPSVKNILLLDSEGKRCCW

SEQ ID NO: 128475 - protein, 64 aa, Setaria italica
  Transcript Sequence Number=SeqID_62501
IGHHYHDDSKINKQYSILFNDDNLVANTCKHKTDTGLLGLIQSAEWRNYMKPRIRITDYFGLNS

SEQ ID NO: 128476 - protein, 110 aa, Setaria italica
  misc_feature (45)..(45): Xaa can be any naturally occurring amino acid
  Transcript Sequence Number=SeqID_62502
RFLSSFLVRSWDGTKVIYNIASWSATAIGIYQNPAIVQAATAAFXTSCRVISKFSVNGPYGWTVQTCKQCPAAMLKASLRFKISKGKHRSKFQPLWYTYIDVNIPDLQVR

SEQ ID NO: 128477 - protein, 30 aa, Setaria italica
  Transcript Sequence Number=SeqID_62503
TAIGIYQNPAIVQAATAAFWTSCRVISKFL

SEQ ID NO: 128478 - protein, 63 aa, Setaria italica
  Transcript Sequence Number=SeqID_62504
  Homolog annotation: Hit_ID=A8BCW8; Match level="QueryCoverage=76%, HitCoverage=6%, E-value=7e-18, Identity=83%"; Hit description =Vernalization insensitive 3
LGLRGLRPVGPEEVLQQERRVVITFIRTLLDDPSSLAGQLLDSFQEIVASKKPRTGFCTKLWH

SEQ ID NO: 128479 - protein, 43 aa, Setaria italica
  Transcript Sequence Number=SeqID_62505
  Homolog annotation: Hit_ID=A8BCW8; Match level="QueryCoverage=95%, HitCoverage=5%, E-value=1e-11, Identity=85%"; Hit description =Vernalization insensitive 3
VTSLRSTEQERRVVITFIRTLLDDPSSLAGQLLDSFQEIVASK

SEQ ID NO: 128480 - protein, 136 aa, Setaria italica
  misc_feature (114)..(114): Xaa can be any naturally occurring amino acid
  Transcript Sequence Number=SeqID_62506
  Homolog annotation: Hit_ID=B6SH61; Match level="QueryCoverage=91%, HitCoverage=21%, E-value=1e-38, Identity=71%"; Hit description=CDT1a protein
LVKVLLVCLLLDPAELSSVSAYVTEGINRSPKKQDTNAPVPVNYEISATPNRHLISCCPESTPKQGTSESPFLAGTPAMQTPKRPLLTPLGKLEATCGHISGPRSAGSARRYNXEKQYVRNLEGGSLSYDDGMEHE

SEQ ID NO: 128481 - protein, 109 aa, Setaria italica
  misc_feature (68)..(68): Xaa can be any naturally occurring amino acid
  Transcript Sequence Number=SeqID_62507
  Gene Ontology: Mol. function=DNA-directed RNA polymerase activity; Biological process=transcription
  Homolog annotation: Hit_ID=C0JR65; Match level="QueryCoverage=95%, HitCoverage=7%, E-value=3e-41, Identity=78%"; Hit description=DNA -directed RNA polymerase
FAFLSKHLKKYRYSLEYASLEVKNHLERVNFSDLVETIMIIYDGCDKTRKGGPWTTHFHISKEMMKKXRLGLGFVVEELTKEYDATRNQLNNAIPSVHIQRENVQVKVK

SEQ ID NO: 128482 - protein, 54 aa, Setaria italica
  Transcript Sequence Number=SeqID_62508
CCITLVAQAESNSMSQLDTIKKRVIPSILDTLLKGCYGFMHFTKYIPYIIASFL

SEQ ID NO: 128483 - protein, 39 aa, Setaria italica
  Transcript Sequence Number=SeqID_62509
  Homolog annotation: Hit_ID=C0JR65; Match level="QueryCoverage=82%, HitCoverage=2%, E-value=1e-09, Identity=93%"; Hit description=DNA -directed RNA polymerase
SPFSEACFSRPARSFINAAKHCSVDNLCGSLDCPLNNAL

SEQ ID NO: 128484 - protein, 72 aa, Setaria italica
  misc_feature (61)..(61): Xaa can be any naturally occurring amino acid
  Transcript Sequence Number=SeqID_62510
  Gene Ontology: Mol. function=DNA-directed RNA polymerase activity; Biological process=transcription
  Homolog annotation: Hit_ID=C0JR65; Match level="QueryCoverage=98%, HitCoverage=4%, E-value=4e-29, Identity=87%"; Hit description=DNA -directed RNA polymerase
ISKLHIIDSEVLTCSSGSSWLQNSTTGLFSIMFKQYGRKALDFLSSAQEVLCEFLTMRGLXVSLSDLYMFSD

SEQ ID NO: 128485 - protein, 75 aa, Setaria italica
  Transcript Sequence Number=SeqID_62511
  Gene Ontology: Mol. function=DNA-directed RNA polymerase activity; Biological process=transcription
  Homolog annotation: Hit_ID=Q7XTZ3; Match level="QueryCoverage=76%, HitCoverage=3%, E-value=4e-22, Identity=84%"; Hit description=DNA -directed RNA polymerase
MQFSYDTADDMCCNHDLVGELGAPVGSWAACSISEAAYGALDHPVNGLEDSPLMNLQVTFFSLLMSILIMWPLPS

SEQ ID NO: 128486 - protein, 61 aa, Setaria italica
  Transcript Sequence Number=SeqID_62512
  Homolog annotation: Hit_ID=C0JR65; Match level="QueryCoverage=100%, HitCoverage=4%, E-value=8e-10, Identity=54%"; Hit description=DNA -directed RNA polymerase
IVTFVRFSSCWYLVKLIFLVYCLLPSGMNFSCDSKLHIIDSEVLTCSSGSSWLQMHNRSLF

SEQ ID NO: 128487 - protein, 102 aa, Setaria italica
  Transcript Sequence Number=SeqID_62513
FMYTIHCTATYYTHMVMGKILRRSQGQATTYFADRHQHPWIRCASSSPLAHSSSCLFCGDQYTLKGKDKERKNKEEKRKKETMATDTHHLGHGGACQSPLFL

SEQ ID NO: 128488 - protein, 58 aa, Setaria italica
  Transcript Sequence Number=SeqID_62514
  Subcellular localization annotation: CTP_CleavageSite=18; ConfidenceScore=5.05e-01
RRGPSPAPAALGFLRSLRRSRREAKRRLKRGDRVLMVTFGSGFKCNSCYWEVSRDLAD

SEQ ID NO: 128489 - protein, 76 aa, Setaria italica
  Transcript Sequence Number=SeqID_62515
  Gene Ontology: Mol. function=DNA binding; Cellular component=nucleus; Biological process=regulation of transcription, DNA-dependent
  Homolog annotation: Hit_ID=Q9S7B2; Match level="QueryCoverage=100%, HitCoverage=20%, E-value=6e-35, Identity=93%"; Hit description =Protein rough sheath 2
  Pfam annotation: Domain name=Myb_DNA-binding; Domain location=4-53; Score=35.2; E_value=2.6e-07; Accession=PF00249.23; Description=Myb -like DNA-binding domain
MKERQRWRPEEDAVLRAYVRQYGPREWHLVSQRMSVALDRDAKSCLERWKNYLRPGIKKGSLTDDEQRLVIRLEAN

SEQ ID NO: 128490 - protein, 44 aa, Setaria italica
  Transcript Sequence Number=SeqID_62516
  Gene Ontology: Cellular component=membrane
  Homolog annotation: Hit_ID=B9SI82; Match level="QueryCoverage=100%, HitCoverage=19%, E-value=7e-11, Identity=70%"; Hit description =Membrin, putative
CAQMDRLWRSIPAKGQRDLWKRKVEQLSEEVDSLKETLDRHTLR

SEQ ID NO: 128491 - protein, 47 aa, Setaria italica
  Transcript Sequence Number=SeqID_62517
  Gene Ontology: Mol. function=protein binding; Cellular component =small nuclear ribonucleoprotein complex; Biological process =embryonic development ending in birth or egg hatching
  Homolog annotation: Hit_ID=A8J2L7; Match level="QueryCoverage=95%, HitCoverage=50%, E-value=2e-15, Identity=84%"; Hit description=U6 small ribonucleoprotein F
GILACLDGYMNIAMEQTEEYVNGQLKNKYGDAFIRGNNGMHCATLIF

SEQ ID NO: 128492 - protein, 53 aa, Setaria italica
  misc_feature (34)..(34): Xaa can be any naturally occurring amino acid
  misc_feature (43)..(43): Xaa can be any naturally occurring amino acid
  Transcript Sequence Number=SeqID_62518
  Gene Ontology: Mol. function=actin binding; Cellular component =cytoskeleton
  Homolog annotation: Hit_ID=O24399; Match level="QueryCoverage=98%, HitCoverage=11%, E-value=2e-17, Identity=88%"; Hit description =Fimbrin/plastin-like (Fragment)
MQPHLVLGLISQIIKIQLLADLNLKKTPQLVELXDDSKDIDEXLSLSPEKMMV

SEQ ID NO: 128493 - protein, 65 aa, Setaria italica
  Transcript Sequence Number=SeqID_62519
  Gene Ontology: Mol. function=actin binding; Cellular component =cytoskeleton
  Homolog annotation: Hit_ID=O24399; Match level="QueryCoverage=75%, HitCoverage=10%, E-value=4e-21, Identity=95%"; Hit description =Fimbrin/plastin-like (Fragment)
RWMNHHLKKAGYKKTVNNFSSDVKDGEAYAYLLKALAPEHSPETTLDTKVSRIVVGFFKTFGFTL

SEQ ID NO: 128494 - protein, 88 aa, Setaria italica
  misc_feature (55)..(55): Xaa can be any naturally occurring amino acid
  Transcript Sequence Number=SeqID_62520
  Gene Ontology: Mol. function=cycloartenol synthase activity; Biological process=metabolic process
  Homolog annotation: Hit_ID=Q6IWA3; Match level="QueryCoverage=79%, HitCoverage=9%, E-value=2e-31, Identity=90%"; Hit description =Cycloartenol synthase
ILIFIVLSCSSLFLYCSYMNDNGGFATYELTRSYPWLELINPAETFGDIVIDYPXVECTSAAIQALTSFRKLYPGHRRKEVDSCISKA

SEQ ID NO: 128495 - protein, 69 aa, Setaria italica
  Transcript Sequence Number=SeqID_62521
FPEWKTKPKNLRAHYEVLARVEGSQAIPDEDRAGAAFQADEAMSESVLTGNVTRSKMEIVHPPPVYFTL

SEQ ID NO: 128496 - protein, 87 aa, Setaria italica
  Transcript Sequence Number=SeqID_62522
  Subcellular localization annotation: CTP_CleavageSite=75; ConfidenceScore=5.77e-01
WERKMGRSTKSQRLTSSSRRTGRTFLPTSMSNSYDTACPTSASRTSNPDTLSPSAWNPSPFTIASLRSCGRHRIRSAHQSDQTLGQT

SEQ ID NO: 128497 - protein, 74 aa, Setaria italica
  misc_feature (43)..(43): Xaa can be any naturally occurring amino acid
  misc_feature (61)..(61): Xaa can be any naturally occurring amino acid
  Transcript Sequence Number=SeqID_62523
VRRYCNLLLITVYLLVLFLSLNGSDGSLQGFEELLASVLGKKXGENGTFKLVKARASAQTXVKMAFAVEKKLVK

SEQ ID NO: 128498 - protein, 84 aa, Setaria italica
  misc_feature (50)..(50): Xaa can be any naturally occurring amino acid
  misc_feature (70)..(70): Xaa can be any naturally occurring amino acid
  misc_feature (79)..(79): Xaa can be any naturally occurring amino acid
  Transcript Sequence Number=SeqID_62524
  Gene Ontology: Mol. function=metal ion binding; Cellular component =vacuolar membrane; Biological process=protein transport
  Homolog annotation: Hit_ID=Q54YP4; Match level="QueryCoverage=79%, HitCoverage=7%, E-value=5e-16, Identity=50%"; Hit description =Vacuolar protein sorting-associated protein 11 homolog
LLTKVTKTYVKVFTKLSKCTACTFTLDLPAVHFMCMHSFHLRCLGDNEKXCPECAPEYRSVMEAKQKLEXNARDHDLFXRQLRG

SEQ ID NO: 128499 - protein, 58 aa, Setaria italica
  Transcript Sequence Number=SeqID_62525
SNIFRLLITQIIHSLIRFKGLLLFLKHPIIITQVPLQALLGCPLFQIRFQSRCLSQNL

SEQ ID NO: 128500 - protein, 43 aa, Setaria italica
  Transcript Sequence Number=SeqID_62526
  Homolog annotation: Hit_ID=Q84UX7; Match level="QueryCoverage=93%, HitCoverage=5%, E-value=2e-10, Identity=85%"; Hit description=Global transcription factor group E
TTGPADIVGLREEDSESKPAPEGENSKPDTQVSPDRLLRAAVL

SEQ ID NO: 128501 - protein, 83 aa, Setaria italica
  Transcript Sequence Number=SeqID_62527
  Gene Ontology: Mol. function=protein binding; Cellular component =nucleus; Biological process=ubiquitin-dependent protein catabolic process
  Homolog annotation: Hit_ID=B9SG25; Match level="QueryCoverage=97%, HitCoverage=13%, E-value=6e-33, Identity=80%"; Hit description =Polyadenylation factor subunit, putative
  Pfam annotation: Domain name=WD40; Domain location=16-63; Score=46.3; E_value=1.2e-10; Accession=PF00400.24; Description=WD domain, G-beta repeat
LHSDDWTAKIWSMKQDKCVFDFKEHTKEIYTIRWSPTGPGTNNPNQQLLLASASFDSTIKLWEVEQGRLLYSLAGHRQPVYSV

SEQ ID NO: 128502 - protein, 62 aa, Setaria italica
  Transcript Sequence Number=SeqID_62528
GKEKERNEEHERRPGGQNPSQFLHHSLRYLIPVLCNAVPPGALITVVQKGLLLNFFIILFGI

SEQ ID NO: 128503 - protein, 141 aa, Setaria italica
  misc_feature (78)..(78): Xaa can be any naturally occurring amino acid
  Transcript Sequence Number=SeqID_62529
  Gene Ontology: Mol. function=serine-type endopeptidase activity; Cellular component=nucleus; Biological process=ubiquitin-dependent protein catabolic process
  Homolog annotation: Hit_ID=B9SG25; Match level="QueryCoverage=83%, HitCoverage=24%, E-value=3e-46, Identity=65%"; Hit description =Polyadenylation factor subunit, putative
  Pfam annotation: Domain name=WD40; Domain location=25-63; Score=41.5; E_value=3.2e-09; Accession=PF00400.24; Description=WD domain, G-beta repeat
  Pfam annotation: Domain name=WD40; Domain location=81-119; Score =51.1; E_value=4.3e-12; Accession=PF00400.24; Description=WD domain, G-beta repeat
  Pfam module annotation: Pfam domain module=WD40::WD40; Domain location=25-63::81-119
VIQPRYFVFSYSFVSSFHYDERISGELKQTLFKHKGPIFSLKWNKKGDFLLSGSVDKTAIVWDTKTWECKQQFEFHSXGEQRPVKAFSGHQSEVNAIKWDPTGSFLASCSDDWTAKIWSMKQDKCVFDFKEHTKEIYTIRW

SEQ ID NO: 128504 - protein, 41 aa, Setaria italica
  Transcript Sequence Number=SeqID_62530
CRSPPGALITVVQKGLHYIELESNTEENDEEIEKDFDSSSM

SEQ ID NO: 128505 - protein, 52 aa, Setaria italica
  Transcript Sequence Number=SeqID_62531
FDVYLSKIGHQGNTNLEEGLAQPLLIGRERNQDENSEDNDDSEVASENSHEP

SEQ ID NO: 128506 - protein, 99 aa, Setaria italica
  Transcript Sequence Number=SeqID_62532
  Homolog annotation: Hit_ID=Q6EPQ3; Match level="QueryCoverage=79%, HitCoverage=11%, E-value=2e-12, Identity=53%"; Hit description=SPX (SYG1/Pho81/XPR1) domain-containing protein-like
  Subcellular localization annotation: CTP_CleavageSite=31; ConfidenceScore=5.38e-01
NSVTYVTDLSATQLLISSDAGVNLSLLSRVMSSRLSRGTYNGGLLSTEAGTLARVIADATITAAGYLGTDLLLNVTLLPPLVICIASIAATLYTYNTLY

SEQ ID NO: 128507 - protein, 125 aa, Setaria italica
  misc_feature (71)..(71): Xaa can be any naturally occurring amino acid
  misc_feature (117)..(117): Xaa can be any naturally occurring amino acid
  Transcript Sequence Number=SeqID_62533
SYFLSLGSTYWVSLVGCWLLHGWLPFYNRVRQLEEETVGFVENTVEVVEHVAEVTEKLAANVAKQLPKDGXLQKAVEEVEHIAEVVDTDAEKVEAVTEKIDKVSDEIDAAVEPVIKXLRKGLDQG

SEQ ID NO: 128508 - protein, 59 aa, Setaria italica
  Transcript Sequence Number=SeqID_62534
FIDVAMILHSWVVLKNSDIVSADLAAAAISGGQRLGSSAIPSWARWVLGGVVYTVVPFY

SEQ ID NO: 128509 - protein, 124 aa, Setaria italica
  Transcript Sequence Number=SeqID_62535
  Gene Ontology: Mol. function=aminoacyl-tRNA ligase activity; Cellular component=cytoplasm; Biological process=tRNA aminoacylation for protein translation
  Homolog annotation: Hit_ID=B9SYX1; Match level="QueryCoverage=92%, HitCoverage=16%, E-value=3e-55, Identity=86%"; Hit description=Valyl- tRNA synthetase, putative
KYGGTITNQIRRLGASCDWSRERFTLDEQLSRAVVEAFVRLHDKGLVYQGSYLVNWSPNLQTAVSDLEVEYSEQPGSLYFIKYRVAGGTRDDFMTIATTRPETLFGDVAIAVNQRISVNDQNNS

SEQ ID NO: 128510 - protein, 83 aa, Setaria italica
  Transcript Sequence Number=SeqID_62536
  Gene Ontology: Mol. function=zinc ion binding; Cellular component =intracellular
  Homolog annotation: Hit_ID=B6U450; Match level="QueryCoverage=86%, HitCoverage=25%, E-value=2e-12, Identity=59%"; Hit description=Salt tolerance-like protein
  Subcellular localization annotation: CTP_CleavageSite=57; ConfidenceScore=5.05e-01
LCDACDRRVHRANKLAGKHRRFSLLHPSSSSSAAQTKPPLCDICQVAIVLCRRCFCRSGSDRSLLLKLTDCPRGLARRSGGGS

SEQ ID NO: 128511 - protein, 78 aa, Setaria italica
  Transcript Sequence Number=SeqID_62537
  Gene Ontology: Mol. function=zinc ion binding; Cellular component =intracellular
  Homolog annotation: Hit_ID=B6U450; Match level="QueryCoverage=100%, HitCoverage=26%, E-value=1e-11, Identity=53%"; Hit description=Salt tolerance-like protein
  Pfam annotation: Domain name=zf-B_box; Domain location=1-41; Score =29.9; E_value=1.1e-05; Accession=PF00643.16; Description=B-box zinc finger
VCAAEAASVFCCADEAALCDACDRRVHRANKLAGKHRRFSLLNPAPPSSSGSSAAQQQQPPPLCDICQEKRGLLFCKE

SEQ ID NO: 128512 - protein, 78 aa, Setaria italica
  Transcript Sequence Number=SeqID_62538
  Gene Ontology: Mol. function=structural constituent of cell wall; Cellular component=proteasome core complex; Biological process=lipid transport
  Homolog annotation: Hit_ID=Q41848; Match level="QueryCoverage=88%, HitCoverage=22%, E-value=1e-30, Identity=92%"; Hit description=36.4 kDa proline-rich protein
  Pfam annotation: Domain name=Tryp_alpha_amyl; Domain location=6-73; Score=44.9; E_value=3.1e-10; Accession=PF00234.14; Description =Protease inhibitorseed storageLTP f
ERRLEDGTRIHLVIGQEARSKCCPLVQGIADLDAALCLCTTIRARLLNINIYLPVALELLITCGKHAPPGFKCPPLYD

SEQ ID NO: 128513 - protein, 148 aa, Setaria italica
  misc_feature (32)..(32): Xaa can be any naturally occurring amino acid
  Transcript Sequence Number=SeqID_62539
  Gene Ontology: Mol. function=protein dimerization activity
  Homolog annotation: Hit_ID=Q2R211; Match level="QueryCoverage=95%, HitCoverage=28%, E-value=2e-52, Identity=66%"; Hit description=F-box domain containing protein, expressed
FATLEIPDLIRAGSVCSSWHSAYTCLRNLGRXKSQTPCLLYTSRSAGENVACLYSLVENRTYKLTLPEPPIRRRLLIGSSNGWLITADERSELHLVNPITGEQVALPSVITIEQVKPITDGSGIIRKYKLSYYCREMDEGRPKIVALD

SEQ ID NO: 128514 - protein, 43 aa, Setaria italica
  Transcript Sequence Number=SeqID_62540
  Homolog annotation: Hit_ID=Q2R271; Match level="QueryCoverage=97%, HitCoverage=3%, E-value=1e-12, Identity=76%"; Hit description=HAT family dimerisation domain containing protein, expressed
CLLYTSRSAGENVACLYSLVENRTYKLTLPEPPIRRRLLIGAG

SEQ ID NO: 128515 - protein, 84 aa, Setaria italica
  Transcript Sequence Number=SeqID_62541
KEDDDIWWTHACDLVHGRFTLFNTTHSLSTCYTRFEHDLGRTVPPHSRSLTSPYLHHRMRYKTALSCGEPSPRTHSYRLLLFPT

SEQ ID NO: 128516 - protein, 48 aa, Setaria italica
  Transcript Sequence Number=SeqID_62542
VGTNVPSCRQRCQHHRDYSRRQQCVSECRRQHGGGWEAAVAGAVLQVV

SEQ ID NO: 128517 - protein, 62 aa, Setaria italica
  Transcript Sequence Number=SeqID_62543
RTEPNETDPNTTERTKEDNDRCRQRCQHHRDYSRRQQCVSECRRQHGGGWEAAVAGAVLQVV

SEQ ID NO: 128518 - protein, 58 aa, Setaria italica
  Transcript Sequence Number=SeqID_62544
  Subcellular localization annotation: CTP_CleavageSite=21; ConfidenceScore=5.01e-01
FSFTFRFTLTLTLLLFFPLPSCPSQSCQRHGDRETQRQCVSWCERQEGCRRRDGPIAD

SEQ ID NO: 128519 - protein, 56 aa, Setaria italica
  misc_feature (54)..(54): Xaa can be any naturally occurring amino acid
  Transcript Sequence Number=SeqID_62545
QTRQRKCRERCERRPAGDWQEKQRCLMECRRRDGPIADEEEDNDRCRQRCQHHXDY

SEQ ID NO: 128520 - protein, 55 aa, Setaria italica
  Transcript Sequence Number=SeqID_62546
PSSSSTPSPCCLAAAALGHALLQQQRLVPWLVGRLRLPPPALAPPGAEHVDVRCR

SEQ ID NO: 128521 - protein, 139 aa, Setaria italica
  misc_feature (81)..(81): Xaa can be any naturally occurring amino acid
  Transcript Sequence Number=SeqID_62547
SLTFISSFVFIVLKLPLYYLLRSLLVGFVHSLRTRRQTHPLLLDVEARVLVALGAATAGGLGSRGRVGQGEVVAAEPDSPXHVLAEVAAPPVVAVARPRRQHVRIHRGSVRHDPRRTCGDDEGHEAGGDEGVQSGCCHL

SEQ ID NO: 128522 - protein, 135 aa, Setaria italica
  Transcript Sequence Number=SeqID_62548
SDSVTYVPQAQSSSQSREPNQPIEMAASALNPFVAACLVALVVAAGAARIVPDTATMDPDMLTTRPCHSNNGWSGHLCKDVCGLAGSAATTSPWPTRPRDPSPPAVAAQGYRRVPQRQGVVGGLPSRAQAVTSHS

SEQ ID NO: 128523 - protein, 106 aa, Setaria italica
  Transcript Sequence Number=SeqID_62549
LFLLKVLSYFVLSSLVEPNQPIEMAASALNPFVAACLVALVVAAGAARIVPDTATMDPDMLTTRPCHSNNGWSGHLCKDVCGASGFSRYDFTLANTATGSQSTCCC

SEQ ID NO: 128524 - protein, 113 aa, Setaria italica
  Transcript Sequence Number=SeqID_62550
  Gene Ontology: Mol. function=calcium ion binding; Cellular component =vacuole
  Homolog annotation: Hit_ID=C3VER2; Match level="QueryCoverage=87%, HitCoverage=31%, E-value=9e-46, Identity=87%"; Hit description =Caleosin
  Pfam annotation: Domain name=Caleosin; Domain location=1-104; Score =92.0; E_value=2e-24; Accession=PF05042.5; Description=Caleosin related protein
FLLSSLSLRSSRLPGPIDNEGRFMPVNFENMFSKYARTSPDRLTYRELWSMTEGFREVFDFYGWFAAKLEWTILYVLARDEEGYLSREAMRRVYDGSLFEYVERQRAQHAKMS

SEQ ID NO: 128525 - protein, 67 aa, Setaria italica
  Transcript Sequence Number=SeqID_62551
  Gene Ontology: Cellular component=vacuole
  Homolog annotation: Hit_ID=Q7XQ03; Match level="QueryCoverage=76%, HitCoverage=20%, E-value=3e-19, Identity=88%"; Hit description =OSJNBa0004N05.4 protein
  Pfam annotation: Domain name=Caleosin; Domain location=1-58; Score= -75.1; E_value=0.017; Accession=PF05042.5; Description=Caleosin related protein
RNRKGLTREGSYEFTNGWFAAKLEWTILYVLARDEEGYLSREAMRRVYDGSLFEYVERQRAQHAKMS

SEQ ID NO: 128526 - protein, 101 aa, Setaria italica
  Transcript Sequence Number=SeqID_62552
  Gene Ontology: Mol. function=calcium ion binding; Cellular component =vacuole
  Homolog annotation: Hit_ID=C3VER2; Match level="QueryCoverage=88%, HitCoverage=28%, E-value=1e-42, Identity=89%"; Hit description =Caleosin
  Pfam annotation: Domain name=Caleosin; Domain location=1-94; Score =61.8; E_value=2.6e-15; Accession=PF05042.5; Description=Caleosin related protein
MSICRGYGGWFRFMPVNFENMFSKYARTSPDRLTYRELWSMTEGFREVFDFYGWFAAKLEWTILYVLARDEEGYLSREAMRRVYDGSLFEYVERQRAQHAK

SEQ ID NO: 128527 - protein, 104 aa, Setaria italica
  Transcript Sequence Number=SeqID_62553
  Gene Ontology: Mol. function=calcium ion binding; Cellular component =vacuole
  Homolog annotation: Hit_ID=C3VER2; Match level="QueryCoverage=99%, HitCoverage=32%, E-value=3e-48, Identity=85%"; Hit description =Caleosin
  Pfam annotation: Domain name=Caleosin; Domain location=57-104; Score=- 61.3; E_value=0.0015; Accession=PF05042.5; Description=Caleosin related protein
MSATEGKDSQTIVALQSPVTVMRPVRGDLEEHVPKPYLARALAVPDIYHPDGSTDGHRHHHMSVMQQHVAFFDRDDNGIIYPWETYQGCRALGFNMIMSFLIAL

SEQ ID NO: 128528 - protein, 81 aa, Setaria italica
  misc_feature (21)..(21): Xaa can be any naturally occurring amino acid
  Transcript Sequence Number=SeqID_62554
  Gene Ontology: Mol. function=calcium ion binding; Cellular component =vacuole
  Homolog annotation: Hit_ID=C3VER2; Match level="QueryCoverage=100%, HitCoverage=25%, E-value=1e-33, Identity=85%"; Hit description =Caleosin
  Pfam annotation: Domain name=Caleosin; Domain location=1-72; Score= -6.2; E_value=1.1e-07; Accession=PF05042.5; Description=Caleosin related protein
KYARTSPDRLTYRELWSMTEXGFREVFDFYGWFAAKLEWTILYVLARDEEGYLSREAMRRVYDGSLFEYVERQRAQHAKMS

SEQ ID NO: 128529 - protein, 118 aa, Setaria italica
  Transcript Sequence Number=SeqID_62555
  Pfam annotation: Domain name=Tryp_alpha_amyl; Domain location=30-113; Score=5.1; E_value=0.088; Accession=PF00234.14; Description=Protease inhibitorseed storageLTP f
KIFIVLALLTLAASSASAQQPGYYGSLHPCGEFLRQRCPAVTGWPYAWSRTWQPSSCMAMHQQCCQQLRQVEPLHRCQEVCSLVETTVQQMMLQGSEYYELQHAALGIMNFSMLLWVQ

SEQ ID NO: 128530 - protein, 104 aa, Setaria italica
  misc_feature (12)..(12): Xaa can be any naturally occurring amino acid
  misc_feature (20)..(20): Xaa can be any naturally occurring amino acid
  Transcript Sequence Number=SeqID_62556
  Pfam annotation: Domain name=Tryp_alpha_amyl; Domain location=14-103; Score=4.8; E_value=0.093; Accession=PF00234.14; Description=Protease inhibitorseed storageLTP f
WRQQPGYYGSLXPCGEFLRXQRCPAVTGWPYAWSRTWQPSSCMAMHQQCCQQLRQVEPLHRCQEVCSLVETTVQQMMLQGSEYYELQHAALGAKNLPAMCGNFN

SEQ ID NO: 128531 - protein, 97 aa, Setaria italica
  Transcript Sequence Number=SeqID_62557
MKIFIVLALLTLAASSASAQQPGYYGSLHPCGEFLRQRCPAVTGWPYAWSRTWQPSSCMAMHQQCCQQLRQVEPLHRCQEVCSLVETTVQLVLYCLV

SEQ ID NO: 128532 - protein, 49 aa, Setaria italica
  Transcript Sequence Number=SeqID_62558
DIYIYLAGTARKGLPPIGWLHHHGCCVPHKWQLHRHPNLLQVHHLAHCT

SEQ ID NO: 128533 - protein, 80 aa, Setaria italica
  Transcript Sequence Number=SeqID_62559
DVCRGPNSRRNTASLCAPMTRCSCAGPTAAGSRPREQERTIAGVDASSWPPARGHAMEREESGIALFHVQDVGRFDYYYY

SEQ ID NO: 128534 - protein, 84 aa, Setaria italica
  Transcript Sequence Number=SeqID_62560
EWNKLAAARVPAGGVVYVRVEEGATVARVHACVVRECVCNRTYLRLVREIMQCHFPVQHMRVRTCRGGCYCCARACMCCTGMCR

SEQ ID NO: 128535 - protein, 96 aa, Setaria italica
  Transcript Sequence Number=SeqID_62561
  Gene Ontology: Mol. function=nutrient reservoir activity; Cellular component=extracellular region; Biological process=defense response to bacterium
  Homolog annotation: Hit_ID=B6UGJ0; Match level="QueryCoverage=94%, HitCoverage=21%, E-value=1e-26, Identity=72%"; Hit description =Globulin-1 S allele
FPIGGESPESFFSVFSDDVLQAAFNTRREEWEQVFEKQSKGEITTASEEQIRELSRSCSRAGRSHGGGESMWDIKLCSLTSKRPLHSNNHGLGLLT

SEQ ID NO: 128536 - protein, 66 aa, Setaria italica
  Transcript Sequence Number=SeqID_62562
  Subcellular localization annotation: CTP_CleavageSite=18; ConfidenceScore=5.03e-01
LVYPSFLHVRTRRHPRVHARQLTYSTLTLPHHGMTSSRWPRASVNAGDRPLLFTRTRPCGCWARAG

SEQ ID NO: 128537 - protein, 69 aa, Setaria italica
  Transcript Sequence Number=SeqID_62563
TKSTKVRKSRIREGSVIVIPAGHPMTLVAGEERHRVPRRDHDDARRRRGQQPRRPLLQRQRQARREGVP

SEQ ID NO: 128538 - protein, 58 aa, Setaria italica
  Transcript Sequence Number=SeqID_62564
CLGRLVHLPQQAVAAHQEHLLVVPGVDAEVEDGEVVVLRPDERRRTIRVDPTGNTTNT

SEQ ID NO: 128539 - protein, 75 aa, Setaria italica
  Transcript Sequence Number=SeqID_62565
GTNLEERIGPISNVTPYHHYSYPSSYYAYAHPSYYYQCQYPQPYYPAYSYACGHGMYGYPPEAFTEENPNACAIV

SEQ ID NO: 128540 - protein, 72 aa, Setaria italica
  misc_feature (1)..(19): Xaa can be any naturally occurring amino acid
  Transcript Sequence Number=SeqID_62566
XXXXXXXXXXXXXXXXXXXYPEHCVFIPHYKHDIQTRHPPCSTSDPPLRPRRTLLLGRSGGSDVLHGGCLVL

SEQ ID NO: 128541 - protein, 34 aa, Setaria italica
  Transcript Sequence Number=SeqID_62567
DAAEAERHDDGPEGGDCRDRRRVLARQVLVHPRE

SEQ ID NO: 128542 - protein, 106 aa, Setaria italica
  Transcript Sequence Number=SeqID_62568
  Gene Ontology: Mol. function=serine-type endopeptidase activity; Biological process=proteolysis
  Homolog annotation: Hit_ID=Q2QSI6; Match level="QueryCoverage=92%, HitCoverage=13%, E-value=1e-30, Identity=68%"; Hit description =Subtilase family protein, expressed
TESEVEIITNHKGACGEGRKISEAELNYPSIAVAASTGKLVVNRTVTNVGDEISSYSVDIEMPKEVTASVSPRKLEFTKANEKKTFTVSLTWDANETNIKRAYYSI

SEQ ID NO: 128543 - protein, 118 aa, Setaria italica
  misc_feature (17)..(17): Xaa can be any naturally occurring amino acid
  misc_feature (23)..(23): Xaa can be any naturally occurring amino acid
  Transcript Sequence Number=SeqID_62569
  Gene Ontology: Mol. function=serine-type endopeptidase activity; Cellular component=cell wall; Biological process=proteolysis
  Homolog annotation: Hit_ID=Q2QSI6; Match level="QueryCoverage=91%, HitCoverage=14%, E-value=7e-35, Identity=68%"; Hit description =Subtilase family protein, expressed
TPSPVVAYFSSRGPSTXNPGILXDIIGPRSECIAAWPVKVGPRAEGEKNMAFNTLSGTSMSAPHLSGIAAIIKSAHPDWSPAAIKSAIMTTAYVLDDNKKPILDEKLNSSLGSIFYFI

SEQ ID NO: 128544 - protein, 82 aa, Setaria italica
  misc_feature (18)..(18): Xaa can be any naturally occurring amino acid
  Transcript Sequence Number=SeqID_62570
  Gene Ontology: Mol. function=serine-type endopeptidase activity; Biological process=proteolysis
  Homolog annotation: Hit_ID=Q2QSI6; Match level="QueryCoverage=89%, HitCoverage=10%, E-value=1e-10, Identity=48%"; Hit description =Subtilase family protein, expressed
IDRRMEAIVKLGDGRSFXGESAYQPSNLDSLPLVHELDSGDAKGKVIACDLGGSLSQLKLGKTVQDAGGAGMIYNLGKRRKK

SEQ ID NO: 128545 - protein, 57 aa, Setaria italica
  Transcript Sequence Number=SeqID_62571
  Gene Ontology: Mol. function=serine-type endopeptidase activity; Biological process=proteolysis
  Homolog annotation: Hit_ID=Q2QSI6; Match level="QueryCoverage=78%, HitCoverage=6%, E-value=2e-13, Identity=73%"; Hit description =Subtilase family protein, expressed
KPILDETLNPAGHFSIGAGHVNPSQAVNPGLIYDIDEEQYISYLCNHQAHKDTKCTA

SEQ ID NO: 128546 - protein, 93 aa, Setaria italica
  Transcript Sequence Number=SeqID_62572
GSPARTRRPAGGKTRVREGKRQTDLAGAGAHLVVADALTDVGLLAVAVAGLHRAGDGEEDEGGISSRVRRTPKRGYGGPRAEARTARAGRGAG

SEQ ID NO: 128547 - protein, 139 aa, Setaria italica
  Transcript Sequence Number=SeqID_62573
MGFAGSYRSFPSNANPMQHNLHGPGVPHLDPAAHHLMLQHMSMPGSFPPEGLPRGVLPSQPVHHMAGYRPEMGNVNNFHMHPRQPNYGEFGLMMPGPSGPEVRGNHPEAFERLIQMEMSARSKQQQVHNQANGPLGPGT

SEQ ID NO: 128548 - protein, 113 aa, Setaria italica
  Transcript Sequence Number=SeqID_62574
ARPLVPPGFANAFVDKKLQSQSSNISLDPKLEVNQSATEFTAFESKGKGISDNIAIMGSKHTLPSGGVASSTELASSILKGSEDWEADVMDKYSIGKEGKSKNIDPVRKDDSI

SEQ ID NO: 128549 - protein, 74 aa, Setaria italica
  misc_feature (3)..(3): Xaa can be any naturally occurring amino acid
  Transcript Sequence Number=SeqID_62575
KAXPFSRKDIDSMNDETFGSSECSNEDRAEEEKSGGVSFSYCNIKHPFFYPPQSSMLSHIALYAASFELMRKEQ

SEQ ID NO: 128550 - protein, 51 aa, Setaria italica
  Transcript Sequence Number=SeqID_62576
PQDTNTSLHRRLLRQRQRACQSPHHHILVPIDLLLQKCGLLYVCGHSLPKP

SEQ ID NO: 128551 - protein, 76 aa, Setaria italica
  misc_feature (38)..(38): Xaa can be any naturally occurring amino acid
  misc_feature (61)..(76): Xaa can be any naturally occurring amino acid
  Transcript Sequence Number=SeqID_62577
DDKPVCFNLLIYLSRQGFKLISCCCDVLCWSLVLIPPXSLRGHAHSCILAMHDLQFQVVNXXXXXXXXXXXXXXXX

SEQ ID NO: 128552 - protein, 104 aa, Setaria italica
  misc_feature (10)..(10): Xaa can be any naturally occurring amino acid
  misc_feature (16)..(16): Xaa can be any naturally occurring amino acid
  Transcript Sequence Number=SeqID_62578
  Gene Ontology: Mol. function=aspartic-type endopeptidase activity; Cellular component=lysosome; Biological process=lipid metabolic process
  Homolog annotation: Hit_ID=Q42456; Match level="QueryCoverage=94%, HitCoverage=19%, E-value=1e-44, Identity=82%"; Hit description =Aspartic proteinase oryzasin-1
  Pfam annotation: Domain name=SapB_1; Domain location=2-40; Score =56.4; E_value=1.1e-13; Accession=PF05184.7; Description=Saposin-like type B, region 1
MKLVCNACEXAVVWIXSQLAQNQTQDLVLQYINQLCEKLPSPMGESSVDCSRVASMPDIAFTIGGRKFALKPEQYILKVGEGTAAQCISGFTAMDIPPPRGTYY

SEQ ID NO: 128553 - protein, 75 aa, Setaria italica
  Transcript Sequence Number=SeqID_62579
  Gene Ontology: Mol. function=aspartic-type endopeptidase activity; Cellular component=lysosome; Biological process=lipid metabolic process
  Homolog annotation: Hit_ID=B6TSQ9; Match level="QueryCoverage=85%, HitCoverage=12%, E-value=5e-27, Identity=85%"; Hit description =Aspartic proteinase oryzasin-1
CSILVGTCSRVASMPDIAFTIGGRKFALKPEQYILKVGEGTAAQCISGFTAMDIPPPRGPLWILGDIFMAVKLMH

SEQ ID NO: 128554 - protein, 79 aa, Setaria italica
  misc_feature (48)..(48): Xaa can be any naturally occurring amino acid
  misc_feature (54)..(54): Xaa can be any naturally occurring amino acid
  Transcript Sequence Number=SeqID_62580
  Gene Ontology: Mol. function=aspartic-type endopeptidase activity; Cellular component=lysosome; Biological process=lipid metabolic process
  Homolog annotation: Hit_ID=Q42456; Match level="QueryCoverage=100%, HitCoverage=15%, E-value=4e-33, Identity=83%"; Hit description =Aspartic proteinase oryzasin-1
LAQNQTQDLVLQYINQLCEKLPSPMGESSVDCSRVASMPDIAFTIGGXKFALKXEQYILKVGEGTAAQCISGFTAMDIP

SEQ ID NO: 128555 - protein, 106 aa, Setaria italica
  misc_feature (14)..(14): Xaa can be any naturally occurring amino acid
  Transcript Sequence Number=SeqID_62581
  Gene Ontology: Mol. function=aspartic-type endopeptidase activity; Cellular component=lysosome; Biological process=sphingolipid metabolic process
  Homolog annotation: Hit_ID=Q42456; Match level="QueryCoverage=96%, HitCoverage=20%, E-value=1e-42, Identity=86%"; Hit description =Aspartic proteinase oryzasin-1
  Pfam annotation: Domain name=SapB_2; Domain location=42-76; Score =58.1; E_value=3.3e-14; Accession=PF03489.9; Description=Saposin-like type B, region 2
GKSTGFCASGCAAXRSGTSLLTGPTAIITLINEKIGAAGVVSQECKAVVSQYGQQIIDQLLAETQPSKICSSVGLCTFDGAHGVSAGIRSVVDDEAGESNGLFNED

SEQ ID NO: 128556 - protein, 58 aa, Setaria italica
  Transcript Sequence Number=SeqID_62582
  Gene Ontology: Mol. function=aspartic-type endopeptidase activity; Cellular component=lysosome; Biological process=lipid metabolic process
  Homolog annotation: Hit_ID=Q40140; Match level="QueryCoverage=72%, HitCoverage=8%, E-value=1e-10, Identity=64%"; Hit description =Aspartic protease
NKQRKLQNYKDLVLQYINQLCEKLPSPMGESSVDCSRVASMPDIDSVQAGSVSIQQQF

SEQ ID NO: 128557 - protein, 103 aa, Setaria italica
  Transcript Sequence Number=SeqID_62583
  Gene Ontology: Mol. function=aspartic-type endopeptidase activity; Cellular component=lysosome; Biological process=lipid metabolic process
  Homolog annotation: Hit_ID=Q42456; Match level="QueryCoverage=81%, HitCoverage=16%, E-value=2e-36, Identity=80%"; Hit description =Aspartic proteinase oryzasin-1
YLPKYLIGKKYNTSRNCSRVASMPDIAFTIGGRKFALKPEQYILKVGEGTAAQCISGFTAMDIPPPRGPLWILGDIFMGAYHTVFDYGNLKVGFAGGGMMPTL

SEQ ID NO: 128558 - protein, 97 aa, Setaria italica
  misc_feature (19)..(19): Xaa can be any naturally occurring amino acid
  Transcript Sequence Number=SeqID_62584
  Gene Ontology: Mol. function=aspartic-type endopeptidase activity; Cellular component=lysosome; Biological process=lipid metabolic process
  Homolog annotation: Hit_ID=Q42456; Match level="QueryCoverage=93%, HitCoverage=17%, E-value=2e-39, Identity=86%"; Hit description =Aspartic proteinase oryzasin-1
  Pfam annotation: Domain name=Asp; Domain location=1-96; Score=-196.1; E_value=0.059; Accession=PF00026.15; Description=Eukaryotic aspartyl protease
FGGIDPNHYKGNHTYVPVXTRKGYWQFGMGDVLIGGKSTGFCASGCAAIADSGTSLLTGPTAIITLINEKIGAAGVVSQECKAVVSQYGQQESIESS

SEQ ID NO: 128559 - protein, 123 aa, Setaria italica
  Transcript Sequence Number=SeqID_62585
  Gene Ontology: Mol. function=aspartic-type endopeptidase activity; Cellular component=lysosome; Biological process=lipid metabolic process
  Homolog annotation: Hit_ID=Q42456; Match level="QueryCoverage=91%, HitCoverage=22%, E-value=1e-45, Identity=77%"; Hit description =Aspartic proteinase oryzasin-1
  Pfam annotation: Domain name=SapB_1; Domain location=70-108; Score =60.1; E_value=8.2e-15; Accession=PF05184.7; Description=Saposin-like type B, region 1
  Pfam annotation: Domain name=SapB_2; Domain location=11-41; Score =14.9; E_value=0.064; Accession=PF03489.9; Description=Saposin-like type B, region 2
  Pfam module annotation: Pfam domain module=SapB_1::SapB_2; Domain location=70-108::11-41
KYKTKEIVKDKLVYYSNGQQIIDQLLAETQPSKICSSVGLCTFDGAHGVSAGIRSVVDDEAGESNGLFNEAMCNACETAVVWIRSQLAQNQTQDLVLQYINQLCEKLPSPMGESSVDCSRVAS

SEQ ID NO: 128560 - protein, 65 aa, Setaria italica
  Transcript Sequence Number=SeqID_62586
QGGDEEEKLIVFGEEAQAKKTEQECLIMVIRTHRVYVEPLRAQIIASRMGGSGSVGCSMFYAFRS

SEQ ID NO: 128561 - protein, 78 aa, Setaria italica
  Transcript Sequence Number=SeqID_62587
  Gene Ontology: Mol. function=kinase activity; Cellular component =cellular_component; Biological process=signal transduction
  Homolog annotation: Hit_ID=Q8S5N8; Match level="QueryCoverage=97%, HitCoverage=6%, E-value=5e-37, Identity=86%"; Hit description =Putative F-box protein family
  Pfam annotation: Domain name=Mob1_phocein; Domain location=1-78; Score=18.1; E_value=1.4e-10; Accession=PF03637.9; Description =Mob1phocein family
LREAVRLPIGEDLNEWLAVNTVDFFNNVNMLYGTLMEFCTPATCPIMSAGPKYEYRWADGVKVKKPIEVSAPKYVEVT

SEQ ID NO: 128562 - protein, 141 aa, Setaria italica
  misc_feature (62)..(62): Xaa can be any naturally occurring amino acid
  Transcript Sequence Number=SeqID_62588
  Gene Ontology: Mol. function=starch synthase activity; Cellular component=chloroplast; Biological process=glucan biosynthetic process
  Homolog annotation: Hit_ID=B2Z9Y1; Match level="QueryCoverage=68%, HitCoverage=5%, E-value=2e-40, Identity=82%"; Hit description=Starch synthase IIIa
  Pfam annotation: Domain name=SSIII; Domain location=15-134; Score =98.9; E_value=1.7e-26; Accession=PF07036.3; Description=Starch synthase III
LHQLSEEESSWAEDEVETTEDEEQYEVEESSFVSAEQDTQESPQDYLDPQALQRMLQELAEXNYSLGNKLFVFPEVLKADSTIDLYFNRDLSSLANEPDVLIKGAFNGWRWKFFTEKLHKSRNLGRGTWFGFLLFLLNFLF

SEQ ID NO: 128563 - protein, 158 aa, Setaria italica
  Transcript Sequence Number=SeqID_62589
  Gene Ontology: Mol. function=nutrient reservoir activity
  Homolog annotation: Hit_ID=Q03866; Match level="QueryCoverage=79%, HitCoverage=17%, E-value=6e-29, Identity=56%"; Hit description =Vicilin-like embryo storage protein
  Pfam annotation: Domain name=AraC_binding; Domain location=4-142; Score=-0.4; E_value=0.049; Accession=PF02311.11; Description=AraC -like ligand binding domain
  Pfam annotation: Domain name=Cupin_1; Domain location=1-104; Score= -7.3; E_value=0.0027; Accession=PF00190.14; Description=Cupin
  Pfam annotation: Domain name=Cupin_2; Domain location=6-91; Score =9.5; E_value=0.035; Accession=PF07883.3; Description=Cupin domain
  Pfam module annotation: Pfam domain module=AraC_binding::Cupin _1::Cupin_2; Domain location=4-142::1-104::6-91
GIRNYRVAILEANPRSFIVPSHTDAHSIGYVAQGEGVVTTIENGERRSYTVKEGDVFVAPAGRSPTSPTPTAGGSSSSSRSSTPSPCLASSSSSSAPAGGTRNPSCRASARASRELLTRPRATGWRGCSASRIRASSCARRRSKVRRRLDGRTKLSKP

SEQ ID NO: 128564 - protein, 116 aa, Setaria italica
  Transcript Sequence Number=SeqID_62590
YCTYNFTLRLYTNYMTTSMDLQEASSSMAREDEAAGTRGSPPTGCRRLGWCQRVAMGVLLWLCMYVVSRSKMEEVTRLCARVPSRVSTCRSSCSCVVRCAVLEHSTCKKGGMCPNK

SEQ ID NO: 128565 - protein, 98 aa, Setaria italica
  misc_feature (70)..(70): Xaa can be any naturally occurring amino acid
  Transcript Sequence Number=SeqID_62591
  Gene Ontology: Mol. function=oxidoreductase activity; Biological process=oxidation reduction
  Homolog annotation: Hit_ID=B4FNZ9; Match level="QueryCoverage=97%, HitCoverage=31%, E-value=1e-34, Identity=73%"; Hit description =General stress protein 39
VPADLGYEENCRRVVEEVAGAYGGRIDVLVNNAAEQYERPSLSDITEANLDRVFRTNIYSYFLVTKHALXRYMREGSSVINTSSVNAYKGNKERLEPN

SEQ ID NO: 128566 - protein, 70 aa, Setaria italica
  Transcript Sequence Number=SeqID_62592
QQHESDGGDGCGGRGCRRLVAVGDEDKKLKVAVIHPDLGIGKPPPFLLPVEPPDPRFPTRAVQFKAKILH

SEQ ID NO: 128567 - protein, 90 aa, Setaria italica
  Transcript Sequence Number=SeqID_62593
  Subcellular localization annotation: CTP_CleavageSite=29; ConfidenceScore=5.29e-01
SSINTVRQPASSACAKLRITKISKPALLSCSKSQKCFFLGSGPIYKIILSIPRSGWMTATLSFFVFVPDGDEPPAPPPAAAISSVSPPSD

SEQ ID NO: 128568 - protein, 133 aa, Setaria italica
  misc_feature (25)..(25): Xaa can be any naturally occurring amino acid
  Transcript Sequence Number=SeqID_62594
  Gene Ontology: Mol. function=transferase activity, transferring glycosyl groups; Cellular component=perinuclear region of cytoplasm; Biological process=biosynthetic process
  Homolog annotation: Hit_ID=B9SI01; Match level="QueryCoverage=86%, HitCoverage=35%, E-value=2e-31, Identity=52%"; Hit description=Alpha- 1,3-mannosyltransferase, putative
VLLWWSLLLYVILVDQVSVVIPLLXLKASSKIVFYCHFPDLLLAQHTTMLRRLYRKPIDMIEEYTTGMADLILVNSKFTAATFARTFRAVHARGIEPGVLFERKKNLDLAISAFALLRSGGALQDATLTSKTR

SEQ ID NO: 128569 - protein, 62 aa, Setaria italica
  Transcript Sequence Number=SeqID_62595
  Subcellular localization annotation: CTP_CleavageSite=29; ConfidenceScore=5.30e-01
SSINTVRQPASSACAKLRITKISKPALLSCSKSQKCFFLGSGPIYKIILSNARCNFNSSRWL

SEQ ID NO: 128570 - protein, 124 aa, Setaria italica
  misc_feature (22)..(22): Xaa can be any naturally occurring amino acid
  misc_feature (71)..(71): Xaa can be any naturally occurring amino acid
  Transcript Sequence Number=SeqID_62596
  Gene Ontology: Mol. function=dopamine beta-monooxygenase activity; Cellular component=perinuclear region of cytoplasm; Biological process=biosynthetic process
  Homolog annotation: Hit_ID=Q9ZV98; Match level="QueryCoverage=94%, HitCoverage=22%, E-value=1e-35, Identity=63%"; Hit description =F9K20.16 protein
MEILARHVFYRFHAVCAYLRCXFVALCVLLWWPSFDVILVDQVSVVIPLLKLKASSKVSISCSECLVLSSXSIMLTVCLLHLQIVFYCHFPDLLLAQHTTMLRRLYRKPIDMIEEYTTGIVLHI

SEQ ID NO: 128571 - protein, 54 aa, Setaria italica
  Transcript Sequence Number=SeqID_62597
DRLIPAFFQIFCDFLVQIQIQQPPSVPRDERTLFVTFSNGYPFTADELYEFFTR

SEQ ID NO: 128572 - protein, 58 aa, Setaria italica
  Transcript Sequence Number=SeqID_62598
GGNTYGLGSSFQRGRKLRTSELISHAWMLGPGLVPYGTCMPKNVGINHADQGSTDGLL

SEQ ID NO: 128573 - protein, 77 aa, Setaria italica
  Transcript Sequence Number=SeqID_62599
SGLTSIDLDYIAPDHFTTTCITVDVVPAALMENALYFIGDFGNEILKQALMETPNGRSAGSFLWSCCSPRFAVRHHI

SEQ ID NO: 128574 - protein, 123 aa, Setaria italica
  Transcript Sequence Number=SeqID_62600
PSSLSYYRVPFLRWSFSWVASAEGQIHACLYSSESGEWSGLTSIDLDYIAPDHFTTTCITVDVVPAALMENALYFIGDFGNEILKYEFDPEEPSLTAIDPPPGVETCCDGVVVMPEADGRLGS

SEQ ID NO: 128575 - protein, 73 aa, Setaria italica
  Transcript Sequence Number=SeqID_62601
YDLSSMVYTSSSVVTTMQLMACTKTSQIWKPPMGEAQGHSSGVAAPPDSPCVTISDWFCCYYFLFFSCFVSYV

SEQ ID NO: 128576 - protein, 114 aa, Setaria italica
  Transcript Sequence Number=SeqID_62602
VGYYRRSKNRMMDARDKPQIFHGQPQIINLSGDQAPSGGGPSHQKQQEQLVHSQLRENIISTTSAAQEMNHNHLFGVARSCFPEKSRGSLQSLPIDKHQDCCTPTPSAISKSAF

SEQ ID NO: 128577 - protein, 60 aa, Setaria italica
  Transcript Sequence Number=SeqID_62603
KFCVGIAGVEGVIADSKTHKVVVKGKKVAADPTKVIEHVQKKTGHKVELLSPIPPPVEEK

SEQ ID NO: 128578 - protein, 72 aa, Setaria italica
  misc_feature (32)..(32): Xaa can be any naturally occurring amino acid
  Transcript Sequence Number=SeqID_62604
  Homolog annotation: Hit_ID=B6U4D0; Match level="QueryCoverage=87%, HitCoverage=15%, E-value=2e-10, Identity=51%"; Hit description=ATFP3
DAAAHRHQPNLYMYYPQFAFPGGYYSPPDTAXPGYIYQAAYPPPSYTAYAPHHQMMAPQTFSDENPNACSII

SEQ ID NO: 128579 - protein, 64 aa, Setaria italica
  Transcript Sequence Number=SeqID_62605
TLLLLLLNTFHLLLLLDHVIAARALQRGNRLRLDDGHVLADCALLHCYFGLSFGPSFLTTTLST

SEQ ID NO: 128580 - protein, 63 aa, Setaria italica
  Transcript Sequence Number=SeqID_62606
  Subcellular localization annotation: CTP_CleavageSite=41; ConfidenceScore=5.40e-01
HVPKQSTVHLKHVVARALFGNMMAVPPPMPFSHQLGIGTASASTFMAAPQSEASSILSQKMLG

SEQ ID NO: 128581 - protein, 91 aa, Setaria italica
  misc_feature (78)..(78): Xaa can be any naturally occurring amino acid
  Transcript Sequence Number=SeqID_62607
  Subcellular localization annotation: CTP_CleavageSite=74; ConfidenceScore=5.44e-01
HRKLQRWGHGDAVFGNMMAVPPPMPFSHQLGIGTASASTFMAAPQSEASSILSQKDVGMSLHQTNAMDISSMVSATSXSMGTMDMDGFWKY

SEQ ID NO: 128582 - protein, 101 aa, Setaria italica
  Transcript Sequence Number=SeqID_62608
  Gene Ontology: Mol. function=DNA binding; Cellular component=nucleus; Biological process=regulation of transcription
  Homolog annotation: Hit_ID=B8XRZ4; Match level="QueryCoverage=75%, HitCoverage=20%, E-value=1e-27, Identity=72%"; Hit description=CUP -SHAPED COTYLEDON3
  Pfam annotation: Domain name=NAM; Domain location=3-75; Score=76.9; E_ value=7.5e-20; Accession=PF02365.7; Description=No apical meristem (NAM) protein
IGNLLLTKKDRKYRTGLRMNRATEGGYWKATGKDKEIYRAMTGVLIGMKKTLVFYTGRAPRGQKTTWVMHEYRLEGNNKSPHLHPAQPPPPLNHLQLPRRR

SEQ ID NO: 128583 - protein, 77 aa, Setaria italica
  misc_feature (29)..(29): Xaa can be any naturally occurring amino acid
  Transcript Sequence Number=SeqID_62609
MGPQTMEAAESPISGQISDYEDTESVYLXAKFGAADNFRASSRYHPLAEMQQPVDGFMTENMLYASSSTVGSRQGYH

SEQ ID NO: 128584 - protein, 116 aa, Setaria italica
  Transcript Sequence Number=SeqID_62610
  Subcellular localization annotation: CTP_CleavageSite=85; ConfidenceScore=5.06e-01
RWSYCNWSVGNLYQSSISMPMPLQFSMLSDFTMDPAASYYSTIDARSLAVPPVMPPLSGMGNIGLQVASTLFGNSMVVAPPMSIYHQMGMGAEGASSFLGASKSGPSLMVSQKAQG

SEQ ID NO: 128585 - protein, 111 aa, Setaria italica
  Transcript Sequence Number=SeqID_62611
  Gene Ontology: Mol. function=DNA binding; Cellular component=nucleus; Biological process=regulation of transcription
  Homolog annotation: Hit_ID=Q9LS50; Match level="QueryCoverage=75%, HitCoverage=26%, E-value=2e-23, Identity=58%"; Hit description =Similarity to NAM
  Pfam annotation: Domain name=NAM; Domain location=2-63; Score=13.1; E_ value=1.2e-08; Accession=PF02365.7; Description=No apical meristem (NAM) protein
VRNRVLRKGGYWKATGKDREIYRAATKDELPLLVGMKKTLVFYKGRAPTGKKTDWVMHEFRLEGTNKDEWVVCRVFDKTTRVKREPALPLFNVAMNGGGIDQSSISMPMPL

SEQ ID NO: 128586 - protein, 87 aa, Setaria italica
  Transcript Sequence Number=SeqID_62612
  Gene Ontology: Mol. function=DNA binding; Biological process =regulation of transcription
  Homolog annotation: Hit_ID=Q9FKA0; Match level="QueryCoverage=55%, HitCoverage=16%, E-value=4e-14, Identity=72%"; Hit description=No apical meristem-like protein
  Pfam annotation: Domain name=NAM; Domain location=19-87; Score=-14.3; E_value=4.2e-06; Accession=PF02365.7; Description=No apical meristem (NAM) protein
MGGQKVQPKGMSIKDGLQLPPGFRFYPSDEEIITFYLKPKVHQSNFSCTAIGEVDLNRIEPWELSGTHSTHIYPVHMVHGHTIVSYP

SEQ ID NO: 128587 - protein, 53 aa, Setaria italica
  Transcript Sequence Number=SeqID_62613
TCMQQYSASNSTSIYIISLASYQNIETMHYFIKCDVAIGIIYLCDPLSQLPPS

SEQ ID NO: 128588 - protein, 71 aa, Setaria italica
  Transcript Sequence Number=SeqID_62614
  Subcellular localization annotation: CTP_CleavageSite=50; ConfidenceScore=5.45e-01
CSFPELPSSILSTLAESTSFTLPARATLHAGSGLAASSSTPTSFFVDSFVASSPPKATISLFSPSQKLMGI

SEQ ID NO: 128589 - protein, 95 aa, Setaria italica
  Transcript Sequence Number=SeqID_62615
VANKYEDDAKVAVAEYEKLEQQGEKGKEVGYGGEDGGELDKENKAKVSVVSVEIAAPEDNVAILVEPNSELGYEKEENNDIVVMRRIGRKTPKRN

SEQ ID NO: 128590 - protein, 45 aa, Setaria italica
  Transcript Sequence Number=SeqID_62616
LKVENIAAAVEGIGVVNPTEIENIVPIEGVDVKFVSMSEVVHDGS

SEQ ID NO: 128591 - protein, 117 aa, Setaria italica
  misc_feature (36)..(36): Xaa can be any naturally occurring amino acid
  misc_feature (82)..(82): Xaa can be any naturally occurring amino acid
  Transcript Sequence Number=SeqID_62617
  Gene Ontology: Mol. function=nutrient reservoir activity
  Homolog annotation: Hit_ID=Q5EN77; Match level="QueryCoverage=42%, HitCoverage=34%, E-value=2e-14, Identity=82%"; Hit description=Zein -like seed storage protein (Fragment)
  Subcellular localization annotation: CTP_CleavageSite=38; ConfidenceScore=5.10e-01
LKPTTNLLATMAAKIFAFLALLALSVSAATAVLVPXCSVAAAAATIPQYLSPYTAVGYEHPIVQSYRLQQALAANILSSPAXFLQQPWALSQQQSFAHVTVQSTTAQQQQFLPAFLA

SEQ ID NO: 128592 - protein, 98 aa, Setaria italica
  misc_feature (92)..(92): Xaa can be any naturally occurring amino acid
  Transcript Sequence Number=SeqID_62618
  Gene Ontology: Mol. function=nutrient reservoir activity
  Homolog annotation: Hit_ID=A9XEB5; Match level="QueryCoverage=95%, HitCoverage=45%, E-value=3e-16, Identity=53%"; Hit description=22kD alpha canein 5
SLSLSPAAYWQQQQLLPFNQLAVANAYWQQQQLLPFNQLAIANPAAYWQQQQLLPFNPLHLANSATYWQQQQLLSVNPLGVMNPAAFWQQPXIGSAIF

SEQ ID NO: 128593 - protein, 96 aa, Setaria italica
  Transcript Sequence Number=SeqID_62619
  Gene Ontology: Mol. function=nutrient reservoir activity
  Homolog annotation: Hit_ID=A9XEB5; Match level="QueryCoverage=83%, HitCoverage=47%, E-value=2e-14, Identity=47%"; Hit description=22kD alpha canein 5
YDLTRTNKTNRLDFQFNQLAVANAYWQQQQLLPFNQLAIANPAAYWQQQQLLPFNPLHLANSATYWQQQQLLSVNPLGVMNPAAFWQQPIIGSAIF

SEQ ID NO: 128594 - protein, 70 aa, Setaria italica
  Transcript Sequence Number=SeqID_62620
  Subcellular localization annotation: CTP_CleavageSite=62; ConfidenceScore=5.40e-01
ITGTLPQQPWALSQQQSFAHVTVQSTTAQQQQFLPAFSQLALASPAAYWQQQQLLPFNQLAVANAYWQSN

SEQ ID NO: 128595 - protein, 80 aa, Setaria italica
  Transcript Sequence Number=SeqID_62621
  Subcellular localization annotation: CTP_CleavageSite=44; ConfidenceScore=5.32e-01
KNPIVQSYRLQQALAANILSSPALFLQQPWALSQQQSFAHVTVQSTTAQQQQFLPAFSQLALASPAAYWQQQQLLPFSQM

SEQ ID NO: 128596 - protein, 47 aa, Setaria italica
  Transcript Sequence Number=SeqID_62622
ANILSSPALFLQQPWALSQGSLAAVAARDPCGRKTAVAALTANILSS

SEQ ID NO: 128597 - protein, 74 aa, Setaria italica
  Transcript Sequence Number=SeqID_62623
  Gene Ontology: Mol. function=nutrient reservoir activity
  Homolog annotation: Hit_ID=Q10QG3; Match level="QueryCoverage=85%, HitCoverage=9%, E-value=5e-15, Identity=63%"; Hit description=Cupin family protein, expressed
MPSKPKVEAYSSVSNLLKGFETEVLRLGFGVQREVAEAIKSAKIPPLIIPYNPTERRQCPQSSWASPTYNPYLR

SEQ ID NO: 128598 - protein, 97 aa, Setaria italica
  Transcript Sequence Number=SeqID_62624
TRQTVLETNPCCSGTPSERSLCPSSSNPSGESRRGHRGDERGRPGGRGDEEGVFFFFFFFFFLRQRLGSVQEHGVPGKGGLFVVPRFHPMAQMSFNN

SEQ ID NO: 128599 - protein, 113 aa, Setaria italica
  Transcript Sequence Number=SeqID_62625
  Gene Ontology: Mol. function=nutrient reservoir activity
  Homolog annotation: Hit_ID=Q10QG3; Match level="QueryCoverage=91%, HitCoverage=15%, E-value=7e-26, Identity=54%"; Hit description=Cupin family protein, expressed
TSKFLSFLGILGFQREVAEAIKSAKIPPLIIPYNPHEKGDEEKPNWTEDIVDALLGVRDPEEFINNKKKDKHKKKEKDKKSRSKAFNFYSGKPDVHNCYGWSRTMTNKDLDAL

SEQ ID NO: 128600 - protein, 76 aa, Setaria italica
  Transcript Sequence Number=SeqID_62626
NKRENNVNKETVVDPKTSSNPSGESRRGHRGDERGRPGGRGDEEGEGKGWVRCRNTVFRVKEGDVFVVPRFHPMAQ

SEQ ID NO: 128601 - protein, 89 aa, Setaria italica
  Transcript Sequence Number=SeqID_62627
MSAIFTFLLLLSFVFILCTCCLRICLLLKVYLVDLLSAGILFSNQSDHSLLVWFQYELLNEKSKEKLEVLREITGTVTHRKHLDSSVDF

SEQ ID NO: 128602 - protein, 94 aa, Setaria italica
  Transcript Sequence Number=SeqID_62628
  Gene Ontology: Mol. function=cysteine-type endopeptidase activity; Cellular component=vacuole; Biological process=proteolysis
  Homolog annotation: Hit_ID=Q5QL06; Match level="QueryCoverage=98%, HitCoverage=18%, E-value=2e-47, Identity=95%"; Hit description =Vacuolar processing enzyme 1
  Pfam annotation: Domain name=Peptidase_C13; Domain location=1-94; Score=-33.0; E_value=1.8e-09; Accession=PF01650.10; Description =Peptidase C13 family
PNLPYIYAGDFMKVLREKHASNSYAKMVIYVEACESGSIFEGLMPEDLNIYVTTASNAEESSWGTYCPGMIPSPPSEYITCLGDLYSVSWMEDR

SEQ ID NO: 128603 - protein, 60 aa, Setaria italica
  Transcript Sequence Number=SeqID_62629
  Gene Ontology: Mol. function=cysteine-type endopeptidase activity; Cellular component=vacuole; Biological process=proteolysis
  Homolog annotation: Hit_ID=Q5QL06; Match level="QueryCoverage=100%, HitCoverage=12%, E-value=7e-25, Identity=83%"; Hit description =Vacuolar processing enzyme 1
VRIFESHCGSLTQYGMKHMRAFANICNRGTPATAMKEASISACGSYNSARWSPLVQGYSA

SEQ ID NO: 128604 - protein, 68 aa, Setaria italica
  Transcript Sequence Number=SeqID_62630
  Gene Ontology: Mol. function=cysteine-type endopeptidase activity; Biological process=proteolysis
  Homolog annotation: Hit_ID=Q5QL06; Match level="QueryCoverage=86%, HitCoverage=11%, E-value=8e-14, Identity=61%"; Hit description =Vacuolar processing enzyme 1
PENADITYKLLWQGQKSVVNQRDADILFLWKRYELLNEKSKEKLEVLREITGTVTHRKQYYEQRTKLN

SEQ ID NO: 128605 - protein, 109 aa, Setaria italica
  misc_feature (12)..(12): Xaa can be any naturally occurring amino acid
  misc_feature (20)..(20): Xaa can be any naturally occurring amino acid
  Transcript Sequence Number=SeqID_62631
  Gene Ontology: Mol. function=peptidase activity
  Homolog annotation: Hit_ID=B4FFB8; Match level="QueryCoverage=86%, HitCoverage=86%, E-value=2e-25, Identity=57%"; Hit description=5a2 protein
  Pfam annotation: Domain name=Tryp_alpha_amyl; Domain location=26-101; Score=33.5; E_value=8.7e-07; Accession=PF00234.14; Description =Protease inhibitorseed storageLTP f
MAKLLNLFLVLXFVVAMSIXGTQAACGDGLKDLIKECQQYVMPPKDPKIPPSDGCCGLVKKVDVPCLCSKVTKAIEAIVSMEKVAFVAEKCGRPLEHGYKCGSYTVPAK

SEQ ID NO: 128606 - protein, 137 aa, Setaria italica
  misc_feature (76)..(76): Xaa can be any naturally occurring amino acid
  Transcript Sequence Number=SeqID_62632
  Gene Ontology: Mol. function=peptidase activity
  Homolog annotation: Hit_ID=B4FFB8; Match level="QueryCoverage=70%, HitCoverage=88%, E-value=4e-24, Identity=55%"; Hit description=5a2 protein
  Pfam annotation: Domain name=Tryp_alpha_amyl; Domain location=40-116; Score=27.1; E_value=7e-05; Accession=PF00234.14; Description=Protease inhibitorseed storageLTP f
LTLLVFLISPIGRKLLCNLVSLVPLFLLVAMSIEGTQAACGDGLKDLIKECQQYVMPPKDPKIPPSDGCCGLVKKXVDVPCLCSKVTKAIEAIVSMEKVAFVAEKCGRPLEHGYKCGSYTVPAKMNRQQEGGAGCSA

SEQ ID NO: 128607 - protein, 105 aa, Setaria italica
  Transcript Sequence Number=SeqID_62633
  Gene Ontology: Mol. function=peptidase activity
  Homolog annotation: Hit_ID=B4FFB8; Match level="QueryCoverage=89%, HitCoverage=86%, E-value=1e-17, Identity=50%"; Hit description=5a2 protein
  Pfam annotation: Domain name=Tryp_alpha_amyl; Domain location=22-97; Score=33.7; E_value=7.3e-07; Accession=PF00234.14; Description =Protease inhibitorseed storageLTP f
RKQGPRTCSGVAMSIEGTQAACDDNLSDLIKECQQYVMPPKDPKIPPSDSCCRVVQKADFPCLCSKVTKIIEGIVCMEKAVYVAEKCGRQVPHGFKCGSYTVPAK

SEQ ID NO: 128608 - protein, 110 aa, Setaria italica
  Transcript Sequence Number=SeqID_62634
  Gene Ontology: Mol. function=peptidase activity
  Homolog annotation: Hit_ID=B4FFB8; Match level="QueryCoverage=87%, HitCoverage=88%, E-value=8e-19, Identity=51%"; Hit description=5a2 protein
  Pfam annotation: Domain name=Tryp_alpha_amyl; Domain location=26-101; Score=33.7; E_value=7.3e-07; Accession=PF00234.14; Description =Protease inhibitorseed storageLTP f
MAKLRSMFLVLAFVVAMSIEGTQAACDDNLSDLIKECQQYVMPPKDPKIPPSDSCCRVVQKADFPCLCSKVTKIIEGIVCMEKAVYVAEKCGRQVPHGFKCGSYTVPANE

SEQ ID NO: 128609 - protein, 88 aa, Setaria italica
  misc_feature (65)..(65): Xaa can be any naturally occurring amino acid
  Transcript Sequence Number=SeqID_62635
  Homolog annotation: Hit_ID=B4FFB8; Match level="QueryCoverage=84%, HitCoverage=68%, E-value=5e-09, Identity=46%"; Hit description=5a2 protein
QWRKLRSMFLVLAFVVAMSIEGTQAACDDNLSDLIKECQQYVMPPKDPKIPPSDSCCRVVQKADXPCLCSKVTKIIEGIVCMEKAVYV

SEQ ID NO: 128610 - protein, 62 aa, Setaria italica
  Transcript Sequence Number=SeqID_62636
ELSTTSSTSPLAVYSFSWNCVASALVRPIDYKVGPTRQFLRTNKIDKPYYQLEQQIRPTNKT

SEQ ID NO: 128611 - protein, 43 aa, Setaria italica
  Transcript Sequence Number=SeqID_62637
  Homolog annotation: Hit_ID=B4FFB8; Match level="QueryCoverage=100%, HitCoverage=38%, E-value=8e-10, Identity=67%"; Hit description=5a2 protein
LCSKVTKAIEAIVSMEKVAFVAEKCGRPLEHGYKCGSYTVPAK

SEQ ID NO: 128612 - protein, 47 aa, Setaria italica
  misc_feature (44)..(44): Xaa can be any naturally occurring amino acid
  Transcript Sequence Number=SeqID_62638
CLVLNCLPDLPLLAHHNIFHTSLSLSNLTVVSTQPHIAHFFRKXQVG

SEQ ID NO: 128613 - protein, 101 aa, Setaria italica
  misc_feature (26)..(26): Xaa can be any naturally occurring amino acid
  Transcript Sequence Number=SeqID_62639
  Gene Ontology: Mol. function=peptidase activity
  Homolog annotation: Hit_ID=B4FFB8; Match level="QueryCoverage=95%, HitCoverage=88%, E-value=2e-23, Identity=56%"; Hit description=5a2 protein
  Pfam annotation: Domain name=Tryp_alpha_amyl; Domain location=17-92; Score=7.8; E_value=0.05; Accession=PF00234.14; Description=Protease inhibitorseed storageLTP f
GPVFVVAMSIEGTQAACGDGLKDLIXECQQYVMPPKDPKIPPSDGCLRSGKKVDVPCLCSKVTKAIEAIVSMEKVAFVAEKCGRPLEHGYKCGSYTVPANE

SEQ ID NO: 128614 - protein, 70 aa, Setaria italica
  Transcript Sequence Number=SeqID_62640
FLFLLFNFKGSFLLSTNYFPYIIISLEPYSSLNTTSYCTFFQKGKSGRQLRTKHYIQHLPSCCLFRKVIR

SEQ ID NO: 128615 - protein, 52 aa, Setaria italica
  Transcript Sequence Number=SeqID_62641
FFRKKKPLIKLNHNIFHTSLSLSNLTVVSTQPHIAHFFQKGKSGRQLRTKHY

SEQ ID NO: 128616 - protein, 54 aa, Setaria italica
  Transcript Sequence Number=SeqID_62642
  Gene Ontology: Mol. function=electron carrier activity
  Homolog annotation: Hit_ID=Q7XGY2; Match level="QueryCoverage=94%, HitCoverage=2%, E-value=1e-10, Identity=57%"; Hit description =Transposon protein, putative, CACTA, En/Spm sub-class
GACVPTSYNDAIKYIRTRGLGSESIHVCKNNCVLFRKDLAEHDVCLVCCEADSR

SEQ ID NO: 128617 - protein, 72 aa, Setaria italica
  Transcript Sequence Number=SeqID_62643
ETFASWAVNPTLRPDITNLVDPALQGQCSASRLYHAFLLAARCVSELPAMRPAITEVVRTLEQRILRKTKTN

SEQ ID NO: 128618 - protein, 89 aa, Setaria italica
  misc_feature (38)..(38): Xaa can be any naturally occurring amino acid
  Transcript Sequence Number=SeqID_62644
  Gene Ontology: Mol. function=diacylglycerol kinase activity; Cellular component=vacuole; Biological process=activation of protein kinase C activity
  Homolog annotation: Hit_ID=B6TYH8; Match level="QueryCoverage=95%, HitCoverage=17%, E-value=1e-18, Identity=53%"; Hit description=D -erythro-sphingosine kinase/ diacylglycerol kinase
ALLMKMSDGSYVKSPYVTYLKVRSFKLSPGPLVGNPKXGGIIDVDGEVIARGEGTYGRSQHQDVMAYGPPIQLTVHQALATVYCPNKIR

SEQ ID NO: 128619 - protein, 91 aa, Setaria italica
  Transcript Sequence Number=SeqID_62645
  Homolog annotation: Hit_ID=B4FFZ9; Match level="QueryCoverage=93%, HitCoverage=35%, E-value=2e-39, Identity=90%"; Hit description =Lipoprotein
  Pfam annotation: Domain name=DUF1264; Domain location=1-82; Score =41.2; E_value=7.2e-13; Accession=PF06884.3; Description=Protein of unknown function (DUF1264)
VFLTLPDTEKPLWHTHEFEVKGGVLFMPGVPGVVERRDLEKVCRTYGKTVHFWQVDRGDALPLGLPQIMMALTREGQLRQVPWSCYFVCLV

SEQ ID NO: 128620 - protein, 119 aa, Setaria italica
  misc_feature (17)..(17): Xaa can be any naturally occurring amino acid
  misc_feature (31)..(31): Xaa can be any naturally occurring amino acid
  Transcript Sequence Number=SeqID_62646
  Homolog annotation: Hit_ID=B4FFZ9; Match level="QueryCoverage=100%, HitCoverage=37%, E-value=6e-38, Identity=68%"; Hit description =Lipoprotein
TYGKTVHFWQVDRGDAXPLGLPQIMMALTRXGQLRQDLADCTRALVACCFVWWPFLCVFLIGCLLERRAGVEKKFGVSFQKERENRAYMSGLEHGIHPLANAAGKGLKTEIREVDIPAT

SEQ ID NO: 128621 - protein, 66 aa, Setaria italica
  Transcript Sequence Number=SeqID_62647
  Gene Ontology: Mol. function=DNA binding; Biological process =regulation of transcription
  Homolog annotation: Hit_ID=Q5SNB8; Match level="QueryCoverage=81%, HitCoverage=14%, E-value=2e-15, Identity=69%"; Hit description=One repeat myb transcriptional factor-like
IIHPKLTNISHCRQFLYGLRKYGRGKWKDISREFVTTRTPVQVSSHAQKYFHRQNTSEKQRYSIND

SEQ ID NO: 128622 - protein, 83 aa, Setaria italica
  Transcript Sequence Number=SeqID_62648
  Gene Ontology: Mol. function=protein dimerization activity; Biological process=lignin biosynthetic process
  Homolog annotation: Hit_ID=Q96565; Match level="QueryCoverage=81%, HitCoverage=18%, E-value=2e-23, Identity=76%"; Hit description=N -methyltransferase
  Pfam annotation: Domain name=Methyltransf_2; Domain location=1-82; Score=-110.7; E_value=0.044; Accession=PF00891.10; Description=O -methyltransferase
VAFSEDFDDVRLLVDVGGGTGNTLEMITSQYKHIKGINFDLPHVISQAPSLPGVEHVAGNMYESVPYGDAVLLQVCLKKILIK

SEQ ID NO: 128623 - protein, 57 aa, Setaria italica
  misc_feature (42)..(42): Xaa can be any naturally occurring amino acid
  Transcript Sequence Number=SeqID_62649
  Gene Ontology: Mol. function=protein dimerization activity; Biological process=lignin biosynthetic process
  Homolog annotation: Hit_ID=Q96565; Match level="QueryCoverage=92%, HitCoverage=14%, E-value=3e-16, Identity=69%"; Hit description=N -methyltransferase
DMYESVPYGDAVLLQWILLMQTDEQCLKILKNCHKALPEGGXVIVIDGLLPENTYPR

SEQ ID NO: 128624 - protein, 108 aa, Setaria italica
  misc_feature (38)..(38): Xaa can be any naturally occurring amino acid
  Transcript Sequence Number=SeqID_62650
  Gene Ontology: Mol. function=catechol O-methyltransferase activity; Biological process=lignin biosynthetic process
  Homolog annotation: Hit_ID=Q96565; Match level="QueryCoverage=92%, HitCoverage=26%, E-value=5e-34, Identity=68%"; Hit description=N -methyltransferase
  Pfam annotation: Domain name=Methyltransf_2; Domain location=1-108; Score=-77.8; E_value=0.00056; Accession=PF00891.10; Description=O -methyltransferase
  Subcellular localization annotation: CTP_CleavageSite=26; ConfidenceScore=5.01e-01
LAPFAVFLATRTTMLPWHHIADTVVSGGLLSSSFERTXGMPFFDYLGKNKRLGTLFDNAMAEHSVILVTKMLERFRGFDDVRLLVDVGGGTGNTLEMITSLVTKSTIS

SEQ ID NO: 128625 - protein, 111 aa, Setaria italica
  misc_feature (86)..(86): Xaa can be any naturally occurring amino acid
  Transcript Sequence Number=SeqID_62651
  Gene Ontology: Mol. function=serine-type endopeptidase activity
  Pfam annotation: Domain name=PA; Domain location=15-103; Score=20.9; E_value=0.0026; Accession=PF02225.14; Description=PA domain
RLFVVFEGQSLYIMKAKGTAMIPLVSSGSPDDWTPDTVMGKIVVCMDGATDAYGILLQNAGGAGIVDVDPREWSRDGSTAYPFTLXPGPTLSYTSGEKLRAYMASEPQPGR

SEQ ID NO: 128626 - protein, 126 aa, Setaria italica
  misc_feature (47)..(47): Xaa can be any naturally occurring amino acid
  Transcript Sequence Number=SeqID_62652
  Gene Ontology: Mol. function=transcription cofactor activity; Biological process=regulation of transcription, DNA-dependent
  Homolog annotation: Hit_ID=B9SWU1; Match level="QueryCoverage=50%, HitCoverage=4%, E-value=1e-09, Identity=50%"; Hit description =Transcription cofactor, putative
MQQLKQQHQEHQIMQSQQMKRQQMLHQQIHQKQLHQSQLPIQQQLQXQQQQGQMQVPQLHSGNDMNELKVRQGAAMKSGMYQQLGQRNYYQQMKQGSAFPISSPQNLQASPPQINTNSTTLLDSGK

SEQ ID NO: 128627 - protein, 155 aa, Setaria italica
  Transcript Sequence Number=SeqID_62653
  Gene Ontology: Mol. function=transcription cofactor activity; Biological process=regulation of transcription, DNA-dependent
  Homolog annotation: Hit_ID=B9SWU1; Match level="QueryCoverage=66%, HitCoverage=7%, E-value=5e-24, Identity=50%"; Hit description =Transcription cofactor, putative
GHTGAGDLQEELYQMIKSLKDQYFAELNDLYNKISMKIQHVDNHMPAQKSSDQYEKMKNFKALLERTLHFLQVNKSSIQPGFREKIPIYERQIVNILNSQRRKPVPAPGQQQFQQPGGQASGSNISQQHQNSQGLQQHDSHTNQMPQASLPSMST

SEQ ID NO: 128628 - protein, 148 aa, Setaria italica
  misc_feature (111)..(111): Xaa can be any naturally occurring amino acid
  Transcript Sequence Number=SeqID_62654
  Gene Ontology: Mol. function=transcription cofactor activity; Biological process=regulation of transcription, DNA-dependent
  Homolog annotation: Hit_ID=Q8H6Q7; Match level="QueryCoverage=85%, HitCoverage=9%, E-value=8e-21, Identity=50%"; Hit description=CTV.22
  Subcellular localization annotation: CTP_CleavageSite=64; ConfidenceScore=5.40e-01
QGSAFPISSPQNLQASSPQISHHSPQVDQHNLLQSQIKTGTPLHSANSPFVPSPSPPVAPSPIPVDSDKPLSNLSSLTSTGQAGHQQTSLAHQSQSIAVNTPGISASPLLXEFTSADGSQANVPTQVPTTHSAAAILLQSTQMQSSQQ

SEQ ID NO: 128629 - protein, 160 aa, Setaria italica
  Transcript Sequence Number=SeqID_62655
  Gene Ontology: Mol. function=transcription cofactor activity; Biological process=regulation of transcription, DNA-dependent
  Homolog annotation: Hit_ID=B9SWU1; Match level="QueryCoverage=80%, HitCoverage=9%, E-value=9e-33, Identity=54%"; Hit description =Transcription cofactor, putative
QKQYIQAQRGLQEVSSSTSVDSTAQTGHTGAGDLQEELYQMIKSLKDQYFAELNDLYNKISMKIQHVDNHMPAQKSSDQYEKMKNFKALLERTLHFLQVNKSSIQPGFREKIPIYERQIVNILNSQRRKPVPAPGQQQFQQPGGQASGSNISQQHQNSQG

SEQ ID NO: 128630 - protein, 74 aa, Setaria italica
  misc_feature (37)..(37): Xaa can be any naturally occurring amino acid
  Transcript Sequence Number=SeqID_62656
  Gene Ontology: Mol. function=transcription cofactor activity; Biological process=regulation of transcription, DNA-dependent
  Homolog annotation: Hit_ID=Q8H6Q7; Match level="QueryCoverage=82%, HitCoverage=4%, E-value=3e-11, Identity=55%"; Hit description=CTV.22
YIRPGSVNDSLKQSYSMDTPELQSTATSRVKWQKAEXNHALMEEIQEINQQLIDTELHVSEDDAESFAATSEGA

SEQ ID NO: 128631 - protein, 148 aa, Setaria italica
  misc_feature (118)..(118): Xaa can be any naturally occurring amino acid
  Transcript Sequence Number=SeqID_62657
  Gene Ontology: Mol. function=transcription cofactor activity; Biological process=regulation of transcription, DNA-dependent
  Homolog annotation: Hit_ID=B9SWU1; Match level="QueryCoverage=90%, HitCoverage=9%, E-value=2e-30, Identity=53%"; Hit description =Transcription cofactor, putative
AGMLLQQNNIDQKQYIQAQRGLQEVSSSTSVDSTAQTGHTGAGDLQEELYQMIKSLKDQYFAELNDLYNKISMKIQHVDNHMPAQKSSDQYEKMKNFKALLERTLHFLQVNKSSIQPXLEKNPIYERQIVNILNSQRRKTCASTRTAT

SEQ ID NO: 128632 - protein, 84 aa, Setaria italica
  misc_feature (1)..(1): Xaa can be any naturally occurring amino acid
  Transcript Sequence Number=SeqID_62658
  Gene Ontology: Mol. function=transcription cofactor activity; Biological process=regulation of transcription, DNA-dependent
  Homolog annotation: Hit_ID=Q8H6Q7; Match level="QueryCoverage=95%, HitCoverage=5%, E-value=4e-17, Identity=60%"; Hit description=CTV.22
  Subcellular localization annotation: CTP_CleavageSite=45; ConfidenceScore=5.46e-01
XLVAMTKCRLQPGTSITHDGSGTSKKMKRDTSAMPLNVSSPGSVNDSLKQSYSMDTPELQSTATSRVKWQKAEVNHALMEEYSR

SEQ ID NO: 128633 - protein, 39 aa, Setaria italica
  Transcript Sequence Number=SeqID_62659
SVNDSLKQSYSMDTPELQSTATSRVKWQKAEVQFSEFFF

SEQ ID NO: 128634 - protein, 132 aa, Setaria italica
  misc_feature (118)..(118): Xaa can be any naturally occurring amino acid
  Transcript Sequence Number=SeqID_62660
  Gene Ontology: Mol. function=transcription cofactor activity; Biological process=regulation of transcription, DNA-dependent
  Homolog annotation: Hit_ID=B9SWU1; Match level="QueryCoverage=81%, HitCoverage=7%, E-value=3e-24, Identity=51%"; Hit description =Transcription cofactor, putative
LGVPFLSKFSSSTSVDSTAQTGHTGAGDLQEELYQMIKSLKDQYFAELNDLYNKISMKIQHVDNHMPAQKSSDQYEKMKNFKALLERTLHFLQVNKSSIQPGFREKIPIYERQIVNIXLNSQRRKPVPAPGQ

SEQ ID NO: 128635 - protein, 128 aa, Setaria italica
  Transcript Sequence Number=SeqID_62661
  Gene Ontology: Mol. function=transcription cofactor activity; Biological process=regulation of transcription, DNA-dependent
  Homolog annotation: Hit_ID=Q8H6Q7; Match level="QueryCoverage=94%, HitCoverage=8%, E-value=9e-33, Identity=59%"; Hit description=CTV.22
ATSRVKWQKAEVNHALMEEIQEINQQLIDTELHVSEDDAESFAATSEGAEGMVIRCTFTAVAVSPSLKSMFASAQMSPILPLRLLVPASYPKCSPVLLDKFPDEQRNSDDLSTKAKSKFGIFASVGLA

SEQ ID NO: 128636 - protein, 127 aa, Setaria italica
  misc_feature (12)..(12): Xaa can be any naturally occurring amino acid
  Transcript Sequence Number=SeqID_62662
  Gene Ontology: Mol. function=transcription cofactor activity; Biological process=regulation of transcription, DNA-dependent
  Homolog annotation: Hit_ID=Q8H6Q7; Match level="QueryCoverage=100%, HitCoverage=9%, E-value=4e-34, Identity=59%"; Hit description=CTV.22
ATSRVKWQKAEXNHALMEEIQEINQQLIDTELHVSEDDAESFAATSEGAEGMVIRCTFTAVAVSPSLKSMFASAQMSPILPLRLLVPASYPKCSPVLLDKFPDEQRNSDDLSTKAKSKFGILLRGLA

SEQ ID NO: 128637 - protein, 105 aa, Setaria italica
  misc_feature (58)..(58): Xaa can be any naturally occurring amino acid
  Transcript Sequence Number=SeqID_62663
  Gene Ontology: Mol. function=transcription cofactor activity; Biological process=regulation of transcription, DNA-dependent
  Homolog annotation: Hit_ID=Q8H6Q7; Match level="QueryCoverage=99%, HitCoverage=7%, E-value=4e-25, Identity=58%"; Hit description=CTV.22
LLQSTATSRVKWQKAEVNHALMEEIQEINQQLIDTELHVSEDDAESFAATSEGGRKGXVIRCTFTAVAVSPSLKSMFASAQMSPILPLRLLVPGSYPMLPVLLDK

SEQ ID NO: 128638 - protein, 115 aa, Setaria italica
  misc_feature (97)..(97): Xaa can be any naturally occurring amino acid
  misc_feature (106)..(106): Xaa can be any naturally occurring amino acid
  Transcript Sequence Number=SeqID_62664
  Gene Ontology: Mol. function=transcription cofactor activity; Biological process=regulation of transcription, DNA-dependent
  Homolog annotation: Hit_ID=Q8H6Q7; Match level="QueryCoverage=93%, HitCoverage=7%, E-value=5e-29, Identity=60%"; Hit description=CTV.22
LLQSTATSRVKWQKAEVNHALMEEIQEINQQLIDTELHVSEDDAESFAATSEGAKGWVIRCTFTAVAVSPSLKSMFASAQMSPILPLRLLVPGSYPXCSPVLLDKXPDEQRTRMT

SEQ ID NO: 128639 - protein, 114 aa, Setaria italica
  Transcript Sequence Number=SeqID_62665
  Gene Ontology: Mol. function=transcription cofactor activity; Biological process=regulation of transcription, DNA-dependent
  Homolog annotation: Hit_ID=Q8H6Q7; Match level="QueryCoverage=100%, HitCoverage=8%, E-value=8e-39, Identity=70%"; Hit description=CTV.22
  Subcellular localization annotation: CTP_CleavageSite=29; ConfidenceScore=5.12e-01
TAVAVSPSLKSMFASAQMSPILPLRLLVPASYPKCSPVLLDKFPDEQRNSDDLSTKAKSKFGILLRGLAEPMSLREIARTWDACARKVIAEYAQQTGGGSFSSSYGCWESCVGA

SEQ ID NO: 128640 - protein, 130 aa, Setaria italica
  Transcript Sequence Number=SeqID_62666
  Subcellular localization annotation: CTP_CleavageSite=76; ConfidenceScore=5.41e-01
TPNVANSQRMHMLQPAKAMQQPQQQQHAQQPSMGMMQPQSQQNQLQQSQQHMMSQFQSQSNQLQQQLGMQQRLQTSAGMLLQQNNIDQKQYIQAQRGLQEVSSSTSVDSTAQTGHTGAGDLQEELYQMIK

SEQ ID NO: 128641 - protein, 74 aa, Setaria italica
  Transcript Sequence Number=SeqID_62667
  Gene Ontology: Mol. function=transcription cofactor activity; Biological process=regulation of transcription, DNA-dependent
  Homolog annotation: Hit_ID=Q8H6Q7; Match level="QueryCoverage=100%, HitCoverage=5%, E-value=1e-16, Identity=61%"; Hit description=CTV.22
NHALMEEIQEINQQLIDTELHVSEDDAESFAATSEGAEGMVIRCTFTAVAVSPSLKSMFASAQMSPILPLRLLV

SEQ ID NO: 128642 - protein, 82 aa, Setaria italica
  misc_feature (54)..(54): Xaa can be any naturally occurring amino acid
  Transcript Sequence Number=SeqID_62668
  Gene Ontology: Mol. function=transcription cofactor activity; Biological process=regulation of transcription, DNA-dependent
  Subcellular localization annotation: CTP_CleavageSite=70; ConfidenceScore=5.72e-01
NSPFVPSPSPPVAPSPIPVDSDKPLSNLSSLTSTGQAGHQQTSLAHQSQSIAVXNTPGISASPLLAEFTSADWKSGLTLPYF

SEQ ID NO: 128643 - protein, 56 aa, Setaria italica
  Transcript Sequence Number=SeqID_62669
VVFEKLGIKYATKGEIGLAIFKAFREFRHVLLVLGLAVKTTYLRRLPTYGTNYDEY

SEQ ID NO: 128644 - protein, 71 aa, Setaria italica
  Transcript Sequence Number=SeqID_62670
  Gene Ontology: Mol. function=transcription cofactor activity; Biological process=regulation of transcription, DNA-dependent
  Homolog annotation: Hit_ID=Q8H6Q7; Match level="QueryCoverage=94%, HitCoverage=4%, E-value=3e-18, Identity=70%"; Hit description=CTV.22
LPRSLLDKFPDEQRNSDDLSTKAKSKFGILLRGLAEPMSLREIARTWDACARKVIAEYAQQTGGGSFSSSY

SEQ ID NO: 128645 - protein, 77 aa, Setaria italica
  Transcript Sequence Number=SeqID_62671
  Gene Ontology: Mol. function=transcription cofactor activity; Biological process=regulation of transcription, DNA-dependent
  Homolog annotation: Hit_ID=Q8H6Q7; Match level="QueryCoverage=98%, HitCoverage=5%, E-value=6e-15, Identity=55%"; Hit description=CTV.22
GDLQEELYQMIKSLKDQYFAELNDLYNKISMKIQHVDNHMPAQKSSDQYEKMKNFKALLERTLHFLQVNKSSIQPWF

SEQ ID NO: 128646 - protein, 81 aa, Setaria italica
  misc_feature (14)..(14): Xaa can be any naturally occurring amino acid
  misc_feature (64)..(64): Xaa can be any naturally occurring amino acid
  Transcript Sequence Number=SeqID_62672
  Gene Ontology: Mol. function=transcription cofactor activity; Biological process=regulation of transcription, DNA-dependent
  Homolog annotation: Hit_ID=Q8H6Q7; Match level="QueryCoverage=97%, HitCoverage=5%, E-value=2e-12, Identity=48%"; Hit description=CTV.22
PDFAELNDLYNKIXSMKIQHVDNHMPAQKSSDQYEKMKNFKALLERTLHFLQVNKSSIQPGFRXKIPIYERQIVNILNSQR

SEQ ID NO: 128647 - protein, 113 aa, Setaria italica
  Transcript Sequence Number=SeqID_62673
  Gene Ontology: Mol. function=transcription cofactor activity; Biological process=regulation of transcription, DNA-dependent
  Homolog annotation: Hit_ID=B9SWU1; Match level="QueryCoverage=97%, HitCoverage=7%, E-value=3e-22, Identity=51%"; Hit description =Transcription cofactor, putative
QRLQTSAGMLLQQNNIDQKQYIQAQRGLQEVSSSTSVDSTAQTGHTGAGDLQEELYQMIKSLKDQYFAELNDLYNKISMKIQHVDNHMPAQKSSDQYEKMKNFKALLERTLHF

SEQ ID NO: 128648 - protein, 75 aa, Setaria italica
  Transcript Sequence Number=SeqID_62674
MMSQFQSQSNQLQQQLGMQQRLQTSAGMLLQQNNIDQKQYIQAQRGLQEVSSSTSVDSTAQTGHTGAGDLQEELY

SEQ ID NO: 128649 - protein, 82 aa, Setaria italica
  Transcript Sequence Number=SeqID_62675
  Subcellular localization annotation: CTP_CleavageSite=60; ConfidenceScore=5.27e-01
NQLQQSQQHMMSQFQSQSNQLQQQLGMQQRLQTSAGMLLQQNNIDQKQYIQAQRGLQEVSSSTSVDSTAQTGHTGAGDLQVG

SEQ ID NO: 128650 - protein, 78 aa, Setaria italica
  Transcript Sequence Number=SeqID_62676
  Gene Ontology: Mol. function=transcription cofactor activity; Biological process=regulation of transcription, DNA-dependent
  Homolog annotation: Hit_ID=B9SWU1; Match level="QueryCoverage=94%, HitCoverage=5%, E-value=2e-16, Identity=61%"; Hit description =Transcription cofactor, putative
GMLLQQNNIDQKQYIQAQRGLQEVSSSTSVDSTAQTGHTGAGDLQEELYQMIKSLKDQYFAELNDLYNKISMKIQHVD

SEQ ID NO: 128651 - protein, 75 aa, Setaria italica
  Transcript Sequence Number=SeqID_62677
  Subcellular localization annotation: CTP_CleavageSite=59; ConfidenceScore=5.22e-01
KLQQSQQHMMSQFQSQSNQLQQQLGMQQRLQTSAGMLLQQNNIDQKQYIQAQRGLQEVSSSTSVDSTAQTGHTGA

SEQ ID NO: 128652 - protein, 73 aa, Setaria italica
  misc_feature (26)..(26): Xaa can be any naturally occurring amino acid
  Transcript Sequence Number=SeqID_62678
  Subcellular localization annotation: CTP_CleavageSite=57; ConfidenceScore=5.20e-01
QSQQHMMSQFQSQSNQLQQQLGMQQXRLQTSAGMLLQQNNIDQKQYIQAQRGLQEVSSSTSVDSTAQTGHTKG

SEQ ID NO: 128653 - protein, 41 aa, Setaria italica
  Transcript Sequence Number=SeqID_62679
  Gene Ontology: Mol. function=transcription cofactor activity; Biological process=regulation of transcription, DNA-dependent
MKIQHVDNHMPAQKSSDQYEKMKNFKALLERTLHFLQVNKS

SEQ ID NO: 128654 - protein, 43 aa, Setaria italica
  Transcript Sequence Number=SeqID_62680
  Gene Ontology: Mol. function=transcription cofactor activity; Biological process=regulation of transcription, DNA-dependent
QMIKSLKDQYFAELNDLYNKISMKIQHVDNHMSAQKSSDQYEK

SEQ ID NO: 128655 - protein, 80 aa, Setaria italica
  misc_feature (21)..(21): Xaa can be any naturally occurring amino acid
  Transcript Sequence Number=SeqID_62681
  Subcellular localization annotation: CTP_CleavageSite=56; ConfidenceScore=5.41e-01
SSSNRQQQIKQQQQQQQQQLXGTTPNVANSQRMHMLQPAKAMQQPQQQQHAQQPSMGMMQPQSQQNQLQQSQQHMIVTVS

SEQ ID NO: 128656 - protein, 66 aa, Setaria italica
  Transcript Sequence Number=SeqID_62682
  Pfam annotation: Domain name=zf-CCHC; Domain location=41-58; Score =23.6; E_value=7e-05; Accession=PF00098.15; Description=Zinc knuckle
DAISARKVVISRRTAPKKKKWFEWLTVPAGSSSKGKKGKKLRCHFCKKGGHFKKDCPKKKKWFEEK

SEQ ID NO: 128657 - protein, 61 aa, Setaria italica
  Transcript Sequence Number=SeqID_62683
NIQKHKDTLLALRAQTNVKDYSQVPVHSIQCLHSIPMYFRSAYGLDHKQLHFFFLGQSFLK

SEQ ID NO: 128658 - protein, 68 aa, Setaria italica
  Transcript Sequence Number=SeqID_62684
  Subcellular localization annotation: CTP_CleavageSite=47; ConfidenceScore=5.44e-01
QPSMGMMQPQSQQNQLQQSQQHMMSQFQSQSNQLQQQLGMQQRLQTSAGMLLQQNNIDQKQYIQAQRG

SEQ ID NO: 128659 - protein, 80 aa, Setaria italica
  Transcript Sequence Number=SeqID_62685
NVKDLFTSPDPFNPVPSLHSHVIFRVPALWGWIISNSVFKAFRELRLVLLVLGLGLAVQTPPRRLLPTGNYRRILGTGGE

SEQ ID NO: 128660 - protein, 64 aa, Setaria italica
  Transcript Sequence Number=SeqID_62686
  Subcellular localization annotation: CTP_CleavageSite=50; ConfidenceScore=5.56e-01
PAKAMQQPQQQQHAQQPSMGMMQPQSQQNQLQQSQQHMMSQFQSQSNQLQQQLGMQQRLQTSAG

SEQ ID NO: 128661 - protein, 59 aa, Setaria italica
  Transcript Sequence Number=SeqID_62687
  Subcellular localization annotation: CTP_CleavageSite=33; ConfidenceScore=5.24e-01
TPNVANSQRMHMLQPAKAMQQPQQQQHAQQPSMGMMQPQSQQNQLQQSQQHMMSQFQSQ

SEQ ID NO: 128662 - protein, 55 aa, Setaria italica
  Transcript Sequence Number=SeqID_62688
SNHSSNSMLSSHRWGMMQPQSQQNQLQDKYSNKHNRIVQQVTKYYKLLKITKLSN

SEQ ID NO: 128663 - protein, 54 aa, Setaria italica
  Transcript Sequence Number=SeqID_62689
QQQREEGKEAEMPFLQERWSFQEGLPQEEKNGSKRNVYELLMIQPISGPKIHGK

SEQ ID NO: 128664 - protein, 63 aa, Setaria italica
  misc_feature (7)..(7): Xaa can be any naturally occurring amino acid
  Transcript Sequence Number=SeqID_62690
  Subcellular localization annotation: CTP_CleavageSite=38; ConfidenceScore=5.30e-01
QQQQQQXKQQQQQQQQQLLGTTPNVANSQRMHMLQPAKAMQQPQQQQHAQQPSMGMMQPQSQE

SEQ ID NO: 128665 - protein, 55 aa, Setaria italica
  Transcript Sequence Number=SeqID_62691
  Subcellular localization annotation: CTP_CleavageSite=31; ConfidenceScore=5.06e-01
KQQQQQQQQQLLGTTPNVANSQRMHMLQPAKAMQQPQQQQHAQQPSMGMMQPQSQ

SEQ ID NO: 128666 - protein, 59 aa, Setaria italica
  Transcript Sequence Number=SeqID_62692
  Subcellular localization annotation: CTP_CleavageSite=35; ConfidenceScore=5.18e-01
AAKYKQQQQQQQQQLLGTTPNVANSQRMHMLQPAKAMQQPQQQQHAQQPSMGMMQPQSQ

SEQ ID NO: 128667 - protein, 51 aa, Setaria italica
  Transcript Sequence Number=SeqID_62693
  Gene Ontology: Mol. function=transcription cofactor activity; Biological process=regulation of transcription, DNA-dependent
  Homolog annotation: Hit_ID=Q8H6Q7; Match level="QueryCoverage=94%, HitCoverage=3%, E-value=6e-12, Identity=68%"; Hit description=CTV.22
DDLSTKAKSKFGILLRGLAEPMSLREIARTWDACARKVIAEYAQTKLGRKA

SEQ ID NO: 128668 - protein, 37 aa, Setaria italica
  Transcript Sequence Number=SeqID_62694
SDDLSTKAKSKFGILLRGLAEPMSLRFLAVTWAPLDH

SEQ ID NO: 128669 - protein, 78 aa, Setaria italica
  Transcript Sequence Number=SeqID_62695
EENMEQGAIQHIPNHRQVYVDDSVHMEADENDSWLHRGDLGEIKTYFMWGQVNQVRLHTFVVLEKHHCFRRCFIFMIF

SEQ ID NO: 128670 - protein, 30 aa, Setaria italica
  Transcript Sequence Number=SeqID_62696
KLEAKDFSTLQESHACTAGLKAVTTSATAL

SEQ ID NO: 128671 - protein, 37 aa, Setaria italica
  Transcript Sequence Number=SeqID_62697
LQERVRTFIEDASDKDVLVLNVQDPFQRLLLHGVCEF

SEQ ID NO: 128672 - protein, 37 aa, Setaria italica
  Transcript Sequence Number=SeqID_62698
NIHSVHKDARRMIASDTSPALQCDSNLNLDNLHLPTS

SEQ ID NO: 128673 - protein, 95 aa, Setaria italica
  Transcript Sequence Number=SeqID_62699
ALTQRHSMALSSPPLPSPELQRPWRPEVARRTEEHPFGNERNVKEQEHYWSVQSDQLNKEDAKIFHNWAHLIASEKLLYPDDHLHPGPRSTSTSA

SEQ ID NO: 128674 - protein, 65 aa, Setaria italica
  Transcript Sequence Number=SeqID_62700
  Subcellular localization annotation: CTP_CleavageSite=28; ConfidenceScore=5.31e-01
RVLTNFVLVFLVVSLTCYPSSTYLSTPRVPKYSNLLTIRPGGRLAQRLASPRLCRFNPDIQKELQ

SEQ ID NO: 128675 - protein, 50 aa, Setaria italica
  Transcript Sequence Number=SeqID_62701
ATPSTQQGSMRLRCRRRRLLWHVTVSTAAGLAPPAVTTRTAATLYMCDGE

SEQ ID NO: 128676 - protein, 86 aa, Setaria italica
  Transcript Sequence Number=SeqID_62702
  Homolog annotation: Hit_ID=Q5VN46; Match level="QueryCoverage=81%, HitCoverage=20%, E-value=8e-11, Identity=42%"; Hit description=BURP domain-containing protein 10
FFSRFVVCFLLVLRPFNPTRIYEVTLQKEETAAVPAPRRPAVVRALAVCHVNTSGFDPTLKYWVKLGVKPGEAPVCHFLTRGDVLW

SEQ ID NO: 128677 - protein, 64 aa, Setaria italica
  Transcript Sequence Number=SeqID_62703
LAAFLTLLINLSNQDLCPLWLTQHIMYTGKAKSTRGRKAANYATENVSLGPSRSIRPDMPHGFL

SEQ ID NO: 128678 - protein, 80 aa, Setaria italica
  Transcript Sequence Number=SeqID_62704
VTDSSLVENQDSLSDSEMTLSESPPPAVSKAEEEQIMPALQNPVNIPDPKMKGTDPLYAVPLRMVLVPYGGKEPILFDKN

SEQ ID NO: 128679 - protein, 75 aa, Setaria italica
  misc_feature (45)..(45): Xaa can be any naturally occurring amino acid
  Transcript Sequence Number=SeqID_62705
  Gene Ontology: Mol. function=nucleic acid binding; Cellular component= nucleus
  Homolog annotation: Hit_ID=B9SPC8; Match level="QueryCoverage=80%, HitCoverage=6%, E-value=1e-25, Identity=91%"; Hit description=U2 snrnp auxiliary factor, small subunit, putative
  Pfam annotation: Domain name=zf-CCCH; Domain location=19-45; Score =29.4; E_value=1.4e-05; Accession=PF00642.16; Description=Zinc finger C-x8-C-x5-C-x3-H type (and similar)
LKRYLRKLLKRLQNFGTEQDKAHCPFHLKTGACRFGVRCSRVHFXYPDKSSTLLMKNMYNGPGLALEQDEGLEVR

SEQ ID NO: 128680 - protein, 89 aa, Setaria italica
  Transcript Sequence Number=SeqID_62706
KISSRKHQSDQRGSCEPGSSDWPSDLTDTDASKGPSGGKSSSKYDDPKKSMRKSSEAHNLERRYTAHKIQDKEKETTRQPRKGTTTNVG

SEQ ID NO: 128681 - protein, 83 aa, Setaria italica
  Transcript Sequence Number=SeqID_62707
  Gene Ontology: Mol. function=nucleic acid binding; Cellular component= nucleus
  Homolog annotation: Hit_ID=B9SPC8; Match level="QueryCoverage=98%, HitCoverage=9%, E-value=2e-30, Identity=76%"; Hit description=U2 snrnp auxiliary factor, small subunit, putative
  Pfam annotation: Domain name=zf-CCCH; Domain location=10-36; Score =28.8; E_value=2.2e-05; Accession=PF00642.16; Description=Zinc finger C-x8-C-x5-C-x3-H type (and similar)
QETPNFGTEQDKAHCPFHLKTGACRFGVRCSRVHFYPDKSSTLLMKNMYNGPGLALEQDEGLEFTDEEIEQSYEEFYEDVHTV

SEQ ID NO: 128682 - protein, 38 aa, Setaria italica
  Transcript Sequence Number=SeqID_62708
MLQFTDEEIEQSYEEFYEDVHTEFLKFGELANFKVCRN

SEQ ID NO: 128683 - protein, 60 aa, Setaria italica
  Transcript Sequence Number=SeqID_62709
IGAISIQVENKKEQNSDILTSYVLSHCPLGFHLHCVAPGQQVHNLSNTSVVQQSNWKVIY

SEQ ID NO: 128684 - protein, 49 aa, Setaria italica
  Transcript Sequence Number=SeqID_62710
  Gene Ontology: Mol. function=metal ion binding
  Homolog annotation: Hit_ID=B9RU00; Match level="QueryCoverage=79%, HitCoverage=7%, E-value=4e-16, Identity=87%"; Hit description=Ring finger protein, putative
  Pfam annotation: Domain name=zf-C3HC4; Domain location=4-40; Score =17.1; E_value=0.0011; Accession=PF00097.17; Description=Zinc finger, C3HC4 type (RING finger)
AAQCYICLVEYEEGDCVRILPCNHEFHLTCVDKWLKEIHRYAFLPLFQQ

SEQ ID NO: 128685 - protein, 81 aa, Setaria italica
  misc_feature (47)..(47): Xaa can be any naturally occurring amino acid
  Transcript Sequence Number=SeqID_62711
  Gene Ontology: Mol. function=nucleic acid binding; Cellular component= mitochondrion; Biological process=response to stress
  Homolog annotation: Hit_ID=Q9SVM8; Match level="QueryCoverage=100%, HitCoverage=51%, E-value=2e-15, Identity=48%"; Hit description =Glycine-rich RNA-binding protein 2, mitochondrial
  Pfam annotation: Domain name=RRM_1; Domain location=1-68; Score=92.3; E_value=1.7e-24; Accession=PF00076.14; Description=RNA recognition motif. (a.k.a. RRM, RBD, o
VSNLSYGTSEASLKGAFSNYGPLNSEIVVDRETGRSRGFGFVQFEDXESMDNAIQDMNGQEVGGRNVRVSEAKQRPRRWRA

SEQ ID NO: 128686 - protein, 93 aa, Setaria italica
  Transcript Sequence Number=SeqID_62712
EIVMRVGGGNKHGQYWIGDGVIDTASTPTLSQIRARSTDSSPAVRPRPTAAHFQMEALQAQVEESRKAQEEIKAQMEAQIGGNVAEDGGGKPD

SEQ ID NO: 128687 - protein, 33 aa, Setaria italica
  Transcript Sequence Number=SeqID_62713
QFERRVSILGATVRGKKERITELQRIQSTLADI

SEQ ID NO: 128688 - protein, 71 aa, Setaria italica
  Transcript Sequence Number=SeqID_62714
LVRTKLTEKFAVDHLVNNASIWQVCMFEEVEDVNHFRTLMVRAVVNPQFPELFRSTPCFRPINDNSSRVLF

SEQ ID NO: 128689 - protein, 75 aa, Setaria italica
  Transcript Sequence Number=SeqID_62715
TSRVQYDSDIPTEFENNGVAQVMVSTLTEFGTRCLGLGKCWSPYLLLSVQGEDDQSWWANLDFLSDEPEPSEFSV

SEQ ID NO: 128690 - protein, 76 aa, Setaria italica
  Transcript Sequence Number=SeqID_62716
  Gene Ontology: Mol. function=DNA binding; Cellular component=nucleus; Biological process=regulation of transcription
  Homolog annotation: Hit_ID=B9RYY3; Match level="QueryCoverage=71%, HitCoverage=8%, E-value=2e-13, Identity=64%"; Hit description =Transcription factor, putative
  Pfam annotation: Domain name=NAM; Domain location=1-49; Score=-20.9; E_value=1.8e-05; Accession=PF02365.7; Description=No apical meristem (NAM) protein
ATGKDRIIKSKGDKRKQHVIGMKKTLVFHRGRAPKGERTGWIMHEYRTTEPEFDSGEQVNLQYLVAFLLAAAYGCQ

SEQ ID NO: 128691 - protein, 118 aa, Setaria italica
  misc_feature (3)..(3): Xaa can be any naturally occurring amino acid
  misc_feature (13)..(13): Xaa can be any naturally occurring amino acid
  misc_feature (28)..(28): Xaa can be any naturally occurring amino acid
  Transcript Sequence Number=SeqID_62717
TDXTSSCIITKTXSHHQPEKSEIAEDAXKNFAGSVDDLSVNCDDNEQKTMPQHVAEMAVPEAKPVPRLRKASEKSDKDTIKQESGLESLVRAPAQKGGFLILLLPSLVLVSFSVLVFL

SEQ ID NO: 128692 - protein, 50 aa, Setaria italica
  Transcript Sequence Number=SeqID_62718
HHQPEKSEIAEDASKNFAGSVDDLSVNCDDNEQKTMPQHGKKALELPYIV

SEQ ID NO: 128693 - protein, 77 aa, Setaria italica
  Transcript Sequence Number=SeqID_62719
NCDDNEQKTMPQHVAEMAVPEAKPVPRLRKASEKSDKDTIKQESGLESLVRAPAQKGGFQSYTPTERSSSRTTERTS

SEQ ID NO: 128694 - protein, 61 aa, Setaria italica
  Transcript Sequence Number=SeqID_62720
  Gene Ontology: Mol. function=DNA binding; Biological process =regulation of transcription
PSRSSPDNIEANEEANTPLNRESPESGLHESPIELPNSVETHAMPITRWLAGRNDNLSRPN

SEQ ID NO: 128695 - protein, 44 aa, Setaria italica
  Transcript Sequence Number=SeqID_62721
YVVSLGTVVRVRSVVCPVPTSFPREAGWRRAGSVARPPLPREAG

SEQ ID NO: 128696 - protein, 67 aa, Setaria italica
  Transcript Sequence Number=SeqID_62722
GHRREEGYHGQDQGEAARTALSAVAYILVTNRATCHGEAARNSTKCGRVYTGDKPCYLSRRSEIIKR

SEQ ID NO: 128697 - protein, 110 aa, Setaria italica
  misc_feature (8)..(9): Xaa can be any naturally occurring amino acid
  misc_feature (69)..(69): Xaa can be any naturally occurring amino acid
  Transcript Sequence Number=SeqID_62723
  Gene Ontology: Mol. function=oxidoreductase activity; Cellular component=extracellular region; Biological process=lignin catabolic process
  Homolog annotation: Hit_ID=Q2QUP7; Match level="QueryCoverage=83%, HitCoverage=10%, E-value=5e-35, Identity=73%"; Hit description =Retrotransposon protein, putative, Ty1-copia subclass, expressed
  Pfam annotation: Domain name=Cu-oxidase_2; Domain location=1-94; Score=111.9; E_value=2.1e-30; Accession=PF07731.6; Description =Multicopper oxidase
STRLLANXXHPMHLHGVNFYVLAQGVGNYDEAAAAPRFNLENPQERNTVAVPPGGWAVIRFQANNPRGXWFMHCHIEDHLDVGLAMAFEVQDGPTPETSVPPPPLDLPQC

SEQ ID NO: 128698 - protein, 47 aa, Setaria italica; identical to SEQ ID NO: 104255
  Transcript Sequence Number=SeqID_62724

SEQ ID NO: 128699 - protein, 63 aa, Setaria italica
  Transcript Sequence Number=SeqID_62725
EVYKCSKIMSAWGHRRQPSIIPENAAILQFEEIMVDDTIIASQERSPKEDTPYVGNEIKYQEL

SEQ ID NO: 128700 - protein, 62 aa, Setaria italica
  Transcript Sequence Number=SeqID_62726
GQPKEDTPYVGNEIKYQSSEELSTNKKVNNKNILGDGKGINDKEGVKDLASQVKTSLTIKDT

SEQ ID NO: 128701 - protein, 91 aa, Setaria italica
  Transcript Sequence Number=SeqID_62727
  Gene Ontology: Mol. function=nutrient reservoir activity
  Homolog annotation: Hit_ID=A9XEB9; Match level="QueryCoverage=95%, HitCoverage=76%, E-value=1e-15, Identity=56%"; Hit description=50kD gamma canein (Fragment)
LSFSFLILRFVLQPSNCQVLQQHCCHELRQIEPRYLHQAICNIVQSITHQQQQQEKQQQQQHSCELCGSQQASEGELAIRMVAQHLPSMCG

SEQ ID NO: 128702 - protein, 144 aa, Setaria italica
  misc_feature (89)..(89): Xaa can be any naturally occurring amino acid
  misc_feature (117)..(117): Xaa can be any naturally occurring amino acid
  misc_feature (130)..(130): Xaa can be any naturally occurring amino acid
  Transcript Sequence Number=SeqID_62728
AISDAFLLHPFNGSIGSGDSLLVLVGLVGPIGKLRPLVQQIISWERPFVTGSVLAVTLLTIYNEWFNYMLAASLILAVGVMVWARQKKXSAKICSEVIIDTSSDKTTMESIVEAQQXSLRKVHEYIKTAXNVVILRLWSIALAR

SEQ ID NO: 128703 - protein, 51 aa, Setaria italica
  Transcript Sequence Number=SeqID_62729
CCPSSWYYFQGQNGRSKLKKLLFPCITYETQLVCRFNMFSPFSLRVNAYFP

SEQ ID NO: 128704 - protein, 63 aa, Setaria italica
  Transcript Sequence Number=SeqID_62730
  Gene Ontology: Mol. function=DNA binding; Cellular component =cytoplasm; Biological process=regulation of transcription, DNA -dependent
  Homolog annotation: Hit_ID=P26307; Match level="QueryCoverage=69%, HitCoverage=6%, E-value=3e-19, Identity=95%"; Hit description =Regulatory protein viviparous-1
ALTHACRFWPNNKSRMYLLENTGEFVRSNELQEGDFIVIYSDVKSGKYVMFTLLYLFPCNDCF

SEQ ID NO: 128705 - protein, 46 aa, Setaria italica; identical to SEQ ID NO: 104290
  Transcript Sequence Number=SeqID_62731

SEQ ID NO: 128706 - protein, 91 aa, Setaria italica
  misc_feature (24)..(24): Xaa can be any naturally occurring amino acid
  misc_feature (72)..(72): Xaa can be any naturally occurring amino acid
  misc_feature (78)..(78): Xaa can be any naturally occurring amino acid
  Transcript Sequence Number=SeqID_62732
  Gene Ontology: Biological process=response to stress
  Homolog annotation: Hit_ID=B6U2R1; Match level="QueryCoverage=100%, HitCoverage=50%, E-value=2e-29, Identity=72%"; Hit description =Ethylene-responsive protein
RCHPDASLVVVHAQHAVDHFVYPXATHGIAYAPPAAVESMRKAQEENSRRILARALGMCKERQVDATAAVVXEGDAKXAICQAVERFQAGL

SEQ ID NO: 128707 - protein, 89 aa, Setaria italica
  misc_feature (29)..(29): Xaa can be any naturally occurring amino acid
  misc_feature (50)..(50): Xaa can be any naturally occurring amino acid
  Transcript Sequence Number=SeqID_62733
  Gene Ontology: Mol. function=hydrolase activity; Cellular component =cell wall
  Homolog annotation: Hit_ID=B6U0A3; Match level="QueryCoverage=97%, HitCoverage=24%, E-value=2e-32, Identity=71%"; Hit description =Catalytic/ hydrolase
AYMEAGVHKENARYKVIFVHGFASTKETXFPVSQVLVEELRIYMVFLDRXGYGDSDANPRRCLKSDATDVEELADALRLGEQSSNVGTD

SEQ ID NO: 128708 - protein, 71 aa, Setaria italica
  Transcript Sequence Number=SeqID_62734
LNSEYHHLYRWCLGDLWCFAEIISYYAYYSVFEEQEAASVSSALPAAEDTLERSTSLTMIADDVEEFLLTP

SEQ ID NO: 128709 - protein, 73 aa, Setaria italica
  Transcript Sequence Number=SeqID_62735
IFLLIHWKEWFLICLNMASMPIAIIQLGLVVYYTSGIMLMGGKLQLSFSFLLVTGNSALMKFFLKKSNYVWMS

SEQ ID NO: 128710 - protein, 39 aa, Setaria italica
  Transcript Sequence Number=SeqID_62736
DLERYMAAKQFDPTKDFPVPYVNTTVEEDDNTIGGGYQK

SEQ ID NO: 128711 - protein, 43 aa, Setaria italica
  Transcript Sequence Number=SeqID_62737
LNAKNVRFPFKCEHPYQVDRVLEYNLHFLHSIITSVSGRQSLG

SEQ ID NO: 128712 - protein, 76 aa, Setaria italica
  Transcript Sequence Number=SeqID_62738
  Gene Ontology: Mol. function=serine-type endopeptidase activity
FSVFTFLVFFWFGRLTVTPATLEFGELNETKSYKVVFQSKNSSAGAHGAGSKMQFGHIVWENDAHRVRSPVVFTWN

SEQ ID NO: 128713 - protein, 90 aa, Setaria italica
  misc_feature (55)..(55): Xaa can be any naturally occurring amino acid
  Transcript Sequence Number=SeqID_62739
  Gene Ontology: Mol. function=glutathione transferase activity
  Homolog annotation: Hit_ID=Q9ZP61; Match level="QueryCoverage=100%, HitCoverage=38%, E-value=1e-25, Identity=73%"; Hit description=GST6 protein
  Pfam annotation: Domain name=GST_N; Domain location=1-70; Score=19.5; E_value=0.011; Accession=PF02798.12; Description=Glutathione S -transferase, N-terminal domain
WVSPFGQRCRIALAEKGLPYEYLEQDLSNKSELLLRSNPIHKKIPVLLHDGRPVXEFPSILFVPSYYSYEAFPGQGAPLLPADPYARAQA

SEQ ID NO: 128714 - protein, 65 aa, Setaria italica
  Transcript Sequence Number=SeqID_62740
GELDKNRKRQDMSTAWDGAVREAMLHHPHHPVPCRRHVLPHLQPLPPQYQRPHRLRVREQNPMLM

SEQ ID NO: 128715 - protein, 82 aa, Setaria italica
  misc_feature (36)..(36): Xaa can be any naturally occurring amino acid
  Transcript Sequence Number=SeqID_62741
TLIRMIIFWRHACRSMGFCSRGCRDDYHLGELDKNXKRQAVALMGRSKMARIVTRVDAGKATEAGEASCSRPTFFTCAEEAE

SEQ ID NO: 128716 - protein, 43 aa, Setaria italica
  Transcript Sequence Number=SeqID_62742
SPVSRTPCSMYRSATLLDKVKMDYEIIFPYGALVSSIPSLPGT

SEQ ID NO: 128717 - protein, 148 aa, Setaria italica
  misc_feature (124)..(124): Xaa can be any naturally occurring amino acid
  Transcript Sequence Number=SeqID_62743
  Gene Ontology: Mol. function=binding; Cellular component =mitochondrial inner membrane; Biological process=transport
  Homolog annotation: Hit_ID=P29518; Match level="QueryCoverage=93%, HitCoverage=31%, E-value=3e-71, Identity=93%"; Hit description =Protein brittle-1, chloroplastic/amyloplastic
  Pfam annotation: Domain name=Mito_carr; Domain location=7-95; Score =107.7; E_value=3.8e-29; Accession=PF00153.19; Description =Mitochondrial carrier protein
VFVLIPSTFRRLVSGAIAGAVSRTFVAPLETIRTHLMVGSSGADSMAGVFQWIMQNEGWTGLFRGNAVNVLRVAPSKAIEHFTYDTAKKFLTPKADEPPKVPIPTPLVAGAMAGVASTLCTYPXELIKTRVTVEKDAYDNVAHAFVKI

SEQ ID NO: 128718 - protein, 124 aa, Setaria italica
  misc_feature (12)..(12): Xaa can be any naturally occurring amino acid
  misc_feature (34)..(34): Xaa can be any naturally occurring amino acid
  Transcript Sequence Number=SeqID_62744
  Gene Ontology: Mol. function=binding; Cellular component =mitochondrial inner membrane; Biological process=transport
  Homolog annotation: Hit_ID=P29518; Match level="QueryCoverage=83%, HitCoverage=23%, E-value=1e-48, Identity=92%"; Hit description =Protein brittle-1, chloroplastic/amyloplastic
  Pfam annotation: Domain name=Mito_carr; Domain location=1-72; Score =27.6; E_value=8.7e-06; Accession=PF00153.19; Description =Mitochondrial carrier protein
VAPLETIRTHLXMVGSSGADSMAGVFQWIMQNEXGWTGLFRGNAVNVLRVAPSKAIEHFTYDTAKKFLTPKADEPPKVPIPTPLVAGAMAGVASTLCTYPMELNTKNQGLTVRRKETNVNETKR

SEQ ID NO: 128719 - protein, 111 aa, Setaria italica
  misc_feature (17)..(17): Xaa can be any naturally occurring amino acid
  Transcript Sequence Number=SeqID_62745
NSLHLNTVVALFCIYMXLNSGIMVLTLDDPNFELLQESRLQIEYLKAQFSERISSISQFMHRNRTLTCVFCIVSHIHSAAVCVVRSYVARDNWSLFSGKIHAKLTRLLLTT

SEQ ID NO: 128720 - protein, 75 aa, Setaria italica
  Transcript Sequence Number=SeqID_62746
AALCMDYGVLRLVSLACILPEKRLQLSLATYDLTTQTAEWTSANMHQQLASLFTVYLLDTSAYRSKESLGQLVRP

SEQ ID NO: 128721 - protein, 70 aa, Setaria italica
  Transcript Sequence Number=SeqID_62747
AALCMDYGVLRLVSLACILPEKRLQLSLATYDLTTQTAEWTSANMHQQLASLFTVYLLDTSAYRSKESRL

SEQ ID NO: 128722 - protein, 122 aa, Setaria italica
  Transcript Sequence Number=SeqID_62748
  Gene Ontology: Mol. function=triacylglycerol lipase activity; Biological process=lipid metabolic process
  Homolog annotation: Hit_ID=Q1RN82; Match level="QueryCoverage=98%, HitCoverage=26%, E-value=5e-47, Identity=75%"; Hit description =Calmodulin binding heat shock protein
  Pfam annotation: Domain name=Lipase_3; Domain location=3-114; Score =57.3; E_value=5.9e-14; Accession=PF01764.17; Description=Lipase (class 3)
RFDGGYVHNGLLKAAEWGCLDAECDVLRDLLEKNPGYTLTFAGHSLGSGVVAMLALVAVHNRERLGGIERKMIRCFAMAPARCMSLNLAVRYADVINAVILQDDFLPRTDIPLEDIFKSLVW

SEQ ID NO: 128723 - protein, 92 aa, Setaria italica
  Transcript Sequence Number=SeqID_62749
VPKVKLKLSYLSSLANVNKSKETTIESSKPEGVQSICRNSTTIIGEDRVKGIQKPPIKHVYKRRGKKQQVTDEAINKSPSNKLDKGMGTRKQ

SEQ ID NO: 128724 - protein, 132 aa, Setaria italica
  Transcript Sequence Number=SeqID_62750
  Gene Ontology: Mol. function=protein serine/threonine kinase activity; Biological process=protein amino acid phosphorylation
  Homolog annotation: Hit_ID=Q53QC7; Match level="QueryCoverage=99%, HitCoverage=17%, E-value=6e-32, Identity=50%"; Hit description =Protein kinase domain containing protein, expressed
SPTRNDLQAIGCDTLALLAGREDGSYYTGCYTSCMSVDAAAKDDEECTGLGCCQMSIPTNLSTIHMSWGITSSYTPPNLAWGYSPCNYAFIVEKGRYHFKQRDLITHVANETLPDRFGDRTIPMVLDWAIRD

SEQ ID NO: 128725 - protein, 59 aa, Setaria italica
  Transcript Sequence Number=SeqID_62751
  Gene Ontology: Mol. function=protein serine/threonine kinase activity; Biological process=protein amino acid phosphorylation
  Homolog annotation: Hit_ID=Q53QC7; Match level="QueryCoverage=83%, HitCoverage=7%, E-value=7e-12, Identity=70%"; Hit description =Protein kinase domain containing protein, expressed
HVRQCIGCDTLAFLNGREDSSFFSGCITSCDSLHAAARDGEECTGLGCCQSSIPRTSPG

SEQ ID NO: 128726 - protein, 116 aa, Setaria italica
  Transcript Sequence Number=SeqID_62752
QVALLFALMFQVGDNATYYNMGGCKDMPGSCTSKSCRGHEVDIMHFEIGNAIPGRLYGGNHIDNAAGNGGDRFGHLVDVYAWNPHCRYLDGLGPKENNSNAQNDWHGDLGRTTSYN

SEQ ID NO: 128727 - protein, 111 aa, Setaria italica
  Transcript Sequence Number=SeqID_62753
YYEEPLKKQIGIQIYKQDAQFTIGQPSNMAVAFWYPTDGKEWSDSEHYSSSCNWLILDIQPSSEATYYRPAPNRSWDAVTGFALFLSVVAICLSIFVGHRVSKNRSAAQFT

SEQ ID NO: 128728 - protein, 147 aa, Setaria italica
  Transcript Sequence Number=SeqID_62754
  Gene Ontology: Mol. function=nucleoside-triphosphatase activity; Cellular component=intrinsic to membrane
  Homolog annotation: Hit_ID=B6TDW7; Match level="QueryCoverage=82%, HitCoverage=53%, E-value=2e-43, Identity=68%"; Hit description =Secretory protein
  Pfam annotation: Domain name=BSP; Domain location=29-147; Score=44.2; E_value=4.6e-10; Accession=PF04450.4; Description=Plant Basic Secretory Protein
STKYCKSCLSSFVRRFVYSLPCFALAATAGAIVTIDVTNTASNTLGGQRFDREVGLDFPRQIISEASMFIWMTFNQTNPADRKPVDAIALVVADVGGVAFTSNDVITLSAQYIGNYSGNVRIEVASVLFHETTHVWQWDGQGQASRG

SEQ ID NO: 128729 - protein, 58 aa, Setaria italica
  Transcript Sequence Number=SeqID_62755
  Gene Ontology: Mol. function=nucleoside-triphosphatase activity; Cellular component=intrinsic to membrane
  Homolog annotation: Hit_ID=B6TDW7; Match level="QueryCoverage=93%, HitCoverage=23%, E-value=5e-18, Identity=79%"; Hit description =Secretory protein
GLLPLTAMFLVYCDTLRPGFVALLNAKMRYGYTDDLFAQILGKDVQQLWQDYKAMYGA

SEQ ID NO: 128730 - protein, 76 aa, Setaria italica
  Transcript Sequence Number=SeqID_62756
  Gene Ontology: Mol. function=serine-type carboxypeptidase activity; Cellular component=extracellular region; Biological process =proteolysis
  Homolog annotation: Hit_ID=B6TM29; Match level="QueryCoverage=86%, HitCoverage=14%, E-value=1e-27, Identity=81%"; Hit description =Serine carboxypeptidase K10B2.2
RISNWYAWYDQGEVGGWCQVYKGLTLVTIRGAGHEVPLHRPRLGLKLFEHFLRDEPMPKPADSIQTFLECAISLDE

SEQ ID NO: 128731 - protein, 47 aa, Setaria italica
  Transcript Sequence Number=SeqID_62757
  Gene Ontology: Mol. function=serine-type carboxypeptidase activity; Cellular component=extracellular region; Biological process =proteolysis
  Homolog annotation: Hit_ID=P55747; Match level="QueryCoverage=80%, HitCoverage=11%, E-value=1e-11, Identity=89%"; Hit description =Serine carboxypeptidase II-1 chain B (Fragment)
LLDDFGSGDADSVVPLTATRYSIDALSLPTVTNWYPWYDNGEVSQRH

SEQ ID NO: 128732 - protein, 87 aa, Setaria italica
  Transcript Sequence Number=SeqID_62758
  Gene Ontology: Mol. function=serine-type carboxypeptidase activity; Cellular component=extracellular region; Biological process =proteolysis
  Homolog annotation: Hit_ID=B6TM29; Match level="QueryCoverage=59%, HitCoverage=11%, E-value=2e-20, Identity=92%"; Hit description =Serine carboxypeptidase K10B2.2
ASAKSPMAAAAAAALAAVLALSCCNVASATAEAEADRIASLPGQPPVNFSMYSGYVTVDAAAGRALFYWLIEAAGVPPESAPLVLWL

SEQ ID NO: 128733 - protein, 113 aa, Setaria italica
  Transcript Sequence Number=SeqID_62759
LTTSLAILTALLIMHHPSITAAATIAHHTTTPANASLAAGFSLQLVVPDHDDLDHTVRRGSDGFLHLQSLRTDLPPRPPSGAKQDYLRTDEDEPNQTLNEPKERNKKRKQTRT

SEQ ID NO: 128734 - protein, 96 aa, Setaria italica
  Transcript Sequence Number=SeqID_62760
  Homolog annotation: Hit_ID=Q9SBW9; Match level="QueryCoverage=59%, HitCoverage=55%, E-value=9e-23, Identity=92%"; Hit description=LIM1 protein
  Pfam annotation: Domain name=Tryp_alpha_amyl; Domain location=1-57; Score=27.9; E_value=4e-05; Accession=PF00234.14; Description =Protease inhibitorseed storageLTP f
PQLNRLLACRAYLVPGAPDPSADCCGALSAVSHECACSTMGIINSLPGRCSLAPVNCCKHQASTIQSFCHCITLLVKLLSMCSILWLSSLFVRAAA

SEQ ID NO: 128735 - protein, 53 aa, Setaria italica
  Transcript Sequence Number=SeqID_62761
  Homolog annotation: Hit_ID=B4FHR0; Match level="QueryCoverage=92%, HitCoverage=16%, E-value=3e-13, Identity=71%"; Hit description =Nuclear transcription factor Y subunit A-3
LILSSDNDEGHGKHNQFTVKPVLSMGKQGSAFSPPKLDYNASFACVPYNADAY

SEQ ID NO: 128736 - protein, 147 aa, Setaria italica
  misc_feature (129)..(129): Xaa can be any naturally occurring amino acid
  Transcript Sequence Number=SeqID_62762
  Pfam annotation: Domain name=DUF2052; Domain location=1-143; Score =58.2; E_value=3.2e-14; Accession=PF09747.1; Description=Coiled-coil domain containing protein
YFSEEAMREREPYLHHEYLGRFQDPLGRAMARPGERWSETLMRRAEEAVIVEKIRGEQIRRGVDPSEWVGGGPEEAMQEQEEEEEEEEEEEEEDEEEQSMKEKETEVVKPIATEVCILPIMILSKFSTXLYLFYSGCKLFVVDSVVG

SEQ ID NO: 128737 - protein, 65 aa, Setaria italica
  Transcript Sequence Number=SeqID_62763
HICELFQLILHFFTRQRLVESPCSRTSTIAGVHGGRLIGNNLQICQGRNSYHARAMHKKGRTTPR

SEQ ID NO: 128738 - protein, 80 aa, Setaria italica
  Transcript Sequence Number=SeqID_62764
LLIIIADKITSPPSKALELDWYALLYYCWYMQLNWRVSVRARLLDAVVRPVLAGELLLIRRGGGRRAGVDVPPPADGAGS

SEQ ID NO: 128739 - protein, 73 aa, Setaria italica
  Transcript Sequence Number=SeqID_62765
  Homolog annotation: Hit_ID=B6T8R2; Match level="QueryCoverage=100%, HitCoverage=32%, E-value=1e-22, Identity=72%"; Hit description=Cold acclimation WCOR413-like protein gamma form
  Pfam annotation: Domain name=WCOR413; Domain location=1-70; Score= -56.3; E_value=2e-05; Accession=PF05562.3; Description=Cold acclimation protein WCOR413
SAVLLLAKGTAIHKSFLVPFFALQAPCSIISWIKSDYGQWTAFLALLVRLFFFIPGELELPLSTMLCLDLPPW

SEQ ID NO: 128740 - protein, 63 aa, Setaria italica
  Transcript Sequence Number=SeqID_62766
  Gene Ontology: Mol. function=phosphoglycolate phosphatase activity; Biological process=metabolic process
SAFPDAQPFLRWAREKGLTVGIVSNAEYRYKDVILPALGLNQGSEWDFGVLNTQQGIGKAHRG

SEQ ID NO: 128741 - protein, 36 aa, Setaria italica
  Transcript Sequence Number=SeqID_62767
LETSAAFCHWLLANLHLHGNGRVRLDHRQLRRHEAV

SEQ ID NO: 128742 - protein, 132 aa, Setaria italica
  misc_feature (123)..(124): Xaa can be any naturally occurring amino acid
  Transcript Sequence Number=SeqID_62768
  Gene Ontology: Mol. function=binding
  Homolog annotation: Hit_ID=Q9M7X4; Match level="QueryCoverage=91%, HitCoverage=13%, E-value=3e-20, Identity=45%"; Hit description =F3E22.19 protein
SSNISAESKSKLVLFLHEFCTLSRSLHPDQQWHLSMDLVRKGVFDIIYDVLRSQNKVLVSAGMNVLKHFLDQDPNFLRTFIAHHEENYQEGDSLLGVLVQGMVIGSGEELRCQSCLMTLLDPXXPRQLGIVK

SEQ ID NO: 128743 - protein, 85 aa, Setaria italica
  Transcript Sequence Number=SeqID_62769
LLNCFGKYSDNCTRLLTIGQYKSAVRSSMNPIVTAFSLFCRVESGVHLLVAIYMESHLLVAIYMDMNTIASTAIQGLDSAKINLL

SEQ ID NO: 128744 - protein, 92 aa, Setaria italica
  misc_feature (85)..(85): Xaa can be any naturally occurring amino acid
  misc_feature (87)..(87): Xaa can be any naturally occurring amino acid
  Transcript Sequence Number=SeqID_62770
  Gene Ontology: Mol. function=DNA binding; Cellular component=nucleus; Biological process=transcription from RNA polymerase II promoter
  Homolog annotation: Hit_ID=Q5W7C5; Match level="QueryCoverage=86%, HitCoverage=7%, E-value=1e-31, Identity=82%"; Hit description=Unknow protein
YSQYLNHEEANKEAAINQVVSGALDRLHYERDPCVLYDNDKKLWTYLHRGREEEDFEDDGTSSTKKWKRPRKDPSDSAEPGAANXDXDDDGT

SEQ ID NO: 128745 - protein, 63 aa, Setaria italica
  Transcript Sequence Number=SeqID_62771
MGKESKKKPESTTDAVTVAEPAADVPENNVVAVEPEKLEKPEKIEKPKKKYVPISPTIHTGFS

SEQ ID NO: 128746 - protein, 43 aa, Setaria italica
  Transcript Sequence Number=SeqID_62772
RRSTLTSQGCSHMLMLGQYRSIYLITDKDTSRINIGSKLFDGR

SEQ ID NO: 128747 - protein, 70 aa, Setaria italica
  Transcript Sequence Number=SeqID_62773
TITKWSVSRLNHEVRADIASSFLFDSHAASDRNLSNGRPAATNAINQSSPDGMHSLNAVFLLIDTVLNNM

SEQ ID NO: 128748 - protein, 100 aa, Setaria italica
  misc_feature (45)..(45): Xaa can be any naturally occurring amino acid
  misc_feature (58)..(58): Xaa can be any naturally occurring amino acid
  Transcript Sequence Number=SeqID_62774
MQTSAGATMLTDVTFWGLLVPFFYRDKFGLSLVTDGMHSLNAVFXLIDTVLNNMPFPXYRMAFFVFWSCAYVTFQWVLHACGGLSWWPYPFLDLSSSGRP

SEQ ID NO: 128749 - protein, 59 aa, Setaria italica
  Transcript Sequence Number=SeqID_62775
EDYAFFIYTKLAVHIQCLISWYLVHQNFTQVTDGMHSLNAVFLLIDTVLNNMVRLLIKL

SEQ ID NO: 128750 - protein, 96 aa, Setaria italica
  Transcript Sequence Number=SeqID_62776
  Subcellular localization annotation: CTP_CleavageSite=33; ConfidenceScore=5.35e-01
KTTKASPVKRPFLLTRRQSTISSPAKNLQMSISLQSKGSPRSRRYVEVFRCKKQEYYCAIANEVNQGGYFEPEYRRSPPPPRPRSFSTSVYSMLPL

SEQ ID NO: 128751 - protein, 47 aa, Setaria italica
  Transcript Sequence Number=SeqID_62777
TRLLPDPVNAGSPLDVSKRARMMEPGPPYFGAMGSNAGGASGGFYQP

SEQ ID NO: 128752 - protein, 72 aa, Setaria italica
  Transcript Sequence Number=SeqID_62778
  Homolog annotation: Hit_ID=B9S1M7; Match level="QueryCoverage=51%, HitCoverage=10%, E-value=3e-10, Identity=62%"; Hit description =Clathrin binding protein, putative
MVEANRDELACPIKNQFKSIQLIDCQYYSACLQQIAPNGWAEGECRGKAGWFPAAYVERRENIPPNKVFPQA

SEQ ID NO: 128753 - protein, 39 aa, Setaria italica
  Transcript Sequence Number=SeqID_62779
TEDAALHMYNYHRCIYHVLAGSIGRRLSLSLPLLLTPFE

SEQ ID NO: 128754 - protein, 55 aa, Setaria italica
  Transcript Sequence Number=SeqID_62780
RVREAPIPEHTTKLQQSEAKMIEHKASMAVLGKEPAAEGLPVAAEIQQPQAQLLL

SEQ ID NO: 128755 - protein, 88 aa, Setaria italica
  Transcript Sequence Number=SeqID_62781
FLLPGTTVRPSLKDARTANKRPSIYGAETYLAWFCRADNANEEAAKQSVVEMTEDEGQRRSGGQIVGSRWSILSEPQTKFSPPIWFYP

SEQ ID NO: 128756 - protein, 71 aa, Setaria italica
  Transcript Sequence Number=SeqID_62782
TKSSLSIYGAETYLAWFCRADNANEEAAKQSVVEMTEDEGQRRSGGQIVGSRWSILSEPQTKFSPPIWFYP

SEQ ID NO: 128757 - protein, 27 aa, Setaria italica
  Transcript Sequence Number=SeqID_62783
ALNQYKALWTKHVDTEMEFLTLCNFGL

SEQ ID NO: 128758 - protein, 80 aa, Setaria italica
  misc_feature (12)..(12): Xaa can be any naturally occurring amino acid
  Transcript Sequence Number=SeqID_62784
  Homolog annotation: Hit_ID=B6UCK4; Match level="QueryCoverage=95%, HitCoverage=10%, E-value=1e-19, Identity=71%"; Hit description =Catalytic/ ligase
SSIEIERICLTXVNDAILETAAIGVPPIGGGPEQLTIAVVLKDQSSQVEDLNQLKLAFNVALKKLNPLFKVSPLFMPICR

SEQ ID NO: 128759 - protein, 67 aa, Setaria italica
  Transcript Sequence Number=SeqID_62785
PPRRPSPRSPRPPTRPRPRPRHPGPAATEGGAAAEAKGPHKLHRQWTFWYDIQSKPKPGAAWGTSLK

SEQ ID NO: 128760 - protein, 53 aa, Setaria italica
  Transcript Sequence Number=SeqID_62786
RLGLGLDGAGGVFFSVATFIRFSLSLPEAIFPIYYDVILLSSISFLYYIGLFL

SEQ ID NO: 128761 - protein, 98 aa, Setaria italica
  misc_feature (54)..(54): Xaa can be any naturally occurring amino acid
  misc_feature (72)..(72): Xaa can be any naturally occurring amino acid
  Transcript Sequence Number=SeqID_62787
  Homolog annotation: Hit_ID=Q6Z5I0; Match level="QueryCoverage=96%, HitCoverage=12%, E-value=1e-19, Identity=59%"; Hit description=Ent -copalyl diphosphate synthase 2
FLKRGEKDSTAEDGLLNALNDLIDHLTSGNASDSLQGAWKQWLMEWTAENGSYXRDTALLLVRSVEICSGSXGSTEQNQKLPEYSQLEQLTYSICSKL

SEQ ID NO: 128762 - protein, 124 aa, Setaria italica
  misc_feature (38)..(38): Xaa can be any naturally occurring amino acid
  Transcript Sequence Number=SeqID_62788
  Gene Ontology: Mol. function=acyltransferase activity; Cellular component=integral to membrane; Biological process=metabolic process
  Homolog annotation: Hit_ID=B9S2F2; Match level="QueryCoverage=88%, HitCoverage=21%, E-value=5e-49, Identity=79%"; Hit description=ER glycerol-phosphate acyltransferase
NGLPGQRRPLRADHQVVPVAMENQMSMFHGTTARGWKXLDPFYFFMNPSPGYVVTFLNKLPAELTCSGGRSSHEVANYIQRLIASTLSYECTSFTRKDKYKALAGNDGTVVSKPNIDKKQVMGC

SEQ ID NO: 128763 - protein, 123 aa, Setaria italica
  misc_feature (77)..(77): Xaa can be any naturally occurring amino acid
  misc_feature (105)..(105): Xaa can be any naturally occurring amino acid
  misc_feature (107)..(107): Xaa can be any naturally occurring amino acid
  Transcript Sequence Number=SeqID_62789
  Gene Ontology: Mol. function=protein serine/threonine phosphatase activity; Cellular component=protein serine/threonine phosphatase complex; Biological process=protein amino acid dephosphorylation
  Homolog annotation: Hit_ID=B6U271; Match level="QueryCoverage=70%, HitCoverage=22%, E-value=5e-25, Identity=64%"; Hit description =Protein phosphatase 2C ABI1
TWNLVNHSKCSICSHACLHLDKLLPYRLSSIYLDRPLNFFDVSAISGDYFMKPSISAEPEVTVTDRTGTDEFIILGXDGLWDAMSNEYACRVVRYCLSGRLAAKXPXTVHGSSATDAAKLLAA

SEQ ID NO: 128764 - protein, 119 aa, Setaria italica
  misc_feature (99)..(100): Xaa can be any naturally occurring amino acid
  Transcript Sequence Number=SeqID_62790
  Gene Ontology: Mol. function=protein serine/threonine phosphatase activity; Cellular component=protein serine/threonine phosphatase complex; Biological process=protein amino acid dephosphorylation
  Homolog annotation: Hit_ID=B6U271; Match level="QueryCoverage=86%, HitCoverage=25%, E-value=2e-36, Identity=73%"; Hit description =Protein phosphatase 2C ABI1
  Pfam annotation: Domain name=PP2C; Domain location=1-119; Score= -63.3; E_value=0.033; Accession=PF00481.13; Description=Protein phosphatase 2C
NVKVNEPKLRTGNYPTTVLCRGGVAVPLSTDHKPERPDELARIESVGGQVIYWQGPRVLGVLAMSRSIGDYFMKPSISAEPEVTVTDRTGTDEFIILGXXDGWWDAMSNEYACRVVRYC

SEQ ID NO: 128765 - protein, 78 aa, Setaria italica
  Transcript Sequence Number=SeqID_62791
  Homolog annotation: Hit_ID=Q8SAT5; Match level="QueryCoverage=100%, HitCoverage=8%, E-value=4e-27, Identity=76%"; Hit description =Putative membrane-associated salt-inducible protein
LCDVIKASCADCRLSCGLTVMRYSLRVGCELGRSAYCSLLGQYIRNGSFDLVVEIVEGLIKSGYNLGTYLSAILILRL

SEQ ID NO: 128766 - protein, 71 aa, Setaria italica
  misc_feature (21)..(21): Xaa can be any naturally occurring amino acid
  Transcript Sequence Number=SeqID_62792
ESLGAPKNSQTETTSLHWIHXFPLASMLSLLMLAAGSLLEAEPRGIRHVVLPGLAAAAAYLLGTDKLQYVR

SEQ ID NO: 128767 - protein, 107 aa, Setaria italica
  Transcript Sequence Number=SeqID_62793
  Homolog annotation: Hit_ID=Q259K5; Match level="QueryCoverage=100%, HitCoverage=15%, E-value=6e-14, Identity=36%"; Hit description =H0402C08.8 protein
QVNEEPTVGEEAYVWFGSVFPLACDVVNARFTFEALTATTANRLHYPAYDKFLKEMDKSFKFLQNLPTPTGIEFAEDEFILHMEGTAGTQRVVRHIGTSSWPGRVTL

SEQ ID NO: 128768 - protein, 69 aa, Setaria italica
  Transcript Sequence Number=SeqID_62794
  Gene Ontology: Mol. function=serine-type endopeptidase inhibitor activity; Cellular component=extracellular region
  Homolog annotation: Hit_ID=P81368; Match level="QueryCoverage=97%, HitCoverage=56%, E-value=3e-15, Identity=61%"; Hit description=Alpha- amylase inhibitor 5
SVPYCRCGALRIMMDGMPAGGGVVASPSCSWAAQLDLAATLVSEAECNLVTIHGRPFCYALGAEGTTSG

SEQ ID NO: 128769 - protein, 164 aa, Setaria italica
  misc_feature (137)..(137): Xaa can be any naturally occurring amino acid
  Transcript Sequence Number=SeqID_62795
  Gene Ontology: Mol. function=transferase activity, transferring glycosyl groups; Cellular component=integral to membrane; Biological process=protein amino acid glycosylation
  Homolog annotation: Hit_ID=B6TIX7; Match level="QueryCoverage=96%, HitCoverage=38%, E-value=9e-79, Identity=85%"; Hit description=Beta -1,3-galactosyltransferase sqv-2
  Pfam annotation: Domain name=Galactosyl_T; Domain location=2-164; Score=105.4; E_value=1.9e-28; Accession=PF01762.13; Description =Galactosyltransferase
CWFRLSLIGHSATPGGALDRAVNVEAAATGDFLRLDHVEGYHELSAKTRAYFATAVATWDAEFYVKVDDDVHVNLGMLATRLAKYRARPRVYVGCMKSGPVLSQKGVKYHEPEYWKFGDEGNKYFRHATGQIYAVSXDLASYISINQPILHRFANEDVSLGAWL

SEQ ID NO: 128770 - protein, 91 aa, Setaria italica
  misc_feature (79)..(79): Xaa can be any naturally occurring amino acid
  Transcript Sequence Number=SeqID_62796
  Gene Ontology: Mol. function=transferase activity, transferring glycosyl groups; Cellular component=integral to membrane; Biological process=protein amino acid glycosylation
  Homolog annotation: Hit_ID=B6TIX7; Match level="QueryCoverage=95%, HitCoverage=20%, E-value=2e-39, Identity=88%"; Hit description=Beta -1,3-galactosyltransferase sqv-2
LTDQRPTGPRIYAISKDLAAYISINQPILHRFANEDVSLGAWLIGLEVEHVDDRSMCCATPPDCEWKKRAGNVCVASFXWSCSGVCSRWTR

SEQ ID NO: 128771 - protein, 57 aa, Setaria italica
  misc_feature (35)..(35): Xaa can be any naturally occurring amino acid
  Transcript Sequence Number=SeqID_62797
  Gene Ontology: Mol. function=peptidase activity; Cellular component =extracellular region; Biological process=defense response
  Homolog annotation: Hit_ID=Q39807; Match level="QueryCoverage=100%, HitCoverage=72%, E-value=2e-14, Identity=68%"; Hit description =Protease inhibitor
  Pfam annotation: Domain name=Defensin_2; Domain location=20-54; Score= 11.5; E_value=0.048; Accession=PF01097.10; Description=Arthropod defensin
  Pfam annotation: Domain name=Gamma-thionin; Domain location=11-57; Score=72.4; E_value=1.7e-18; Accession=PF00304.12; Description=Gamma- thionins family
  Pfam module annotation: Pfam domain module=Defensin_2::Gamma-thionin; Domain location=20-54::11-57
MQGPVRVAVARQCQSQSHRYKGPCVHDTNCASVCXTEGFTRGKCVGFRGRCFCLKAC

SEQ ID NO: 128772 - protein, 45 aa, Setaria italica
  Transcript Sequence Number=SeqID_62798
EFETKKNLLSGCLFYSYAHAISRCIHVVSIDRNKRCMHRLMGMSI

SEQ ID NO: 128773 - protein, 64 aa, Setaria italica
  Transcript Sequence Number=SeqID_62799
  Gene Ontology: Mol. function=sugar:hydrogen symporter activity; Cellular component=mitochondrial inner membrane; Biological process =mitochondrial transport
  Homolog annotation: Hit_ID=Q6E5A5; Match level="QueryCoverage=67%, HitCoverage=10%, E-value=8e-18, Identity=95%"; Hit description =Plastidial ADP-glucose transporter
  Pfam annotation: Domain name=Mito_carr; Domain location=1-46; Score =3.5; E_value=0.0015; Accession=PF00153.19; Description=Mitochondrial carrier protein
MYCILKKEGAAGLYRGLGPSCIKLMPAAGISFMCYEACKNILVDKEDEEEDGEAGDGDEDKKAA

SEQ ID NO: 128774 - protein, 55 aa, Setaria italica
  Transcript Sequence Number=SeqID_62800
  Gene Ontology: Mol. function=sugar:hydrogen symporter activity; Cellular component=mitochondrial inner membrane; Biological process =mitochondrial transport
  Homolog annotation: Hit_ID=Q6E5A5; Match level="QueryCoverage=56%, HitCoverage=7%, E-value=1e-11, Identity=100%"; Hit description =Plastidial ADP-glucose transporter
RRCLYRGLGPSCIKLMPAAGISFMCYEACKKILVDKEDEEEDGEAGDGDEDKKAA

SEQ ID NO: 128775 - protein, 72 aa, Setaria italica
  Transcript Sequence Number=SeqID_62801
  Gene Ontology: Mol. function=sugar:hydrogen symporter activity; Cellular component=mitochondrial inner membrane; Biological process =mitochondrial transport
  Homolog annotation: Hit_ID=Q6E5A5; Match level="QueryCoverage=95%, HitCoverage=16%, E-value=2e-31, Identity=91%"; Hit description =Plastidial ADP-glucose transporter
  Pfam annotation: Domain name=Mito_carr; Domain location=3-70; Score =44.2; E_value=5.2e-10; Accession=PF00153.19; Description =Mitochondrial carrier protein
VGRRKQMQVGAVGGRQVYRNVLHAMYCILKKEGAAGLYRGLGPSCIKLMPAAGISFMCYEACKKILVDKEDE

SEQ ID NO: 128776 - protein, 123 aa, Setaria italica
  misc_feature (91)..(91): Xaa can be any naturally occurring amino acid
  misc_feature (115)..(115): Xaa can be any naturally occurring amino acid
  Transcript Sequence Number=SeqID_62802
  Gene Ontology: Mol. function=unfolded protein binding; Cellular component=prefoldin complex; Biological process=regulation of transcription, DNA-dependent
  Homolog annotation: Hit_ID=B6T6M5; Match level="QueryCoverage=86%, HitCoverage=55%, E-value=3e-50, Identity=92%"; Hit description =Mediator complex subunit 10 CG5057-PA
  Pfam annotation: Domain name=Med10; Domain location=1-100; Score =97.9; E_value=3.6e-26; Accession=PF09748.1; Description =Transcription factor subunit Med10
TQRLTPLLPRRPRNDDYVAELDTMQKLAEGCNIQVPMEVVNLIDDGKNPDEFTRDVLNSCIAKNQITKGKTDAFKSLRKHLLEELEQAFPXEDVEQYREIRATSAAEAKRLAQSXQSSLPNGD

SEQ ID NO: 128777 - protein, 108 aa, Setaria italica
  Transcript Sequence Number=SeqID_62803
  Gene Ontology: Cellular component=nucleus
  Homolog annotation: Hit_ID=B6U0H4; Match level="QueryCoverage=85%, HitCoverage=18%, E-value=8e-39, Identity=81%"; Hit description=SET domain containing protein
MQINPSLSFMFMLYAQVVAETKIEKNAAITLNYGCHPNDFFLLDYGFVIAPNPYDLVELSYDGALFDAASMAAGVSSPNFSAPAKWQQDILSQLNLHGEGAIFEGFPP

SEQ ID NO: 128778 - protein, 102 aa, Setaria italica
  Transcript Sequence Number=SeqID_62804
  Gene Ontology: Cellular component=nucleus
  Homolog annotation: Hit_ID=B6U0H4; Match level="QueryCoverage=61%, HitCoverage=12%, E-value=2e-24, Identity=85%"; Hit description=SET domain containing protein
LCAIALQHFHTKIMEDEAILKGEPPLTTELAVQFRLQKKFLIVDVMQNISRKIKMLSPQKSTAWGFIITHSNQYRKVINCKTKAHPLDDGDVTFQCQALEVV

SEQ ID NO: 128779 - protein, 51 aa, Setaria italica
  Transcript Sequence Number=SeqID_62805
ERLLALQAMYSYIISPRGSSNTSHAIYTILHGITSLGSNPRPPASAALVPP

SEQ ID NO: 128780 - protein, 44 aa, Setaria italica
  Transcript Sequence Number=SeqID_62806
RTSRSSLPQWVNACLRHELRDHDGHPTTEQQDHHHRPLSSDYLK

SEQ ID NO: 128781 - protein, 63 aa, Setaria italica
  Transcript Sequence Number=SeqID_62807
IMSVPHMSAHICVHAHICAHSCLVRQLNNVCTTIAIVLYVPLFINVYCHHCAIRPRSTIKVLL

SEQ ID NO: 128782 - protein, 36 aa, Setaria italica
  Transcript Sequence Number=SeqID_62808
SCSISPSTSPSSSTTATRTTAHVLHIRSTSIGRADE

SEQ ID NO: 128783 - protein, 90 aa, Setaria italica
  Transcript Sequence Number=SeqID_62809
  Gene Ontology: Mol. function=nucleic acid binding; Cellular component= cytoplasm; Biological process=multicellular organismal development
  Homolog annotation: Hit_ID=Q851R2; Match level="QueryCoverage=93%, HitCoverage=8%, E-value=2e-38, Identity=82%"; Hit description =Protein argonaute MEL1
FPDHRRRDLTDRSGNILPGTVVDTDVCHPSEFDFYLCSHAGIQGTSRPTHYHVLCDENHFSADALQMLTNNLCYTYACCTRSISSCSNRT

SEQ ID NO: 128784 - protein, 69 aa, Setaria italica
  misc_feature (29)..(29): Xaa can be any naturally occurring amino acid
  Transcript Sequence Number=SeqID_62810
  Gene Ontology: Mol. function=nucleic acid binding; Cellular component= cytoplasm; Biological process=multicellular organismal development
  Homolog annotation: Hit_ID=Q851R2; Match level="QueryCoverage=100%, HitCoverage=6%, E-value=3e-32, Identity=85%"; Hit description =Protein argonaute MEL1
RDLTDRSGNILPGTVVDTDVCHPSEFDFXLCSHAGIQGTSRPTHYHVLCDENHFSADALQMLTNNLCYT

SEQ ID NO: 128785 - protein, 75 aa, Setaria italica
  Transcript Sequence Number=SeqID_62811
  Gene Ontology: Mol. function=nucleic acid binding; Cellular component= cytoplasm; Biological process=multicellular organismal development
  Homolog annotation: Hit_ID=B9SCN8; Match level="QueryCoverage=98%, HitCoverage=7%, E-value=3e-23, Identity=71%"; Hit description =Eukaryotic translation initiation factor 2c, putative
SRPTHYHVLCDENHFSADALQMLTNNLCYTYACCTRSISVVPPAYYAHLAASRARYYDEQARRDDRIGRPTSTTK

SEQ ID NO: 128786 - protein, 34 aa, Setaria italica
  misc_feature (3)..(3): Xaa can be any naturally occurring amino acid
  Transcript Sequence Number=SeqID_62812
FFXFFVFTNGFIHVKNERICMNCLWLTTSITSFE

SEQ ID NO: 128787 - protein, 95 aa, Setaria italica
  Transcript Sequence Number=SeqID_62813
  Gene Ontology: Mol. function=protein binding; Biological process =ubiquitin-dependent protein catabolic process
  Homolog annotation: Hit_ID=B6U845; Match level="QueryCoverage=98%, HitCoverage=28%, E-value=2e-44, Identity=92%"; Hit description =Ubiquitin-protein ligase
SQHLLPDALGLIFRNLPLQEVLTVVPRVCKSWGRVVAGPYCWQEIDIEEWSQQQSKPEQIGRMVEMLVGRSGGSCRRISVSGLPCDPLLSFIGDR

SEQ ID NO: 128788 - protein, 81 aa, Setaria italica
  Transcript Sequence Number=SeqID_62814
FSQHSTRQLYSKKLLMMLMFSDTIRPDDVGLWDEISFFNEMNTHRHQNPPIITCKTIHQCNNFTVTIWIDRAMHNLSEIIS

SEQ ID NO: 128789 - protein, 64 aa, Setaria italica
  Transcript Sequence Number=SeqID_62815
YLQQPTNNRQPDKKQRACTYYQESSHERSVMRGGRMSRLVWLKEVPVPRNLRIVNLRFQGSQIL

SEQ ID NO: 128790 - protein, 59 aa, Setaria italica
  Transcript Sequence Number=SeqID_62816
  Homolog annotation: Hit_ID=B6TX94; Match level="QueryCoverage=69%, HitCoverage=13%, E-value=3e-15, Identity=85%"; Hit description=Cupin, RmlC-type
  Pfam annotation: Domain name=DUF1637; Domain location=1-59; Score= -93.4; E_value=0.0043; Accession=PF07847.4; Description=Protein of unknown function (DUF1637)
HVQLFCTHISILQIAVFFLPLRSVMPLHDHPGMTVFSKLLIGSARLEAYDWVRPRILTT

SEQ ID NO: 128791 - protein, 114 aa, Setaria italica
  Transcript Sequence Number=SeqID_62817
  Homolog annotation: Hit_ID=C0L973; Match level="QueryCoverage=63%, HitCoverage=43%, E-value=1e-14, Identity=63%"; Hit description=Delta- coixin
  Subcellular localization annotation: CTP_CleavageSite=70; ConfidenceScore=5.57e-01
MASRIALVVLLALSAVATTTATCPQNFPLMMGIGMMDPCMQSCMMQQPFTMVSSFSPIMGMGSMVPCMQSCMMQRAFTIGGSPLLAMLMQQSPLAMLQQQCCMQSMMQGIDCST

SEQ ID NO: 128792 - protein, 48 aa, Setaria italica
  Transcript Sequence Number=SeqID_62818
MEVMRWRRRRNRSSRVQFQGIEFQKKAEGDEASKVVPPEIAEKSRPCG

SEQ ID NO: 128793 - protein, 42 aa, Setaria italica
  Transcript Sequence Number=SeqID_62819
DVCLDSNVMLHSFHSVVTRMMLMDGMIACSPSTRTTCYSFLS

SEQ ID NO: 128794 - protein, 85 aa, Setaria italica
  Transcript Sequence Number=SeqID_62820
  Gene Ontology: Mol. function=indole-3-acetate beta-glucosyltransferase activity; Biological process=metabolic process
  Homolog annotation: Hit_ID=Q41819; Match level="QueryCoverage=76%, HitCoverage=13%, E-value=4e-19, Identity=81%"; Hit description =Indole-3-acetate beta-glucosyltransferase
DDAAGVFPRGEVERCVRAVMDEGEGAAAMRETAGKWRDRARAAVAPGGSSDRSLDEFVEFVRAGAAAEKWKALVLEGSEPEGSEM

SEQ ID NO: 128795 - protein, 85 aa, Setaria italica
  Transcript Sequence Number=SeqID_62821
SEPYATSKLVEPPHLGSSMHASCGEGERPNPSHHVIVPGRSGHHKQSKPSVCSCIRLFVVHHISDPSGSLPSRTSAFHFSAAAPA

SEQ ID NO: 128796 - protein, 144 aa, Setaria italica
  misc_feature (13)..(13): Xaa can be any naturally occurring amino acid
  misc_feature (61)..(61): Xaa can be any naturally occurring amino acid
  Transcript Sequence Number=SeqID_62822
  Gene Ontology: Mol. function=protein serine/threonine kinase activity; Cellular component=intracellular; Biological process =protein amino acid phosphorylation
  Homolog annotation: Hit_ID=A3FK65; Match level="QueryCoverage=100%, HitCoverage=28%, E-value=1e-73, Identity=89%"; Hit description =Mitogen-activated protein kinase kinase 3
  Pfam annotation: Domain name=Pkinase; Domain location=3-144; Score= -36.1; E_value=2.4e-06; Accession=PF00069.17; Description=Protein kinase domain
  Pfam annotation: Domain name=Pkinase_Tyr; Domain location=3-144; Score=-170.4; E_value=0.021; Accession=PF07714.9; Description =Protein tyrosine kinase
  Pfam module annotation: Pfam domain module=Pkinase::Pkinase_Tyr; Domain location=3-144::3-144
IPELVLSHMLQKXLLGLRYLHEVRHLVHRDIKPANLLVNLKGEAKITDFGVSAGLDNTMAXGTVTYMSPERIRIENYSYAADIWSLGLTILECATGKFPYDVNEGPANLMLQILDDPSPTPPQDAYSSEFCSFVNDCLQKDADA

SEQ ID NO: 128797 - protein, 36 aa, Setaria italica
  misc_feature (18)..(18): Xaa can be any naturally occurring amino acid
  Transcript Sequence Number=SeqID_62823
  Homolog annotation: Hit_ID=A8IK93; Match level="QueryCoverage=77%, HitCoverage=12%, E-value=8e-10, Identity=92%"; Hit description =Mitogen-activated protein kinase family protein (Fragment)
HILFFTLFQMLAIHYYLXFNGSDGIWHHMKTFYMEQ

SEQ ID NO: 128798 - protein, 58 aa, Setaria italica
  Transcript Sequence Number=SeqID_62824
  Gene Ontology: Mol. function=protein serine/threonine kinase activity; Cellular component=intracellular; Biological process =protein amino acid phosphorylation
  Homolog annotation: Hit_ID=A3FK65; Match level="QueryCoverage=81%, HitCoverage=8%, E-value=5e-21, Identity=93%"; Hit description =Mitogen-activated protein kinase kinase 3
IVLSKPALTPKSMCATFVGTVTYMSPERIRNENYSYAADIWSLGLTILECATGKFPYD

SEQ ID NO: 128799 - protein, 92 aa, Setaria italica
  Transcript Sequence Number=SeqID_62825
ALIQTNISTTDKLNLHCQLDNRTAEPTKQIKNVITKEGITSNRKHNDKHHRLDKRQHCYTGNKRQTVHNSFWLHPFFIRGKTGCHISNNGRH

SEQ ID NO: 128800 - protein, 134 aa, Setaria italica
  misc_feature (22)..(22): Xaa can be any naturally occurring amino acid
  Transcript Sequence Number=SeqID_62826
  Gene Ontology: Mol. function=catalytic activity; Biological process =DNA integration
  Homolog annotation: Hit_ID=B8B5M4; Match level="QueryCoverage=47%, HitCoverage=13%, E-value=1e-09, Identity=55%"; Hit description =Superoxide dismutase [Cu-Zn]
NKGKQKLSIKVVAVGRDTIHEXLMGTIREVKFSNKDCKLDCKDLHWSTCKIKKVGIGGPLIDFDGSFVGMNFYDESSATPFLPRSKVVHALRSAYNSILPSERGCNPRAINVVSRGRKTQGNILDDRWPVSKAQ

SEQ ID NO: 128801 - protein, 108 aa, Setaria italica
  misc_feature (50)..(50): Xaa can be any naturally occurring amino acid
  misc_feature (84)..(84): Xaa can be any naturally occurring amino acid
  Transcript Sequence Number=SeqID_62827
  Gene Ontology: Mol. function=catalytic activity
AALGGTLVGHDWIFDGMVIDLVEYGGAACIIEREFLCTRLELLLACNPKXLRSRDYSLPSGVSSIIPSGFMKTIYRLRSFGYPXPPPLVLECKFFVFDYFGCRMCSSL

SEQ ID NO: 128802 - protein, 110 aa, Setaria italica
  misc_feature (15)..(15): Xaa can be any naturally occurring amino acid
  misc_feature (40)..(40): Xaa can be any naturally occurring amino acid
  Transcript Sequence Number=SeqID_62828
  Homolog annotation: Hit_ID=B6T476; Match level="QueryCoverage=80%, HitCoverage=49%, E-value=2e-12, Identity=48%"; Hit description =Membrane protein
DDDHPWKCFRSCTKXCHHHDAVAANKECNVSAVVSGECKXGCHDDDCFEDVPTMGYPQCVYTACLSYPRRIREKRACLKKCCEKCFRHSPPAPGPSPTPEPPSPTPPSPT

SEQ ID NO: 128803 - protein, 74 aa, Setaria italica
  Transcript Sequence Number=SeqID_62829
  Subcellular localization annotation: CTP_CleavageSite=59; ConfidenceScore=5.31e-01
IDIQLSVFQNDPDGYSSSQVGFLCGSPPVRTNNPVIHDPLFGERVPSFSPLGSSFGKTLAGRVEVGSPSCGVSS

SEQ ID NO: 128804 - protein, 48 aa, Setaria italica
  Transcript Sequence Number=SeqID_62830
MEHCYLRQPLSRAEAMPERRSRFWPMDSPPTPRAEVICPQPRRATRIP

SEQ ID NO: 128805 - protein, 42 aa, Setaria italica
  Transcript Sequence Number=SeqID_62831
RAPRLYTSYSSLRLCSFKCHNLKGKGNSNQASLKVLLISCTA

SEQ ID NO: 128806 - protein, 66 aa, Setaria italica
  Transcript Sequence Number=SeqID_62832
  Gene Ontology: Mol. function=catalytic activity; Biological process =cellular metabolic process
  Homolog annotation: Hit_ID=B6TY10; Match level="QueryCoverage=81%, HitCoverage=16%, E-value=1e-11, Identity=61%"; Hit description =Dihydroflavonol-4-reductase
CGLYYLCTGDRLVKMKLRNFVDVRDVADALLLVYETQEASGRYICNSHPKHVSEVIKLLKSWYPAY

SEQ ID NO: 128807 - protein, 119 aa, Setaria italica
  misc_feature (41)..(41): Xaa can be any naturally occurring amino acid
  Transcript Sequence Number=SeqID_62833
  Gene Ontology: Cellular component=integral to membrane; Biological process=nodulation
  Homolog annotation: Hit_ID=B6SGD1; Match level="QueryCoverage=92%, HitCoverage=93%, E-value=2e-24, Identity=54%"; Hit description=Early nodulin 93
  Pfam annotation: Domain name=ENOD93; Domain location=12-90; Score =165.5; E_value=1.6e-46; Accession=PF03386.6; Description=Early nodulin 93 ENOD93 protein
MPTPATRKSLDEQRALAKQCSREAALAGAKAAAIATVATAXPTLASVRMSRWAKANINPAGQALIISTVAGMAYFIAADKKVLSLARQHSYENAPEDNLQGNNLPNRGQPVRTTNPYLT

SEQ ID NO: 128808 - protein, 70 aa, Setaria italica
  Transcript Sequence Number=SeqID_62834
RLRVPPLHARHVYSRIRDEKQWIRSAKSLNQTKMQSLCVHSDSVAVCDTECVYLASIAWLGHAARQGNLR

SEQ ID NO: 128809 - protein, 71 aa, Setaria italica
  Transcript Sequence Number=SeqID_62835
  Homolog annotation: Hit_ID=B6SGD1; Match level="QueryCoverage=77%, HitCoverage=47%, E-value=2e-19, Identity=76%"; Hit description=Early nodulin 93
  Pfam annotation: Domain name=ENOD93; Domain location=5-45; Score=0.5; E_value=0.0072; Accession=PF03386.6; Description=Early nodulin 93 ENOD93 protein
GYVKGYLNYSNPCLGPRSLIISTVAGMAYFIAADKKVLSLARQHSYENAPEHLRDTSYRGTGRHHPSFFRP

SEQ ID NO: 128810 - protein, 84 aa, Setaria italica
  Transcript Sequence Number=SeqID_62836
LIIFVIRVGQLLFIKYDVDIICVHVEVMYGIIQGILFFLQGSVVISYRWCVHCQEIDYETFFIRRIIVANFSWSSSCGIFKSNG

SEQ ID NO: 128811 - protein, 76 aa, Setaria italica
  Transcript Sequence Number=SeqID_62837
  Gene Ontology: Mol. function=sequence-specific DNA binding; Cellular component=nucleus; Biological process=regulation of transcription, DNA-dependent
  Homolog annotation: Hit_ID=Q43353; Match level="QueryCoverage=71%, HitCoverage=20%, E-value=4e-24, Identity=100%"; Hit description=MADS- box transcription factor 13
  Pfam annotation: Domain name=SRF-TF; Domain location=31-76; Score =90.4; E_value=6.5e-24; Accession=PF00319.10; Description=SRF-type transcription factor (DNA-binding and dimerisation domain)
LPFLACLQVQETRGGEQAEISSMGRGRIEIKRIENNTSRQVTFCKRRNGLLKKAYELSVLCDAEVALIVFSSRGRL

SEQ ID NO: 128812 - protein, 146 aa, Setaria italica
  misc_feature (107)..(107): Xaa can be any naturally occurring amino acid
  Transcript Sequence Number=SeqID_62838
  Gene Ontology: Mol. function=electron carrier activity; Cellular component=mitochondrial respiratory chain; Biological process =electron transport chain
  Homolog annotation: Hit_ID=P25076; Match level="QueryCoverage=84%, HitCoverage=38%, E-value=6e-62, Identity=90%"; Hit description =Cytochrome c1-1, heme protein, mitochondrial
  Pfam annotation: Domain name=Cytochrom_C1; Domain location=31-146; Score=89.7; E_value=1e-23; Accession=PF02167.7; Description =Cytochrome C1 family
KKQLALLGVGASGLLSFATIASADEAEHGLAAPDYPWPHAGIMSSYDHASIRRGHQVYTQVCASCHSMSLISYRDLVGVAYTEEETKAMAAEIEVVDGPNDEGEMFXRPGKLSDRFPQPYANEQAARFANGGALPPGLSLSQGKAQ

SEQ ID NO: 128813 - protein, 99 aa, Setaria italica
  misc_feature (86)..(86): Xaa can be any naturally occurring amino acid
  misc_feature (89)..(89): Xaa can be any naturally occurring amino acid
  Transcript Sequence Number=SeqID_62839
KKRILKHQFSKKVKSKQRYQGSKMVLILLWCMLECLAIELKKQNNSFKHVMKKDVSGGRDISLIFALKKIYLSFKFGPIIGVSSTXPRXEVFHRLPVTG

SEQ ID NO: 128814 - protein, 49 aa, Setaria italica
  misc_feature (47)..(47): Xaa can be any naturally occurring amino acid
  Transcript Sequence Number=SeqID_62840
TQKQNNSFKHVMKKDVSGGRDISLIFALKKIYLSFKFGPIIGVSSTXRG

SEQ ID NO: 128815 - protein, 51 aa, Setaria italica
  Transcript Sequence Number=SeqID_62841
SCKQQSDTPLCPFHSGKKTWPTNITHVLVVQEPELAGPSHFDSQHANNLHR

SEQ ID NO: 128816 - protein, 152 aa, Setaria italica
  misc_feature (33)..(33): Xaa can be any naturally occurring amino acid
  Transcript Sequence Number=SeqID_62842
  Gene Ontology: Mol. function=voltage-gated chloride channel activity; Cellular component=integral to membrane; Biological process=chloride transport
  Homolog annotation: Hit_ID=Q8LPA2; Match level="QueryCoverage=90%, HitCoverage=16%, E-value=1e-47, Identity=74%"; Hit description =Chloride channel
GLFIPVILAGATYGRIVGTLLGSISDLDPGLFXALLGAASFLGGTMRMTVSVCVILLELTNDLPMLPLVMLVLLISKTIADNFNKGVYDQIVVMKGLPYMEAHAEPYMRHLVAGDVVSGPLITFSGVEKVEKIVHAIRRNKTGTKTKNKRVK

SEQ ID NO: 128817 - protein, 88 aa, Setaria italica
  Transcript Sequence Number=SeqID_62843
  Gene Ontology: Mol. function=hydrogen ion transporting ATP synthase activity, rotational mechanism; Cellular component=proton -transporting ATP synthase complex, catalytic core F(1); Biological process=ATP synthesis coupled proton transport
  Homolog annotation: Hit_ID=B8AWF8; Match level="QueryCoverage=35%, HitCoverage=5%, E-value=3e-10, Identity=100%"; Hit description=ATP synthase subunit beta
  Subcellular localization annotation: CTP_CleavageSite=55; ConfidenceScore=5.06e-01
FTVLRVLLFYVFTVSVSLVRSFLNTGSPITVPVGRATLGRIMNVIGEPIDEKGVVGQADEGKAKRREWPRTAWGIINLGLVDGVANCN

SEQ ID NO: 128818 - protein, 52 aa, Setaria italica
  misc_feature (50)..(50): Xaa can be any naturally occurring amino acid
  Transcript Sequence Number=SeqID_62844
  Homolog annotation: Hit_ID=B6TX94; Match level="QueryCoverage=76%, HitCoverage=12%, E-value=2e-11, Identity=80%"; Hit description=Cupin, RmlC-type
  Pfam annotation: Domain name=DUF1637; Domain location=2-51; Score= -85.7; E_value=0.0009; Accession=PF07847.4; Description=Protein of unknown function (DUF1637)
FQRVAGPQIAVFFLPQRAVMPLHDHPGMTVFSKVLIGSTHVEAYDWLRPXVS

SEQ ID NO: 128819 - protein, 77 aa, Setaria italica
  Transcript Sequence Number=SeqID_62845
  Homolog annotation: Hit_ID=B6TX94; Match level="QueryCoverage=100%, HitCoverage=29%, E-value=7e-18, Identity=52%"; Hit description=Cupin, RmlC-type
  Pfam annotation: Domain name=DUF1637; Domain location=1-76; Score= -72.2; E_value=5.9e-05; Accession=PF07847.4; Description=Protein of unknown function (DUF1637)
GNMHRFVVDGHCAFLDVLTPPYAPAEQRSCTYYEDLPYDELDPCAVSSGLTEAQRRRQLAWLREVPQPKDLRIANLP

SEQ ID NO: 128820 - protein, 43 aa, Setaria italica
  Transcript Sequence Number=SeqID_62846
IEGINRVMCCLYNASYEYRHARELISSHGWWIQMTLVHAHTRF

SEQ ID NO: 128821 - protein, 36 aa, Setaria italica
  Transcript Sequence Number=SeqID_62847
RSKHDYCDMYLQFRKVLNECLQLQLSPVWLMYESSL

SEQ ID NO: 128822 - protein, 41 aa, Setaria italica
  Transcript Sequence Number=SeqID_62848
IGIQFRYGSNILFATIKGAGHVPSDYLPFEAFVAYQRWIDG

SEQ ID NO: 128823 - protein, 126 aa, Setaria italica
  misc_feature (21)..(21): Xaa can be any naturally occurring amino acid
  Transcript Sequence Number=SeqID_62849
  Gene Ontology: Mol. function=serine-type carboxypeptidase activity; Cellular component=extracellular region; Biological process =proteolysis
  Homolog annotation: Hit_ID=Q9FX26; Match level="QueryCoverage=96%, HitCoverage=41%, E-value=2e-17, Identity=32%"; Hit description =Serine carboxypeptidase, putative
FYVAGCSYSGVIVPVLAQEIXKRNEEPYRMKINFKGYSLCNPAVDVDIENNAHVPYAFRVGLISEELFQPEVSGRWKRCPKHIQYTRDILTLTEYHLNVTSKGYRVFLYSGDHSLLVPFSATMELA

SEQ ID NO: 128824 - protein, 63 aa, Setaria italica
  Transcript Sequence Number=SeqID_62850
RTKTKNELTFIVSCTALFIPRLLTLARIQAEMLSQSLALNSELLWSDTEESSYHKEAAPSIHL

SEQ ID NO: 128825 - protein, 64 aa, Setaria italica
  Transcript Sequence Number=SeqID_62851
  Gene Ontology: Mol. function=serine-type carboxypeptidase activity; Biological process=proteolysis
TSRVADLYDFLSKWFAEYTEFMSNPFYVAGCSYSGVIVPVLAQEILKSMLRHSFTIHLLYSIQM

SEQ ID NO: 128826 - protein, 136 aa, Setaria italica
  misc_feature (67)..(67): Xaa can be any naturally occurring amino acid
  Transcript Sequence Number=SeqID_62852
  Gene Ontology: Mol. function=oxidoreductase activity; Biological process=oxidation reduction
  Homolog annotation: Hit_ID=B4FE26; Match level="QueryCoverage=88%, HitCoverage=34%, E-value=2e-59, Identity=85%"; Hit description =Corticosteroid 11-beta-dehydrogenase isozyme 1
TSATDVGQVLSICVQAANAALVNFFETLRTELGSEIGITIVTPGWIESEMSKGKYLKEHGEMEVDQXMRDAQIGLFPVEYAKNCARAMVQAACQGERYLTVPAWFRAMYLWRVFAPEVVEVCYRLLYMHGHGASQT

SEQ ID NO: 128827 - protein, 84 aa, Setaria italica
  misc_feature (52)..(52): Xaa can be any naturally occurring amino acid
  misc_feature (70)..(70): Xaa can be any naturally occurring amino acid
  Transcript Sequence Number=SeqID_62853
  Gene Ontology: Mol. function=oxidoreductase activity; Biological process=oxidation reduction
  Homolog annotation: Hit_ID=Q2QRE6; Match level="QueryCoverage=95%, HitCoverage=22%, E-value=1e-34, Identity=85%"; Hit description =Oxidoreductase, short chain dehydrogenase/reductase family protein, expressed
SQSGQISCNAGIASVGAFQEIPDVTNYSSQLDVNFWGSVQTTFAALPYLKRXRGRIVVTASATAWNPVPXMSFYNAANAALVNF

SEQ ID NO: 128828 - protein, 62 aa, Setaria italica
  Transcript Sequence Number=SeqID_62854
IMTQEDTRHLPVSLQYAAPPVAEQRDEVDGGGGADDAAGDLPEGPDALIVERDGDVHAEAPV

SEQ ID NO: 128829 - protein, 87 aa, Setaria italica
  Transcript Sequence Number=SeqID_62855
QDAIFKVLHFCHHLVWLVLQDVVKSLHAERTKNVSGTKEATLSVNKYQRNHGRHPSCCYGISIGVTDISVANYQHAGKFSFSIWALS

SEQ ID NO: 128830 - protein, 71 aa, Setaria italica
  Transcript Sequence Number=SeqID_62856
  Gene Ontology: Mol. function=hydrolase activity
  Homolog annotation: Hit_ID=B9SNP1; Match level="QueryCoverage=69%, HitCoverage=17%, E-value=1e-17, Identity=79%"; Hit description =Alpha/beta hydrolase, putative
SSCILVVLRPPCDVASKREHLYQFWKSYIKRPMVLVGPSLGAAVAIDFSINYPEAVNAKTNFCSLYFFGAE

SEQ ID NO: 128831 - protein, 51 aa, Setaria italica
  Transcript Sequence Number=SeqID_62857
IAILRQVRQCGHIPHVEKPREAAKLVLEFLERDKAENTDRASSVTPVLTNS

SEQ ID NO: 128832 - protein, 87 aa, Setaria italica
  misc_feature (81)..(81): Xaa can be any naturally occurring amino acid
  Transcript Sequence Number=SeqID_62858
  Subcellular localization annotation: CTP_CleavageSite=59; ConfidenceScore=5.36e-01
PASSRARVRVAASAAASAPDGAAASGTSAGGFPSFLPRAVERIRDGAAIRLAKRIERVPVQTGFSVSPIQSSCVRPLKQQXQDADPI

SEQ ID NO: 128833 - protein, 67 aa, Setaria italica
  Transcript Sequence Number=SeqID_62859
  Gene Ontology: Mol. function=hydrolase activity
  Homolog annotation: Hit_ID=B9SNP1; Match level="QueryCoverage=98%, HitCoverage=23%, E-value=1e-12, Identity=53%"; Hit description =Alpha/beta hydrolase, putative
  Subcellular localization annotation: CTP_CleavageSite=25; ConfidenceScore=5.01e-01
QVSKMIFIGASVYSEGPKDMTRMPKFVSYAGVFILKSLPLRFLATRLAFNNTPNEFFDWVQIGRLHC

SEQ ID NO: 128834 - protein, 52 aa, Setaria italica
  Transcript Sequence Number=SeqID_62860
  Gene Ontology: Mol. function=nuclease activity
  Homolog annotation: Hit_ID=Q9LMH4; Match level="QueryCoverage=88%, HitCoverage=7%, E-value=1e-11, Identity=67%"; Hit description =F16A14.4
KCLIMWGEDDGIISSKLAYRLHLGELPDAILRQVRQCGHIPHVEKPRTSFAA

SEQ ID NO: 128835 - protein, 44 aa, Setaria italica
  Transcript Sequence Number=SeqID_62861
TDLTTFTYNKPILGEVYYLSYSKSRDAAGGAPYGGSSIGMGPYN

SEQ ID NO: 128836 - protein, 96 aa, Setaria italica
  Transcript Sequence Number=SeqID_62862
  Gene Ontology: Cellular component=plasma membrane
  Homolog annotation: Hit_ID=B6T362; Match level="QueryCoverage=95%, HitCoverage=48%, E-value=8e-30, Identity=77%"; Hit description=Fiber protein Fb34
  Pfam annotation: Domain name=DUF1218; Domain location=2-65; Score =62.0; E_value=2.2e-15; Accession=PF06749.4; Description=Protein of unknown function (DUF1218)
PITCLIPIDRVTFLIAEACLLAGSVRNAYHTRYRGIFYGESLSCETVRKGVFAAGAAFTFFTAILGEVYYLSYSKSRDAAGGAPYGGSSIGMGPYN

SEQ ID NO: 128837 - protein, 35 aa, Setaria italica
  Transcript Sequence Number=SeqID_62863
  Homolog annotation: Hit_ID=B6T362; Match level="QueryCoverage=100%, HitCoverage=19%, E-value=1e-10, Identity=100%"; Hit description =Fiber protein Fb34
MASIIVQAVVILLDVIAFGLGVAAEQRRSRATVTP

SEQ ID NO: 128838 - protein, 48 aa, Setaria italica
  Transcript Sequence Number=SeqID_62864
RPRGSPPLLRWRPSYVQAVVILLDVIAFGLGVAAEQRRSRATVTPGRR

SEQ ID NO: 128839 - protein, 85 aa, Setaria italica
  misc_feature (32)..(32): Xaa can be any naturally occurring amino acid
  misc_feature (68)..(68): Xaa can be any naturally occurring amino acid
  Transcript Sequence Number=SeqID_62865
LPYLEALDREHGDSLVEVVENFADPFSMEREXLSSSMVLTPTSSNKQKAVARISTPTSGGALPELVLXLLDLGMEYNRRKNNKRK

SEQ ID NO: 128840 - protein, 54 aa, Setaria italica
  Transcript Sequence Number=SeqID_62866
  Gene Ontology: Mol. function=transferase activity; Biological process= D-ribose metabolic process
  Homolog annotation: Hit_ID=B9SU49; Match level="QueryCoverage=100%, HitCoverage=13%, E-value=5e-17, Identity=75%"; Hit description =Ribokinase, putative
EVIMAAKSAGVPVIMDAGGMDAPVPGELLRLVDIFSPNETELARLTGLPTESFE

SEQ ID NO: 128841 - protein, 56 aa, Setaria italica
  Transcript Sequence Number=SeqID_62867
QNIIVLHKKASYGLMHFYGLVLPEVMAMYTVYSTVHDYMLLFPSRKLTSFRTYRKP

SEQ ID NO: 128842 - protein, 99 aa, Setaria italica
  Transcript Sequence Number=SeqID_62868
DIISAPPKPLNIDDPKLKGQQPPDAVPLSVVLSPYGGKEPIPFDKNKLGHLRDQSVPVKEQPICCFPQSLKSLESYKEEDWTAFLHPVFVGPVLVPINN

SEQ ID NO: 128843 - protein, 49 aa, Setaria italica
  Transcript Sequence Number=SeqID_62869
EINLFLSKNNPICCFPQSLKSLESYKEEDWTAFLHTRVLVPTTHTCSSV

SEQ ID NO: 128844 - protein, 115 aa, Setaria italica
  Transcript Sequence Number=SeqID_62870
  Gene Ontology: Mol. function=nutrient reservoir activity; Cellular component=anchored to membrane
  Homolog annotation: Hit_ID=O04288; Match level="QueryCoverage=53%, HitCoverage=15%, E-value=6e-14, Identity=75%"; Hit description =Endosperm specific protein
NGDVNTLATDGSKGYKYNLTVRADGDTVELSSASQSAAKVTKTVVDKGPLAVYLIDAVLLPSELFNASHGRTAPAPAPASSPAHAPPPAPAPASSPAHATPPASLLSGPSFVLVY

SEQ ID NO: 128845 - protein, 75 aa, Setaria italica
  Transcript Sequence Number=SeqID_62871
MPQRSSPCCDKVRKADVQGICNKLTTAEKARIKIEKWVQVTRKCENPLPVGFNCAGYVVPEPPSPPLPPPPRSAY

SEQ ID NO: 128846 - protein, 98 aa, Setaria italica; identical to SEQ ID NO: 104667
  Transcript Sequence Number=SeqID_62872

SEQ ID NO: 128847 - protein, 82 aa, Setaria italica
  Transcript Sequence Number=SeqID_62873
VTIATVFQRIGCEAVYSTLRRLWKAVTDVDGTTSQCIQGRINCFTPYSLEHCNDRDCGHTCSTHGFHFGGYCKQAIIQYAAA

SEQ ID NO: 128848 - protein, 93 aa, Setaria italica
  Transcript Sequence Number=SeqID_62874
ESSTECDNIPPIHSPQYIAPAQHGALLQERNSGASINCSRSSAFCHNIGTPETGTPVILHTKLHKKHDQPEALWKGNFHVTGELIHTCDGLEA

SEQ ID NO: 128849 - protein, 112 aa, Setaria italica
  misc_feature (79)..(79): Xaa can be any naturally occurring amino acid
  misc_feature (88)..(88): Xaa can be any naturally occurring amino acid
  Transcript Sequence Number=SeqID_62875
  Gene Ontology: Mol. function=protein dimerization activity; Cellular component=nucleus; Biological process=regulation of transcription, DNA-dependent
  Homolog annotation: Hit_ID=Q8LKI5; Match level="QueryCoverage=98%, HitCoverage=27%, E-value=8e-21, Identity=57%"; Hit description =Opaque-2-like protein
VAKVKMAEDALKRVTGTMSSSQPSRPSPPVPANADASGPILDNIIDYLMNSTDATTDNNFEPRTATTPSFSQQAEKPAXGQHDSAMIXRIAAHHAVAVELLHKRLGAMPTAS

SEQ ID NO: 128850 - protein, 62 aa, Setaria italica
  Transcript Sequence Number=SeqID_62876
  Gene Ontology: Mol. function=protein dimerization activity; Cellular component=nucleus; Biological process=regulation of transcription, DNA-dependent
  Homolog annotation: Hit_ID=Q8LKI5; Match level="QueryCoverage=96%, HitCoverage=15%, E-value=2e-12, Identity=67%"; Hit description =Opaque-2-like protein
VLKANMETLRAKVKMAEDALKRVTGTMSSSQPSRPSPPVPANADASGPILDNIIDYLMNSNC

SEQ ID NO: 128851 - protein, 39 aa, Setaria italica
  misc_feature (13)..(13): Xaa can be any naturally occurring amino acid
  Transcript Sequence Number=SeqID_62877
LATSSSSRDPSPXSDDDDMDGEVEILGFKLPTEEKVRKR

SEQ ID NO: 128852 - protein, 87 aa, Setaria italica
  Transcript Sequence Number=SeqID_62878
  Gene Ontology: Mol. function=actin binding; Cellular component=actin cytoskeleton; Biological process=actin cytoskeleton organization and biogenesis
  Homolog annotation: Hit_ID=Q5VMJ3; Match level="QueryCoverage=81%, HitCoverage=54%, E-value=6e-33, Identity=90%"; Hit description =Profilin LP04
  Pfam annotation: Domain name=Profilin; Domain location=16-87; Score =28.4; E_value=2.4e-06; Accession=PF00235.11; Description=Profilin
GREGEGGRRERSGVGEWQAYVDDHLLCEIDGQHLTAAAIIGHDGSVWAQSPTFPQYKPEEIVAIMKDFDEPGTLAPTGLFLGGTKYM

SEQ ID NO: 128853 - protein, 70 aa, Setaria italica
  misc_feature (38)..(38): Xaa can be any naturally occurring amino acid
  misc_feature (64)..(64): Xaa can be any naturally occurring amino acid
  Transcript Sequence Number=SeqID_62879
  Gene Ontology: Mol. function=branched-chain-amino-acid transaminase activity; Cellular component=chloroplast; Biological process =branched chain family amino acid metabolic process
  Homolog annotation: Hit_ID=B4FA16; Match level="QueryCoverage=100%, HitCoverage=22%, E-value=4e-25, Identity=83%"; Hit description =Branched-chain-amino-acid aminotransferase
VSVDELLDADEIFCTGTAVVVSPVGSITYQERWNMGTXVFGVVSQQLYTSLTSLQMGQTEDWMXWTMQLN

SEQ ID NO: 128854 - protein, 65 aa, Setaria italica
  Transcript Sequence Number=SeqID_62880
ADEVFLHGNCCCGVTCGEHYISGEKVTILLCLAGFIWYLICMCDEQVRLFLFVKTLLNIIFLSKA

SEQ ID NO: 128855 - protein, 70 aa, Setaria italica
  Transcript Sequence Number=SeqID_62881
SESTKLFAAYHHICALIQCKLSNSLSFQYCTSFTFLFDPLGFSFLYGIGLAGSSSPRQRIISMVTKMMVT

SEQ ID NO: 128856 - protein, 50 aa, Setaria italica
  misc_feature (12)..(12): Xaa can be any naturally occurring amino acid
  Transcript Sequence Number=SeqID_62882
CGWALGWIYMLXIERCHVSSSVTESIGEYMTPLMHNIYIQAQRPATLALA

SEQ ID NO: 128857 - protein, 83 aa, Setaria italica
  misc_feature (19)..(19): Xaa can be any naturally occurring amino acid
  misc_feature (31)..(31): Xaa can be any naturally occurring amino acid
  misc_feature (62)..(62): Xaa can be any naturally occurring amino acid
  Transcript Sequence Number=SeqID_62883
  Homolog annotation: Hit_ID=B6TSB6; Match level="QueryCoverage=93%, HitCoverage=43%, E-value=1e-28, Identity=69%"; Hit description =Protein tyrosine phosphatase-like protein PTPLB
  Pfam annotation: Domain name=PTPLA; Domain location=6-83; Score= -59.1; E_value=0.02; Accession=PF04387.6; Description=Protein tyrosine phosphatase-like protein, PTPLA
SCNGEGRTHFVLAVVRQIXQVQSSPSVFITXFMAWSIAEVIRYSHYALTTLKVCPSWVTYLXWTMYQALPFVKKRNLYSGFFE

SEQ ID NO: 128858 - protein, 138 aa, Setaria italica
  misc_feature (8)..(8): Xaa can be any naturally occurring amino acid
  misc_feature (96)..(96): Xaa can be any naturally occurring amino acid
  Transcript Sequence Number=SeqID_62884
LCDGLPCXVQRTISKLSNQMIPPIQKANKDLLILCQNIYTLCVRSQDLEGEDQDYGNGAYQFDDWFAKQKNDLMVKAYSPIPENFPDELWNWEVPXCPNQFEEEFQRYLPTYIDLLHEVDAMDYCLEDDCFERVKKFL

SEQ ID NO: 128859 - protein, 126 aa, Setaria italica
  Transcript Sequence Number=SeqID_62885
  Subcellular localization annotation: CTP_CleavageSite=36; ConfidenceScore=5.06e-01
LVYFVLSLLLNSLLYFLLSLVATSLALLAIMSSNTRSCEAWNGFSGRVGLLSLNGDLPQESPPPPASRAPPRAEPCFLPTNPDYCTDPICVHVCEVHGISNSPRYCRQEAGYDMCCCPILIDAVVM

SEQ ID NO: 128860 - protein, 100 aa, Setaria italica
  misc_feature (20)..(20): Xaa can be any naturally occurring amino acid
  Transcript Sequence Number=SeqID_62886
  Homolog annotation: Hit_ID=B9HE57; Match level="QueryCoverage=85%, HitCoverage=3%, E-value=1e-10, Identity=33%"; Hit description=SET domain protein
FCVFIDIMAGYEKQNIRTLXLAGCSNLSSYALGKVLEQLPHISYVHIQGCSHLGDLKNKFQHIKWIRTSLNPEESHQKMKTMKQMGDGNNYPSKVAKNFY

SEQ ID NO: 128861 - protein, 136 aa, Setaria italica
  misc_feature (66)..(66): Xaa can be any naturally occurring amino acid
  misc_feature (100)..(100): Xaa can be any naturally occurring amino acid
  Transcript Sequence Number=SeqID_62887
  Gene Ontology: Mol. function=hydrolase activity, acting on acid anhydrides, catalyzing transmembrane movement of substances; Cellular component=integral to membrane; Biological process =metabolic process
  Homolog annotation: Hit_ID=Q2R471; Match level="QueryCoverage=92%, HitCoverage=13%, E-value=3e-24, Identity=51%"; Hit description=E1-E2 ATPase family protein, expressed
FVSRYEWILTCSMMFFLQIYTVSSTVHLFGVRIIFHFWNFDMSSILALVIASCNYFTSLAMLLERXELNKSPDRWRVQKSIASGAAFGSYIVLSTAIFTXVARTADSFSCKFKGKSLMGTDEEIGAALFLQMSIVN

SEQ ID NO: 128862 - protein, 46 aa, Setaria italica
  Transcript Sequence Number=SeqID_62888
KPRKQYIIKQVIIVNSNLGCYNSLEVLMQQDGQHKSHQPRECEEWP

SEQ ID NO: 128863 - protein, 63 aa, Setaria italica
  Transcript Sequence Number=SeqID_62889
  Gene Ontology: Mol. function=protein serine/threonine kinase activity; Biological process=protein amino acid phosphorylation
  Homolog annotation: Hit_ID=Q53QB7; Match level="QueryCoverage=95%, HitCoverage=5%, E-value=3e-15, Identity=65%"; Hit description =Leucine Rich Repeat family protein
GRRESRAEEVGCCSYGIMLLEVFTGKRPTDPMFVADLSIRWWVRQAFPAQLASVLDDRLLQGV

SEQ ID NO: 128864 - protein, 145 aa, Setaria italica
  misc_feature (9)..(9): Xaa can be any naturally occurring amino acid
  misc_feature (40)..(40): Xaa can be any naturally occurring amino acid
  misc_feature (57)..(57): Xaa can be any naturally occurring amino acid
  misc_feature (96)..(96): Xaa can be any naturally occurring amino acid
  Transcript Sequence Number=SeqID_62890
DGFYIGKRXRDMKPIQEKMGASVPMANFHMTSTNTVTPFXISMQQHPNQQSQVPKEXATQRLLEENNQLLNQIAANIDTFKTVENADLFLRTSSNXKTILSRMSETPGIMGRMEPLPLSINEDHLNSLIQLNRMVASYGTASMSH

SEQ ID NO: 128865 - protein, 99 aa, Setaria italica
  Transcript Sequence Number=SeqID_62891
AAVYLRVIYESYVGRAIRNGIVFLSRRLLRTWHLMYKVQCVQTKFHGVVERWLTRKRHSLVSTSRETHSISKWNVKSNNIHIPHHTIQFGRVLICNPYA

SEQ ID NO: 128866 - protein, 123 aa, Setaria italica
  misc_feature (114)..(114): Xaa can be any naturally occurring amino acid
  Transcript Sequence Number=SeqID_62892
  Gene Ontology: Mol. function=transferase activity, transferring groups other than amino-acyl groups
  Homolog annotation: Hit_ID=B6UDK0; Match level="QueryCoverage=97%, HitCoverage=26%, E-value=4e-58, Identity=92%"; Hit description=3-N -debenzoyl-2-deoxytaxol N-benzoyltransferase
LTANAIFPVKVSAPAEKVAGSSVIELVGMVRDAKRRMAEECLSWAEDRTGGRDPFQMTFNYESVYVSDWSKLGFNDVDYGYGAPMSAGPLVNCDLIASVIVMRAPAPLAGTRLXLASCVTREH

SEQ ID NO: 128867 - protein, 31 aa, Setaria italica
  Transcript Sequence Number=SeqID_62893
FHQVQLMASIKKLLDSNSILNPYKVLPQSVL

SEQ ID NO: 128868 - protein, 80 aa, Setaria italica
  misc_feature (14)..(14): Xaa can be any naturally occurring amino acid
  Transcript Sequence Number=SeqID_62894
  Gene Ontology: Mol. function=oxidoreductase activity; Cellular component=mitochondrion; Biological process=cellular protein metabolic process
  Homolog annotation: Hit_ID=Q8N465; Match level="QueryCoverage=78%, HitCoverage=11%, E-value=1e-24, Identity=88%"; Hit description=D-2 -hydroxyglutarate dehydrogenase, mitochondrial
IMPLDLGAKGSCHXIGGNISTNAGGLRFIRYGSLHGNVLGLEVVLADGTVLDMLTTLRKDNTGYVFLLSSYFYLLVCTEC

SEQ ID NO: 128869 - protein, 61 aa, Setaria italica
  Transcript Sequence Number=SeqID_62895
INILMRAVIQTRVSNKDATLIPCKSLCSWMISLRECIHSEKLSQYHSNFVLCNIFVSIFSF

SEQ ID NO: 128870 - protein, 67 aa, Setaria italica
  Transcript Sequence Number=SeqID_62896
  Gene Ontology: Mol. function=calcium ion binding
  Homolog annotation: Hit_ID=B4FE15; Match level="QueryCoverage=95%, HitCoverage=28%, E-value=1e-25, Identity=85%"; Hit description =Calcium ion binding protein
MVLQFDEDSNGEIDQQELKHCFQKLGIESTDDEIKDLFEACDIYEHMGMKFNEFIVFLCLLFLLQTP

SEQ ID NO: 128871 - protein, 107 aa, Setaria italica
  Transcript Sequence Number=SeqID_62897
  Gene Ontology: Mol. function=unfolded protein binding; Cellular component=cell wall; Biological process=protein folding
  Homolog annotation: Hit_ID=Q43638; Match level="QueryCoverage=95%, HitCoverage=13%, E-value=8e-45, Identity=87%"; Hit description=Heat -shock protein
MPVSVIVIVPASWSGLITITDTGIGMTKDELKDCLGTIAQSGTSKFLKALKENKDLGADNGLIGQFGVGFYSAFLVAEKVVVSTKSPKADKQYVWEAEADSSSYVIK

SEQ ID NO: 128872 - protein, 42 aa, Setaria italica
  Transcript Sequence Number=SeqID_62898
NLELSEELAFVRGRVENLENLLREANHAKVSTAKVLLVILVT

SEQ ID NO: 128873 - protein, 41 aa, Setaria italica
  Transcript Sequence Number=SeqID_62899
TITKQYSSSVYIRFASSNYSPSRRLNGVIRFHLQLVTRYIL

SEQ ID NO: 128874 - protein, 58 aa, Setaria italica
  Transcript Sequence Number=SeqID_62900
  Subcellular localization annotation: CTP_CleavageSite=40; ConfidenceScore=5.19e-01
YILQVSTAQALSDLSSLHSADNLQPQSSYIVRPKQSAFCRQSATTKQLHCLIPSATLC

SEQ ID NO: 128875 - protein, 130 aa, Setaria italica
  misc_feature (69)..(69): Xaa can be any naturally occurring amino acid
  Transcript Sequence Number=SeqID_62901
  Pfam annotation: Domain name=Dev_Cell_Death; Domain location=1-71; Score=-34.7; E_value=0.00049; Accession=PF10539.1; Description =Development and cell death domain
FVQIRTCAKTQYPPLLESQFKTLLGDNYYNHHHFLSVHGQAQNRSGDGYNSCHHFYFELDHAQTRALIXLFKSLAPANFNQVPAVSSKRNLAVSSSPTKMRLTAVPDPKKVTADSKETNPFSVLSDRASP

SEQ ID NO: 128876 - protein, 53 aa, Setaria italica
  misc_feature (12)..(12): Xaa can be any naturally occurring amino acid
  Transcript Sequence Number=SeqID_62902
  Homolog annotation: Hit_ID=Q84S70; Match level="QueryCoverage=84%, HitCoverage=6%, E-value=5e-10, Identity=66%"; Hit description=Kelch -like protein
  Pfam annotation: Domain name=Kelch_1; Domain location=1-46; Score =36.9; E_value=8.2e-08; Accession=PF01344.17; Description=Kelch motif
RKGSLAGICLNXKIYAIGGGDGNETYSEVEMFDPYLGKWICSPSMLLSKNLDY

SEQ ID NO: 128877 - protein, 62 aa, Setaria italica
  Transcript Sequence Number=SeqID_62903
  Gene Ontology: Mol. function=heat shock protein binding; Biological process=response to stress
  Homolog annotation: Hit_ID=B6UF39; Match level="QueryCoverage=77%, HitCoverage=36%, E-value=6e-19, Identity=93%"; Hit description =Chaperone protein dnaJ
HILCYCFWCLFLLTVLSNPAKRQEYDKAGIIYVQDQNVVDYLNRHKGLILTCNGLGIRYSVW

SEQ ID NO: 128878 - protein, 86 aa, Setaria italica
  Transcript Sequence Number=SeqID_62904
  Subcellular localization annotation: CTP_CleavageSite=49; ConfidenceScore=5.10e-01
FPPGTHGGLQRSTRAAALPYSATFSTFKCAVGTIAHNMVHLAHTTAIIVAHNMRNLEARFRPSKTPGAQARLAGWRVGRNHHKNHE

SEQ ID NO: 128879 - protein, 59 aa, Setaria italica
  Transcript Sequence Number=SeqID_62905
  Subcellular localization annotation: CTP_CleavageSite=30; ConfidenceScore=5.14e-01
AARFLNSSCFNYRSSHQRPRRLSSRITGIRAVQVSSEAVEPLGRFTEDVVEGQIQTADS

SEQ ID NO: 128880 - protein, 45 aa, Setaria italica
  Transcript Sequence Number=SeqID_62906
KTIILSYLFIVCVRLRWRNSTNNFTLFLPSNVCMSLLPCAYFTSN

SEQ ID NO: 128881 - protein, 61 aa, Setaria italica
  Transcript Sequence Number=SeqID_62907
  Gene Ontology: Mol. function=structural molecule activity; Cellular component=membrane coat; Biological process=intracellular protein transport
  Homolog annotation: Hit_ID=Q5VQ77; Match level="QueryCoverage=98%, HitCoverage=18%, E-value=8e-20, Identity=80%"; Hit description =Coatomer protein complex, beta prime subunit-like
SPVLVSPSCGSVAHFLESRGMLEEALEIATDADYKFDLAVQLGKLDVAKAIATEAQSESKW

SEQ ID NO: 128882 - protein, 60 aa, Setaria italica
  Transcript Sequence Number=SeqID_62908
  Gene Ontology: Mol. function=structural molecule activity; Cellular component=cytoplasmic vesicle; Biological process=intracellular protein transport
  Homolog annotation: Hit_ID=Q5VQ78; Match level="QueryCoverage=95%, HitCoverage=6%, E-value=2e-29, Identity=100%"; Hit description =Coatomer subunit beta'-1
  Pfam annotation: Domain name=WD40; Domain location=1-40; Score=40.2; E_value=8.1e-09; Accession=PF00400.24; Description=WD domain, G-beta repeat
QQATQIFEGHSHYVMQVTFNPKDTNTFASASLDRTTKIWSLGSPDPNFTLDGHQKGVNCV

SEQ ID NO: 128883 - protein, 158 aa, Setaria italica
  misc_feature (10)..(10): Xaa can be any naturally occurring amino acid
  misc_feature (19)..(19): Xaa can be any naturally occurring amino acid
  misc_feature (44)..(44): Xaa can be any naturally occurring amino acid
  misc_feature (109)..(109): Xaa can be any naturally occurring amino acid
  misc_feature (114)..(114): Xaa can be any naturally occurring amino acid
  Transcript Sequence Number=SeqID_62909
  Gene Ontology: Mol. function=kinase activity
  Homolog annotation: Hit_ID=Q9AS76; Match level="QueryCoverage=59%, HitCoverage=15%, E-value=1e-20, Identity=57%"; Hit description =Kinase interacting protein 1-like
KASHSLDESXAEIMKLQEXNQGSASKMENDANEKGVLEERAMEXEQVRRQLEDSRTEVMELQATIKNLKDGLGKSLQEKALLQDRVKDLEQATSDLNDSVASLVGKLYXVLLVXQLKQLHAEKEEASLKSEEQISELNETIADLKKKLELLSSEKSAV

SEQ ID NO: 128884 - protein, 77 aa, Setaria italica
  Transcript Sequence Number=SeqID_62910
  Gene Ontology: Mol. function=kinase activity
  Homolog annotation: Hit_ID=Q9AS76; Match level="QueryCoverage=90%, HitCoverage=11%, E-value=2e-11, Identity=64%"; Hit description =Kinase interacting protein 1-like
RYDNVTGELRKNLPSSLQSQGSGISETDSETQSTSPSPEPNMEQKTPKQKHKTRAAGFDVFLGSGGSSDIYQEGEVE

SEQ ID NO: 128885 - protein, 114 aa, Setaria italica
  Transcript Sequence Number=SeqID_62911
  Pfam annotation: Domain name=FBD; Domain location=12-58; Score=8.5; E_ value=0.015; Accession=PF08387.2; Description=FBD
MPASCPCDQPRNWRSQSITLINLKEVEVEGFSGDDHEVDLLKVITRRATMLEGVTLKFYQKFSLECSAFKEIPSILIAHPSVKFNIFNYYHVQESSMNDSDSEIVEDTSSDEDD

SEQ ID NO: 128886 - protein, 128 aa, Setaria italica
  misc_feature (10)..(10): Xaa can be any naturally occurring amino acid
  Transcript Sequence Number=SeqID_62912
WVCSFSAAPXSGGSDGEALHGSKEISTGCLDTPGTHHHPDSSRICNPQVSRLPSRRHGRVVTAVATYRSNVRMKNLPNCIYTYKFDFLTCPICGEIHGLFPNFSVVSTRSAYGEVRCNGFVVVGSLRC

SEQ ID NO: 128887 - protein, 60 aa, Setaria italica
  Transcript Sequence Number=SeqID_62913
ERATMLEGVTLKFYQKFSLECSAFKEIPSILIAHPSVKFNIFNYYHVQESSMNCIRIRKS

SEQ ID NO: 128888 - protein, 62 aa, Setaria italica
  Transcript Sequence Number=SeqID_62914
PCMDSSGREKNPKFIEQVAAHFDKQDSIVVVLLMIDLSIARQINYIYIVIFILLVLLLIHFF

SEQ ID NO: 128889 - protein, 71 aa, Setaria italica
  Transcript Sequence Number=SeqID_62915
  Gene Ontology: Mol. function=chalcone isomerase activity
  Homolog annotation: Hit_ID=B4G1R6; Match level="QueryCoverage=80%, HitCoverage=26%, E-value=3e-13, Identity=65%"; Hit description =Chalcone--flavonone isomerase
TVTIHVPLPATPGAAEISFATEGKDEAKMRVDNENVAAMIQKWYLGGESAASPTTVQSLADRFAALLSAAA

SEQ ID NO: 128890 - protein, 102 aa, Setaria italica
  Transcript Sequence Number=SeqID_62916
  Gene Ontology: Mol. function=chalcone isomerase activity; Biological process=flavonoid biosynthetic process
  Homolog annotation: Hit_ID=B4G1R6; Match level="QueryCoverage=97%, HitCoverage=40%, E-value=5e-23, Identity=66%"; Hit description =Chalcone--flavonone isomerase
PLFLVSWKGKTADELLGDDAFFQALVSAPVEKLFRVVVIKEIKGSQYGVQLESSVRDRLVAADKYDDEEEEGPRRKVRPKLLTKYQSNLQRPKTTVITFHFP

SEQ ID NO: 128891 - protein, 35 aa, Setaria italica
  Transcript Sequence Number=SeqID_62917
MGSETTETVTVEGIPFPAEITVGNPLSLLANGITD

SEQ ID NO: 128892 - protein, 71 aa, Setaria italica
  Transcript Sequence Number=SeqID_62918
  Gene Ontology: Mol. function=nucleic acid binding; Cellular component= cytoplasm; Biological process=ubiquitin-dependent protein catabolic process
  Homolog annotation: Hit_ID=Q9LSS9; Match level="QueryCoverage=77%, HitCoverage=5%, E-value=3e-16, Identity=61%"; Hit description =General negative transcription regulator-like
MLICCVILCSHPFRYVTFAREEEAVRCIQAVNGYILDGRPLKATFGVTRYCHIWLSNRVCYKANCSTTHTE

SEQ ID NO: 128893 - protein, 141 aa, Setaria italica
  misc_feature (29)..(29): Xaa can be any naturally occurring amino acid
  Transcript Sequence Number=SeqID_62919
  Gene Ontology: Mol. function=nucleic acid binding; Cellular component= cytoplasm; Biological process=embryonic development ending in birth or egg hatching
  Homolog annotation: Hit_ID=Q9LSS9; Match level="QueryCoverage=83%, HitCoverage=12%, E-value=3e-29, Identity=50%"; Hit description =General negative transcription regulator-like
  Pfam annotation: Domain name=RRM_1; Domain location=7-83; Score=21.6; E_value=0.0019; Accession=PF00076.14; Description=RNA recognition motif. (a.k.a. RRM, RBD, o
CDSAEAVYIVGMPNEFASEKLLRQKNFLXGQYGKIENIIIDNIGANQQIPDSGRVYVTFAREEEAVRCIQAVNGYILDGRPLKATFGVTRYCHIWLSNRVCYKANCSYVHHKASAEDICTKDDVSVVCARYIFLYYNFIMY

SEQ ID NO: 128894 - protein, 38 aa, Setaria italica
  Transcript Sequence Number=SeqID_62920
FCGVCKVHIFILQKHHLWYKYLLLRLYDAHTNIALLAN

SEQ ID NO: 128895 - protein, 88 aa, Setaria italica
  Transcript Sequence Number=SeqID_62921
  Gene Ontology: Mol. function=nucleoside-triphosphatase activity; Cellular component=cytoskeleton; Biological process=protein transport
  Homolog annotation: Hit_ID=B9S9N8; Match level="QueryCoverage=100%, HitCoverage=10%, E-value=1e-23, Identity=59%"; Hit description =Protein cdcH, putative
KIARATPGFVGADLKALIDKAGNLAMKRIIDERRVQYSHGHDGNNKPDWWRQPWDVDEVESLHITMGDFEEAAKLVQPSLRREGFSSI

SEQ ID NO: 128896 - protein, 75 aa, Setaria italica
  Transcript Sequence Number=SeqID_62922
  Gene Ontology: Mol. function=cysteine-type endopeptidase activity; Cellular component=endoplasmic reticulum; Biological process =proteolysis
  Homolog annotation: Hit_ID=B6SZV3; Match level="QueryCoverage=81%, HitCoverage=16%, E-value=1e-23, Identity=86%"; Hit description=Thiol protease SEN102
  Pfam annotation: Domain name=Peptidase_C1; Domain location=6-75; Score=-135.7; E_value=0.07; Accession=PF00112.15; Description=Papain family cysteine protease
YPLCALPFPCCVSQVSLSEQELVDCDTLDHGCDGGISYRALRWIADNGGITTEADYPYTAATGVCDTAKLSHNAV

SEQ ID NO: 128897 - protein, 76 aa, Setaria italica
  misc_feature (66)..(66): Xaa can be any naturally occurring amino acid
  misc_feature (68)..(68): Xaa can be any naturally occurring amino acid
  Transcript Sequence Number=SeqID_62923
MCTSSDFSASLDQKNFVPILTEVLANGAGAKLGKLGEEMRVIELGPNTSNKSTSEGQSNVLFWSHXMXSDSVQKAT

SEQ ID NO: 128898 - protein, 114 aa, Setaria italica
  misc_feature (86)..(86): Xaa can be any naturally occurring amino acid
  Transcript Sequence Number=SeqID_62924
  Homolog annotation: Hit_ID=Q7XQF7; Match level="QueryCoverage=42%, HitCoverage=7%, E-value=3e-14, Identity=77%"; Hit description =OSJNBa0081L15.6 protein
SYHNHYCLCGSYRYYLFIQASESEWLEISEDDEEEDDDEADDNENDSEGGDSQTDEDEESDEDAVKNVSSAVSLLKGESKTMRRKXKRARIEQIRVILGLSDSQRTPVPGESLR

SEQ ID NO: 128899 - protein, 51 aa, Setaria italica
  Transcript Sequence Number=SeqID_62925
  Gene Ontology: Mol. function=metal ion binding
EACVCRTLRRPGQHQEKTNRTMILAPLVGIILNLMECSSTSEHRELNDVIA

SEQ ID NO: 128900 - protein, 63 aa, Setaria italica
  misc_feature (1)..(3): Xaa can be any naturally occurring amino acid
  misc_feature (5)..(5): Xaa can be any naturally occurring amino acid
  misc_feature (9)..(9): Xaa can be any naturally occurring amino acid
  misc_feature (13)..(13): Xaa can be any naturally occurring amino acid
  Transcript Sequence Number=SeqID_62926
  Subcellular localization annotation: CTP_CleavageSite=46; ConfidenceScore=5.15e-01
XXXFXFFFXFFFXFFFFFFLVFNQLYNILYFLSNRRYSIQYNQNVVRRPKFHNNQIDILVTSF

SEQ ID NO: 128901 - protein, 86 aa, Setaria italica
  Transcript Sequence Number=SeqID_62927
QITKKYNYLGTIEYKQGMLKNMLKRTSLRHWMRNSNIGHGSSDGNDQSVCKEHLMDIARLRVENATLLEGVGTVERLTSSVHRLHI

SEQ ID NO: 128902 - protein, 45 aa, Setaria italica
  Transcript Sequence Number=SeqID_62928
CKEHLMDIARFLYRDKSFYFILFPVCLMALPFINKLVHWRKYQVP

SEQ ID NO: 128903 - protein, 125 aa, Setaria italica
  misc_feature (7)..(7): Xaa can be any naturally occurring amino acid
  misc_feature (110)..(110): Xaa can be any naturally occurring amino acid
  Transcript Sequence Number=SeqID_62929
LRHWMRXNIGHGSSDGNDQSVCKEHLMDIARVENATLLEGVGTVERLTSSVHRLHIVLLKAYDDVKSASSLESTFQDLNSLITEANLMKTALSVVLPVSWSGDSSDAITXEALCDPSDSPKSKSE

SEQ ID NO: 128904 - protein, 87 aa, Setaria italica
  Transcript Sequence Number=SeqID_62930
LKKRRKSHLKAKMAKLQSNLRMGLEIEQHLQRNARILEKRQALYDGFLRNGLSELQKFHKYQRAEIMKTLEEESSWLSRKFVCLVNF

SEQ ID NO: 128905 - protein, 50 aa, Setaria italica
  Transcript Sequence Number=SeqID_62931
SIFSCKACASALDSSNDMELESAGKSLLGLVKNMLKRTSLRHWMRNSNIG

SEQ ID NO: 128906 - protein, 67 aa, Setaria italica
  misc_feature (9)..(9): Xaa can be any naturally occurring amino acid
  Transcript Sequence Number=SeqID_62932
LAQHSPPRXTTSHSSAGHTIQTRTRSLHENILLLLEVITGHDDTTRSPCSCSFISEEGRRPARQIPN

SEQ ID NO: 128907 - protein, 119 aa, Setaria italica
  misc_feature (14)..(14): Xaa can be any naturally occurring amino acid
  Transcript Sequence Number=SeqID_62933
  Gene Ontology: Mol. function=DNA binding; Cellular component=nucleus; Biological process=regulation of transcription
  Homolog annotation: Hit_ID=Q8S0Z6; Match level="QueryCoverage=97%, HitCoverage=36%, E-value=2e-60, Identity=93%"; Hit description=Myb -related transcription factor LBM2-like
  Pfam annotation: Domain name=Myb_DNA-binding; Domain location=14-62; Score=48.0; E_value=3.6e-11; Accession=PF00249.23; Description=Myb -like DNA-binding domain
  Pfam annotation: Domain name=Myb_DNA-binding; Domain location=68-113; Score=36.3; E_value=1.3e-07; Accession=PF00249.23; Description=Myb -like DNA-binding domain
  Pfam module annotation: Pfam domain module=Myb_DNA-binding::Myb_DNA -binding; Domain location=14-62::68-113
MGRAPCCDKTSVKXGPWSPEEDELLRSYVQNHGTGGNWIALPHKAGLNRCGKSCRLRWLNYLRPDIKHGGYTEQEDRIICSLYNSIGSRWSIIASKLPGRTDNDVKNYWNTKLKRRPSP

SEQ ID NO: 128908 - protein, 82 aa, Setaria italica
  Transcript Sequence Number=SeqID_62934
  Gene Ontology: Mol. function=DNA binding; Cellular component=nucleus; Biological process=regulation of transcription
  Homolog annotation: Hit_ID=Q8S0Z6; Match level="QueryCoverage=76%, HitCoverage=19%, E-value=3e-29, Identity=92%"; Hit description=Myb -related transcription factor LBM2-like
  Pfam annotation: Domain name=Myb_DNA-binding; Domain location=15-60; Score=33.6; E_value=7.7e-07; Accession=PF00249.23; Description=Myb -like DNA-binding domain
CRLRWLNYLRPNIKHGGYTEQEDQIIWSLYSSIGSRWSIIASKLPGRTDNDVKNYWNTKLKKKAMAAVAASAATGGAFAAPA

SEQ ID NO: 128909 - protein, 72 aa, Setaria italica
  Transcript Sequence Number=SeqID_62935
SRSVRSSYLTVLLMANPSPRFMQVNNRLTLRDLQLLPKLPAYRGPTPRPDLQGPFHRAIRCCSRQWIQARAP

SEQ ID NO: 128910 - protein, 42 aa, Setaria italica
  misc_feature (20)..(20): Xaa can be any naturally occurring amino acid
  misc_feature (33)..(33): Xaa can be any naturally occurring amino acid
  Transcript Sequence Number=SeqID_62936
  Gene Ontology: Mol. function=heat shock protein binding
  Homolog annotation: Hit_ID=B4FTV3; Match level="QueryCoverage=95%, HitCoverage=15%, E-value=4e-13, Identity=95%"; Hit description=DnaJ subfamily C member 8
VSSWRDFMKTGKKGRKGEIXKPPKLKTEDPNKXYVQRPVKPK

SEQ ID NO: 128911 - protein, 78 aa, Setaria italica
  Transcript Sequence Number=SeqID_62937
RCTSISISMLHQGFTVFPWRSNDFKKTNHDLKKAMLYNIKNLNLANTTNEKTISIALNHIATERQTKSKLNGWVITNP

SEQ ID NO: 128912 - protein, 51 aa, Setaria italica
  Transcript Sequence Number=SeqID_62938
  Homolog annotation: Hit_ID=Q6YSJ5; Match level="QueryCoverage=100%, HitCoverage=5%, E-value=1e-11, Identity=66%"; Hit description =Protein argonaute 16
MATKMAGSVQVVKDDTVKRTPMARPSIGREGKPIRLLSNHFAVKLNGVDAV

SEQ ID NO: 128913 - protein, 95 aa, Setaria italica
  Transcript Sequence Number=SeqID_62939
  Pfam annotation: Domain name=Defensin_2; Domain location=60-92; Score= 11.1; E_value=0.054; Accession=PF01097.10; Description=Arthropod defensin
MALKSAALAILLVSLFADHVKCQPLVRSEGQELAGNGSGNGGGGEVSPKSDCNEGALYHGPCLELICAAACLLQMNRGGHCKGGFFGACLCFVCN

SEQ ID NO: 128914 - protein, 126 aa, Setaria italica
  misc_feature (39)..(39): Xaa can be any naturally occurring amino acid
  Transcript Sequence Number=SeqID_62940
  Gene Ontology: Mol. function=protein serine/threonine kinase activity; Biological process=regulation of transcription, DNA -dependent
  Homolog annotation: Hit_ID=Q2QNK0; Match level="QueryCoverage=86%, HitCoverage=14%, E-value=1e-34, Identity=68%"; Hit description =Protein kinase family protein, putative, expressed
SQVRADENGIEREGGSGESQCSDRGAKEEPTSSGTTTPXGDAPRGLFSTEEHSPGQSTNPNSDESGEGKVGLHKILSSKAEALLNKKGISWPWKGRENEGPDERNHVTFTIGTSIGCYLKLVNLVP

SEQ ID NO: 128915 - protein, 48 aa, Setaria italica
  Transcript Sequence Number=SeqID_62941
  Gene Ontology: Mol. function=protein serine/threonine kinase activity
  Homolog annotation: Hit_ID=Q2QNK0; Match level="QueryCoverage=64%, HitCoverage=4%, E-value=3e-12, Identity=96%"; Hit description =Protein kinase family protein, putative, expressed
SSASSTGSTNSSALYKIDHEADCLDYEILWEDLVIGEQIGQGSCFSFN

SEQ ID NO: 128916 - protein, 63 aa, Setaria italica
  Transcript Sequence Number=SeqID_62942
  Subcellular localization annotation: CTP_CleavageSite=35; ConfidenceScore=5.14e-01
SFLIVTFIWLSSVPFFCSMYSLRSWLSMASIPAIRREAEESNSMMARMEAIEFDLQLLSLWPA

SEQ ID NO: 128917 - protein, 70 aa, Setaria italica
  Transcript Sequence Number=SeqID_62943
LQISNSMSRPRQTETDQLGAWAYNWRCNHARHSGDHHVACDWRLSPGTISFHADISTPPSWNLINSAKIW

SEQ ID NO: 128918 - protein, 39 aa, Setaria italica
  Transcript Sequence Number=SeqID_62944
RWCANISMKTNRPWAEPPVTGYMMILAHHLHGICMFGSD

SEQ ID NO: 128919 - protein, 109 aa, Setaria italica
  Transcript Sequence Number=SeqID_62945
MMTTNGSLATTAAARRMRITKIRVAVLYTTPDINRRGPSPIMLFPAFKTGYHLFGSDYNLADKSEVSVSNDWDCSNKCHCYSMNLIQFIDAKIAGYQHTHPGHAKIFGF

SEQ ID NO: 128920 - protein, 33 aa, Setaria italica
  Transcript Sequence Number=SeqID_62946
NNDSRNLGHILSHCPSKQHSEVMQKSKVECLVP

SEQ ID NO: 128921 - protein, 132 aa, Setaria italica
  misc_feature (117)..(117): Xaa can be any naturally occurring amino acid
  Transcript Sequence Number=SeqID_62947
  Homolog annotation: Hit_ID=Q2QMW0; Match level="QueryCoverage=100%, HitCoverage=28%, E-value=3e-60, Identity=84%"; Hit description =Cytoplasmic tRNA 2-thiolation protein 2
  Pfam annotation: Domain name=DUF2392; Domain location=45-132; Score =67.9; E_value=3.6e-17; Accession=PF10288.1; Description=Protein of unknown function (DUF2392)
EVVGMIDDETGRDDFIRCLRMLSLQKIALENGYTKIMLGTCASGIACHVLSATVKGQGYSLPADVQYVDTRWEVPVVLPLHDCLAQELSLLCELYSLKMQQLLDRPCRGINSLVASXVSRLREENPSREHTI

SEQ ID NO: 128922 - protein, 80 aa, Setaria italica
  Transcript Sequence Number=SeqID_62948
  Gene Ontology: Mol. function=metal ion binding; Cellular component =cell wall; Biological process=cell redox homeostasis
  Homolog annotation: Hit_ID=B6T5J0; Match level="QueryCoverage=65%, HitCoverage=15%, E-value=3e-21, Identity=90%"; Hit description=RHC1A
  Pfam annotation: Domain name=zf-C3HC4; Domain location=23-67; Score =9.0; E_value=0.0095; Accession=PF00097.17; Description=Zinc finger, C3HC4 type (RING finger)
TPPAKKEAVEALPTVKIEEVVSCSVCLDDLELGSQAKQMPCEHKFHSPCILPLALNFLLVSIVPCCCRFRANHLKENEKN

SEQ ID NO: 128923 - protein, 87 aa, Setaria italica
  misc_feature (8)..(8): Xaa can be any naturally occurring amino acid
  Transcript Sequence Number=SeqID_62949
  Gene Ontology: Mol. function=RNA polymerase II transcription factor activity; Cellular component=transcription factor TFIIE complex; Biological process=transcription initiation from RNA polymerase II promoter
  Homolog annotation: Hit_ID=B9T7B5; Match level="QueryCoverage=83%, HitCoverage=24%, E-value=8e-20, Identity=60%"; Hit description =Transcription initiation factor iie, alpha subunit, putative
YICPSCNXRYSSFDALQLVSYIDEYFHCESCNGELVAESAKLASEEMGDGIDNVRKCRHEKLKGMLQRVDVSILFFVELLTPEILYS

SEQ ID NO: 128924 - protein, 109 aa, Setaria italica
  misc_feature (60)..(60): Xaa can be any naturally occurring amino acid
  Transcript Sequence Number=SeqID_62950
  Gene Ontology: Mol. function=RNA polymerase II transcription factor activity; Cellular component=transcription factor TFIIE complex; Biological process=transcription initiation from RNA polymerase II promoter
  Homolog annotation: Hit_ID=B9T7B5; Match level="QueryCoverage=74%, HitCoverage=25%, E-value=4e-21, Identity=59%"; Hit description =Transcription initiation factor iie, alpha subunit, putative
LVSYNTNEYFHCESCNGELVAESAKLASEEMGDGIDNVRKCRHEKLKGMLQRVDIRSTLXQLKPLITQLDRVKNLPAPEFGSLKSLERAILGAFTNCDIGASDSSRNSQ

SEQ ID NO: 128925 - protein, 58 aa, Setaria italica
  Transcript Sequence Number=SeqID_62951
MIFLFFFSILQEEYVKAYYEALMKKQEVEDAKGIMQEEDEKVVSDSQSERQLGKKYKW

SEQ ID NO: 128926 - protein, 69 aa, Setaria italica
  Transcript Sequence Number=SeqID_62952
TSSSLKQCMLLKYPFIVVYSKISQCCSFLVLALFSDTLSQPLVRVFVNIKDCNFVSSIPYTMKIMISLK

SEQ ID NO: 128927 - protein, 45 aa, Setaria italica
  Transcript Sequence Number=SeqID_62953
YIVLRHNCSLMLSYYSMIVNKSRLYSYISHDVEPCVECLLKHQIQ

SEQ ID NO: 128928 - protein, 50 aa, Setaria italica
  Transcript Sequence Number=SeqID_62954
REKAKFIEICDLSIRRGSAYMEPHYACCLIVRTYDMLYIYGFLVLICHGT

SEQ ID NO: 128929 - protein, 77 aa, Setaria italica
  Transcript Sequence Number=SeqID_62955
  Gene Ontology: Mol. function=protein binding; Biological process =apoptosis
  Homolog annotation: Hit_ID=Q2R1P5; Match level="QueryCoverage=100%, HitCoverage=5%, E-value=7e-15, Identity=50%"; Hit description =Leucine Rich Repeat family protein, expressed
ALYANPNRNYEELRRLNDTLQVSGNSMATDATKAKAKMIFKFSYKDLPREHKTCLLYLAVFPQGHSIKRSSLIERWA

SEQ ID NO: 128930 - protein, 66 aa, Setaria italica
  misc_feature (52)..(52): Xaa can be any naturally occurring amino acid
  Transcript Sequence Number=SeqID_62956
  Gene Ontology: Mol. function=protein binding; Biological process =ubiquitin-dependent protein catabolic process
  Homolog annotation: Hit_ID=Q8H0X8; Match level="QueryCoverage=98%, HitCoverage=37%, E-value=2e-21, Identity=72%"; Hit description =Similar to CGI-126 protein
  Pfam annotation: Domain name=UFC1; Domain location=6-66; Score=-33.5; E_value=1.1e-06; Accession=PF08694.3; Description=Ubiquitin-fold modifier-conjugating enzyme 1
MEGWDKGTKSTVGEIPLLTTRAGPRDGEAWRQRLKEEYRALIAYTSVNKAKXNDWFRIAAANPGGH

SEQ ID NO: 128931 - protein, 82 aa, Setaria italica
  misc_feature (46)..(46): Xaa can be any naturally occurring amino acid
  Transcript Sequence Number=SeqID_62957
  Gene Ontology: Mol. function=hydrolase activity, acting on ester bonds; Biological process=lipid metabolic process
SVYLASNRSNAISMDMYENHLIARVANHTQAMIMLGGRRFVFVGLXPPMGCMPIARTLVGTGSDRCDETLNQLATSFQLRKS

SEQ ID NO: 128932 - protein, 66 aa, Setaria italica
  Transcript Sequence Number=SeqID_62958
  Gene Ontology: Mol. function=oxidoreductase activity, acting on single donors with incorporation of molecular oxygen, incorporation of two atoms of oxygen; Cellular component=chloroplast; Biological process=fatty acid biosynthetic process
  Homolog annotation: Hit_ID=A1XCI4; Match level="QueryCoverage=96%, HitCoverage=6%, E-value=3e-29, Identity=95%"; Hit description =Lipoxygenase
LGLQEHLFQKIPLVQKIQESSEGMLRYDTPSILSKDKFAWLRDDEFARQTVAGINPVNIARLTVMN

SEQ ID NO: 128933 - protein, 116 aa, Setaria italica
  misc_feature (94)..(94): Xaa can be any naturally occurring amino acid
  Transcript Sequence Number=SeqID_62959
  Gene Ontology: Mol. function=protein disulfide oxidoreductase activity; Cellular component=cytoplasm; Biological process=electron transport chain
  Homolog annotation: Hit_ID=B4FSW8; Match level="QueryCoverage=81%, HitCoverage=67%, E-value=6e-38, Identity=68%"; Hit description=Grx _S17-glutaredoxin subgroup II
  Pfam annotation: Domain name=Glutaredoxin; Domain location=71-116; Score=5.3; E_value=0.068; Accession=PF00462.16; Description =Glutaredoxin
KLVLGPCLSCLSCSSVLLPASLGVAAGPAVLEKVQELAQRNGSSADEGTNSVGLPDSLNKRLEQLVNSHPVFLFMKGTPEQPRCGFSRKVVDIXLKQEGVDFGSFDILTDNDVREG

SEQ ID NO: 128934 - protein, 126 aa, Setaria italica
  Transcript Sequence Number=SeqID_62960
  Gene Ontology: Mol. function=protein disulfide oxidoreductase activity; Cellular component=cytoplasm; Biological process=electron transport chain
  Homolog annotation: Hit_ID=B4FSW8; Match level="QueryCoverage=99%, HitCoverage=61%, E-value=1e-54, Identity=63%"; Hit description=Grx _S17-glutaredoxin subgroup II
  Pfam annotation: Domain name=Glutaredoxin; Domain location=78-126; Score=24.6; E_value=0.0004; Accession=PF00462.16; Description =Glutaredoxin
TKGELLGGCDIVIAMHDSGELKDVFEEHNIPLKPQGSKNVETVEPEAPTGKGGAVSEPVGLTDALKARLESLVNSSPVMVFIKGSPEELKCGFSGKLVHILKQENIPFSSFDILADDDVRQGLKVF

SEQ ID NO: 128935 - protein, 65 aa, Setaria italica
  Transcript Sequence Number=SeqID_62961
  Gene Ontology: Mol. function=protein disulfide oxidoreductase activity; Cellular component=cytoplasm; Biological process=electron transport chain
  Homolog annotation: Hit_ID=B4FSW8; Match level="QueryCoverage=95%, HitCoverage=60%, E-value=2e-24, Identity=68%"; Hit description=Grx _S17-glutaredoxin subgroup II
  Pfam annotation: Domain name=Glutaredoxin; Domain location=4-64; Score=48.2; E_value=3.2e-11; Accession=PF00462.16; Description =Glutaredoxin
GAKVWVFIKGSPEELKCGFSGKLVHILKQENIPFSSFDILADDDVRQGLKVFSNWPSYPHLLCTA

SEQ ID NO: 128936 - protein, 86 aa, Setaria italica
  Transcript Sequence Number=SeqID_62962
  Gene Ontology: Mol. function=protein disulfide oxidoreductase activity; Cellular component=cytoplasm; Biological process=electron transport chain
  Homolog annotation: Hit_ID=B4FSW8; Match level="QueryCoverage=76%, HitCoverage=13%, E-value=1e-20, Identity=77%"; Hit description=Grx _S17-glutaredoxin subgroup II
PQGSKNVETVEPEAPTGKGGAVSEPVGLTDALKARLESLVNSSPVMVFIKGSPEELKCGFSGKLVHNTLKTKKKQLPLLPSFRTIP

SEQ ID NO: 128937 - protein, 144 aa, Setaria italica
  Transcript Sequence Number=SeqID_62963
  Gene Ontology: Mol. function=hydrolase activity, acting on ester bonds; Biological process=lipid metabolic process
  Homolog annotation: Hit_ID=B6STS8; Match level="QueryCoverage=91%, HitCoverage=34%, E-value=2e-59, Identity=81%"; Hit description=Alpha- L-fucosidase 2
CSLLAAAAGAGGRYEALFNFGDSLGDTGNICVNMTAADQLLLTVAHPPYGMTYFGRPTCRCSDGRLVIDFLAQELGLPLLPPSKLRGADFRRGANMAIVGGTALDFAFLESIGLGYPVWNNGAMNVQIQWLRDILPSVCGGGAP

SEQ ID NO: 128938 - protein, 46 aa, Setaria italica
  Transcript Sequence Number=SeqID_62964
LFYTYVTKHIVFNTFWYYTKCSSMPSSESLKGTNAIPALLLETERN

SEQ ID NO: 128939 - protein, 144 aa, Setaria italica
  Transcript Sequence Number=SeqID_62965
  Gene Ontology: Mol. function=methyltransferase activity
  Homolog annotation: Hit_ID=B9S456; Match level="QueryCoverage=95%, HitCoverage=23%, E-value=5e-45, Identity=61%"; Hit description=ATP binding protein, putative
  Pfam annotation: Domain name=DUF248; Domain location=1-138; Score= -290.9; E_value=3.5e-08; Accession=PF03141.8; Description=Putative methyltransferase
TKYIICVRDIDQNCSLNRFATSLIHQPLWVMNVVPVDQPDTLPIIFNRGLIGVYHDWCESFNTYPRTYDLLHMSYLLGPLTRRCHIIEVAAEIDRILRPGRWFVLQDTIEVIRKMEPVLRSLHYRTTIVKQQFLVAAKGFWRPG

SEQ ID NO: 128940 - protein, 92 aa, Setaria italica
  misc_feature (37)..(37): Xaa can be any naturally occurring amino acid
  misc_feature (52)..(52): Xaa can be any naturally occurring amino acid
  Transcript Sequence Number=SeqID_62966
  Gene Ontology: Cellular component=mitochondrion
  Subcellular localization annotation: CTP_CleavageSite=39; ConfidenceScore=5.32e-01
VVNYYWSSSSQSSAFPPKARLLQQRRAHAAPTFTIKXLAAEAAWMPAIDNVXTVLCFIICLVLNITLTGGSNRAIFFLAPILLLLNQDSISL

SEQ ID NO: 128941 - protein, 94 aa, Setaria italica
  Transcript Sequence Number=SeqID_62967
  Homolog annotation: Hit_ID=Q9LYR7; Match level="QueryCoverage=89%, HitCoverage=7%, E-value=6e-14, Identity=45%"; Hit description=No exine formation-1
VSPETSSAEPAVPSCKASKPTWPSWLLITTVVLTLAAVTSIIPVKYVVELRALYAVAVGVTLGIYISVQCFFQAVVLYPLLVATLSLLQSCRIP

SEQ ID NO: 128942 - protein, 23 aa, Setaria italica
  Transcript Sequence Number=SeqID_62968
VIMQPPIKLSWVYRSELITAAQF

SEQ ID NO: 128943 - protein, 68 aa, Setaria italica
  Transcript Sequence Number=SeqID_62969
  Gene Ontology: Mol. function=solute:hydrogen antiporter activity; Cellular component=integral to membrane; Biological process =regulation of pH
  Homolog annotation: Hit_ID=Q8S5V1; Match level="QueryCoverage=48%, HitCoverage=6%, E-value=1e-10, Identity=87%"; Hit description =Putative potassium/proton antiporter-like protein
VYVSQCILLLQVTTPLIFKLIPVVMHLGILMRWFPTENSVQNEVCFVFFADFAHLYQKLDLINQRWWL

SEQ ID NO: 128944 - protein, 38 aa, Setaria italica
  Transcript Sequence Number=SeqID_62970
PQSCGYKIQTSFGAQHTQSTKLSSIGACLELTGRRPVI

SEQ ID NO: 128945 - protein, 53 aa, Setaria italica
  Transcript Sequence Number=SeqID_62971
GGDVVVSGSLGCEEVGRGIPFLFLSFCFLMTSSLLAICKVWLSYITKVADLRV

SEQ ID NO: 128946 - protein, 49 aa, Setaria italica
  Transcript Sequence Number=SeqID_62972
  Gene Ontology: Mol. function=protein serine/threonine kinase activity; Cellular component=integral to plasma membrane; Biological process=protein amino acid phosphorylation
  Homolog annotation: Hit_ID=B9RKQ3; Match level="QueryCoverage=93%, HitCoverage=6%, E-value=5e-19, Identity=93%"; Hit description=ATP binding protein, putative
TEQRLKIALGSAKGLAYLHEDCHPKIIHRDIKASNILLDLRFEAKVADF

SEQ ID NO: 128947 - protein, 122 aa, Setaria italica
  misc_feature (93)..(93): Xaa can be any naturally occurring amino acid
  misc_feature (113)..(113): Xaa can be any naturally occurring amino acid
  Transcript Sequence Number=SeqID_62973
  Gene Ontology: Mol. function=protein serine/threonine kinase activity; Cellular component=integral to plasma membrane; Biological process=protein amino acid phosphorylation
  Homolog annotation: Hit_ID=B6SXS9; Match level="QueryCoverage=81%, HitCoverage=14%, E-value=2e-39, Identity=84%"; Hit description =Receptor protein kinase PERK1
  Subcellular localization annotation: CTP_CleavageSite=22; ConfidenceScore=5.23e-01
PPSHCRSRKARRRVPLTPPPPPAMLNSSGGSGSNYSGGEILPPPSPGAALGFSKSTFTYEELVRATDGFSDANLLGQGGFGYVHRGLLPNGKXIAVKQLKLGSGQGEREFQAXEVEIISRVH

SEQ ID NO: 128948 - protein, 54 aa, Setaria italica
  Transcript Sequence Number=SeqID_62974
  Gene Ontology: Mol. function=protein serine/threonine kinase activity; Cellular component=plasma membrane; Biological process =protein amino acid phosphorylation
  Homolog annotation: Hit_ID=B6SXS9; Match level="QueryCoverage=92%, HitCoverage=7%, E-value=4e-18, Identity=78%"; Hit description =Receptor protein kinase PERK1
MDDNLVDWARPLMTKAFEDGNHDALVDPRLGSEYNDNEMARMIACAAACVTSFF

SEQ ID NO: 128949 - protein, 134 aa, Setaria italica
  misc_feature (16)..(16): Xaa can be any naturally occurring amino acid
  Transcript Sequence Number=SeqID_62975
  Gene Ontology: Mol. function=protein binding; Cellular component =cytoplasm; Biological process=RNA metabolic process
  Homolog annotation: Hit_ID=B9SD55; Match level="QueryCoverage=100%, HitCoverage=16%, E-value=4e-58, Identity=79%"; Hit description =Regulator of nonsense transcripts, putative
  Pfam annotation: Domain name=MIF4G; Domain location=1-126; Score= -7.2; E_value=0.038; Accession=PF02854.11; Description=MIF4G domain
MKNLPSMLLSMLEEEXNFLINKKDQIKIETKIRNIRFIGELCKFKIAPSCLVFGCLKACLDDFTHHNIDVACNLLETCGRFLYRLPETTIRMSNMLEILKRLKNVKNLDAHHSTLVENAYYLCKPPERSSRVSK

SEQ ID NO: 128950 - protein, 117 aa, Setaria italica
  Transcript Sequence Number=SeqID_62976
MLSAAACTPLLGSSHSDCLNNHPICANARIGITSEDLKNTIEKTLGGAGVALSSPRLVIPAVIFGLSALSDHFQNSFFSFEVSAPVCYCTKFHLVGRPCQIYLSLEYTHMPVPVFSC

SEQ ID NO: 128951 - protein, 100 aa, Setaria italica
  Transcript Sequence Number=SeqID_62977
LLNNHPICANARIGITSEDLKNTIEKTLGGAGVALSSPRLVIPAVIFGLSALSDHFQNSFFSFEVSAPVCYCTKFHLVGRPCQIYLSLEYTHMPVPVFSC

SEQ ID NO: 128952 - protein, 98 aa, Setaria italica
  Transcript Sequence Number=SeqID_62978
FIIHHLSILDAYSVLEITCWTILIEYVFSPNMTFLAVYYLLLHVMGFITPRLILLWQLYKFYGFHSYAGSSTWCHQCTNIQINKGMDGIGYYLSKVVV

SEQ ID NO: 128953 - protein, 43 aa, Setaria italica
  Transcript Sequence Number=SeqID_62979
MITMLAASSVVNSSLACSSRISSGSDLASGHSWRPIEAVKLPR

SEQ ID NO: 128954 - protein, 57 aa, Setaria italica
  Transcript Sequence Number=SeqID_62980
  Gene Ontology: Mol. function=receptor activity; Cellular component =integral to membrane
  Homolog annotation: Hit_ID=B9HKS4; Match level="QueryCoverage=73%, HitCoverage=5%, E-value=3e-12, Identity=78%"; Hit description=Pho1 -like protein
MGRTEPLLTAVGVHRAYVISFLPYYWRAMQCLRRYLEEGHDINQLANAGKYVSAMVA

SEQ ID NO: 128955 - protein, 78 aa, Setaria italica
  Transcript Sequence Number=SeqID_62981
  Gene Ontology: Mol. function=receptor activity; Cellular component =integral to membrane
  Homolog annotation: Hit_ID=B9HKS4; Match level="QueryCoverage=88%, HitCoverage=8%, E-value=4e-19, Identity=65%"; Hit description=Pho1 -like protein
MLGACQQVLNFVMDWGFLNPKSKNLWLRDQLILKNKSIYYVSMMLNLALRLAWAQSVMKLKLGRVESRLLDFSLASLE

SEQ ID NO: 128956 - protein, 57 aa, Setaria italica
  Transcript Sequence Number=SeqID_62982
ANSDLMETCIGSHGTHSYVLGTSANCWLTLMDWLLTPGVSQSEKDLIKINMLELKRI

SEQ ID NO: 128957 - protein, 53 aa, Setaria italica
  misc_feature (34)..(34): Xaa can be any naturally occurring amino acid
  Transcript Sequence Number=SeqID_62983
  Gene Ontology: Mol. function=nucleic acid binding; Cellular component= ribonucleoprotein complex
SIKTLSLLLSFPGAMARPRLPILPTPGMPHGFPXAPGAPLMPGVRPPILPAPG

SEQ ID NO: 128958 - protein, 50 aa, Setaria italica
  Transcript Sequence Number=SeqID_62984
IIPPWKHMQSLHEQENGSSRSGTYQCTFFSSISEFSATNKELFSYLSIFS

SEQ ID NO: 128959 - protein, 45 aa, Setaria italica
  misc_feature (34)..(34): Xaa can be any naturally occurring amino acid
  Transcript Sequence Number=SeqID_62985
CTQLVIANFTEFQLATLITFLLHETVFFLSGLPXSLLFERFGLLA

SEQ ID NO: 128960 - protein, 68 aa, Setaria italica
  Transcript Sequence Number=SeqID_62986
  Subcellular localization annotation: CTP_CleavageSite=39; ConfidenceScore=5.25e-01
TEIDVSLKPPTSRPRTKLWQPDSILLSSAQSMISSSSVRQGHRRCSCNLFLNPACHENHSRFRRRSAL

SEQ ID NO: 128961 - protein, 90 aa, Setaria italica
  Transcript Sequence Number=SeqID_62987
FMDAVMKSWRDPNPNIRVDKEADQKLADSRFAELALKRYNKNKNNKVKYALIEAIADAVMFEASGLYRHVNFYAKAKNGPRRTTEVLSVR

SEQ ID NO: 128962 - protein, 108 aa, Setaria italica
  Transcript Sequence Number=SeqID_62988
  Gene Ontology: Mol. function=small protein activating enzyme activity; Cellular component=nucleus; Biological process=protein modification process
  Homolog annotation: Hit_ID=B6TJH0; Match level="QueryCoverage=99%, HitCoverage=23%, E-value=6e-58, Identity=94%"; Hit description=NEDD8- activating enzyme E1 catalytic subunit
CGFLEYDSNDNPLPETVKPMVDGGTEGFKGHARVIIPGTTPCFECNIWLFPPQVKFPLCTLAETPRTAAHCIEYAHLIKWDEVHSGKPFDADDAEHMQWIYSEALKNM

SEQ ID NO: 128963 - protein, 87 aa, Setaria italica
  Transcript Sequence Number=SeqID_62989
  Subcellular localization annotation: CTP_CleavageSite=24; ConfidenceScore=5.20e-01
PGRCSWGSRRRRPPDPPRGRARRRCGRARSPPMAPWDSGGAGLPSDSVYANHLPRLRSSLSTTRLVRSAPLLLLGASAPVVATAKPV

SEQ ID NO: 128964 - protein, 56 aa, Setaria italica
  misc_feature (56)..(56): Xaa can be any naturally occurring amino acid
  Transcript Sequence Number=SeqID_62990
FFNVENPSDVKGKNHGHQPTTISLSEEFWVTRLWRLTKESNLHETLARVYIPYRGX

SEQ ID NO: 128965 - protein, 102 aa, Setaria italica
  Transcript Sequence Number=SeqID_62991
  Homolog annotation: Hit_ID=A6N4D4; Match level="QueryCoverage=94%, HitCoverage=55%, E-value=2e-24, Identity=68%"; Hit description=27 kDa pennisetin
  Subcellular localization annotation: CTP_CleavageSite=18; ConfidenceScore=5.22e-01
MLLPPNIFNQMALANPITAAYWQQQQFLPNVFNQLALTSPITHWQQQQLLSSVFNQVASVNPITTTYWQQQRLLPNVFNQLALTSPIAQLVSSVFNQVALAS

SEQ ID NO: 128966 - protein, 99 aa, Setaria italica
  Transcript Sequence Number=SeqID_62992
  Homolog annotation: Hit_ID=A6N4D4; Match level="QueryCoverage=74%, HitCoverage=44%, E-value=1e-17, Identity=69%"; Hit description=27 kDa pennisetin
  Subcellular localization annotation: CTP_CleavageSite=48; ConfidenceScore=5.45e-01
HLQPNRLWQTPSTAAYWQQQQFLPNVFNQLALTSPITHWQQQQLLSSVFNQVASVNPITTTYWQQQRLLPNVFNQLALTSPIAHLVEHARYQLLLLPVG

SEQ ID NO: 128967 - protein, 86 aa, Setaria italica
  misc_feature (24)..(24): Xaa can be any naturally occurring amino acid
  misc_feature (36)..(36): Xaa can be any naturally occurring amino acid
  Transcript Sequence Number=SeqID_62993
  Homolog annotation: Hit_ID=A6N4D4; Match level="QueryCoverage=98%, HitCoverage=47%, E-value=7e-18, Identity=62%"; Hit description=27 kDa pennisetin
IFNQMALANPITAAYWQQQQLLPXVIGLVRASWLNXPITHWQQQQLLSSVFNQVASVNPITTTYWQQQRLLPNVFNQLALTSPIAT

SEQ ID NO: 128968 - protein, 80 aa, Setaria italica
  Transcript Sequence Number=SeqID_62994
  Subcellular localization annotation: CTP_CleavageSite=45; ConfidenceScore=5.02e-01
KWHQSGVIPFLLWILCPHYSKDTFTPTPTRETNSLQGNSNLLFTHSQLDTTLTLTLFMWLPYHDTTTLHGNLDISSPMAH

SEQ ID NO: 128969 - protein, 57 aa, Setaria italica
  Transcript Sequence Number=SeqID_62995
TLYPHYFEETFTPTPTRETNSLQGTQIFYSSTHNLIQHSLLCSLCGYPTMTLLYYIG

SEQ ID NO: 128970 - protein, 31 aa, Setaria italica
  Transcript Sequence Number=SeqID_62996
MYSIALGATVHDVLYYMSPIYCQHIIDSVSN

SEQ ID NO: 128971 - protein, 43 aa, Setaria italica
  misc_feature (5)..(5): Xaa can be any naturally occurring amino acid
  Transcript Sequence Number=SeqID_62997
RDFLXLLFILQLHREDFSLCSWSMNSNIKKSLQAYQSFSVESD

SEQ ID NO: 128972 - protein, 58 aa, Setaria italica
  Transcript Sequence Number=SeqID_62998
KYKTIVTRRLEELLSSVRSQREKLDKARQSEAASLKHSKSAFEHTSHSKSALEHDGNS

SEQ ID NO: 128973 - protein, 84 aa, Setaria italica
  Transcript Sequence Number=SeqID_62999
  Gene Ontology: Mol. function=chaperone activator activity; Cellular component=cytoplasm
  Pfam annotation: Domain name=Aha1_N; Domain location=1-83; Score= -3.0; E_value=0.00017; Accession=PF09229.3; Description=Activator of Hsp90 ATPase, N-terminal
SLDSLEFPTGKASIDEVSKCSGDAFQVTVRNKKRVGYNYELSLRFRGEWLIKEENKKVKGHLDIPEFSFGELDDLELQVRLQDE

SEQ ID NO: 128974 - protein, 79 aa, Setaria italica
  Transcript Sequence Number=SeqID_63000
  Gene Ontology: Mol. function=microtubule motor activity; Cellular component=microtubule associated complex; Biological process =microtubule-based movement
  Homolog annotation: Hit_ID=Q6YZ52; Match level="QueryCoverage=60%, HitCoverage=8%, E-value=4e-19, Identity=93%"; Hit description =Kinesin motor protein 1-like
MEMKKISDEIKGKKRQIASLEREIAHATLGSQGKATHIPYRDSKLTRLLQSSLSGQGRVSLICTVTPASSNSEETHNTT

SEQ ID NO: 128975 - protein, 52 aa, Setaria italica
  Transcript Sequence Number=SeqID_63001
  Gene Ontology: Mol. function=transferase activity, transferring glycosyl groups; Cellular component=integral to membrane; Biological process=protein amino acid glycosylation
  Homolog annotation: Hit_ID=Q9ZV71; Match level="QueryCoverage=100%, HitCoverage=12%, E-value=2e-20, Identity=82%"; Hit description =Probable beta-1,3-galactosyltransferase 3
TCADCEWKAQAGNVCVASFDWSCSGICKSADRIKEVHQRCGESENAIWNAKF

SEQ ID NO: 128976 - protein, 67 aa, Setaria italica
  Transcript Sequence Number=SeqID_63002
  Gene Ontology: Mol. function=transferase activity, transferring glycosyl groups; Cellular component=integral to membrane; Biological process=protein amino acid glycosylation
  Homolog annotation: Hit_ID=B9SV83; Match level="QueryCoverage=85%, HitCoverage=23%, E-value=3e-26, Identity=85%"; Hit description=Beta -1,3-galactosyltransferase sqv-2, putative
RNLRTLETTSNDRRLCCGTPPDCEWKAQAGNVCVASFDWSCSGICKSADRIKEVHQRCGESENAIWN

SEQ ID NO: 128977 - protein, 66 aa, Setaria italica
  Transcript Sequence Number=SeqID_63003
LPNHSLILSLRPRAISLYLSPQPAQGPTASPSLEPHDRCPRTPSANKWSLLPTIMDAHLSVHSSLN

SEQ ID NO: 128978 - protein, 82 aa, Setaria italica
  Transcript Sequence Number=SeqID_63004
  Subcellular localization annotation: CTP_CleavageSite=26; ConfidenceScore=5.02e-01
VPADLIFLRTFAISSLFFFMSKPGIFSSTKTEKFPYNNPIPKAKNTPKRKIKEIPLLPTIMDAHLSVHSSLNLKLSSYWLST

SEQ ID NO: 128979 - protein, 51 aa, Setaria italica
  misc_feature (9)..(9): Xaa can be any naturally occurring amino acid
  Transcript Sequence Number=SeqID_63005
PQPAQGPTXSPSLEPHDRCPRTPSANKWSLLLLQAVALTFVKSKAPPFFLP

SEQ ID NO: 128980 - protein, 70 aa, Setaria italica
  Transcript Sequence Number=SeqID_63006
  Gene Ontology: Mol. function=methyltransferase activity
IIQDEGSFEINKMHVHEPEKSLIAPNTMAHAVRAVFEPMIVQHFGLSSDVMDEFVRTLEQHLNPGSLHHI

SEQ ID NO: 128981 - protein, 68 aa, Setaria italica
  Transcript Sequence Number=SeqID_63007
QSFSECFSHKEVLNVALSPLLQLIVVEIKLSSNYVQHCMDNQQFSYSDSIGVWIVPTPISYIINYRCP

SEQ ID NO: 128982 - protein, 113 aa, Setaria italica
  Transcript Sequence Number=SeqID_63008
  Gene Ontology: Mol. function=nucleic acid binding; Cellular component= cytoplasm; Biological process=multicellular organismal development
  Homolog annotation: Hit_ID=O04379; Match level="QueryCoverage=96%, HitCoverage=10%, E-value=2e-47, Identity=77%"; Hit description =Protein argonaute
  Pfam annotation: Domain name=Piwi; Domain location=1-113; Score= -69.9; E_value=7.5e-05; Accession=PF02171.9; Description=Piwi domain
PYNKLVQKRHHTRLFPSDRRSADRTGNILPGTVIDRNICHPTEFDFFLCSHAGIKGTSRPTHYHVLRDDNKFTADGLQSLTYNLCYMYSNCTRSVSIAPPAYYAHKLAFRARF

SEQ ID NO: 128983 - protein, 37 aa, Setaria italica
  Transcript Sequence Number=SeqID_63009
KLKRYDQIVKENTSSVCFSTVAVQILLLHSRDITRRT

SEQ ID NO: 128984 - protein, 58 aa, Setaria italica
  Transcript Sequence Number=SeqID_63010
  Gene Ontology: Mol. function=DNA-dependent ATPase activity; Cellular component=nucleus; Biological process=DNA metabolic process
  Homolog annotation: Hit_ID=B6TBD6; Match level="QueryCoverage=87%, HitCoverage=17%, E-value=1e-19, Identity=92%"; Hit description=DNA repair protein RAD51
TCINKLTGRSMMISVAMILKKLADEHNLSVLVTNHMVSAGNGAVKPALGESWKAVPHV

SEQ ID NO: 128985 - protein, 72 aa, Setaria italica
  Transcript Sequence Number=SeqID_63011
KATPDSPLLQPRLISCFHTLSLLMQSGLFGYFHDVTPSMLPIMIGCFHKVDTRILSYLYCQPNYLLTAQEPT

SEQ ID NO: 128986 - protein, 63 aa, Setaria italica
  Transcript Sequence Number=SeqID_63012
  Gene Ontology: Mol. function=RNA-directed DNA polymerase activity; Biological process=RNA-dependent DNA replication
  Homolog annotation: Hit_ID=Q2RBM8; Match level="QueryCoverage=88%, HitCoverage=3%, E-value=2e-14, Identity=64%"; Hit description =Retrotransposon protein, putative, unclassified
MTLEEDDPSSINNTCIVLIPKVGQPEELGQFRPISLCNVIYKIGSKVLANRLRRILPEIIAEE

SEQ ID NO: 128987 - protein, 114 aa, Setaria italica
  misc_feature (51)..(51): Xaa can be any naturally occurring amino acid
  misc_feature (72)..(72): Xaa can be any naturally occurring amino acid
  Transcript Sequence Number=SeqID_63013
  Gene Ontology: Mol. function=RNA-directed DNA polymerase activity; Cellular component=nucleus; Biological process=RNA-dependent DNA replication
  Homolog annotation: Hit_ID=Q2RBM8; Match level="QueryCoverage=74%, HitCoverage=5%, E-value=4e-20, Identity=52%"; Hit description =Retrotransposon protein, putative, unclassified
MLPIMIGCFHKVDTRILSYLYCQPNYLLTFSEEELKVALFQMFPIEAPEPXGFPAHFFQRHWDLCGEKVTSXVLRVLLGEDDPSSINNTCIVLIPKVGQPEELGQFRPISLCNV

SEQ ID NO: 128988 - protein, 91 aa, Setaria italica
  Transcript Sequence Number=SeqID_63014
  Gene Ontology: Cellular component=integral to membrane
  Homolog annotation: Hit_ID=B9SEZ5; Match level="QueryCoverage=92%, HitCoverage=12%, E-value=1e-32, Identity=75%"; Hit description =Endosomal P24A protein, putative
  Subcellular localization annotation: CTP_CleavageSite=72; ConfidenceScore=5.44e-01
LKGTSEGWRSVSWSTACFFPGIVFIVLTVLNFMLWTRNSTGALPISLFFGLLSLWFCVSVPLTLLGGFFGTRAEPIEFPVRTHSRTFLAKY

SEQ ID NO: 128989 - protein, 60 aa, Setaria italica
  Transcript Sequence Number=SeqID_63015
  Gene Ontology: Cellular component=integral to membrane
  Homolog annotation: Hit_ID=B9SEZ5; Match level="QueryCoverage=100%, HitCoverage=9%, E-value=1e-20, Identity=80%"; Hit description =Endosomal P24A protein, putative
MLCVMIGDGVQILGMAIVTIFFAAFGFMSPASRGMLLTGMIVLYMLLGIVAGYAAVRLWR

SEQ ID NO: 128990 - protein, 55 aa, Setaria italica
  Transcript Sequence Number=SeqID_63016
VSYTRCVLHTTRLMRDSSPTKMPSVCIACAHRANKDLDWIKFAQNEQFKAIYGMI

SEQ ID NO: 128991 - protein, 75 aa, Setaria italica
  Transcript Sequence Number=SeqID_63017
NFFPARLICTEKTKPPKWRCKGKGWRRANLGLGDLLALQELGNGGELIRRARRQHRSPPTTPCGSARTATPVGSA

SEQ ID NO: 128992 - protein, 103 aa, Setaria italica
  Transcript Sequence Number=SeqID_63018
  Homolog annotation: Hit_ID=Q7XZY8; Match level="QueryCoverage=88%, HitCoverage=19%, E-value=8e-11, Identity=38%"; Hit description=F-box domain containing protein
MNKILMKILMWDSDNDNVLEHGGRSKDSYIVFHGFQSLQRGCFLSDKFDRVLAYNWSSSKLQDLGQLFPKFYIERDLLFQHRLASASFPYTPCWLGELPEKQN

SEQ ID NO: 128993 - protein, 67 aa, Setaria italica
  misc_feature (45)..(45): Xaa can be any naturally occurring amino acid
  Transcript Sequence Number=SeqID_63019
  Gene Ontology: Mol. function=potassium ion transmembrane transporter activity; Cellular component=integral to membrane; Biological process=potassium ion transport
  Homolog annotation: Hit_ID=B6SS13; Match level="QueryCoverage=97%, HitCoverage=8%, E-value=1e-29, Identity=93%"; Hit description =Potassium transporter 10
  Subcellular localization annotation: CTP_CleavageSite=55; ConfidenceScore=5.12e-01
SCSDAREAGMAFILGNSHVKAKSGSSFLRRFVINFCYDFLRRNSXGPNYAVTIPHASTLEVGMMYYV

SEQ ID NO: 128994 - protein, 93 aa, Setaria italica
  misc_feature (17)..(17): Xaa can be any naturally occurring amino acid
  misc_feature (37)..(37): Xaa can be any naturally occurring amino acid
  Transcript Sequence Number=SeqID_63020
  Gene Ontology: Mol. function=DNA topoisomerase (ATP-hydrolyzing) activity; Cellular component=chromosome; Biological process=DNA topological change
  Homolog annotation: Hit_ID=B6TWI5; Match level="QueryCoverage=88%, HitCoverage=21%, E-value=2e-37, Identity=90%"; Hit description =Meiotic recombination protein SPO11
LTTLCYLCNLKQLAYDXNLLRVPDIRWLGVFTSDFEXFCLPDCCLLHLSPEDRRKAESILARCYLHKEAPEWRSELEAMLQKGVKFEIEALSC

SEQ ID NO: 128995 - protein, 65 aa, Setaria italica
  Transcript Sequence Number=SeqID_63021
  Subcellular localization annotation: CTP_CleavageSite=32; ConfidenceScore=5.04e-01
TKQLVAQAASCGLLLGNQRSDRDLSRTDTSVSTSQIQQQDRNTVQAQRISLSKACLLLDLSLAPP

SEQ ID NO: 128996 - protein, 56 aa, Setaria italica
  Transcript Sequence Number=SeqID_63022
  Subcellular localization annotation: CTP_CleavageSite=16; ConfidenceScore=5.13e-01
HGHTIPAMHDNTTARSCTMSPTQHCTGVNSTPTARTHSLNHKPKLNKTTNDRPYNK

SEQ ID NO: 128997 - protein, 37 aa, Setaria italica
  Transcript Sequence Number=SeqID_63023
IIDSLSYIYLYLHRYMIVNYYMQGPPHYRFTIIYLCK

SEQ ID NO: 128998 - protein, 58 aa, Setaria italica
  misc_feature (9)..(9): Xaa can be any naturally occurring amino acid
  Transcript Sequence Number=SeqID_63024
  Gene Ontology: Mol. function=nucleotide binding; Cellular component =plasma membrane; Biological process=small GTPase mediated signal transduction
  Homolog annotation: Hit_ID=Q8VY57; Match level="QueryCoverage=75%, HitCoverage=23%, E-value=2e-12, Identity=75%"; Hit description=ADP -RIBOSYLATION FACTOR-like protein
AHDFCEAFXESFTEVMGLKTITDREVACFMISCKNSTNIDSVIDWLVKHSKKRIDLNL

SEQ ID NO: 128999 - protein, 127 aa, Setaria italica
  Transcript Sequence Number=SeqID_63025
  Gene Ontology: Mol. function=nucleic acid binding
  Homolog annotation: Hit_ID=Q2PEV8; Match level="QueryCoverage=79%, HitCoverage=24%, E-value=2e-35, Identity=69%"; Hit description =Putative DNA binding protein (Fragment)
  Pfam annotation: Domain name=RRM_1; Domain location=29-93; Score =76.9; E_value=7.2e-20; Accession=PF00076.14; Description=RNA recognition motif. (a.k.a. RRM, RBD, o
  Pfam annotation: Domain name=RRM_3; Domain location=29-117; Score= -5.1; E_value=0.062; Accession=PF08777.3; Description=RNA binding motif
  Pfam module annotation: Pfam domain module=RRM_1::RRM_3; Domain location=29-93::29-117
MVPICVVLAGAYQSSQGNLSENDPNNTTVFVGGLDSNVNEEYLRQTFTPYGEIAYVKIPVGKRCGFVQFTSRSSAEEAIRMLNGSLIGGQNVRLSWGRSPQNKQAPQQDANSQYNGNNYYGYQQQGY

SEQ ID NO: 129000 - protein, 74 aa, Setaria italica
  Transcript Sequence Number=SeqID_63026
  Gene Ontology: Mol. function=nucleic acid binding
  Homolog annotation: Hit_ID=Q7EZ58; Match level="QueryCoverage=75%, HitCoverage=27%, E-value=1e-19, Identity=82%"; Hit description=RNA Binding Protein-like
  Pfam annotation: Domain name=RRM_1; Domain location=5-74; Score=36.7; E_value=9.1e-08; Accession=PF00076.14; Description=RNA recognition motif. (a.k.a. RRM, RBD, o
VHQSIFVGDLAADVTDSMLEEVFRASYPSVRGAKVVIDKPTGRPKGYGFVRFGDLNEQAPETRNRGKARHTGDR

SEQ ID NO: 129001 - protein, 100 aa, Setaria italica
  Transcript Sequence Number=SeqID_63027
  Pfam annotation: Domain name=GRP; Domain location=1-66; Score=2.4; E _value=4.4e-05; Accession=PF07172.3; Description=Glycine rich protein family
MMSGKALLVAVLLVGVASRCSASRGLQGDHVAEQKYGGGGYGGGGGGGGGYGGGGGGYTPGYSGTGTCDYWKSHPDAIISCIGSLGSILGSFGDVCSAFF

SEQ ID NO: 129002 - protein, 50 aa, Setaria italica
  Transcript Sequence Number=SeqID_63028
  Subcellular localization annotation: CTP_CleavageSite=23; ConfidenceScore=5.07e-01
VLVYSSVRRLLPSVGSPPPRRPPCSRRPTSPATTYDDEASIVSVVVVLVK

SEQ ID NO: 129003 - protein, 45 aa, Setaria italica
  Transcript Sequence Number=SeqID_63029
HVWTCIHHHAHTDLFNKHDDYADDGSFIIISSDASLIVVVADVKK

SEQ ID NO: 129004 - protein, 45 aa, Setaria italica
  Transcript Sequence Number=SeqID_63030
PLDPGRHVWTCIHHHAHTDLFNKHDDYADDGSFIIISSGRRSWPS

SEQ ID NO: 129005 - protein, 77 aa, Setaria italica
  misc_feature (52)..(52): Xaa can be any naturally occurring amino acid
  Transcript Sequence Number=SeqID_63031
  Pfam annotation: Domain name=GRP; Domain location=1-61; Score=-6.8; E_ value=0.0004; Accession=PF07172.3; Description=Glycine rich protein family
MMSGKALLVAVLLVGVASRCSASRGLQGDHVAEQKYGGGGYGGGGGGYGGGXGGGGYGDTAASPPEPPPSPWPGSRC

SEQ ID NO: 129006 - protein, 95 aa, Setaria italica
  misc_feature (13)..(13): Xaa can be any naturally occurring amino acid
  Transcript Sequence Number=SeqID_63032
KSQETGQNMEQRXEVDNAGLEKSNEMLREELQKLKSELQVLRSKEQPVIDVKSCDAEITKLLANMQLATANASLFKEKVLELIVTCESFEISSST

SEQ ID NO: 129007 - protein, 128 aa, Setaria italica
  Transcript Sequence Number=SeqID_63033
  Homolog annotation: Hit_ID=Q84VB6; Match level="QueryCoverage=92%, HitCoverage=36%, E-value=1e-25, Identity=54%"; Hit description =Centromere protein-like protein (Fragment)
TVKDLGVDKQEVLPRPVVTTVATTTMEPQREWKKKVIDRLSSEAQRLRDLRSIVQELRGGVEASSDAELDGVKVQMADAEDAIEELIDANGKLLKKAEEFTSAAAGDDVDLRSRSQRKILERVRKMSE

SEQ ID NO: 129008 - protein, 76 aa, Setaria italica
  Transcript Sequence Number=SeqID_63034
  Homolog annotation: Hit_ID=Q84VD9; Match level="QueryCoverage=71%, HitCoverage=10%, E-value=1e-19, Identity=85%"; Hit description =Centromere protein-like protein (Fragment)
MTRRGEGGSRGGGGVWFCLVRVGSLHAAGNELYQEIKLMNKKLGDLQLENNYLEKELSRTLSICDGSGAEISIGSK

SEQ ID NO: 129009 - protein, 123 aa, Setaria italica
  misc_feature (55)..(55): Xaa can be any naturally occurring amino acid
  misc_feature (100)..(100): Xaa can be any naturally occurring amino acid
  Transcript Sequence Number=SeqID_63035
  Homolog annotation: Hit_ID=Q84VD9; Match level="QueryCoverage=97%, HitCoverage=23%, E-value=9e-33, Identity=65%"; Hit description =Centromere protein-like protein (Fragment)
WPLTLEKLSEKNVFLENLLSDNNTELEILRRKLKDSEESTHTFRNQNSVLRSEKXTLMREVDSINSALLSLETQYAELEGRCLDLEQDRDKALDEVIKLXELLRLEKEGTKSHSSDITQFSAI

SEQ ID NO: 129010 - protein, 119 aa, Setaria italica
  misc_feature (103)..(103): Xaa can be any naturally occurring amino acid
  Transcript Sequence Number=SeqID_63036
VERQSKELRTLVASMFNFKKELETIREENRKLDDQNHSSASVIIRLQDEIISLKNTQRRLEEEVSRHVEEKRVLQHELSYLKDNKGDLDRKHFSIKEQIQVVXNFNVESLQSLAQEVRD

SEQ ID NO: 129011 - protein, 103 aa, Setaria italica
  Transcript Sequence Number=SeqID_63037
  Gene Ontology: Mol. function=DNA-directed RNA polymerase activity; Cellular component=nucleus; Biological process=transcription
  Homolog annotation: Hit_ID=B9RKM1; Match level="QueryCoverage=87%, HitCoverage=40%, E-value=2e-29, Identity=70%"; Hit description=DNA -directed RNA polymerase II, putative
  Pfam annotation: Domain name=RNA_pol_Rpb5_C; Domain location=57-103; Score=0.5; E_value=0.00076; Accession=PF01191.11; Description=RNA polymerase Rpb5, C-terminal domain
KVGMKHIKKYVEMMTHENVSRAVLVLQQNLTPFAKSFLIELEPKIHLEIFQEAELLINIKEHVLVPEHQVLTNEEKKTLLERYTLKETQVLLLIHTYKFRFRG

SEQ ID NO: 129012 - protein, 59 aa, Setaria italica
  Transcript Sequence Number=SeqID_63038
  Gene Ontology: Mol. function=ER retention sequence binding; Cellular component=integral to membrane; Biological process=protein retention in ER lumen
  Homolog annotation: Hit_ID=Q8LD89; Match level="QueryCoverage=89%, HitCoverage=19%, E-value=7e-22, Identity=90%"; Hit description =Putative ER lumen protein retaining receptor
FRQIVYLSCAHWVLQVLDTRGRLLTALGYGLWPSMVLLSEIVQTFILADFCYYYVKSLV

SEQ ID NO: 129013 - protein, 139 aa, Setaria italica
  Transcript Sequence Number=SeqID_63039
GARLRRRRRRQLHALGKPRGRGTRVAVHDQLGDGAAGEDDGVEERPQADQQDGRRLLLPVHGRRRRRRWRRKLHVHDHGQRKGGCFLPSMDDAGSGNDGSLSMDISNGAAGLLTLSASAMGDSKLHTRKTSHTAGEFFN

SEQ ID NO: 129014 - protein, 89 aa, Setaria italica
  Transcript Sequence Number=SeqID_63040
VPSLGRAAPQLPAPQGARLRRRRRRQLHALGKPRGLHVCVCICYGNVFVYIHISKNRRSYEEFLALLFTVVHGLRFYDQLGDGAAGEDD

SEQ ID NO: 129015 - protein, 36 aa, Setaria italica
  Transcript Sequence Number=SeqID_63041
NVVLVVASLSRINGHELISNSSYYVLPVERGVGGGL

SEQ ID NO: 129016 - protein, 99 aa, Setaria italica
  misc_feature (6)..(6): Xaa can be any naturally occurring amino acid
  Transcript Sequence Number=SeqID_63042
MRLPSXLVLLIFAFVGGNLLMGISSNARSAKNSTDPGHGNIELNGRKLKERYTIRKTRGLENIRTDDYQPVDPSPSSKATIRPGDTPTNSFRRSKLNRC

SEQ ID NO: 129017 - protein, 65 aa, Setaria italica
  Transcript Sequence Number=SeqID_63043
SNKQKRIVNHMTEVFFFLLDPGYVWHSLSIQVCPQKVQFLLDHDRAWINLSGHTGHVHVKPQSTP

SEQ ID NO: 129018 - protein, 36 aa, Setaria italica
  Transcript Sequence Number=SeqID_63044
SLVWQHLMGVNGVIVDLVPEITEAVSELIALPEPDP

SEQ ID NO: 129019 - protein, 65 aa, Setaria italica
  Transcript Sequence Number=SeqID_63045
GAFPICIHKQERYNQMLLNPNCLYHLRSRWCSAFTFPFSFCGPYWTKSSNPMLRCSCENCRANTL

SEQ ID NO: 129020 - protein, 64 aa, Setaria italica
  misc_feature (49)..(49): Xaa can be any naturally occurring amino acid
  misc_feature (57)..(57): Xaa can be any naturally occurring amino acid
  Transcript Sequence Number=SeqID_63046
  Subcellular localization annotation: CTP_CleavageSite=31; ConfidenceScore=5.07e-01
VKPMDQVGGFQNHSMCLCPIPKRNNNEKIARMTSLSCLNRNPFILPSLXPLLMFCNXKYSSLQI

SEQ ID NO: 129021 - protein, 73 aa, Setaria italica
  Transcript Sequence Number=SeqID_63047
MNSGILQPDPLVLTHPANSKFVDQHTSSEEDFPSADPLPQSVVKVEKQITGAPPPLTMVGYSVDVADENECRL

SEQ ID NO: 129022 - protein, 90 aa, Setaria italica
  Transcript Sequence Number=SeqID_63048
MDHHLSMRPCIRTEGEDGALGGEDEDGGGEELGDGGADGVRVRRVLAPPHREPPPRPRARAHLGADPKLPASLQLVATSITSPSYSAVLL

SEQ ID NO: 129023 - protein, 82 aa, Setaria italica
  Transcript Sequence Number=SeqID_63049
  Gene Ontology: Mol. function=substrate-specific transmembrane transporter activity; Cellular component=integral to membrane; Biological process=transmembrane transport
GGLGSRQGSVLDHLRDPVVALLDSVHDIKAPAPPPGPGGGSMLFSNLGSMLSFHDNNVDWDEENAAAEQDRSLSDDDDLGAP

SEQ ID NO: 129024 - protein, 67 aa, Setaria italica
  Transcript Sequence Number=SeqID_63050
  Gene Ontology: Mol. function=transferase activity, transferring groups other than amino-acyl groups
  Homolog annotation: Hit_ID=Q01MP2; Match level="QueryCoverage=85%, HitCoverage=12%, E-value=8e-19, Identity=77%"; Hit description =H1005F08.2 protein
WRCMTTARGLEEGQSTSVCIAVDGRARMNPQVPDGYTGNVVLWARPTATSRSFSTAPELAKSMNDLK

SEQ ID NO: 129025 - protein, 109 aa, Setaria italica
  Transcript Sequence Number=SeqID_63051
PYGDQDYLAILWRSQTLPPANRSDEAFPPQGARFRSSGLDPAKISGGEEEGTSNRRKIHKRKQLPVPLPPDAQLESSGEGKLERIYILSELLLPPHVAPFKVGINIATM

SEQ ID NO: 129026 - protein, 129 aa, Setaria italica
  Transcript Sequence Number=SeqID_63052
  Homolog annotation: Hit_ID=Q01HB9; Match level="QueryCoverage=73%, HitCoverage=23%, E-value=4e-16, Identity=52%"; Hit description =OSIGBa0136O08-OSIGBa0153H12.5 protein
MLVSKKGGRWVLHPEDDNASAIALDEMRQFFFNEIVLSAPPDADGRGCVAMAVLAGSTEVAFCRVGVDTAWTLLQTNLECTVGSVVYCQGRFLAIDSTVCRCSNLLDPTPAWSRVKDAGDLTLFVSTHF

SEQ ID NO: 129027 - protein, 61 aa, Setaria italica
  Transcript Sequence Number=SeqID_63053
DGLPCAVHALRLRLAPQEDAAAGGEHGLRRASHLSLSFFLSRHTQQQQQRTSDEHQPENSL

SEQ ID NO: 129028 - protein, 65 aa, Setaria italica
  Transcript Sequence Number=SeqID_63054
MACPAQSMLSASGCIFLRSKPQEDAAAGGEHGLRRASHLSLSFFLSRHTQQQQQRTSDEHQPENS

SEQ ID NO: 129029 - protein, 66 aa, Setaria italica
  Transcript Sequence Number=SeqID_63055
MAPKAEKKPAAKKPAAEGAENTAAIAAGLVLITVAAASSILIQVSKNQPQVAEVAYNGPPLSYYVA

SEQ ID NO: 129030 - protein, 81 aa, Setaria italica
  Transcript Sequence Number=SeqID_63056
  Gene Ontology: Cellular component=chloroplast
  Homolog annotation: Hit_ID=A9JQE3; Match level="QueryCoverage=64%, HitCoverage=32%, E-value=4e-17, Identity=73%"; Hit description =Putative proline-rich family protein (Fragment)
GASLRRASCNASSSPSPSSPPPAPAQEDSDCNEVECAPEKEVGSLSAEWLAEERTRVVGTFPPKKRGWTGLIEKDTAGQTN

SEQ ID NO: 129031 - protein, 71 aa, Setaria italica
  Transcript Sequence Number=SeqID_63057
KCIGYYKLYYLLKKQSMLLSAPAIEYNGSIPRKCCINGQEEEIDIHKKSNDRANMTQEGNPINHPPAPLLA

SEQ ID NO: 129032 - protein, 100 aa, Setaria italica
  misc_feature (84)..(84): Xaa can be any naturally occurring amino acid
  Transcript Sequence Number=SeqID_63058
  Gene Ontology: Mol. function=nucleoside-triphosphatase activity; Cellular component=membrane; Biological process=transport
  Homolog annotation: Hit_ID=B8XSN5; Match level="QueryCoverage=99%, HitCoverage=7%, E-value=1e-31, Identity=65%"; Hit description=PDR -like ABC transporter
  Pfam annotation: Domain name=PDR_assoc; Domain location=15-77; Score =80.7; E_value=5.4e-21; Accession=PF08370.3; Description=Plant PDR ABC transporter associated
QQISMAINEFLAPRWQKETMQTKTIGNQILTNHGLYYNWYFYWISVGALLGYIILFYIAFGLALAYRKPIEYNGSIPRKCCIKXQEEDIDIHKKSNDRAN

SEQ ID NO: 129033 - protein, 78 aa, Setaria italica
  misc_feature (34)..(34): Xaa can be any naturally occurring amino acid
  misc_feature (53)..(53): Xaa can be any naturally occurring amino acid
  misc_feature (62)..(62): Xaa can be any naturally occurring amino acid
  Transcript Sequence Number=SeqID_63059
  Gene Ontology: Mol. function=DNA binding
  Homolog annotation: Hit_ID=B4FN06; Match level="QueryCoverage=96%, HitCoverage=55%, E-value=4e-23, Identity=81%"; Hit description =Programmed cell death protein 5
  Pfam annotation: Domain name=dsDNA_bind; Domain location=3-69; Score=- 33.1; E_value=0.04; Accession=PF01984.12; Description=Double-stranded DNA-binding domain
KDQEEKDYYPTISFGTKPDKARGVEDVLLRAAQXGGISEKVSEERLISLLEQXINTHTSKQXTKVTIQRRRSVLDDDD

SEQ ID NO: 129034 - protein, 57 aa, Setaria italica
  Transcript Sequence Number=SeqID_63060
  Subcellular localization annotation: CTP_CleavageSite=51; ConfidenceScore=5.03e-01
GSTLQLHSAMKKQITAGYFHLGFTKASCYCKFSSTMRWFYTVKSRSIIGCAGQASKY

SEQ ID NO: 129035 - protein, 39 aa, Setaria italica
  Transcript Sequence Number=SeqID_63061
FHLSSLAMYSFSVLLGLSFTSIYYRSRIYGQVKKHNRMC

SEQ ID NO: 129036 - protein, 30 aa, Setaria italica
  misc_feature (3)..(3): Xaa can be any naturally occurring amino acid
  Transcript Sequence Number=SeqID_63062
ITXHSRKPIMNQVTLTMAHKCMPDYFSYLK

SEQ ID NO: 129037 - protein, 63 aa, Setaria italica
  Transcript Sequence Number=SeqID_63063
  Gene Ontology: Mol. function=DNA-directed DNA polymerase activity; Cellular component=intracellular; Biological process=DNA replication
  Homolog annotation: Hit_ID=Q6L9M0; Match level="QueryCoverage=49%, HitCoverage=5%, E-value=5e-10, Identity=83%"; Hit description=DNA polymerase lambda
VIIVCGGSYRRGKATCGDMDIVITHPDGERYTKKSLDTLSSSLSYIFKHKSRKMFYLAFKNFF

SEQ ID NO: 129038 - protein, 106 aa, Setaria italica
  misc_feature (28)..(28): Xaa can be any naturally occurring amino acid
  misc_feature (46)..(46): Xaa can be any naturally occurring amino acid
  misc_feature (62)..(62): Xaa can be any naturally occurring amino acid
  misc_feature (82)..(82): Xaa can be any naturally occurring amino acid
  misc_feature (99)..(99): Xaa can be any naturally occurring amino acid
  Transcript Sequence Number=SeqID_63064
  Gene Ontology: Mol. function=DNA-directed DNA polymerase activity; Cellular component=intracellular; Biological process=DNA replication
  Homolog annotation: Hit_ID=Q6L9M0; Match level="QueryCoverage=89%, HitCoverage=17%, E-value=9e-38, Identity=79%"; Hit description=DNA polymerase lambda
DVGKLTCGDMDIVITHPDGESHVGFYPXVQRLKELTFCREDLIFSXIHSVDGTDSGVDTYLXCTYPGRELRHRIDLKVYPRXNRYACGLLAWTGNDVLXNRRLRLL

SEQ ID NO: 129039 - protein, 139 aa, Setaria italica
  Transcript Sequence Number=SeqID_63065
  Gene Ontology: Mol. function=protein binding
  Homolog annotation: Hit_ID=Q01KP1; Match level="QueryCoverage=67%, HitCoverage=19%, E-value=3e-21, Identity=57%"; Hit description =OSIGBa0107E14.10 protein
IRNCSNLRSLSLRLMPLRSGPGMDFRTPLTDESLKALGLTCHMLEVIELTFTFCSSRYPSEIGFTQEGIVMLVQSCPIRVLMLNGANNFDDEGMKGLSSAQFLETLELVDCERITDAGNQLQSTSNDQYLRRQVLQLLP

SEQ ID NO: 129040 - protein, 77 aa, Setaria italica
  misc_feature (13)..(13): Xaa can be any naturally occurring amino acid
  Transcript Sequence Number=SeqID_63066
  Subcellular localization annotation: CTP_CleavageSite=68; ConfidenceScore=5.42e-01
RPPVVGPPKGPVXTRPPVTYPPITGPPVTVPPITGPPVTVPPITGPPSTTPPVTGPPVTYPPAGDAPAQDQAQEPQA

SEQ ID NO: 129041 - protein, 83 aa, Setaria italica
  Transcript Sequence Number=SeqID_63067
  Gene Ontology: Mol. function=nucleic acid binding; Cellular component= cytoplasm; Biological process=multicellular organismal development
  Homolog annotation: Hit_ID=Q6Z4F1; Match level="QueryCoverage=100%, HitCoverage=7%, E-value=1e-24, Identity=64%"; Hit description =Protein argonaute 14
LHHDVVRICYDLVQMCKSIGMDFNATPVIEVQSASPNNIEAALRNVHINAPNLQLLIVILPEISGHYGKIKKLCETELDIVSQ

SEQ ID NO: 129042 - protein, 93 aa, Setaria italica
  Transcript Sequence Number=SeqID_63068
SDHIKSDAKPTFRNVVFPSSYLHAWSFCYPDSTYCRKASEYPAHFNYCSCLTKGQKSKDFTCSDLKCLTDYVTLKNAELLRTNIKTCSTIYTK

SEQ ID NO: 129043 - protein, 97 aa, Setaria italica
  Transcript Sequence Number=SeqID_63069
  Gene Ontology: Mol. function=nucleotide binding; Biological process =defense response
  Homolog annotation: Hit_ID=A7LM74; Match level="QueryCoverage=54%, HitCoverage=17%, E-value=1e-09, Identity=50%"; Hit description =Jasmonate-induced protein
  Pfam annotation: Domain name=Jacalin; Domain location=2-92; Score= -16.2; E_value=0.0014; Accession=PF01419.9; Description=Jacalin-like lectin domain
MVEGWESLNQRSSLPQTRSNSRKGLLPETTGTYVGSQVVASLAIETNLREYGPYGEEQDMHFSIPLPKNASVVGFFGSAGNLLDAIGVYVMNGSIPN

SEQ ID NO: 129044 - protein, 124 aa, Setaria italica
  misc_feature (94)..(94): Xaa can be any naturally occurring amino acid
  Transcript Sequence Number=SeqID_63070
  Gene Ontology: Mol. function=protein serine/threonine kinase activity; Biological process=defense response
  Homolog annotation: Hit_ID=A7LM74; Match level="QueryCoverage=94%, HitCoverage=39%, E-value=3e-27, Identity=50%"; Hit description =Jasmonate-induced protein
  Pfam annotation: Domain name=Jacalin; Domain location=2-119; Score =58.1; E_value=3.4e-14; Accession=PF01419.9; Description=Jacalin-like lectin domain
LDSVMIRAGEIIDSFGFSYIDQAGQKHTLGPYGGKGGKLTTIQLAPTEYVKGFSGTTGTYVGSQVVASLAIETNLREYGPYGEEQDMHFSIPLXKNASVVGFFGSAGNLLDAIGVYVMNGSIPN

SEQ ID NO: 129045 - protein, 99 aa, Setaria italica
  Transcript Sequence Number=SeqID_63071
  Gene Ontology: Mol. function=sugar binding
  Homolog annotation: Hit_ID=A7LM74; Match level="QueryCoverage=74%, HitCoverage=23%, E-value=6e-10, Identity=45%"; Hit description =Jasmonate-induced protein
  Pfam annotation: Domain name=Jacalin; Domain location=1-76; Score= -34.3; E_value=0.036; Accession=PF01419.9; Description=Jacalin-like lectin domain
EYVKKFSGTIGRAVGSGEMLFVASLEIETNVKKYGPYGKEDNEYPFSIPLPENTSVVGFFGRAGRLIDAVGVYIIFIANPLSLMQLKKPQVTKMKKPQR

SEQ ID NO: 129046 - protein, 111 aa, Setaria italica
  Transcript Sequence Number=SeqID_63072
  Gene Ontology: Mol. function=protein serine/threonine kinase activity; Biological process=defense response
  Homolog annotation: Hit_ID=Q2QVI2; Match level="QueryCoverage=92%, HitCoverage=39%, E-value=3e-17, Identity=45%"; Hit description =Jasmonate-induced protein, putative
  Pfam annotation: Domain name=Jacalin; Domain location=13-109; Score= -34.1; E_value=0.034; Accession=PF01419.9; Description=Jacalin-like lectin domain
RVLVPYWGLGVEANPFDITEEPKRLESVTVRSGAVINSFGFTYVDLAGQKHTVGPVGGNGGKLTTIQFAPTEYVKGFCGSVGPTQGTWVVTCLNIETNLRTHEIYDQGNMF

SEQ ID NO: 129047 - protein, 98 aa, Setaria italica
  misc_feature (10)..(10): Xaa can be any naturally occurring amino acid
  misc_feature (32)..(32): Xaa can be any naturally occurring amino acid
  Transcript Sequence Number=SeqID_63073
  Gene Ontology: Mol. function=thioredoxin-disulfide reductase activity; Cellular component=cytoplasm; Biological process=removal of superoxide radicals
  Homolog annotation: Hit_ID=Q69PS6; Match level="QueryCoverage=97%, HitCoverage=28%, E-value=2e-35, Identity=81%"; Hit description =Thioredoxin reductase
  Pfam annotation: Domain name=Pyr_redox; Domain location=1-80; Score =3.2; E_value=0.0028; Accession=PF00070.19; Description=Pyridine nucleotide-disulphide oxidore
TKYGSQVYIXIHRRNAFRASKIMQARALSNPXRIQVVWDSEVVEAYGGAEGGPLAGVKVKNVVSGEVSDLQVAGLFFAIGHEPATKFLGGQLELRTTE

SEQ ID NO: 129048 - protein, 92 aa, Setaria italica
  Transcript Sequence Number=SeqID_63074
  Gene Ontology: Mol. function=protein binding
  Homolog annotation: Hit_ID=B6TS72; Match level="QueryCoverage=66%, HitCoverage=21%, E-value=8e-19, Identity=73%"; Hit description=U2 small nuclear ribonucleoprotein A
TVTKQPDYRLYVIHKLKHLRLLDFKKVKQQERVAAAQKFHSKEAEEEAKKVPVKAFTPGQPVLNAFSSLAASSRVWVFAIAALIAVICSAVG

SEQ ID NO: 129049 - protein, 89 aa, Setaria italica
  Transcript Sequence Number=SeqID_63075
  Gene Ontology: Mol. function=ribonuclease activity; Cellular component=cytoplasm; Biological process=carbohydrate metabolic process
  Homolog annotation: Hit_ID=B0LV36; Match level="QueryCoverage=76%, HitCoverage=7%, E-value=3e-23, Identity=72%"; Hit description =Ribonuclease E
EDGKLVELLLEPIKNNVQCDSIYLGIVTKLVPHMGGAFVDIGILRPSLMSIKQNRDPFVYPQVVKNSRADPVDDSYYNEDNPFPNFMER

SEQ ID NO: 129050 - protein, 41 aa, Setaria italica
  Transcript Sequence Number=SeqID_63076
YHFNWELPPESKDRGIDMSESFGVTVHRTEKLLLVPVLPQE

SEQ ID NO: 129051 - protein, 81 aa, Setaria italica
  misc_feature (38)..(38): Xaa can be any naturally occurring amino acid
  Transcript Sequence Number=SeqID_63077
  Gene Ontology: Mol. function=oxidoreductase activity; Biological process=oxidation reduction
  Homolog annotation: Hit_ID=B6TFG1; Match level="QueryCoverage=85%, HitCoverage=14%, E-value=5e-19, Identity=71%"; Hit description=NADP -dependent oxidoreductase P1
GQIVGQLAKLHGCYVVGSAGTNQKAHTHTIASSNIHNXIFQVELLKEKLGFDAAFNYKEEPDLTAALKRSEFLLLQKMISA

SEQ ID NO: 129052 - protein, 27 aa, Setaria italica
  Transcript Sequence Number=SeqID_63078
ILLPLFHNSCHSSFVLSPTFLSLTISS

SEQ ID NO: 129053 - protein, 44 aa, Setaria italica
  Transcript Sequence Number=SeqID_63079
KVSHVESKSINLMMVNYIIFRKLIVRQKCLAKDKARMTTIMKQR

SEQ ID NO: 129054 - protein, 68 aa, Setaria italica
  Transcript Sequence Number=SeqID_63080
  Gene Ontology: Mol. function=zinc ion binding; Cellular component =intracellular; Biological process=regulation of transcription, DNA -dependent
  Homolog annotation: Hit_ID=Q2L9Y1; Match level="QueryCoverage=89%, HitCoverage=9%, E-value=5e-25, Identity=86%"; Hit description=EMF -like
LSSHLKIFLCPFCYVRCGSFKGLGCHLNSSHDQFCFEFWISEEYQVVNVRLKADASRTEFLAEGVDPR

SEQ ID NO: 129055 - protein, 114 aa, Setaria italica
  misc_feature (95)..(95): Xaa can be any naturally occurring amino acid
  Transcript Sequence Number=SeqID_63081
  Gene Ontology: Mol. function=zinc ion binding; Cellular component =intracellular
  Homolog annotation: Hit_ID=Q0ZQJ9; Match level="QueryCoverage=90%, HitCoverage=16%, E-value=6e-30, Identity=65%"; Hit description=EMF2
RLWAAHYLPSHTWLLAEGVDPRHQTFSYRSRFKKRRRLETTAEKFRHVHSHIMESGSHEDAQALSEDDYVQRENGFSVADAPVDPSHTVPGSNLXPPTVLQFGKSRKLSVERSD

SEQ ID NO: 129056 - protein, 92 aa, Setaria italica
  Transcript Sequence Number=SeqID_63082
  Subcellular localization annotation: CTP_CleavageSite=61; ConfidenceScore=5.21e-01
IITIQNPSITQDTVYCYSLGGAPCYVISFQQQLIQSTSIMNETMTLLSSPRNSFTNSCSPRSIEITSCLGNLGGLCCTCPWCERLEGCGSRV

SEQ ID NO: 129057 - protein, 70 aa, Setaria italica
  Transcript Sequence Number=SeqID_63083
CLCIHHCLLQCALHWDYAHSWPAMFMTKGHILFLLHTPQLIYPIFMGLGCHLNSSHDQFCFCNFWYYFFV

SEQ ID NO: 129058 - protein, 51 aa, Setaria italica
  Transcript Sequence Number=SeqID_63084
ETLRISLATHSSEIRRVLVSRRLHFFFICQLFVLVSLINWKYSFYKRRCQL

SEQ ID NO: 129059 - protein, 89 aa, Setaria italica
  misc_feature (64)..(64): Xaa can be any naturally occurring amino acid
  Transcript Sequence Number=SeqID_63085
ELLYEAREKTKGGGRMTREQYGALRRKIGGTYQDFFKSYVEVDGEYVEDGWVDKTCKICKKDTXGGEPRQVDKLGRYVHVACLEKPKTG

SEQ ID NO: 129060 - protein, 49 aa, Setaria italica
  Transcript Sequence Number=SeqID_63086
EGLVTTSEVVEDVSIKKYLEVENIATAVEDIGVDKPTEIEDVVDFKKVR

SEQ ID NO: 129061 - protein, 91 aa, Setaria italica
  Transcript Sequence Number=SeqID_63087
VSYLLPSSSPLPTVGDFSDRAKEPHHQKPDLAPLLPVDPIEAWNRRGRGASSIQLSLPLLLLRRCRAGPSPIQPLSLPLFSPDSVLPTRFA

SEQ ID NO: 129062 - protein, 70 aa, Setaria italica
  Transcript Sequence Number=SeqID_63088
  Gene Ontology: Mol. function=DNA binding; Cellular component=nucleus; Biological process=regulation of transcription
  Homolog annotation: Hit_ID=Q5NKS7; Match level="QueryCoverage=81%, HitCoverage=13%, E-value=2e-24, Identity=91%"; Hit description =Putative NAM (No apical meristem) protein
  Pfam annotation: Domain name=NAM; Domain location=11-67; Score=-2.9; E_value=3.6e-07; Accession=PF02365.7; Description=No apical meristem (NAM) protein
MSISVNGQSCVPPGFRFHPTEEELLNYYLRKKVASQEIDLDVIRDVDLNKLEPWDIQGMNLAHGHGSESW

SEQ ID NO: 129063 - protein, 83 aa, Setaria italica
  Transcript Sequence Number=SeqID_63089
  Gene Ontology: Cellular component=integral to membrane
  Homolog annotation: Hit_ID=B4FU25; Match level="QueryCoverage=60%, HitCoverage=15%, E-value=4e-22, Identity=96%"; Hit description =Membrane protein
AAAIITLLFIIALNLAIGILPHADNFAHIGGFATGFLLGFVLLARPQFGWMERHELPQTSQPPKYKAYQYVLWVVALVLLLIG

SEQ ID NO: 129064 - protein, 76 aa, Setaria italica
  Transcript Sequence Number=SeqID_63090
KYELDLRLTYLPTGAVEAPPRSPEATGDLSNSDREALCNQQPFLATQHGGAELESGVPIGALRRAVLAPGRGHPLR

SEQ ID NO: 129065 - protein, 61 aa, Setaria italica
  Transcript Sequence Number=SeqID_63091
QGLQPWFSVLVNHTLVVVVHEMQFLFYCFHHKVTEDALLVNRLFLINATAYTFLGLSSNQC

SEQ ID NO: 129066 - protein, 56 aa, Setaria italica
  Transcript Sequence Number=SeqID_63092
  Gene Ontology: Mol. function=phosphotransferase activity, alcohol group as acceptor
HATQGDLSNSIFIRKNLLRSTLELVHSKEFSLLNEQNVVLIPEAIFSLCAAFSHYQ

SEQ ID NO: 129067 - protein, 51 aa, Setaria italica
  Transcript Sequence Number=SeqID_63093
LFVWHCKLDAMPDVACLMQFHLLSVQVIHHALNSKTLTDSIIAPLAFYLTA

SEQ ID NO: 129068 - protein, 72 aa, Setaria italica
  Transcript Sequence Number=SeqID_63094
  Homolog annotation: Hit_ID=Q25A61; Match level="QueryCoverage=100%, HitCoverage=16%, E-value=1e-30, Identity=87%"; Hit description =H0306F03.14 protein
WKGECQEALPYVVVAGCLLHNFLIKCGEPMPEEIQGNADADEFVDFEGEKDKEGERIRDVLAAHLSLVSRNQ

SEQ ID NO: 129069 - protein, 45 aa, Setaria italica
  Transcript Sequence Number=SeqID_63095
TNRTILREFCSQVLYECMSKDRPSLLQVYITLIQLDFLTGGWILK

SEQ ID NO: 129070 - protein, 59 aa, Setaria italica
  Transcript Sequence Number=SeqID_63096
VLDTSFASVPLMLLHVIMFLWLCNDTQCDHYGVLCDYVVLVVTPYHQPAQKVPREVESD

SEQ ID NO: 129071 - protein, 67 aa, Setaria italica
  Transcript Sequence Number=SeqID_63097
  Subcellular localization annotation: CTP_CleavageSite=48; ConfidenceScore=5.15e-01
KNSSGSSSYGKAVFSGSGLFCRKTFGKTASPSFLECIEDVNCPFCPCICMLLAHEFYVCSIDNVICV

SEQ ID NO: 129072 - protein, 92 aa, Setaria italica
  Transcript Sequence Number=SeqID_63098
RAADPDAPIQIINEDQVVNSPELVELMEGAGLTDFGLQQLIESVLDEQVFVLFWNRSFHTMIKVHNLQYCLLRTSTNFAVLFLVFHLLFDAA

SEQ ID NO: 129073 - protein, 85 aa, Setaria italica
  misc_feature (58)..(58): Xaa can be any naturally occurring amino acid
  Transcript Sequence Number=SeqID_63099
LRLSVSSSMASSANEYVSKRYGKYSIEEVMEVVIACGAGYDSNEHYMASELFVKKEQXREMFMTLPTNEIRFNWLRRKYNDKYEK

SEQ ID NO: 129074 - protein, 91 aa, Setaria italica
  Transcript Sequence Number=SeqID_63100
  Gene Ontology: Mol. function=methionine-tRNA ligase activity; Cellular component=cytoplasm; Biological process=tRNA aminoacylation for protein translation
  Homolog annotation: Hit_ID=Q9ZTS1; Match level="QueryCoverage=73%, HitCoverage=8%, E-value=1e-28, Identity=89%"; Hit description =Probable methionyl-tRNA synthetase
LFILNCRYLLRKVCSLVGSPTVILAAVGERVTFAGYSGEPEASLSGKSKTWEKLAAELHSNGELVACYKDVPFTTSAGICKVKTIANGEIR

SEQ ID NO: 129075 - protein, 120 aa, Setaria italica
  misc_feature (113)..(113): Xaa can be any naturally occurring amino acid
  Transcript Sequence Number=SeqID_63101
  Gene Ontology: Mol. function=methionine-tRNA ligase activity; Cellular component=cytoplasm; Biological process=tRNA aminoacylation for protein translation
  Homolog annotation: Hit_ID=Q9ZTS1; Match level="QueryCoverage=95%, HitCoverage=14%, E-value=9e-58, Identity=93%"; Hit description =Probable methionyl-tRNA synthetase
  Pfam annotation: Domain name=tRNA_bind; Domain location=2-59; Score =18.4; E_value=1.5e-06; Accession=PF01588.12; Description=Putative tRNA binding domain
ISITFFEEMQNRKVCVLCNLKPVAMRGIKSHAMVLAASNEDHTKVELVEPPESAAVGERVTFAGYSGEPEASLSGKSKTWEKLAAELHSNGELVACYKDVPFTTSAGICKVKXIANGEIR

SEQ ID NO: 129076 - protein, 139 aa, Setaria italica
  misc_feature (93)..(93): Xaa can be any naturally occurring amino acid
  Transcript Sequence Number=SeqID_63102
  Gene Ontology: Mol. function=methionine-tRNA ligase activity; Cellular component=cytoplasm; Biological process=tRNA aminoacylation for protein translation
  Homolog annotation: Hit_ID=Q9ZTS1; Match level="QueryCoverage=87%, HitCoverage=15%, E-value=3e-55, Identity=82%"; Hit description =Probable methionyl-tRNA synthetase
  Pfam annotation: Domain name=tRNA-synt_1g; Domain location=6-139; Score=-175.2; E_value=1.3e-08; Accession=PF09334.3; Description=tRNA synthetases class I (M)
MTAIVTLITSRSLISTSFCRNTPHVRETDHFFLDLPLLKDKLVNYINDTSVAGMWSQNAIQATNAWLKEGLKPRCITRDLKWGVPVPIEKYKXFYVWFDAPIGYVSITASYTPEWEKWWKNPDNVELFQFMGKDNVPFH

SEQ ID NO: 129077 - protein, 74 aa, Setaria italica
  Transcript Sequence Number=SeqID_63103
EKARKQQLMLKPTKSLTSSRARNYLVINLEILICSSWLARIIRENSFLVAHLETNRKKSVLPVGYVSFSLKKNL

SEQ ID NO: 129078 - protein, 87 aa, Setaria italica
  Transcript Sequence Number=SeqID_63104
  Gene Ontology: Mol. function=methionine-tRNA ligase activity; Cellular component=cytoplasm; Biological process=tRNA aminoacylation for protein translation
  Homolog annotation: Hit_ID=Q9ZTS1; Match level="QueryCoverage=98%, HitCoverage=10%, E-value=2e-41, Identity=91%"; Hit description =Probable methionyl-tRNA synthetase
YLNYEAGKFSKSKGIGVFGNDAKNTNIPPEVWRYYLLTNRPEASDTLFTWTDLQAKSNSELLKNLGNFINRVLSFIAKPAGAGYDST

SEQ ID NO: 129079 - protein, 37 aa, Setaria italica
  Transcript Sequence Number=SeqID_63105
GVLKYKKMAEDFVRSSGIPFTIISQSSRPDNGERYPT

SEQ ID NO: 129080 - protein, 43 aa, Setaria italica
  misc_feature (8)..(8): Xaa can be any naturally occurring amino acid
  Transcript Sequence Number=SeqID_63106
QPIQTSWXKGPHHFCPCTLCSNCLLWLPLITVVVVLFRSWTSA

SEQ ID NO: 129081 - protein, 160 aa, Setaria italica
  misc_feature (18)..(18): Xaa can be any naturally occurring amino acid
  Transcript Sequence Number=SeqID_63107
  Gene Ontology: Mol. function=methyltransferase activity; Cellular component=nucleus; Biological process=DNA methylation
  Homolog annotation: Hit_ID=Q8LER4; Match level="QueryCoverage=98%, HitCoverage=41%, E-value=2e-49, Identity=60%"; Hit description=DNA methyltransferase PMT1-like protein
RLTASDLDKYKAHAWLLXPPCQPYTRQGLQKHSADARAFSFIKILNLMQNMSHPPQMLFVENVVGFEVSDTHDQLLEVLSSLNFNLQEFILSPLQFGVPYSRPRYFCLAKREPMGFQNASFNKKLLWTPMCVSQTMNSTSQDSDLRTEEELDPVCKPVKD

SEQ ID NO: 129082 - protein, 64 aa, Setaria italica
  Transcript Sequence Number=SeqID_63108
RNQTSVFPSETRNCVFVVHFMKTPLDCVEQLCNYCQFCIDRRNENLWGFKMHHSTRSCSGHLCA

SEQ ID NO: 129083 - protein, 72 aa, Setaria italica
  Transcript Sequence Number=SeqID_63109
FSSPHNVVGQSPHGQQSHADIMMFLVWPTGTQTHFQPITHGIIFQTILLCSRNFLNFIIMSSIKMHTWGVET

SEQ ID NO: 129084 - protein, 69 aa, Setaria italica
  Transcript Sequence Number=SeqID_63110
LIFILVKVQSSMVHSNRNYKWRTTLVPEVTVQLDNIIGRDLLSSIKHILQVKSWFTLSLVGCGCHRLQS

SEQ ID NO: 129085 - protein, 66 aa, Setaria italica
  Transcript Sequence Number=SeqID_63111
  Homolog annotation: Hit_ID=B9SAE9; Match level="QueryCoverage=59%, HitCoverage=32%, E-value=2e-10, Identity=71%"; Hit description =Transmembrane protein 14, putative
  Pfam annotation: Domain name=Tmemb_14; Domain location=9-65; Score= -3.3; E_value=0.0018; Accession=PF03647.5; Description=Transmembrane proteins 14C
REENKLWCVKSSVAFKVSRLTLPETSNSYLALALETLCAFALTYVMGQRYLETSKVMPAGVVAGLR

SEQ ID NO: 129086 - protein, 83 aa, Setaria italica
  Transcript Sequence Number=SeqID_63112
  Gene Ontology: Cellular component=membrane
  Homolog annotation: Hit_ID=B9SAE9; Match level="QueryCoverage=92%, HitCoverage=64%, E-value=3e-13, Identity=51%"; Hit description =Transmembrane protein 14, putative
  Pfam annotation: Domain name=Tmemb_14; Domain location=4-76; Score =73.8; E_value=6.1e-19; Accession=PF03647.5; Description =Transmembrane proteins 14C
  Subcellular localization annotation: CTP_CleavageSite=50; ConfidenceScore=5.04e-01
MHDFCFTIPYGFAVLAGGVLGYLRRGSTASLAGGAGAGALLLLAGFVSLKAFEKRRNSYLALALETRTRRPLPFTLGCAFRFV

SEQ ID NO: 129087 - protein, 88 aa, Setaria italica
  Transcript Sequence Number=SeqID_63113
SYFLYKVQSSMVHSNRNYKWRTTLVPEVTVQLDNIIGRDLLSSIKHILQVKSWFTLSLVGCGCHRLQSSKVMPAGVVAGPQRLDVCIL

SEQ ID NO: 129088 - protein, 35 aa, Setaria italica
  Transcript Sequence Number=SeqID_63114
  Gene Ontology: Mol. function=anthranilate synthase activity; Biological process=tryptophan biosynthetic process
  Homolog annotation: Hit_ID=Q10NN5; Match level="QueryCoverage=85%, HitCoverage=5%, E-value=3e-10, Identity=96%"; Hit description =Anthranilate synthase component I family protein, expressed
RFERRTYANPFEVYRTLRIVNPSPYMAYVQVEIEA

SEQ ID NO: 129089 - protein, 49 aa, Setaria italica
  Transcript Sequence Number=SeqID_63115
KSALKAEKIGLSERLSPLRLVPSVSHRDLHQSTQLRHGHARQAPHPLLL

SEQ ID NO: 129090 - protein, 41 aa, Setaria italica
  Transcript Sequence Number=SeqID_63116
MWYLLISNFLKQFIVSYYQCCCIYVNKYLHRNVIWCCCICR

SEQ ID NO: 129091 - protein, 77 aa, Setaria italica
  misc_feature (69)..(69): Xaa can be any naturally occurring amino acid
  Transcript Sequence Number=SeqID_63117
  Gene Ontology: Mol. function=protein binding; Cellular component =cytoplasm; Biological process=multicellular organismal development
  Homolog annotation: Hit_ID=A0S6X4; Match level="QueryCoverage=97%, HitCoverage=42%, E-value=5e-36, Identity=94%"; Hit description=FT -like protein
  Pfam annotation: Domain name=PBP; Domain location=1-67; Score=-30.6; E_value=0.0077; Accession=PF01161.12; Description=Phosphatidylethanol amine-binding protein
FLFGTEIVCYESPRPVLGIHRLVFLLFQQLGRQTVYAPGWRQNFSTRDFAELYNLGLPVAAVYFNCQRXSGTGGRRM

SEQ ID NO: 129092 - protein, 49 aa, Setaria italica
  Transcript Sequence Number=SeqID_63118
  Homolog annotation: Hit_ID=Q6L565; Match level="QueryCoverage=89%, HitCoverage=4%, E-value=4e-11, Identity=63%"; Hit description =Putative RNA polymerase sigma factor
MRYSFVAVVLVPVICWALEHVARFLRRHFTSSSLYRTYLEQPCTWVEAN

SEQ ID NO: 129093 - protein, 62 aa, Setaria italica
  Transcript Sequence Number=SeqID_63119
  Gene Ontology: Mol. function=1-deoxy-D-xylulose-5-phosphate synthase activity; Biological process=terpenoid biosynthetic process
  Homolog annotation: Hit_ID=Q58HB2; Match level="QueryCoverage=98%, HitCoverage=21%, E-value=2e-28, Identity=100%"; Hit description=1 -deoxy-D-xylulose 5-phosphate synthase 1 (Fragment)
APTPLLDTINYPVHMKNLSVKELRQLADELRSDVIFHVSKTGGHLGSSLGVVELTVALHYVF

SEQ ID NO: 129094 - protein, 109 aa, Setaria italica
  misc_feature (89)..(89): Xaa can be any naturally occurring amino acid
  Transcript Sequence Number=SeqID_63120
  Gene Ontology: Mol. function=flavin-containing monooxygenase activity; Cellular component=intrinsic to endoplasmic reticulum membrane; Biological process=oxidation reduction
  Homolog annotation: Hit_ID=UPI0001A7B1EB; Match level="QueryCoverage =100%, HitCoverage=26%, E-value=2e-29, Identity=52%"; Hit description= FAD binding / NADP or NADPH binding / electron carrier/ flavin -containing monooxygenase/ monooxygenase
AKEVHIAARYSEDRLGKIELYQNVWMHAEIDGIQDDGRVHFAEGSAVAADTILYCTGYRYHFPFLDLDGLTVDDNRVGPLYRHVFPPSXAPNLSFVGLPFKTIIFQALE

SEQ ID NO: 129095 - protein, 44 aa, Setaria italica
  Transcript Sequence Number=SeqID_63121
RFLCVKGIDKWRGKQIHSHNYRVPEPFRDQVLLLLPSTSCSLAR

SEQ ID NO: 129096 - protein, 91 aa, Setaria italica
  Transcript Sequence Number=SeqID_63122
  Gene Ontology: Mol. function=protein binding
  Homolog annotation: Hit_ID=Q6YYI9; Match level="QueryCoverage=94%, HitCoverage=16%, E-value=1e-20, Identity=61%"; Hit description =Putative speckle-type POZ protein
  Pfam annotation: Domain name=BTB; Domain location=5-90; Score=23.8; E_ value=0.00016; Accession=PF00651.23; Description=BTBPOZ domain
MHQHLGNLLACEDGTDVTFKVAGGGGTGTFSAHRCVLAARSPVFRAQLFGEMKEGKEAATGGVVIAVDDMEAHVFRSLLHFVYTDSSSVSV

SEQ ID NO: 129097 - protein, 104 aa, Setaria italica
  misc_feature (36)..(36): Xaa can be any naturally occurring amino acid
  misc_feature (47)..(47): Xaa can be any naturally occurring amino acid
  Transcript Sequence Number=SeqID_63123
  Gene Ontology: Mol. function=aminoacyl-tRNA ligase activity; Cellular component=cytoplasm; Biological process=tRNA aminoacylation for protein translation
  Homolog annotation: Hit_ID=B6TKT6; Match level="QueryCoverage=96%, HitCoverage=25%, E-value=1e-41, Identity=84%"; Hit description =Sucrose cleavage protein-like
  Pfam annotation: Domain name=Suc_Fer-like; Domain location=1-104; Score=-17.7; E_value=2.8e-05; Accession=PF06999.4; Description =Sucraseferredoxin-like
DNFVEEVLVKDTEWLPGCPEAISGSYVFVCSHGSRXKRCGVCGPALXKRFKEEINGLGLCIGKVAVSACSHVGGHKYAGNVIIFRSDDKGEVTGHWYGYVSYLE

SEQ ID NO: 129098 - protein, 116 aa, Setaria italica
  misc_feature (12)..(12): Xaa can be any naturally occurring amino acid
  Transcript Sequence Number=SeqID_63124
  Homolog annotation: Hit_ID=B6TKT6; Match level="QueryCoverage=99%, HitCoverage=26%, E-value=1e-22, Identity=56%"; Hit description =Sucrose cleavage protein-like
RIVDHLWRGKNXGLILEGRQDKKDKALELRNMTNGAKESLEETGTDGASCIPPATGGGCCQGNGGFTCCQTDLPKEKQDKSVAAEQNQKGSEKENDKESGAGSKKGHTKTCPMPTW

SEQ ID NO: 129099 - protein, 102 aa, Setaria italica
  Transcript Sequence Number=SeqID_63125
HAIGKYDSKGEYLVHKVYICSNLKYPFGQQYHDEIEGCTNTNDVLQSFSSFSHMQQGQLEEGEHCWLLPCSIAIAPCSNIKNKHLRMPLEQVEDDLQPRRGE

SEQ ID NO: 129100 - protein, 78 aa, Setaria italica
  Transcript Sequence Number=SeqID_63126
TLPNSYSLSRRAEAGVLQFTRVLFTHAGPFGPVLAPFGPAVLGLAFGPNWPSWVFQVRNISCWIYLAACPHAAVTPLL

SEQ ID NO: 129101 - protein, 85 aa, Setaria italica
  Transcript Sequence Number=SeqID_63127
TMASRGLHVKVDGPVVQTAVAALAGDQDLGVARAVTVEVRDHRCHDAGRAGADLSGDAEACGGGLGDGGQEADAGLEVAGGKPGS

SEQ ID NO: 129102 - protein, 62 aa, Setaria italica
  Transcript Sequence Number=SeqID_63128
  Gene Ontology: Mol. function=transferase activity, transferring glycosyl groups
  Homolog annotation: Hit_ID=B6SV44; Match level="QueryCoverage=91%, HitCoverage=11%, E-value=6e-24, Identity=81%"; Hit description =Transferase, transferring glycosyl groups
GGICIDKTFGDHLNFSDPAVSGVHSSQCAWSWGINIVDLDAWRRTNVTETYQFWLQKASPLS

SEQ ID NO: 129103 - protein, 58 aa, Setaria italica
  Transcript Sequence Number=SeqID_63129
TFCQIKLRIIYLTEKRYDLRTRRMPEPESLIVASSRSTITPSSSPLVDSISNADITCT

SEQ ID NO: 129104 - protein, 58 aa, Setaria italica
  Transcript Sequence Number=SeqID_63130
  Gene Ontology: Mol. function=phosphopyruvate hydratase activity; Cellular component=phosphopyruvate hydratase complex; Biological process=glycolysis
  Homolog annotation: Hit_ID=Q56WK5; Match level="QueryCoverage=84%, HitCoverage=18%, E-value=6e-16, Identity=85%"; Hit description =Enolase
NFKLKVNEQLSTGTKYKTGAPCRSERLAKYNQLLRIEEELGAAAIYAGENFRAPVEPY

SEQ ID NO: 129105 - protein, 58 aa, Setaria italica
  Transcript Sequence Number=SeqID_63131
  Gene Ontology: Mol. function=phosphopyruvate hydratase activity; Cellular component=phosphopyruvate hydratase complex; Biological process=glycolysis
  Homolog annotation: Hit_ID=P26301; Match level="QueryCoverage=91%, HitCoverage=11%, E-value=4e-22, Identity=90%"; Hit description =Enolase 1
EAIGVLKAVNNVNSIIGPAIIGKDPTEQVDIDNFMVQQLDGTSNDWGWCKQKLGANDY

SEQ ID NO: 129106 - protein, 63 aa, Setaria italica
  Transcript Sequence Number=SeqID_63132
  Gene Ontology: Mol. function=phosphopyruvate hydratase activity; Cellular component=phosphopyruvate hydratase complex; Biological process=glycolysis
  Homolog annotation: Hit_ID=P26301; Match level="QueryCoverage=77%, HitCoverage=10%, E-value=2e-19, Identity=95%"; Hit description =Enolase 1
MQSIIKKKYGQDATNVGDEGGFAPNIQENKEGLELLKAAIEKAGYTGKVSPLFSTLLTIQPLH

SEQ ID NO: 129107 - protein, 85 aa, Setaria italica
  Transcript Sequence Number=SeqID_63133
LSTKEYTLTCYCYFNALLHVCTYHIHENIFYFYIHKNILRQIIISKILNSGRCGQRDTQAGRRPLRLRQRGVLRVGEISHPVYSS

SEQ ID NO: 129108 - protein, 78 aa, Setaria italica
  misc_feature (75)..(75): Xaa can be any naturally occurring amino acid
  Transcript Sequence Number=SeqID_63134
IINETPYAKATRSSRPRGTPQIEYDQIINNPQDGDTSGSDSPYEPEEENIRSRKAKGKEATNSKDYQPFNRKAPXIED

SEQ ID NO: 129109 - protein, 68 aa, Setaria italica
  Transcript Sequence Number=SeqID_63135
QLICLCFMLAQDGDTSGSDSPYEPEEENIRSRKAKGKEATNSRTINRSTGRPPQLRIKEEPTDDQDVD

SEQ ID NO: 129110 - protein, 68 aa, Setaria italica
  Transcript Sequence Number=SeqID_63136
  Gene Ontology: Mol. function=electron carrier activity; Cellular component=integral to membrane; Biological process=oxidation reduction
  Homolog annotation: Hit_ID=Q9FVM8; Match level="QueryCoverage=83%, HitCoverage=10%, E-value=1e-22, Identity=91%"; Hit description =Cytochrome P450
RSTWWTLRASVVSWFFWLVSTHPAVERKIVRELCAVLAASRGADDPALWLAAPFDFEELDRLVYLKAA

SEQ ID NO: 129111 - protein, 48 aa, Setaria italica
  Transcript Sequence Number=SeqID_63137
  Gene Ontology: Mol. function=electron carrier activity; Biological process=oxidation reduction
  Homolog annotation: Hit_ID=Q9FVM8; Match level="QueryCoverage=89%, HitCoverage=7%, E-value=3e-11, Identity=83%"; Hit description =Cytochrome P450
RSTWWTLRTAMSRWVSRSIHGRLLPILGDATADGRSVDLQDLLLRLTF

SEQ ID NO: 129112 - protein, 41 aa, Setaria italica
  Transcript Sequence Number=SeqID_63138
FRILPYMMNIISKLWIYLQMKLNVIVTLIGHEYSLFQFTIL

SEQ ID NO: 129113 - protein, 137 aa, Setaria italica
  Transcript Sequence Number=SeqID_63139
  Homolog annotation: Hit_ID=B6UHI1; Match level="QueryCoverage=71%, HitCoverage=34%, E-value=5e-26, Identity=61%"; Hit description =Harpin-induced protein
  Pfam annotation: Domain name=Hin1; Domain location=40-136; Score =12.5; E_value=0.00015; Accession=PF07320.5; Description=Harpin -induced protein 1 (Hin1)
RPSAPCYAKYDNGDLAYFDNVVRGNLSKGALRGVVGGAFYLLYRPHRPAFTLSVAHVTKLSLSSSATAPALTDAIDVTLTAKNPNKKLVYFYDDFTVTAATAANAVPLGEASVPGFAHEAGNITVIKATVSASALAI

SEQ ID NO: 129114 - protein, 83 aa, Setaria italica
  Transcript Sequence Number=SeqID_63140
  Homolog annotation: Hit_ID=B6UHI1; Match level="QueryCoverage=96%, HitCoverage=28%, E-value=3e-20, Identity=65%"; Hit description =Harpin-induced protein
KAPPAFTLSVAEEERLSLVTCATAPALTDAIDVTLTAKNPNKKLVYFYDDFTVTAATAANAVPLGEASVPGFAHEAGNITVIK

SEQ ID NO: 129115 - protein, 100 aa, Setaria italica
  Transcript Sequence Number=SeqID_63141
KKQKRKQRTNKVVDELADRLQEARTVNLIKSGWSHLLHRFQVSTDSSETDIHIIWSILLAAGLAFTLGIGLSFMDSLYAVWFAGLILSCTFTHHTAVPQT

SEQ ID NO: 129116 - protein, 91 aa, Setaria italica
  Transcript Sequence Number=SeqID_63142
LLSYFKLTFLMLVLIITNSNSIRINVTISIGFTAIGVGDDQHQHEEEANTSLEVNGVHGSLNAQAVAATSIGNDINWDEFDMLYDSLHIRH

SEQ ID NO: 129117 - protein, 62 aa, Setaria italica
  misc_feature (44)..(44): Xaa can be any naturally occurring amino acid
  Transcript Sequence Number=SeqID_63143
VQGYEEAPPSTSSHTLAATTVQVKLVETARGQKVPVRVDHVDIXLSSIVEEGWILTNYAFAL

SEQ ID NO: 129118 - protein, 41 aa, Setaria italica
  Transcript Sequence Number=SeqID_63144
SKPLSLHLNYSHIPCLKIYPKIHQYIILIIKVYTHDVCHHL

SEQ ID NO: 129119 - protein, 40 aa, Setaria italica
  Transcript Sequence Number=SeqID_63145
HTSCVYTLMIRIIYWCIRMMYVTIYKYIEEVIRIYIFNMK

SEQ ID NO: 129120 - protein, 40 aa, Setaria italica
  misc_feature (39)..(39): Xaa can be any naturally occurring amino acid
  Transcript Sequence Number=SeqID_63146
QCYHYCSIERQRFIDTAGIIKKFKQSTRPYKVSLQQLLXT

SEQ ID NO: 129121 - protein, 81 aa, Setaria italica
  misc_feature (26)..(26): Xaa can be any naturally occurring amino acid
  misc_feature (30)..(30): Xaa can be any naturally occurring amino acid
  Transcript Sequence Number=SeqID_63147
KNQTIKRNVQENRKSTNKMCTYNINXGNRXKKQIDSLNRTRGKRLPSNLRNGSSIYIDDDTTTLHIIKNLAKERTKKMQKA

SEQ ID NO: 129122 - protein, 32 aa, Setaria italica
  Transcript Sequence Number=SeqID_63148
RTPKPPPRPPSPPVPMPAPGTPKPPGNPGPRS

SEQ ID NO: 129123 - protein, 28 aa, Setaria italica
  Transcript Sequence Number=SeqID_63149
PPPRPPSPPVPMPAPGTPKPPGNPGPRS

SEQ ID NO: 129124 - protein, 54 aa, Setaria italica
  Transcript Sequence Number=SeqID_63150
  Gene Ontology: Mol. function=protein tyrosine kinase activity
FSFVFPYSILHNNSFYGIIPTEIGHLQDIKMLDLGYNNFSGSIPSELQNIFIPL

SEQ ID NO: 129125 - protein, 122 aa, Setaria italica
  Transcript Sequence Number=SeqID_63151
PGGTFYFLPSRYESRAITLSLYGRNLYIMGLREPHETFEIKERNEKRKSYMSGEKIKIRPFKKNYIFLAPKGDVINVRLGLFALLEAFEVLHKCCGETQGVKQAVSAFAVHLCEGLGTTYQK

SEQ ID NO: 129126 - protein, 129 aa, Setaria italica
  Transcript Sequence Number=SeqID_63152
  Subcellular localization annotation: CTP_CleavageSite=13; ConfidenceScore=5.01e-01
AFQHFKDRDKGSACSAVPGGSCMQQGTKNLFSGQNIKILSSKQQGTENLFSGQKIKILEPEVPVVSTATHGKDNDFDASEFSGYVPFVPFTCKLPMQVHELSYSLVSSIRLLLNQLFTFLFMNVVFQIS

SEQ ID NO: 129127 - protein, 132 aa, Setaria italica
  Transcript Sequence Number=SeqID_63153
  Gene Ontology: Mol. function=serine-type endopeptidase activity; Cellular component=cell wall; Biological process=negative regulation of catalytic activity
  Homolog annotation: Hit_ID=B6UDX1; Match level="QueryCoverage=91%, HitCoverage=15%, E-value=1e-54, Identity=84%"; Hit description =Subtilisin-like protease
  Subcellular localization annotation: CTP_CleavageSite=45; ConfidenceScore=5.24e-01
CVENLTPMQLRAFTKNSSRTCKHTFTSPGDLNYPAISAVFAEQPSAALTVRRTATNVGPPTSTYHVKVSEFKGANIVVEPSTLHFTSSNQKLTYKVTMTTKAAQKTPEFGVVLFLGSCTVVPYLFRFRFSFP

SEQ ID NO: 129128 - protein, 124 aa, Setaria italica
  misc_feature (13)..(13): Xaa can be any naturally occurring amino acid
  misc_feature (49)..(49): Xaa can be any naturally occurring amino acid
  misc_feature (59)..(59): Xaa can be any naturally occurring amino acid
  Transcript Sequence Number=SeqID_63154
  Gene Ontology: Mol. function=serine-type endopeptidase activity; Cellular component=extracellular region; Biological process=negative regulation of catalytic activity
  Homolog annotation: Hit_ID=B6UDX1; Match level="QueryCoverage=99%, HitCoverage=15%, E-value=3e-42, Identity=73%"; Hit description =Subtilisin-like protease
  Pfam annotation: Domain name=PA; Domain location=1-88; Score=64.3; E _value=4.7e-16; Accession=PF02225.14; Description=PA domain
GNSSIPDPMSLCXEGTLKPHEVAGKIVICDRGISPRVQKGQVVKNAGGXGMILANTPAXNGEELVADSHLLPAVAVGESEGVAAKKYSKAAPKPTATLSFDGTKLGIRPSPVVAAFSSRGPKLT

SEQ ID NO: 129129 - protein, 112 aa, Setaria italica
  misc_feature (23)..(23): Xaa can be any naturally occurring amino acid
  Transcript Sequence Number=SeqID_63155
  Gene Ontology: Mol. function=serine-type endopeptidase activity; Cellular component=cell wall; Biological process=negative regulation of catalytic activity
  Homolog annotation: Hit_ID=B6UDX1; Match level="QueryCoverage=91%, HitCoverage=13%, E-value=1e-51, Identity=91%"; Hit description =Subtilisin-like protease
ALMTTAYVHDNTYRSLKDAATGXASTPFDHGAGHIHPLRALNPGLVYDIGQDDYLEFLCVENLTPMQLRAFTKNSSRTCKHTFTSPGDLNYPAISAVFAEDKTVLDGRTKKR

SEQ ID NO: 129130 - protein, 41 aa, Setaria italica
  Transcript Sequence Number=SeqID_63156
IMMMKSIMVYEAVHSPLDFGTMLGAHPQCWCAYYSCCWCSC

SEQ ID NO: 129131 - protein, 78 aa, Setaria italica
  misc_feature (10)..(10): Xaa can be any naturally occurring amino acid
  misc_feature (38)..(38): Xaa can be any naturally occurring amino acid
  misc_feature (53)..(53): Xaa can be any naturally occurring amino acid
  misc_feature (60)..(60): Xaa can be any naturally occurring amino acid
  Transcript Sequence Number=SeqID_63157
  Gene Ontology: Mol. function=binding
  Homolog annotation: Hit_ID=Q2R9P0; Match level="QueryCoverage=97%, HitCoverage=3%, E-value=1e-31, Identity=90%"; Hit description =Armadillo/beta-catenin-like repeat family protein, expressed
SIFQQDITTXNAVVPLVQLAGIGILSLQQTAVKALENXSQSWPKAVADAGGFXELSKVIXQDDPQPSQALWESAALVL

SEQ ID NO: 129132 - protein, 53 aa, Setaria italica
  Transcript Sequence Number=SeqID_63158
  Gene Ontology: Mol. function=binding
  Homolog annotation: Hit_ID=Q2R9P0; Match level="QueryCoverage=71%, HitCoverage=1%, E-value=2e-14, Identity=92%"; Hit description =Armadillo/beta-catenin-like repeat family protein, expressed
TKTKNKNLIEKPSTYPSFHERADSLLHCLPGCLTVTIIRGNNLKQTMGGTNAF

SEQ ID NO: 129133 - protein, 112 aa, Setaria italica
  Transcript Sequence Number=SeqID_63159
KGLDRWRKPSSCKKQPCIVLGGLRSVPDPLPPSRKFLSCPGYCEVVLFIGESFPYVHAPGHHGNLFFEVPLECLGTSIQLGPLNRRGRIFLALFVTMDNGVDLPIPSHLPLS

SEQ ID NO: 129134 - protein, 73 aa, Setaria italica
  Transcript Sequence Number=SeqID_63160
KKGLGTVRKEALFLQEAALYCIGRSSLSSRPLPPSRKFLSCPGYCEVVLFIGESFPYVHAPGHHGNLVTYMIS

SEQ ID NO: 129135 - protein, 31 aa, Setaria italica
  Transcript Sequence Number=SeqID_63161
TKLKLCDFGSAMPTGTNEITPYLVSRFYRHL

SEQ ID NO: 129136 - protein, 57 aa, Setaria italica
  Transcript Sequence Number=SeqID_63162
  Gene Ontology: Mol. function=magnesium ion binding; Biological process=metabolic process
  Homolog annotation: Hit_ID=Q01KN9; Match level="QueryCoverage=92%, HitCoverage=9%, E-value=9e-11, Identity=56%"; Hit description =OSIGBa0106G08.5 protein
RFLNDIASYKQGKCEKDVASTVECYMREYGTTGEEAVAAITGMVEHAWRRINKVFVY

SEQ ID NO: 129137 - protein, 50 aa, Setaria italica
  Transcript Sequence Number=SeqID_63163
IKALLLNLFTAGTDTTSSTVEWALAELIPYNPERNLTNQRKPKETKGKEN

SEQ ID NO: 129138 - protein, 65 aa, Setaria italica
  Transcript Sequence Number=SeqID_63164
DLFRSTANDLQRVLPSKQSVCHAHMFDLRNTLYVNKAVGKTEKMNKANVDVINCIFVQLGICSSI

SEQ ID NO: 129139 - protein, 30 aa, Setaria italica
  Transcript Sequence Number=SeqID_63165
RKLFSTKNNSIICGFHCHEVLESTLSMSRI

SEQ ID NO: 129140 - protein, 77 aa, Setaria italica
  Transcript Sequence Number=SeqID_63166
  Gene Ontology: Mol. function=phosphogluconate dehydrogenase (decarboxylating) activity; Biological process=pentose-phosphate shunt
  Homolog annotation: Hit_ID=B8J0E5; Match level="QueryCoverage=72%, HitCoverage=18%, E-value=8e-14, Identity=57%"; Hit description=2 -hydroxy-3-oxopropionate reductase
GLDVAKWLEAISTGAAGSKSLELYGKRILERDMAAGFYVRHFVKDLGICLSECQAMELLREREPRQRQPHGLAFRQA

SEQ ID NO: 129141 - protein, 80 aa, Setaria italica
  Transcript Sequence Number=SeqID_63167
CHAPTPLAVTSVPLHPDLIIMLTRKRVEMEEDDTRKAIQETRSFPHRVPPSLYLLAWRRRISCRCSAPVSPLYTSTVTVV

SEQ ID NO: 129142 - protein, 91 aa, Setaria italica
  Transcript Sequence Number=SeqID_63168
  Subcellular localization annotation: CTP_CleavageSite=41; ConfidenceScore=5.03e-01
SSFSLSVSMETTHFMSLFRHQSHRYTTVTGNVIHIHSDCCVAVRLVPNSDTTVTVDVYNVASGSFLGESMTVKHDSCLLSLRTSTSHYLRG

SEQ ID NO: 129143 - protein, 81 aa, Setaria italica
  Transcript Sequence Number=SeqID_63169
GLSSSLFYCHTFTKKGSTGNVIHIHSDCCVAVRLVPNSDMKCVVSMLTDKEKEEHDEERILSLESLCEYHPPPSPPSSLST

SEQ ID NO: 129144 - protein, 60 aa, Setaria italica
  misc_feature (17)..(17): Xaa can be any naturally occurring amino acid
  Transcript Sequence Number=SeqID_63170
  Gene Ontology: Mol. function=catalytic activity; Biological process =cellular metabolic process
  Homolog annotation: Hit_ID=B6TYI9; Match level="QueryCoverage=100%, HitCoverage=17%, E-value=3e-18, Identity=83%"; Hit description =Dihydroflavonol-4-reductase
MASVEGKGETVLVTASXGASGFIGSTLVRHLLDRGYNVHAGVLNPDDKAETDHLLALAAG

SEQ ID NO: 129145 - protein, 57 aa, Setaria italica
  misc_feature (26)..(26): Xaa can be any naturally occurring amino acid
  Transcript Sequence Number=SeqID_63171
NKSGSECQCPSDWYSIVSTFFYITFXMYRKGCIIDMISVLMDILPLPGNCFPLDTFF

SEQ ID NO: 129146 - protein, 79 aa, Setaria italica
  Transcript Sequence Number=SeqID_63172
  Gene Ontology: Mol. function=peptidase activity
  Homolog annotation: Hit_ID=B6U3W2; Match level="QueryCoverage=93%, HitCoverage=32%, E-value=3e-30, Identity=85%"; Hit description =Cysteine-type peptidase
  Pfam annotation: Domain name=OTU; Domain location=18-79; Score=-2.7; E_value=0.062; Accession=PF02338.11; Description=OTU-like cysteine protease
SFCTRFGLLYGLAEFQIEGDGNCQFRALADQIFRNPDYHKHVRKAVMKQLKEFRKQYESYVPMEYKVYLKRMKRFLVTH

SEQ ID NO: 129147 - protein, 47 aa, Setaria italica
  Transcript Sequence Number=SeqID_63173
VTRSIIAGLLLGFGASAAVFIKKLFIPRLKSWIRSVVAEGDEIQGNQ

SEQ ID NO: 129148 - protein, 74 aa, Setaria italica
  Transcript Sequence Number=SeqID_63174
  Subcellular localization annotation: CTP_CleavageSite=71; ConfidenceScore=5.53e-01
RLISVTSKLAWSLFACFSANSQNQSTGVQTYAPVQSVLPGTAGPVVLRTQPRFSWYQAFLAAGLLLGFGASAAV

SEQ ID NO: 129149 - protein, 49 aa, Setaria italica
  Transcript Sequence Number=SeqID_63175
  Gene Ontology: Cellular component=peroxisome
  Homolog annotation: Hit_ID=B6TK69; Match level="QueryCoverage=100%, HitCoverage=10%, E-value=2e-17, Identity=85%"; Hit description =Peroxin Pex14
QYRPLEEHAPPAIRNGPVNSSWRASQQTNMYGASNGDFGSGRSSFAPAP

SEQ ID NO: 129150 - protein, 37 aa, Setaria italica
  Transcript Sequence Number=SeqID_63176
NLIDMFSCVQSSININIETICNLLNYWYPSSATEPLF

SEQ ID NO: 129151 - protein, 99 aa, Setaria italica
  misc_feature (41)..(41): Xaa can be any naturally occurring amino acid
  misc_feature (57)..(57): Xaa can be any naturally occurring amino acid
  misc_feature (71)..(72): Xaa can be any naturally occurring amino acid
  Transcript Sequence Number=SeqID_63177
  Gene Ontology: Mol. function=nucleotide binding; Biological process =defense response
  Homolog annotation: Hit_ID=Q6WSR3; Match level="QueryCoverage=98%, HitCoverage=8%, E-value=3e-23, Identity=50%"; Hit description =Resistance protein T10rga2-1A
MDEAKLILKKCGGLPLAISVIGSFLSDKPKTRLEWRKLNSXNWGISEPLQTMRNILXRSYNDLPYHLKSCXXYMAIFPGGPNNIKRKRLIRLWVAEGYS

SEQ ID NO: 129152 - protein, 43 aa, Setaria italica
  Transcript Sequence Number=SeqID_63178
  Gene Ontology: Mol. function=nucleic acid binding
DALVVQGRTLRCSLSQAKHRLFVGNVPKGLSEEELRNIIKGKG

SEQ ID NO: 129153 - protein, 72 aa, Setaria italica
  Transcript Sequence Number=SeqID_63179
TVYSCFLGTSANLRYQVIAGLIEHRLGEHLMAYYNQPLLASLLSFVSRIINSYWGTQVCHFCTLHLADNVCI

SEQ ID NO: 129154 - protein, 82 aa, Setaria italica
  misc_feature (52)..(52): Xaa can be any naturally occurring amino acid
  Transcript Sequence Number=SeqID_63180
RRPRLLLPAGTPRAGQVLEVSMAKPLADKRHDHSYRPGGGPNYPLPPYSGGXMEDPYGAFGGGGSAYNQTDDELLEQRSQFT

SEQ ID NO: 129155 - protein, 53 aa, Setaria italica
  Transcript Sequence Number=SeqID_63181
MPLQALYWNMKQRFASVLMGGLKLAGVGFISSIGAGVASDVLYGARQILKPSA

SEQ ID NO: 129156 - protein, 104 aa, Setaria italica
  Transcript Sequence Number=SeqID_63182
  Gene Ontology: Mol. function=nucleic acid binding
  Homolog annotation: Hit_ID=Q2HTD6; Match level="QueryCoverage=30%, HitCoverage=5%, E-value=1e-09, Identity=90%"; Hit description=RNA -binding region RNP-1 (RNA recognition motif); Calcium-binding EF-hand
PDHSHRPGGGPNYPLPPYGGGYMGDPYGAYGGGGPAYNQPMIYGRGPAPAGMRMVPMVLPDGRLGYVLQQPGGMPPPPPPRRGGDRRDGARGGEGSHSRRYRPY

SEQ ID NO: 129157 - protein, 95 aa, Setaria italica
  Transcript Sequence Number=SeqID_63183
  Gene Ontology: Mol. function=nucleic acid binding; Cellular component= ribonucleoprotein complex
  Homolog annotation: Hit_ID=B9SVF8; Match level="QueryCoverage=85%, HitCoverage=14%, E-value=1e-25, Identity=62%"; Hit description =Nucleolar phosphoprotein, putative
MFLSSSSLSPLGTFPNRNRGFLFVEYYNHACADYARQNLSSPNFKVDGSQLTVSWAEPKGSTDASSAASQVKTIYVKNLPENASKEKIKELFDKH

SEQ ID NO: 129158 - protein, 68 aa, Setaria italica
  Transcript Sequence Number=SeqID_63184
RVQKWLSGHNDVFKALLLSFADDGSGDSVELLKGLLGTLPDNAFQKGIVGQNWSIKQRFASVLMGGLK

SEQ ID NO: 129159 - protein, 37 aa, Setaria italica
  Transcript Sequence Number=SeqID_63185
LHMKPYCVFKHGTKILIEVTNGDMFQIMQYGYAKGHG

SEQ ID NO: 129160 - protein, 58 aa, Setaria italica
  Transcript Sequence Number=SeqID_63186
KVSRVGVPLVGRCGYCHTSSYRSDGKEVLVDDKLLKAKEPLVLIEYYEQHLQCVEVGL

SEQ ID NO: 129161 - protein, 61 aa, Setaria italica
  Transcript Sequence Number=SeqID_63187
PLIKSINNVLGQRVVQEGSSGVVSVGFPSQGAPLSVSLTDQQDEHQLANGSSKVESSVRPP

SEQ ID NO: 129162 - protein, 71 aa, Setaria italica
  Transcript Sequence Number=SeqID_63188
ANLINLQVVCSCICFLLTVTPRLILDTHFQVVHFKGSRKRLMLEAWNFYNSTSKLSDMLCLILRSGPDKIR

SEQ ID NO: 129163 - protein, 110 aa, Setaria italica
  misc_feature (20)..(20): Xaa can be any naturally occurring amino acid
  Transcript Sequence Number=SeqID_63189
  Gene Ontology: Mol. function=protein dimerization activity; Cellular component=nucleus; Biological process=regulation of transcription, DNA-dependent
  Homolog annotation: Hit_ID=Q2QM84; Match level="QueryCoverage=84%, HitCoverage=10%, E-value=9e-33, Identity=75%"; Hit description=Auxin response factor 25
EFARYSSLMWLRDGNRGAQXLNFQGFGVSPWLQPRIDYPLLGLKPDTYQQMAAAALEEIRGGDHLKQTSSLLPVQQAQNLNGGLDPLYGNPVLQQMQFQSQQPTPRQRTK

SEQ ID NO: 129164 - protein, 125 aa, Setaria italica
  Transcript Sequence Number=SeqID_63190
  Gene Ontology: Mol. function=protein dimerization activity; Cellular component=nucleus; Biological process=regulation of transcription, DNA-dependent
  Homolog annotation: Hit_ID=Q2QM84; Match level="QueryCoverage=89%, HitCoverage=12%, E-value=6e-54, Identity=89%"; Hit description=Auxin response factor 25
ESGTFNSLDDVCGVNPSQGVTFVKVYKSGSLGRSLDITRFSSYYELRSELERLFGLEGQLEDPVRSGWQLVFVDRENDILLVGDDPWQEFVNSVWCIKILSPQDVQQMVRGGTTFCTNNLGRQTK

SEQ ID NO: 129165 - protein, 42 aa, Setaria italica
  Transcript Sequence Number=SeqID_63191
RLGYSSRANGTREKTTGNAVTSGWQSCDAKLLVWFGFRSSSQ

SEQ ID NO: 129166 - protein, 81 aa, Setaria italica
  misc_feature (22)..(22): Xaa can be any naturally occurring amino acid
  Transcript Sequence Number=SeqID_63192
  Gene Ontology: Mol. function=histone-lysine N-methyltransferase activity; Cellular component=intracellular; Biological process =chromatin modification
  Homolog annotation: Hit_ID=Q84XG3; Match level="QueryCoverage=100%, HitCoverage=6%, E-value=5e-28, Identity=71%"; Hit description=SET domain protein SDG117
FKIMILPDYISCQWLQNLDMWXNKKCMNAKDAETIEMLYEELRQSVLWSKVEELQNASVQPELVPEWKTWKQEVMKQYFPL

SEQ ID NO: 129167 - protein, 67 aa, Setaria italica
  Transcript Sequence Number=SeqID_63193
LPKFLCLSRQPPTFPTRRRGHSLPDLIKHFNSLSILCIHTIFVSTCQDFVAIGSLCSPEESIKQVGM

SEQ ID NO: 129168 - protein, 49 aa, Setaria italica
  Transcript Sequence Number=SeqID_63194
MATPWIPMQSPLMEAPWIPMQSPLPDDYRSLFITFSKGYPISREVLFYW

SEQ ID NO: 129169 - protein, 81 aa, Setaria italica
  misc_feature (81)..(81): Xaa can be any naturally occurring amino acid
  Transcript Sequence Number=SeqID_63195
VCFNLESCNNSYLFMYVLTPDFVIRRIGVKKGYSAESVKRLLLHFRVDTSDSQSAVLCRREIGRAGRWTKVGLYGLGKVEX

SEQ ID NO: 129170 - protein, 41 aa, Setaria italica
  Transcript Sequence Number=SeqID_63196
IILVSRVRLAEYPVLRVFPLWLSFRSSTGSYQGGDPEDLEY

SEQ ID NO: 129171 - protein, 41 aa, Setaria italica
  Transcript Sequence Number=SeqID_63197
NIQLLSPTQKSSEYCRFGIWKRLALQHRIICLIQILTKKIQ

SEQ ID NO: 129172 - protein, 75 aa, Setaria italica
  Transcript Sequence Number=SeqID_63198
  Gene Ontology: Mol. function=transferase activity
  Homolog annotation: Hit_ID=B9S163; Match level="QueryCoverage=78%, HitCoverage=10%, E-value=6e-25, Identity=91%"; Hit description=O -acetyltransferase, putative
MMWEYVTRVFVHLPFSSWLGKITLETYISQFHIWLRSRVPNGQPKWLLAIIPNYPLLNFMLTTAIYVAVSHRLFE

SEQ ID NO: 129173 - protein, 79 aa, Setaria italica
  Transcript Sequence Number=SeqID_63199
AKGKFGIIANSHFELTNTLKVAFVPSRDNKRLSYNFCGRNCHLTVRQLITLVIICSSWHRRILGISLFFFLPFSCVLVQ

SEQ ID NO: 129174 - protein, 73 aa, Setaria italica
  Transcript Sequence Number=SeqID_63200
  Gene Ontology: Mol. function=transferase activity
  Homolog annotation: Hit_ID=B9S163; Match level="QueryCoverage=75%, HitCoverage=9%, E-value=2e-22, Identity=90%"; Hit description=O -acetyltransferase, putative
RCIRRLWKSDDVSYLSNRQITLETYISQFHIWLRSRVPNGQPKWLLAIIPNYPLLNFMLTTAIYVAVSHRLFE

SEQ ID NO: 129175 - protein, 64 aa, Setaria italica
  Transcript Sequence Number=SeqID_63201
  Gene Ontology: Mol. function=transferase activity
  Homolog annotation: Hit_ID=B9S163; Match level="QueryCoverage=89%, HitCoverage=9%, E-value=8e-23, Identity=78%"; Hit description=O -acetyltransferase, putative
MKFVACFLVVILVWEVPGVFDIVWSPFTFLLGYTDPSKPDLPRLHEWQFRSGLDRYISETRNRG

SEQ ID NO: 129176 - protein, 92 aa, Setaria italica
  Transcript Sequence Number=SeqID_63202
VILRSKVILGTHKDNFAPQNHSDGNHERNPLSKDIQKLLWKNNYKFPKATAQIKLLGLKDGNKNKAKTANDDNPDETCELNGDGKTESLLVN

SEQ ID NO: 129177 - protein, 51 aa, Setaria italica
  Transcript Sequence Number=SeqID_63203
  Gene Ontology: Mol. function=tRNA dihydrouridine synthase activity; Biological process=metabolic process
  Homolog annotation: Hit_ID=Q7XT07; Match level="QueryCoverage=98%, HitCoverage=7%, E-value=1e-18, Identity=90%"; Hit description=tRNA -dihydrouridine synthase 3-like
CGPYPDTVARTVELVDNECSVDFIDINMGCPIDIVVNKGAGSSFVLTKTLL

SEQ ID NO: 129178 - protein, 97 aa, Setaria italica
  Transcript Sequence Number=SeqID_63204
ATLLHTRKVSRPAYKSNAFKNTVAAKSKPGDDLREALACFIRDELLSALKIEVGRKIGITDTSQLERGLANDLEHVAAEVSKLIVLNCELYSAAHVQ

SEQ ID NO: 129179 - protein, 48 aa, Setaria italica
  Transcript Sequence Number=SeqID_63205
  Gene Ontology: Mol. function=protein dimerization activity; Cellular component=nucleus; Biological process=regulation of transcription, DNA-dependent
  Homolog annotation: Hit_ID=Q5QNI5; Match level="QueryCoverage=83%, HitCoverage=12%, E-value=9e-15, Identity=97%"; Hit description=BZIP transcription factor RF2b-like
SALSPRVAFLDHQRSLLTVGNSHLKQRIAALAQDKIFKDGISRSFCSV

SEQ ID NO: 129180 - protein, 71 aa, Setaria italica
  misc_feature (34)..(34): Xaa can be any naturally occurring amino acid
  misc_feature (46)..(46): Xaa can be any naturally occurring amino acid
  Transcript Sequence Number=SeqID_63206
  Subcellular localization annotation: CTP_CleavageSite=40; ConfidenceScore=5.31e-01
ADGISTSPSSISCCRSLGSLPSTVHPTLTQVPEXSPLTVPANSLAXMDLDLMVLAISMTSSRLMLPLCLMS

SEQ ID NO: 129181 - protein, 59 aa, Setaria italica
  Transcript Sequence Number=SeqID_63207
SGALFCMMLMYLTKQRDSIYFCLVLVVLSSERPQCYYWILFQFWKSRMESFNEPKKKKK

SEQ ID NO: 129182 - protein, 48 aa, Setaria italica
  Transcript Sequence Number=SeqID_63208
FFFFLVIQKTISKFPIKLRGTTYDSNHINNFNIACECSLKLDKNSLNN

SEQ ID NO: 129183 - protein, 32 aa, Setaria italica
  Transcript Sequence Number=SeqID_63209
KELLQQPHIATSWTPNLLKADGISTSPSSISC

SEQ ID NO: 129184 - protein, 42 aa, Setaria italica
  Transcript Sequence Number=SeqID_63210
MYLFCFQIFVDELDAIAPSRMEGVEELSIRMVATLLKLMDCK

SEQ ID NO: 129185 - protein, 128 aa, Setaria italica
  Transcript Sequence Number=SeqID_63211
  Gene Ontology: Mol. function=nucleoside-triphosphatase activity; Biological process=cell division
  Homolog annotation: Hit_ID=Q2R8Q8; Match level="QueryCoverage=100%, HitCoverage=9%, E-value=2e-32, Identity=58%"; Hit description=ATPase, AAA family protein, expressed
  Pfam annotation: Domain name=AAA; Domain location=8-128; Score=8.9; E_ value=4e-06; Accession=PF00004.21; Description=ATPase family associated with various cellular activities (AAA)
WFPKIIKVILLYGPPGTGKTSLASFCAYDAGANLFTINGPEIISHYYGESEKSLYDVFSSAKKAAPAVVRFSSNAQLHYLTAKSTVKKEIQIEIPLSQIFVDELDAIAPSRMEGGEELSIRMVATLLK

SEQ ID NO: 129186 - protein, 91 aa, Setaria italica
  Transcript Sequence Number=SeqID_63212
LNLRAADEMKRLVEEANEEHVLVELARIEAEREHREIDAQRRAEAERFAGEVAAARAKVEARAPRASPHGVHHPLLRLHPPLPPLLLPRPP

SEQ ID NO: 129187 - protein, 140 aa, Setaria italica
  misc_feature (58)..(58): Xaa can be any naturally occurring amino acid
  misc_feature (108)..(108): Xaa can be any naturally occurring amino acid
  Transcript Sequence Number=SeqID_63213
  Gene Ontology: Mol. function=3'-5' exonuclease activity; Cellular component=intracellular; Biological process=nucleobase, nucleoside, nucleotide and nucleic acid metabolic process
  Homolog annotation: Hit_ID=B9RFH0; Match level="QueryCoverage=92%, HitCoverage=26%, E-value=1e-36, Identity=53%"; Hit description=3-5 exonuclease, putative
LVPEKVFCGSDYLDLKKLDVEEIVWVDETNGLLNATSCIEGFKIIGMDCEWRPNFEKXSKPSKVSIIQIASDKIAFIFDLIKLYEDNPKVLDSCFRRIMCSSNILKLXYERLLDMQKLFKWVTGGLSGLSKEILGLGLNK

SEQ ID NO: 129188 - protein, 51 aa, Setaria italica
  misc_feature (5)..(5): Xaa can be any naturally occurring amino acid
  Transcript Sequence Number=SeqID_63214
VNNGXTFVKIDKMKHSPDGDYALVIEGDTPLVYLFPMYLALFNQIFLFLNT

SEQ ID NO: 129189 - protein, 48 aa, Setaria italica
  Transcript Sequence Number=SeqID_63215
NVGPSHLVPFTGVLLCVLVHVWTNSMLFSLSHAVSADACNWKVIVTSI

SEQ ID NO: 129190 - protein, 72 aa, Setaria italica
  misc_feature (50)..(50): Xaa can be any naturally occurring amino acid
  Transcript Sequence Number=SeqID_63216
YLVNHADLAVQINSADCDERLSLLRKFFFWLENLCHEGAYMPWISKALAXANPISPDEYEQTPTLETCEDEQ

SEQ ID NO: 129191 - protein, 101 aa, Setaria italica
  Transcript Sequence Number=SeqID_63217
SFGRKATDRKPVSRQRHLRSASKGYVTGAIGLSYLDHYPDLAVQINSADCDERLSLLRKFFFWLENLCHEGAYMPWISKALACNPISPDEYEQTAHLETCE

SEQ ID NO: 129192 - protein, 88 aa, Setaria italica
  misc_feature (8)..(8): Xaa can be any naturally occurring amino acid
  Transcript Sequence Number=SeqID_63218
FDDEPPRXYSPLSSAPRGLRDRSYSHFDLPSYSNSSQFDDLMMNQWQYSSDISMTSFMSDASGYTYQPQDFPVNGVSRYPSYRPANGH

SEQ ID NO: 129193 - protein, 36 aa, Setaria italica
  Transcript Sequence Number=SeqID_63219
QICRRFIDERRSKLSRLIEDKLRWSSFSAITRTKTN

SEQ ID NO: 129194 - protein, 77 aa, Setaria italica
  Transcript Sequence Number=SeqID_63220
  Gene Ontology: Cellular component=plasma membrane
  Homolog annotation: Hit_ID=B6UDP8; Match level="QueryCoverage=74%, HitCoverage=9%, E-value=3e-27, Identity=94%"; Hit description =Protein CYPRO4
LNFFSIHSDHCSYVSQLLPQVTENGNQEKHLVATVGKFSVVWNFQQVKDSKHECYRDQQGLKSCYCYKVVLKDESIV

SEQ ID NO: 129195 - protein, 52 aa, Setaria italica
  Transcript Sequence Number=SeqID_63221
  Homolog annotation: Hit_ID=B6ST53; Match level="QueryCoverage=55%, HitCoverage=10%, E-value=3e-09, Identity=96%"; Hit description =Fasciclin-like arabinogalactan protein 7
MMGSKAAIFATAVLAVLFSAPAPHYVDLAELLSVAGPFHTFLNYLEKTNVIE

SEQ ID NO: 129196 - protein, 33 aa, Setaria italica
  Transcript Sequence Number=SeqID_63222
HLAVQVSKRTCTGTCPISIVISQRNSSVAVQIF

SEQ ID NO: 129197 - protein, 124 aa, Setaria italica
  misc_feature (58)..(58): Xaa can be any naturally occurring amino acid
  misc_feature (114)..(114): Xaa can be any naturally occurring amino acid
  Transcript Sequence Number=SeqID_63223
  Gene Ontology: Mol. function=transferase activity, transferring phosphorus-containing groups; Cellular component=membrane; Biological process=two-component signal transduction system (phosphorelay)
  Homolog annotation: Hit_ID=Q2ACC1; Match level="QueryCoverage=94%, HitCoverage=12%, E-value=1e-57, Identity=90%"; Hit description =Histidine kinase
GRFLSWFTSEADKDKYGFIFDIVMCKPLRASTIASCIQQLLKVEMPERKENQNRPSFXRSLLVGKNILIVDDNKVNLRVAAAALKKYGAKVHCVESGKDAISLLQPPHCFDACXMDVQMPEMDG

SEQ ID NO: 129198 - protein, 34 aa, Setaria italica
  Transcript Sequence Number=SeqID_63224
MTISNMNGYVSKPFDEEQLYQAVSRYVVGTTDSA

SEQ ID NO: 129199 - protein, 63 aa, Setaria italica
  Transcript Sequence Number=SeqID_63225
IFFISMCGSHVINIWHQTTHKYLLLLYLQREDYKGQYTNILGSETNILGTSEQGPVATHGYFC

SEQ ID NO: 129200 - protein, 43 aa, Setaria italica
  Transcript Sequence Number=SeqID_63226
SITCQPTSKTVARDKDFTLHNNRQVKWSNRHHGRVSTNKPHHI

SEQ ID NO: 129201 - protein, 121 aa, Setaria italica
  Transcript Sequence Number=SeqID_63227
  Gene Ontology: Mol. function=binding
  Homolog annotation: Hit_ID=B6SVF1; Match level="QueryCoverage=88%, HitCoverage=24%, E-value=5e-33, Identity=68%"; Hit description=TPR domain containing protein
  Subcellular localization annotation: CTP_CleavageSite=45; ConfidenceScore=5.22e-01
YSLVLTYLFLVLFRLSINLNDIFGQANVNASGQGSSQTGNSNPPPASVPTGAAVPPFAFSGSGNEGNQAHEASSGQEREHGEPGIHINLTGPEQAAEALRTVMQMFGPQMGPHEGTPRGPG

SEQ ID NO: 129202 - protein, 151 aa, Setaria italica
  misc_feature (113)..(113): Xaa can be any naturally occurring amino acid
  misc_feature (147)..(147): Xaa can be any naturally occurring amino acid
  Transcript Sequence Number=SeqID_63228
  Gene Ontology: Mol. function=protein serine/threonine kinase activity; Biological process=protein amino acid phosphorylation
  Homolog annotation: Hit_ID=B9SXQ3; Match level="QueryCoverage=90%, HitCoverage=35%, E-value=2e-50, Identity=66%"; Hit description=ATP binding protein, putative
  Pfam annotation: Domain name=Pkinase_Tyr; Domain location=3-149; Score=-179.3; E_value=0.083; Accession=PF07714.9; Description =Protein tyrosine kinase
LNYSLLNGISLIRCRKVVLDFGFARSGPSDTEKTHISTKVKGTAGYLDPEYLRTYQLTPKSDVFSFGILLVEILSARRPVELKRTPEERITIRWTFKKFNEGNMREILDPLLXDHVDDEVLEKLLSLAFQCAAPTRDDRPTMKEVGXQLWE

SEQ ID NO: 129203 - protein, 74 aa, Setaria italica
  Transcript Sequence Number=SeqID_63229
SSVNCRLLTYNTSSTRYSWYRYGRNDMIKFAKGDNDATKCCRYGFHLEEKESCVYKLMLFACYKPVNNHQFCPT

SEQ ID NO: 129204 - protein, 55 aa, Setaria italica
  Transcript Sequence Number=SeqID_63230
GRTLADYNIQKESTLTWFCASEVASEGPRWAGVPSSICLSDVSLKLSLSKFLLCV

SEQ ID NO: 129205 - protein, 69 aa, Setaria italica
  Transcript Sequence Number=SeqID_63231
  Gene Ontology: Mol. function=structural constituent of ribosome; Cellular component=intracellular; Biological process=protein modification process
  Homolog annotation: Hit_ID=Q3KN73; Match level="QueryCoverage=69%, HitCoverage=37%, E-value=2e-19, Identity=100%"; Hit description =Ubiquitin-60S ribosomal L40 fusion protein
  Pfam annotation: Domain name=ubiquitin; Domain location=5-69; Score =80.9; E_value=4.7e-21; Accession=PF00240.15; Description=Ubiquitin family
QIFVKTLTGKTITLEVESSDTIDNVKAKIQDKEGIPPDQQRLIFAGKQLEDALLVLDLRLHIVNGVGRL

SEQ ID NO: 129206 - protein, 63 aa, Setaria italica
  Transcript Sequence Number=SeqID_63232
KVGWTPFAPLLLSSFLSPQRQRHPYPHTQLLPQPQPHPPQRIRRHRNLELIFVDPLPYLGAGF

SEQ ID NO: 129207 - protein, 56 aa, Setaria italica
  Transcript Sequence Number=SeqID_63233
FSVPSCRLDSSQPSSSPLVIGRTLASGAIYFEMLLGKYMTAQKMWSFLVYHSLTLA

SEQ ID NO: 129208 - protein, 69 aa, Setaria italica
  Transcript Sequence Number=SeqID_63234
MLNSGLLSPEGANQVRALQNLWVSHPAPGINDDVVYLLARVRFRDPKAFVIALDARKNVLLGSAEFVHL

SEQ ID NO: 129209 - protein, 108 aa, Setaria italica
  Transcript Sequence Number=SeqID_63235
SPEGANQVRALQNLWVSHPAPGINDDVVYLLARVRFRDPKAFVIALDARKNVLLGSADSNPELSIFDLGLLWIVVCDALASQSLIQSSHEVLILELLHVVITQSDMSE

SEQ ID NO: 129210 - protein, 58 aa, Setaria italica
  misc_feature (55)..(55): Xaa can be any naturally occurring amino acid
  Transcript Sequence Number=SeqID_63236
  Subcellular localization annotation: CTP_CleavageSite=31; ConfidenceScore=5.16e-01
KKRGDGVMISQVTSQSISPQRLGFFLLPKVMKMAGRNQACMKAQKMWSFLVYHSXTLA

SEQ ID NO: 129211 - protein, 55 aa, Setaria italica
  Transcript Sequence Number=SeqID_63237
LLARVRFRDPKAFVIALDARKNVLLGSAEFATEKKRGDGVMYFPSNISKYIAPEA

SEQ ID NO: 129212 - protein, 33 aa, Setaria italica
  Transcript Sequence Number=SeqID_63238
FLMIYSVFIILTRYYILCMDDCIINHRWHPYIW

SEQ ID NO: 129213 - protein, 44 aa, Setaria italica
  Transcript Sequence Number=SeqID_63239
  Gene Ontology: Mol. function=phosphotransferase activity, phosphate group as acceptor; Biological process=nucleobase, nucleoside, nucleotide and nucleic acid metabolic process
  Homolog annotation: Hit_ID=Q08480; Match level="QueryCoverage=88%, HitCoverage=16%, E-value=4e-13, Identity=89%"; Hit description =Adenylate kinase B
VFVSLFHRQTEPVIDYYSKKGMVANLHAEKPPKEVTAEVQKALS

SEQ ID NO: 129214 - protein, 46 aa, Setaria italica
  Transcript Sequence Number=SeqID_63240
PLIRSYDDVVEVRIDTDVPRFKVLYFHLILDQIMSTVNIAFHHAKD

SEQ ID NO: 129215 - protein, 77 aa, Setaria italica
  Transcript Sequence Number=SeqID_63241
  Gene Ontology: Mol. function=phosphotransferase activity, phosphate group as acceptor; Cellular component=mitochondrial intermembrane space; Biological process=nucleobase, nucleoside, nucleotide and nucleic acid metabolic process
  Homolog annotation: Hit_ID=Q08480; Match level="QueryCoverage=81%, HitCoverage=25%, E-value=4e-26, Identity=90%"; Hit description =Adenylate kinase B
MLSSCTLIAFSLFTQVTGEPLIQRRDDTAEVLKSRLEAFHRQTEPVIDYYSKKGLVANLHAEKPPKEVTVEVQKALS

SEQ ID NO: 129216 - protein, 102 aa, Setaria italica
  misc_feature (78)..(78): Xaa can be any naturally occurring amino acid
  Transcript Sequence Number=SeqID_63242
  Gene Ontology: Mol. function=phosphotransferase activity, phosphate group as acceptor; Biological process=nucleobase, nucleoside, nucleotide and nucleic acid metabolic process
  Homolog annotation: Hit_ID=Q08480; Match level="QueryCoverage=99%, HitCoverage=41%, E-value=3e-48, Identity=95%"; Hit description =Adenylate kinase B
  Pfam annotation: Domain name=ADK; Domain location=33-102; Score=31.2; E_value=3.5e-10; Accession=PF00406.14; Description=Adenylate kinase
MAANLEDVPSLDLMHELLRRMKCSSKPDKRLILIGPPGSGKGTQSPLIKDEYCLCHLATGDMLRAAVAAKTPLGVKAXKEAMDKGELVSDDLVVGIIDEAMK

SEQ ID NO: 129217 - protein, 76 aa, Setaria italica
  Transcript Sequence Number=SeqID_63243
  Gene Ontology: Cellular component=nucleus; Biological process =regulation of transcription, DNA-dependent
  Homolog annotation: Hit_ID=A7YJG7; Match level="QueryCoverage=65%, HitCoverage=6%, E-value=2e-21, Identity=94%"; Hit description=ELF3 protein
STTDDLSDSSVESLPEMEISPDDVVSAIGPKHFWKARRAIVNQQRVFAVQVFELHRLIKVSLRQIINVFWLMLMGR

SEQ ID NO: 129218 - protein, 75 aa, Setaria italica
  misc_feature (14)..(14): Xaa can be any naturally occurring amino acid
  Transcript Sequence Number=SeqID_63244
  Subcellular localization annotation: CTP_CleavageSite=71; ConfidenceScore=5.26e-01
TSPSDGSFWSPFYXSCAPVSLPSTAGDFMSSPYGIPMPHQPQHMGVPGPPPPMPPMYFPPFSMPVMNTAVSASAV

SEQ ID NO: 129219 - protein, 114 aa, Setaria italica
  Transcript Sequence Number=SeqID_63245
  Gene Ontology: Mol. function=protein dimerization activity; Cellular component=endoplasmic reticulum lumen; Biological process=proteolysis
  Homolog annotation: Hit_ID=B6T417; Match level="QueryCoverage=89%, HitCoverage=29%, E-value=1e-38, Identity=65%"; Hit description=IAA -amino acid hydrolase ILR1
  Pfam annotation: Domain name=Peptidase_M20; Domain location=4-110; Score=7.0; E_value=0.0002; Accession=PF01546.20; Description =Peptidase family M20M25M40
NYKSQENGKMHACGHDAHTTMLLGAAKLLQDCKDDFKGTIKLVFQPAEEGYGGAYYILQEGSLDDVSAIFGLHVNPDVPLGGHAAGPHQSIDPVVAASTAILSPSTNCRRNRSA

SEQ ID NO: 129220 - protein, 74 aa, Setaria italica
  Transcript Sequence Number=SeqID_63246
  Gene Ontology: Mol. function=alpha-N-arabinofuranosidase activity; Biological process=L-arabinose metabolic process
  Homolog annotation: Hit_ID=Q2RAZ2; Match level="QueryCoverage=97%, HitCoverage=10%, E-value=3e-32, Identity=87%"; Hit description=Alpha- L-arabinofuranosidase C-terminus family protein, expressed
EELVSNRGFEAGGPHTPSNIDPWSIIGDESSIYVTTDPVSCFTRNIVALRIEVLCDKCPTGGVGVYNPGFWGMV

SEQ ID NO: 129221 - protein, 109 aa, Setaria italica
  Transcript Sequence Number=SeqID_63247
  Subcellular localization annotation: CTP_CleavageSite=72; ConfidenceScore=5.38e-01
DRRAPPPCIRVSRDVRYSKREGARMHSPRPSCGRRRRCWRRTRTSPRPAPRSGTASLSPRTLLLDLCLPCSRADGDDSPEIGIGMPGPGPQPVCLIGRRARGTRGAMPP

SEQ ID NO: 129222 - protein, 58 aa, Setaria italica
  Transcript Sequence Number=SeqID_63248
NARSTDHKRFMFTLGNTPENLYLVKSIFRCIIEDVAAIMRMCRMGHGSLASQHPHTRA

SEQ ID NO: 129223 - protein, 54 aa, Setaria italica
  Transcript Sequence Number=SeqID_63249
  Gene Ontology: Mol. function=small conjugating protein ligase activity; Cellular component=heterochromatin; Biological process =ubiquitin-dependent protein catabolic process
  Homolog annotation: Hit_ID=B9T817; Match level="QueryCoverage=90%, HitCoverage=25%, E-value=4e-22, Identity=97%"; Hit description =Ubiquitin carrier protein
  Pfam annotation: Domain name=UQ_con; Domain location=1-54; Score= -45.1; E_value=0.073; Accession=PF00179.18; Description=Ubiquitin -conjugating enzyme
TVCLSILNEDSGWRPAITVKQILVGIQDLLDQPNPADPAQTDGYHLFIQVRKKQ

SEQ ID NO: 129224 - protein, 84 aa, Setaria italica
  Transcript Sequence Number=SeqID_63250
NLITPALTAVKETILFQANARSTDHKRFMFTLGNTPENLYLVKSIFRCIIEDVAAIMRMCRMGYHLFIQDPAEYKRRVRLQAKQ

SEQ ID NO: 129225 - protein, 70 aa, Setaria italica
  Transcript Sequence Number=SeqID_63251
  Gene Ontology: Mol. function=small conjugating protein ligase activity; Cellular component=heterochromatin; Biological process =ubiquitin-dependent protein catabolic process
  Homolog annotation: Hit_ID=Q8W2X7; Match level="QueryCoverage=84%, HitCoverage=36%, E-value=2e-24, Identity=91%"; Hit description =Ubiquitin carrier protein
  Pfam annotation: Domain name=UQ_con; Domain location=1-63; Score= -25.7; E_value=0.0029; Accession=PF00179.18; Description=Ubiquitin -conjugating enzyme
TYYKLLQIEGISGWRPAITVKQILVGIQDLLDQPNPADPAQTDGYHLFIQDPAEYKRRVRLQAKQYPALV

SEQ ID NO: 129226 - protein, 66 aa, Setaria italica
  Transcript Sequence Number=SeqID_63252
HYPTKHTLRTVNSTVNRRTRFTMTIVTSQSTMLHLVFHSRHWQQLCGCAAWIPRWAIVLRPTPDTT

SEQ ID NO: 129227 - protein, 53 aa, Setaria italica
  Transcript Sequence Number=SeqID_63253
  Gene Ontology: Mol. function=small conjugating protein ligase activity; Cellular component=heterochromatin; Biological process =ubiquitin-dependent protein catabolic process
  Homolog annotation: Hit_ID=Q42551; Match level="QueryCoverage=100%, HitCoverage=31%, E-value=4e-15, Identity=79%"; Hit description =Ubiquitin carrier protein
VCSKISVLTVQFQGWRPAITVKQILVGIQDLLDQPNPADPAQTDGYHLFIQDP

SEQ ID NO: 129228 - protein, 142 aa, Setaria italica
  Transcript Sequence Number=SeqID_63254
  Gene Ontology: Mol. function=cysteine-type endopeptidase activity; Cellular component=vacuole; Biological process=proteolysis
  Homolog annotation: Hit_ID=B6UEY2; Match level="QueryCoverage=95%, HitCoverage=29%, E-value=7e-68, Identity=89%"; Hit description =Vacuolar processing enzyme, beta-isozyme
MGPSQDSVSWMEDSQTHNLMKETIKDQYEVVKTRTSNLKKYKEGSHVMEYGDKTFTNEKLFLYQGFDPANANAANTLLWPGPKGAVNQRDADLLFMWKRYEQLDGGSEEKLRALREIKETVQHRKHLDSSIDFIGRLVFGFE

SEQ ID NO: 129229 - protein, 76 aa, Setaria italica
  Transcript Sequence Number=SeqID_63255
  Gene Ontology: Mol. function=cysteine-type endopeptidase activity; Biological process=proteolysis
  Homolog annotation: Hit_ID=B6UEY2; Match level="QueryCoverage=71%, HitCoverage=11%, E-value=3e-22, Identity=85%"; Hit description =Vacuolar processing enzyme, beta-isozyme
LSRFDPAKGKLLIREGLVTILHDMTFTNEKLFLYQGFDPANANAANTLLWPGPKGAVNQRDADLLFMWKRYEQLDG

SEQ ID NO: 129230 - protein, 39 aa, Setaria italica
  misc_feature (25)..(25): Xaa can be any naturally occurring amino acid
  misc_feature (36)..(36): Xaa can be any naturally occurring amino acid
  Transcript Sequence Number=SeqID_63256
  Gene Ontology: Mol. function=cysteine-type endopeptidase activity; Cellular component=vacuole; Biological process=proteolysis
  Homolog annotation: Hit_ID=B6UEY2; Match level="QueryCoverage=100%, HitCoverage=8%, E-value=3e-13, Identity=89%"; Hit description =Vacuolar processing enzyme, beta-isozyme
VRIFEAQCGSLTQYGMKYMRAFANXCNSGISEAKMXESS

SEQ ID NO: 129231 - protein, 86 aa, Setaria italica
  Transcript Sequence Number=SeqID_63257
  Gene Ontology: Mol. function=cysteine-type endopeptidase activity; Cellular component=vacuole; Biological process=proteolysis
  Homolog annotation: Hit_ID=B6UEY2; Match level="QueryCoverage=100%, HitCoverage=18%, E-value=4e-41, Identity=91%"; Hit description =Vacuolar processing enzyme, beta-isozyme
  Pfam annotation: Domain name=Peptidase_C13; Domain location=1-85; Score=-85.4; E_value=7.9e-06; Accession=PF01650.10; Description =Peptidase C13 family
VTTASNPVENSWGTYCPGMDPSPPPEYITCLGDLYSVSWMEDSQTHNLMKETIKDQYEVVKTRTSNLKKYKEGSHVMEYGDKTFTN

SEQ ID NO: 129232 - protein, 54 aa, Setaria italica
  Transcript Sequence Number=SeqID_63258
VVPRFYLLVKFSFVLLSSLGLISKLSNLLGRVVKKVIDSKPNDHIFIYYSDHGG

SEQ ID NO: 129233 - protein, 86 aa, Setaria italica
  misc_feature (66)..(66): Xaa can be any naturally occurring amino acid
  Transcript Sequence Number=SeqID_63259
  Gene Ontology: Mol. function=cysteine-type endopeptidase activity; Cellular component=vacuole; Biological process=proteolysis
  Homolog annotation: Hit_ID=B6UEY2; Match level="QueryCoverage=100%, HitCoverage=18%, E-value=2e-37, Identity=87%"; Hit description =Vacuolar processing enzyme, beta-isozyme
  Pfam annotation: Domain name=Peptidase_C13; Domain location=1-86; Score=-61.2; E_value=1.6e-07; Accession=PF01650.10; Description =Peptidase C13 family
RVFKKVSLLSSNSYSKMVIYVEACESGSIFEGLMPQDLNIYVTTASNPVENSWGTYCPGMDPSPPXEYITCLGDLYSVSWMEDSQT

SEQ ID NO: 129234 - protein, 60 aa, Setaria italica
  misc_feature (1)..(4): Xaa can be any naturally occurring amino acid
  misc_feature (7)..(7): Xaa can be any naturally occurring amino acid
  misc_feature (9)..(9): Xaa can be any naturally occurring amino acid
  misc_feature (12)..(12): Xaa can be any naturally occurring amino acid
  Transcript Sequence Number=SeqID_63260
XXXXFFXFXFFXFFFFLVCKSDFTMVRAHVAIYTADQPTHILSGLHSPDHTSSHKGCHHN

SEQ ID NO: 129235 - protein, 56 aa, Setaria italica
  Transcript Sequence Number=SeqID_63261
TGGIRDGTGRTDDSHGNEAPSRAEAKAGLGGGGGGAVEAAAGGLDGGGGGSKANNY

SEQ ID NO: 129236 - protein, 109 aa, Setaria italica
  misc_feature (20)..(20): Xaa can be any naturally occurring amino acid
  Transcript Sequence Number=SeqID_63262
  Gene Ontology: Mol. function=nucleoside-triphosphatase activity; Cellular component=mitochondrion; Biological process=protein catabolic process
  Homolog annotation: Hit_ID=Q8LQJ8; Match level="QueryCoverage=81%, HitCoverage=12%, E-value=2e-24, Identity=68%"; Hit description=Cell division protease ftsH homolog 5, mitochondrial
  Pfam annotation: Domain name=Peptidase_M41; Domain location=3-87; Score=-74.8; E_value=4.9e-06; Accession=PF01434.10; Description =Peptidase family M41
CNGKSYGLLKYGMSKQVGLXVSYNYEDDGKSMSSETRLLIEQEVKNFLENAYNNAKTILTKHNKELHALANALLEHETLTGAQIKNILAQVNNKQQQELLSYLLSSYLT

SEQ ID NO: 129237 - protein, 40 aa, Setaria italica
  Transcript Sequence Number=SeqID_63263
ATVHVPRGQNKTLHIVVGTFSWCSNQFCTHIQNDLCSVGT

SEQ ID NO: 129238 - protein, 99 aa, Setaria italica
  Transcript Sequence Number=SeqID_63264
  Gene Ontology: Mol. function=binding
  Subcellular localization annotation: CTP_CleavageSite=60; ConfidenceScore=5.20e-01
ICVLTRCTSDSSNFSTSSKHTDLQNKHAPHSPASSTPSTEANGVIREHGTNSEEHQHSVENAEASCQAGGDCIKDVGSMSTEKAVNTTNPSDSEPYSVR

SEQ ID NO: 129239 - protein, 86 aa, Setaria italica
  misc_feature (19)..(19): Xaa can be any naturally occurring amino acid
  misc_feature (44)..(44): Xaa can be any naturally occurring amino acid
  Transcript Sequence Number=SeqID_63265
  Gene Ontology: Mol. function=binding
  Homolog annotation: Hit_ID=Q9M7X4; Match level="QueryCoverage=100%, HitCoverage=8%, E-value=2e-10, Identity=46%"; Hit description =F3E22.19 protein
LLVKGMVTELGEEMHCQFXLEILRILMDSFTMSGAHRDVIIEIXFYERHLDYLVDVIASSCPPRSTANSVGAGRNAEGHRIKPEIL

SEQ ID NO: 129240 - protein, 50 aa, Setaria italica
  Transcript Sequence Number=SeqID_63266
  Gene Ontology: Mol. function=binding
DEHLIRHVVKFNLLKPIIDAFVENGDKYNMLHSGVLELLEYIRKVHFQDY

SEQ ID NO: 129241 - protein, 67 aa, Setaria italica
  Transcript Sequence Number=SeqID_63267
LYMLKKDSWDFTSDTKVGATYVTSNHASSSDRWIQPLELKLLFPYFLPVGQRMDLVLLGTKPSLLVS

SEQ ID NO: 129242 - protein, 59 aa, Setaria italica
  Transcript Sequence Number=SeqID_63268
SQTIVRLPGSENNDNTKLSTLVLYGCISFHFCSTDSLRHAFAHLENETIATAEQVVSSY

SEQ ID NO: 129243 - protein, 52 aa, Setaria italica
  misc_feature (35)..(35): Xaa can be any naturally occurring amino acid
  Transcript Sequence Number=SeqID_63269
  Gene Ontology: Mol. function=binding
EGTIIIVQQEGNSLLGLLVKGMVTELGEEMHCQFXLEILRILMDSFHYVWST

SEQ ID NO: 129244 - protein, 84 aa, Setaria italica
  Transcript Sequence Number=SeqID_63270
PIFCSSIIERNGGERIYSTSFHTYACHVHAIFQKSKLFRSIINLPECGWCISKIAFLSDQKKCFSLQENKQCFDEKLLLFVFSK

SEQ ID NO: 129245 - protein, 100 aa, Setaria italica
  Transcript Sequence Number=SeqID_63271
RSLDVSSAFHNCVLFVFPWIHGFFCSSVIERNGGERIYSTSFHTYACHVHAIFQKSKLFRSIINLPEWLVHFKIAFLSDQKNCFSLQENKHVWMEILKRL

SEQ ID NO: 129246 - protein, 60 aa, Setaria italica
  misc_feature (53)..(53): Xaa can be any naturally occurring amino acid
  Transcript Sequence Number=SeqID_63272
GIGWSGIQIVFHTGPLIQFLKDDGACYLERCAPPTAQLQKAAERMGSFCQKKXGTDSMIL

SEQ ID NO: 129247 - protein, 104 aa, Setaria italica
  Transcript Sequence Number=SeqID_63273
  Homolog annotation: Hit_ID=Q7XL21; Match level="QueryCoverage=71%, HitCoverage=44%, E-value=5e-19, Identity=67%"; Hit description =OSJNBa0079M09.10 protein
  Pfam annotation: Domain name=DUF2360; Domain location=1-92; Score= -29.0; E_value=0.014; Accession=PF10152.1; Description=Predicted coiled-coil domain-containing prot
VEFLNSFAATCDDKLALLHRKIVKLDSSLALLEAKLHSIDENIALGHPTSQKAQQSSSDEKNFCSENLVGESSRFVCLLIAILLCAFIYLHKLIICSDVLNSCT

SEQ ID NO: 129248 - protein, 76 aa, Setaria italica
  misc_feature (19)..(19): Xaa can be any naturally occurring amino acid
  misc_feature (56)..(56): Xaa can be any naturally occurring amino acid
  Transcript Sequence Number=SeqID_63274
VAEEAIDDLPGIKNTSSFXFWLSYYRRGDQSSMLGCEAHGFILQSLEKVIPKLFEXLIFTQVLIRCMYQRARAQTD

SEQ ID NO: 129249 - protein, 46 aa, Setaria italica
  Transcript Sequence Number=SeqID_63275
VDQTATYLDQFRYLHDVFNVNSKHNTKESGLTDHTPLMIDRPCDSS

SEQ ID NO: 129250 - protein, 71 aa, Setaria italica
  Transcript Sequence Number=SeqID_63276
PLIITIIPFLQVVLHLIDRCLKYLLPILMLTFFFCYQEIQLGCEAHGFILQSLEKVIPKLFEYLIFYSGIN

SEQ ID NO: 129251 - protein, 84 aa, Setaria italica
  Transcript Sequence Number=SeqID_63277
  Subcellular localization annotation: CTP_CleavageSite=26; ConfidenceScore=5.06e-01
LEGSQDNQNRFPLPNRSTATTNTSIVEMSSSKLCFQLRNVKNDNARHLRIEKELNVKNFPCKMFFVQRTPTFHVYKLYTAICPA

SEQ ID NO: 129252 - protein, 90 aa, Setaria italica
  Transcript Sequence Number=SeqID_63278
PIPSSKFFLVLLFFWHVMLYKGNYVCAQKDPKLYKERKCSLLMQHCKVHSLQVNPFWGLQMLVPYVITPAERLQILNHSQICSHQESILK

SEQ ID NO: 129253 - protein, 53 aa, Setaria italica
  Transcript Sequence Number=SeqID_63279
TKHKEWTIYFPCIHNRSTNLESYTILVPYVITPAERLQILNHSQICSHQRNTI

SEQ ID NO: 129254 - protein, 72 aa, Setaria italica
  misc_feature (33)..(33): Xaa can be any naturally occurring amino acid
  Transcript Sequence Number=SeqID_63280
  Gene Ontology: Mol. function=transporter activity; Cellular component= membrane; Biological process=transport
  Homolog annotation: Hit_ID=Q6JN48; Match level="QueryCoverage=83%, HitCoverage=4%, E-value=2e-19, Identity=76%"; Hit description =Ethylene insensitive 2
FILAIIHFVILSLNLMQGILDPAFSKPRSALTXICACLQKDIRVLNGPAHSGLSAMGPIPMPIRGTFTTAAV

SEQ ID NO: 129255 - protein, 96 aa, Setaria italica
  Transcript Sequence Number=SeqID_63281
  Subcellular localization annotation: CTP_CleavageSite=67; ConfidenceScore=5.78e-01
VTESQKAFSIVSLTFFWNSSSAALAAPVANVFTPLSINSSGKTPSVVKENSRTNALGSSSVARSLLGASSSSSTSPVKQLTENEQMVNEMLHEDDS

SEQ ID NO: 129256 - protein, 91 aa, Setaria italica
  misc_feature (53)..(53): Xaa can be any naturally occurring amino acid
  misc_feature (74)..(74): Xaa can be any naturally occurring amino acid
  Transcript Sequence Number=SeqID_63282
  Homolog annotation: Hit_ID=Q6ZI81; Match level="QueryCoverage=74%, HitCoverage=8%, E-value=5e-13, Identity=60%"; Hit description =Putative T-complex protein 11
IQKLLREKVQHLSGDAGIERMDSALSDTRSKFFEAKENGSPLAAPVANVFTPXSINSSGKTPSVVKENSRTMLXGSSSVARSLLGASSSSS

SEQ ID NO: 129257 - protein, 133 aa, Setaria italica
  misc_feature (14)..(14): Xaa can be any naturally occurring amino acid
  misc_feature (25)..(25): Xaa can be any naturally occurring amino acid
  Transcript Sequence Number=SeqID_63283
  Gene Ontology: Mol. function=phosphopantetheine binding
  Homolog annotation: Hit_ID=Q6ZI81; Match level="QueryCoverage=81%, HitCoverage=17%, E-value=1e-29, Identity=53%"; Hit description =Putative T-complex protein 11
VASIRLPRYSLRVXCAYMILAHPSXVLSGQGEREKQLMESAANFIKEFELLIKIILDGPGRSSDVTGQRKFRTQLANFDKAWCTYLYCFVVWKVKDARLLEEDLVRAACKLELSMMQTCKLTADGTSTTKINT

SEQ ID NO: 129258 - protein, 136 aa, Setaria italica
  Transcript Sequence Number=SeqID_63284
  Subcellular localization annotation: CTP_CleavageSite=37; ConfidenceScore=5.26e-01
SAPWLLSSSPPPSGPAQRWSRDGTSHRQSCHGCGSLSAREGRIRVGDVLQVVPIQMRGLRAPTVLDATTWQQAPDSPWPHHLLLSERLSSLAAGRIKGPAARQLCQAGRRTCEVRAARRRYGRSAVARPSCAALPT

SEQ ID NO: 129259 - protein, 55 aa, Setaria italica
  Transcript Sequence Number=SeqID_63285
DPHNTGASVLNGTNEKHMLQGSNLLIPILQEPCIKDVLSCKMQHNLSTKFISKQN

SEQ ID NO: 129260 - protein, 43 aa, Setaria italica
  Transcript Sequence Number=SeqID_63286
CNNQRFLQQLPLSVNLRCYTLYRSLPDYLNQILDNFMDIVYCT

SEQ ID NO: 129261 - protein, 65 aa, Setaria italica
  Transcript Sequence Number=SeqID_63287
ESCERQVLRIAQWEHNDGSWKLMYTNKTPTWKIVIITARQRSKITLALKPKARNQLRCATYSYMK

SEQ ID NO: 129262 - protein, 74 aa, Setaria italica
  Transcript Sequence Number=SeqID_63288
RKMKNPGMTDKIQKVLQWMMTWFRKTHCNLTILLSRQMMVRLQCVFLDQVLVEAPSELELPPEHKLNGEASSPN

SEQ ID NO: 129263 - protein, 75 aa, Setaria italica
  Transcript Sequence Number=SeqID_63289
  Gene Ontology: Mol. function=histone-lysine N-methyltransferase activity; Cellular component=nucleus; Biological process=chromatin modification
  Homolog annotation: Hit_ID=Q8L821; Match level="QueryCoverage=96%, HitCoverage=10%, E-value=6e-23, Identity=69%"; Hit description=SET domain-containing protein SET118
  Pfam annotation: Domain name=Pre-SET; Domain location=1-72; Score =13.8; E_value=3e-05; Accession=PF05033.8; Description=Pre-SET motif
GQESFPIPATNLVDNPPVPPSGFVYSKSLQIPEHIKIPIDRIGCNCSGDCSTSEHCLCAKRNGSELPYVSTKGKC

SEQ ID NO: 129264 - protein, 36 aa, Setaria italica
  Transcript Sequence Number=SeqID_63290
  Gene Ontology: Mol. function=hydrolase activity
  Homolog annotation: Hit_ID=B6T9Z2; Match level="QueryCoverage=100%, HitCoverage=21%, E-value=1e-09, Identity=86%"; Hit description=Nudix hydrolase 4
MAAVMVARQGRELQRYSDSTGGRIVVGCVPYRASGG

SEQ ID NO: 129265 - protein, 70 aa, Setaria italica
  Transcript Sequence Number=SeqID_63291
  Gene Ontology: Mol. function=catalytic activity
  Subcellular localization annotation: CTP_CleavageSite=30; ConfidenceScore=5.18e-01
MWGTMVQDGSFDRDNFNAGASMPSSLGDTVCAAVSASTWVEPHGRCTVVSPVVCTSLFKFNLRRRPSQRK

SEQ ID NO: 129266 - protein, 73 aa, Setaria italica
  Transcript Sequence Number=SeqID_63292
  Gene Ontology: Mol. function=potassium ion transmembrane transporter activity; Cellular component=integral to membrane; Biological process=potassium ion transport
  Homolog annotation: Hit_ID=Q7XPL3; Match level="QueryCoverage=79%, HitCoverage=6%, E-value=1e-23, Identity=91%"; Hit description =Probable potassium transporter 15
PIPCVPCLSPLRVSGKLKYDSEVKQKLSKDLMRKLGPNLGTIRAPGLGLVCSDIVKGVPAIFGHFLTSLPAIH

SEQ ID NO: 129267 - protein, 128 aa, Setaria italica
  Transcript Sequence Number=SeqID_63293
  Gene Ontology: Mol. function=carbohydrate binding; Biological process= carbohydrate metabolic process
  Homolog annotation: Hit_ID=B6UAF2; Match level="QueryCoverage=96%, HitCoverage=36%, E-value=2e-36, Identity=65%"; Hit description =Starch binding domain containing protein
  Pfam annotation: Domain name=CBM_20; Domain location=1-51; Score= -20.9; E_value=0.021; Accession=PF00686.11; Description=Starch binding domain
EHHVWTAKTDLPANKLIEFKFLLREASGHVRWLHGANRTLRITETTNTLVVHEDWDHAKKQSVYEEEELSIGEEDVISSEDLAGSNGTMLADNNIITDEYLGSESEAVVADAPLQGEMMVANETTSHR

SEQ ID NO: 129268 - protein, 63 aa, Setaria italica
  misc_feature (25)..(25): Xaa can be any naturally occurring amino acid
  Transcript Sequence Number=SeqID_63294
  Homolog annotation: Hit_ID=Q7XVS1; Match level="QueryCoverage=73%, HitCoverage=9%, E-value=3e-11, Identity=71%"; Hit description =OSJNBa0067G20.13 protein
PLTKPLPQAKHDAHVRAYWVLGTFXIDSSASGRLLEVCPRGNHRDDDIPFVSMICILCSLNIH

SEQ ID NO: 129269 - protein, 108 aa, Setaria italica
  misc_feature (35)..(35): Xaa can be any naturally occurring amino acid
  Transcript Sequence Number=SeqID_63295
  Gene Ontology: Mol. function=transposase activity; Biological process= transposition, DNA-mediated
  Homolog annotation: Hit_ID=Q2QMM6; Match level="QueryCoverage=73%, HitCoverage=14%, E-value=1e-17, Identity=59%"; Hit description =Transposon protein, putative, CACTA, En/Spm sub-class
GELARELIHVRSTETHVKIISSPNRFYPYFEGCIXALDGTHIRACVPAKMVDRFKGCKSYPTQNVLAAVDFDLRFTYVLLEVCPRGNHRDDDIPFVSMICILCSLNIH

SEQ ID NO: 129270 - protein, 56 aa, Setaria italica
  Transcript Sequence Number=SeqID_63296
QVISDRKTWVKRKTYKVARAILKLLQDFMMTTYFQLGGQLDANDMIYSLSIVGGMP

SEQ ID NO: 129271 - protein, 56 aa, Setaria italica
  Transcript Sequence Number=SeqID_63297
IFIYLLQSFKNISSDQSLVSLITCNIKHQLFVYRGSIVMATTKGFGIHSYDWKPCE

SEQ ID NO: 129272 - protein, 36 aa, Setaria italica
  Transcript Sequence Number=SeqID_63298
LPLGHTSNTYKNTGRSYKSVFRATHVTNIHNNLLNL

SEQ ID NO: 129273 - protein, 116 aa, Setaria italica
  misc_feature (54)..(54): Xaa can be any naturally occurring amino acid
  misc_feature (56)..(56): Xaa can be any naturally occurring amino acid
  misc_feature (110)..(110): Xaa can be any naturally occurring amino acid
  Transcript Sequence Number=SeqID_63299
MSSGDSEENTPAAIGFEQSNARLLGSIPTWSSKTPLQSGIVPKVPRSAAALAKXKXEIGRREANKLDNYDIERNPSSAKRSEARSLSFSTAGPSNGPNRLVPTSKKIRKXRSMLRT

SEQ ID NO: 129274 - protein, 67 aa, Setaria italica
  Transcript Sequence Number=SeqID_63300
  Subcellular localization annotation: CTP_CleavageSite=49; ConfidenceScore=5.24e-01
MLRTGTNLFGPCRTFCNLGIIKAKHGPNRLVPTSKKIRKHRSMLRTGKRAFSSSSSRLVHGFGRDHE

SEQ ID NO: 129275 - protein, 131 aa, Setaria italica
  misc_feature (55)..(55): Xaa can be any naturally occurring amino acid
  Transcript Sequence Number=SeqID_63301
  Homolog annotation: Hit_ID=B6TG26; Match level="QueryCoverage=90%, HitCoverage=57%, E-value=3e-45, Identity=73%"; Hit description=VAMP protein SEC22
  Pfam annotation: Domain name=Hin1; Domain location=36-131; Score =42.0; E_value=2.4e-09; Accession=PF07320.5; Description=Harpin -induced protein 1 (Hin1)
GKHHRHEHHLRRCCGCMASCLLALVLIVAFVALVVYLALRPSKPSFYLQDLQLRXPITVGDPSLSASAQVTLASRNPNDHVGVLYRRLDVFVTYRDEPVTVPVSLPPQYQGHRDVTVWSPVLSAQSVPVAG

SEQ ID NO: 129276 - protein, 41 aa, Setaria italica
  Transcript Sequence Number=SeqID_63302
YHLFVSCPAVLSAGFPGFGGGANATLSALKFAQPTGCSVEV

SEQ ID NO: 129277 - protein, 87 aa, Setaria italica
  misc_feature (61)..(61): Xaa can be any naturally occurring amino acid
  Transcript Sequence Number=SeqID_63303
  Gene Ontology: Mol. function=pyridoxal phosphate binding; Biological process=metabolic process
FHQEPRKLLFPVSLHLCYISHHISSSCRLQWRVTAVMLADTLERYRQQEKSLVSDFEKLCXDFFHGMVEIDTHGSLVQWVERFSPRR

SEQ ID NO: 129278 - protein, 149 aa, Setaria italica
  misc_feature (45)..(45): Xaa can be any naturally occurring amino acid
  Transcript Sequence Number=SeqID_63304
  Gene Ontology: Mol. function=pyridoxal phosphate binding; Biological process=metabolic process
  Homolog annotation: Hit_ID=B9RMS5; Match level="QueryCoverage=97%, HitCoverage=33%, E-value=5e-33, Identity=54%"; Hit description =Trytophan synthase alpha subunit, putative
GTTAMGLALGAVCLGLQWRVTAVMLADTLERYRQQEKSLVSDFEXLCPGFFHGMVEIDTHGSLVQWVERFSPRRFGKVLDGEIAMCRQVAQQTGILLDPMYTLAAWEQAVDLCRRDSEAKVVMIHTGGTLGLFGLAQRYSPQFTTGEQS

SEQ ID NO: 129279 - protein, 42 aa, Setaria italica
  Transcript Sequence Number=SeqID_63305
  Pfam annotation: Domain name=UPF0197; Domain location=1-42; Score =10.2; E_value=0.004; Accession=PF05251.4; Description=Uncharacterised protein family (UPF0197)
IYEATSSRRSRSLAKEITTAAMASVFLGFGSLFVLLASGVYV

SEQ ID NO: 129280 - protein, 90 aa, Setaria italica
  misc_feature (48)..(48): Xaa can be any naturally occurring amino acid
  Transcript Sequence Number=SeqID_63306
  Homolog annotation: Hit_ID=B6TZ85; Match level="QueryCoverage=72%, HitCoverage=16%, E-value=1e-13, Identity=63%"; Hit description =Sucrose responsive element binding protein
LELHAQEVLDGVVGASGEEARDGCPLVPERTDNAIKNHWNSTLKRKYXAAAGSGCGAAGPAAAADADDERPLKRTSSDGHPGLCFSPGSP

SEQ ID NO: 129281 - protein, 77 aa, Setaria italica
  Transcript Sequence Number=SeqID_63307
AHVRHHRLTFRRVCSTWNVRVRLVGRQCRTGRSRSSFSGWDDPISCLVEWDGMILFFVWLERSLIEREQRQPFYFTT

SEQ ID NO: 129282 - protein, 71 aa, Setaria italica
  Transcript Sequence Number=SeqID_63308
TVLTGEENGARPVYSDLSNQTKNGIIPSHSTKQEMGSSHPEKLERDRPVLHCLPTKRTHGVSFLLPFAWNL

SEQ ID NO: 129283 - protein, 55 aa, Setaria italica
  Transcript Sequence Number=SeqID_63309
  Subcellular localization annotation: CTP_CleavageSite=30; ConfidenceScore=5.08e-01
SPTRMDVSPIATTDGTSTSCLLLTPHFILRTRSISSTNHHKSISRSQTNTHPHQT

SEQ ID NO: 129284 - protein, 51 aa, Setaria italica
  Transcript Sequence Number=SeqID_63310
QSAFNQLNKTGGDIGGIASSWASTISRDLSYSCLQFLMATFQCGLPSCYIG

SEQ ID NO: 129285 - protein, 71 aa, Setaria italica
  misc_feature (62)..(62): Xaa can be any naturally occurring amino acid
  Transcript Sequence Number=SeqID_63311
  Gene Ontology: Mol. function=N-acetyltransferase activity; Cellular component=intracellular; Biological process=metabolic process
  Homolog annotation: Hit_ID=B6U0N0; Match level="QueryCoverage=97%, HitCoverage=12%, E-value=2e-27, Identity=82%"; Hit description=KOB1
FTKPFLISNFTSRIWNETWLGGFFYKPCNYELFVKQSLNMEMAIIMARDAGMDWIIHLDTDXLIHPAAAES

SEQ ID NO: 129286 - protein, 44 aa, Setaria italica
  misc_feature (33)..(33): Xaa can be any naturally occurring amino acid
  misc_feature (36)..(36): Xaa can be any naturally occurring amino acid
  Transcript Sequence Number=SeqID_63312
  Gene Ontology: Mol. function=N-acetyltransferase activity; Cellular component=intracellular; Biological process=metabolic process
  Homolog annotation: Hit_ID=A5A6Q2; Match level="QueryCoverage=97%, HitCoverage=7%, E-value=5e-16, Identity=93%"; Hit description =Abscisic acid insensitive 8 homologue
QAFIIASTATEEEMRNWYREHVVWTDKDTNLKXLRXGVLTRIYA

SEQ ID NO: 129287 - protein, 69 aa, Setaria italica
  misc_feature (60)..(60): Xaa can be any naturally occurring amino acid
  Transcript Sequence Number=SeqID_63313
  Gene Ontology: Mol. function=nuclease activity; Biological process =nucleotide-excision repair
  Homolog annotation: Hit_ID=B6TZ52; Match level="QueryCoverage=92%, HitCoverage=21%, E-value=2e-31, Identity=95%"; Hit description =UvrB/uvrC motif family protein
  Pfam annotation: Domain name=DUF525; Domain location=3-69; Score =63.6; E_value=7.6e-16; Accession=PF04379.6; Description=Protein of unknown function (DUF525)
MFSVLPVQLLRRHWIVTDGNGRTENIWGVGVVGEQPVIFPRTGFEYSSACPLSTPNGRMXEGDFEMKHI

SEQ ID NO: 129288 - protein, 53 aa, Setaria italica
  Transcript Sequence Number=SeqID_63314
THSLKHFSSLTGTKSRVEDIWKKMNSGLPNKMPTPMMTKFSNTAKEKEKIKTK

SEQ ID NO: 129289 - protein, 99 aa, Setaria italica
  Transcript Sequence Number=SeqID_63315
  Subcellular localization annotation: CTP_CleavageSite=90; ConfidenceScore=5.38e-01
GLLMTFLQITKHCFLQHAHFFGLSQGTTMVFPLAGRGTMIAPTIATSSSSRSHLCTKIHTLALQNLLNLKTVIIRRACSQLGGTALRHGRASTSATESE

SEQ ID NO: 129290 - protein, 93 aa, Setaria italica
  Transcript Sequence Number=SeqID_63316
KHCFLQHAHFLRLIPRDNYGFPLAGRGTMIAPPSPLPPVAEAIPTWPVAYVGITALAEPPTPPPRQTEVMAEGEATTVAGELPLQCLATSATE

SEQ ID NO: 129291 - protein, 52 aa, Setaria italica
  Transcript Sequence Number=SeqID_63317
  Gene Ontology: Mol. function=homoserine kinase activity; Biological process=threonine metabolic process
  Homolog annotation: Hit_ID=B6UB59; Match level="QueryCoverage=84%, HitCoverage=11%, E-value=7e-14, Identity=90%"; Hit description =Homoserine kinase
ELGSGERRGKGFDFLGCAVADASLSLGDTVIATLDPTLPPGTVSIASVTSPS

SEQ ID NO: 129292 - protein, 74 aa, Setaria italica
  Transcript Sequence Number=SeqID_63318
  Gene Ontology: Mol. function=protein serine/threonine kinase activity; Cellular component=plasma membrane; Biological process =protein amino acid phosphorylation
  Homolog annotation: Hit_ID=B6U656; Match level="QueryCoverage=78%, HitCoverage=15%, E-value=2e-27, Identity=100%"; Hit description=ATP binding protein
SYLHSKKIVHRDVKTENMLLDKTRTVKIADFGVARLEASNPSDMTGETGTLGYMAPEVSFLEQLLFMFSSELLF

SEQ ID NO: 129293 - protein, 103 aa, Setaria italica
  misc_feature (14)..(14): Xaa can be any naturally occurring amino acid
  Transcript Sequence Number=SeqID_63319
  Gene Ontology: Mol. function=hydrolase activity; Cellular component =endoplasmic reticulum membrane; Biological process=signal peptide processing
  Homolog annotation: Hit_ID=P58684; Match level="QueryCoverage=90%, HitCoverage=48%, E-value=1e-34, Identity=73%"; Hit description =Probable signal peptidase complex subunit 2
  Pfam annotation: Domain name=SPC25; Domain location=1-103; Score=7.7; E_value=8.1e-08; Accession=PF06703.3; Description=Microsomal signal peptidase 25 kDa subunit (
DRRRLLAQFYPKKXPQNREFLLGCIALYVALNVVLLILSYTKEKDAILFTHPPAGSFNSTGLIISSKLPRFSDMYTLTIDSADPQSISANKPVRFSKEDVEQK

SEQ ID NO: 129294 - protein, 37 aa, Setaria italica
  Transcript Sequence Number=SeqID_63320
SNQIVIDRHDRKHRTNVCLERYSFTDQAVQYDKNVLF

SEQ ID NO: 129295 - protein, 139 aa, Setaria italica
  misc_feature (6)..(6): Xaa can be any naturally occurring amino acid
  Transcript Sequence Number=SeqID_63321
  Gene Ontology: Mol. function=metal ion binding; Cellular component =intracellular
  Homolog annotation: Hit_ID=Q01HG3; Match level="QueryCoverage=78%, HitCoverage=16%, E-value=2e-26, Identity=54%"; Hit description =OSIGBa0142I02-OSIGBa0101B20.26 protein
MVQELXTIRKMFSDILIQLCPKCQMPIVKSEGCNKMSCGNCGQLLCFRCGRAISGYDHFWNECVLFELCQYSDVTPFERHMEEVQIGRSAKVQLTPIGSTIRCPKCRQRNFKENEELLFFLLGHCPVFLLTCLLFIVRY

SEQ ID NO: 129296 - protein, 77 aa, Setaria italica
  misc_feature (42)..(42): Xaa can be any naturally occurring amino acid
  Transcript Sequence Number=SeqID_63322
QVGRGGGTRNRRSEGRSRRGAPTEHRACTYYQDSPYERSVVXGGQRRQLAWLQEIPQPRSLRIANFRFQRPADFVGL

SEQ ID NO: 129297 - protein, 83 aa, Setaria italica
  Transcript Sequence Number=SeqID_63323
CQCILMTLRTRRTMTQRTAKRRFGPSQLQGASDPTQGSPPPKEGGSGDGIAQMLVVSTRPPPSHQPGPSSCDEEAVHSASIMF

SEQ ID NO: 129298 - protein, 58 aa, Setaria italica
  Transcript Sequence Number=SeqID_63324
  Gene Ontology: Mol. function=ubiquitin thiolesterase activity; Cellular component=intracellular; Biological process=ubiquitin -dependent protein catabolic process
  Homolog annotation: Hit_ID=Q10RB2; Match level="QueryCoverage=93%, HitCoverage=3%, E-value=4e-25, Identity=87%"; Hit description =Ubiquitin carboxyl-terminal hydrolase family protein, expressed
HLQVCYYGQHYHCFAFKDGRWVMYDDQTVKVIGSWGDVLVMFEKGHLQPQVLFFEAAS

SEQ ID NO: 129299 - protein, 41 aa, Setaria italica
  Transcript Sequence Number=SeqID_63325
IQLPPPLPLLLPPPPLLQAHLPLPLPPPSKPLFTPPPPPPP

SEQ ID NO: 129300 - protein, 97 aa, Setaria italica
  misc_feature (18)..(18): Xaa can be any naturally occurring amino acid
  Transcript Sequence Number=SeqID_63326
  Gene Ontology: Mol. function=ubiquitin thiolesterase activity; Cellular component=intracellular; Biological process=ubiquitin -dependent protein catabolic process
  Homolog annotation: Hit_ID=Q10RB2; Match level="QueryCoverage=98%, HitCoverage=6%, E-value=2e-48, Identity=86%"; Hit description =Ubiquitin carboxyl-terminal hydrolase family protein, expressed
WQNNKESVDDISATLAGXSTEIDISIFFHGIDQGSKHTLVSVVCYYGQHYHCFAFKDGRWVMYDDQTVKVIGSWGDVLVMCEKGHLQPQVLFFEAAS

SEQ ID NO: 129301 - protein, 49 aa, Setaria italica
  Transcript Sequence Number=SeqID_63327
  Homolog annotation: Hit_ID=Q69S58; Match level="QueryCoverage=65%, HitCoverage=5%, E-value=2e-09, Identity=100%"; Hit description =Putative hydroxyproline-rich glycoprotein DZ-HRGP
APTVVKRPLAQHTPELTAMVPASVRVKRESALPKPKPKVVQQQQSSTPS

SEQ ID NO: 129302 - protein, 67 aa, Setaria italica
  Transcript Sequence Number=SeqID_63328
KITGSSFFFVSLQGSVCSCTCCCPELLALTGIPRPQPNPNHQHLPPPPKPGQGSNTDTGVIIFPVNR

SEQ ID NO: 129303 - protein, 77 aa, Setaria italica
  misc_feature (11)..(11): Xaa can be any naturally occurring amino acid
  Transcript Sequence Number=SeqID_63329
  Gene Ontology: Cellular component=integral to membrane
  Homolog annotation: Hit_ID=B6TFH7; Match level="QueryCoverage=81%, HitCoverage=31%, E-value=6e-21, Identity=68%"; Hit description =Peroxisomal membrane protein PMP22
  Pfam annotation: Domain name=Mpv17_PMP22; Domain location=2-69; Score= 96.7; E_value=8.2e-26; Accession=PF04117.4; Description=Mpv17  PMP22 family
VLGRLEGRPLXQVKSKVKKDYASVQLTAWKFWPIVSWINYEYMPLQLRVLFHSFVASCWAVFLNLKAARSIANTKKA

SEQ ID NO: 129304 - protein, 81 aa, Setaria italica
  misc_feature (6)..(6): Xaa can be any naturally occurring amino acid
  misc_feature (19)..(19): Xaa can be any naturally occurring amino acid
  Transcript Sequence Number=SeqID_63330
  Gene Ontology: Cellular component=integral to membrane
  Homolog annotation: Hit_ID=B9SS50; Match level="QueryCoverage=81%, HitCoverage=40%, E-value=9e-25, Identity=70%"; Hit description =Peroxisomal membrane protein 2, pxmp2, putative
  Pfam annotation: Domain name=Mpv17_PMP22; Domain location=11-74; Score=78.9; E_value=1.9e-20; Accession=PF04117.4; Description=Mpv17 PMP22 family
PWNNMXFMMYYGLVVEGKXSKVKKDYASVQLTAWKFWPIVSWINYEYMPLQLRVLFHSFVASCWAVFLNLKAARSIANTKK

SEQ ID NO: 129305 - protein, 76 aa, Setaria italica
  Transcript Sequence Number=SeqID_63331
  Gene Ontology: Mol. function=isomerase activity; Biological process =metabolic process
  Homolog annotation: Hit_ID=B6TF44; Match level="QueryCoverage=73%, HitCoverage=20%, E-value=9e-23, Identity=94%"; Hit description=3 -hydroxybutyryl-CoA dehydratase
DVKDVATDPVAQMELCRKPIVGAIAGFAVTAGFEIALACDILVAGRSAKFLDTHAKCVNSPLLHPDHDCSESVTCY

SEQ ID NO: 129306 - protein, 155 aa, Setaria italica
  misc_feature (104)..(104): Xaa can be any naturally occurring amino acid
  Transcript Sequence Number=SeqID_63332
  Gene Ontology: Mol. function=nucleic acid binding; Biological process= DNA integration
  Homolog annotation: Hit_ID=Q2RBA0; Match level="QueryCoverage=100%, HitCoverage=16%, E-value=2e-63, Identity=78%"; Hit description =Retrotransposon protein, putative, Ty1-copia subclass
  Pfam annotation: Domain name=RVT_2; Domain location=1-95; Score= -64.3; E_value=2e-12; Accession=PF07727.6; Description=Reverse transcriptase (RNA-dependent DNA pol
SLYVYKKGTSLAYLLLYVDDIVLTTSSSTLLQHIMAHLHSEFTMTDLGDLHHFLGISVTRSPDRLFLSQRQYALDLLQRAGMAECHSTATPIDTHAKLSATTSXKDGSEYRSPAGALQYLTLTRPDLTYAVQQVYLFMHDPREPHLALIKRNLRY

SEQ ID NO: 129307 - protein, 116 aa, Setaria italica
  misc_feature (15)..(15): Xaa can be any naturally occurring amino acid
  Transcript Sequence Number=SeqID_63333
  Gene Ontology: Mol. function=nucleic acid binding; Biological process= DNA integration
  Homolog annotation: Hit_ID=Q2RBA0; Match level="QueryCoverage=60%, HitCoverage=7%, E-value=3e-26, Identity=82%"; Hit description =Retrotransposon protein, putative, Ty1-copia subclass
  Pfam annotation: Domain name=RVT_2; Domain location=1-87; Score= -100.7; E_value=1.5e-09; Accession=PF07727.6; Description=Reverse transcriptase (RNA-dependent DNA pol
SLAYLLLYVDDIVLXTTSSSTLLQHIMAHLHSEFTMTDLGDLHHFLGISVTRSPDRLFLSQRQYALDLLQRAGMAECHSTATPIDTHAKLSATTSSRNRTTEVTRKYLDKGYPYLS

SEQ ID NO: 129308 - protein, 57 aa, Setaria italica
  Transcript Sequence Number=SeqID_63334
TKLIITSSIYYPFTKLFVKLICNSPFWLLVPWFCLLHSGLNVCNISACFYNIAFKQR

SEQ ID NO: 129309 - protein, 66 aa, Setaria italica
  Transcript Sequence Number=SeqID_63335
  Subcellular localization annotation: CTP_CleavageSite=41; ConfidenceScore=5.10e-01
GVSQSSTLTSDSSKAKSAASSIFAIVDRKSRIDPSEDAGVTVETLRGNIEFPETRNRGKARHTGDR

SEQ ID NO: 129310 - protein, 77 aa, Setaria italica
  Transcript Sequence Number=SeqID_63336
  Subcellular localization annotation: CTP_CleavageSite=59; ConfidenceScore=5.64e-01
NKCDMCMVGNTCPNLRPRLTSLSTLTLSSSSWVRTKQMPTRLFFSTVFMHFLPRDRVLRGMLFYDIYAFFTWDRVLR

SEQ ID NO: 129311 - protein, 100 aa, Setaria italica
  Transcript Sequence Number=SeqID_63337
KVIDETCSGLQMDLPRLLVPLDWVVRMRITTPMVREPTWSRPYFSTILVKRWNNCEGRSAEQLERSLSTRALELRSELPYVVRRLLWRSRYYVICLLECL

SEQ ID NO: 129312 - protein, 49 aa, Setaria italica
  Transcript Sequence Number=SeqID_63338
LGFHRLQYKHRSRIVNNTYNTKPGSLYFLQRPVVRIYALLRIINTLTDK

SEQ ID NO: 129313 - protein, 62 aa, Setaria italica
  Transcript Sequence Number=SeqID_63339
GRWGGEERRGEGEAVVMSEDRSVTYEELRERLHRRIAELRGNRCTRPEFLNKPKKEKGKKAK

SEQ ID NO: 129314 - protein, 43 aa, Setaria italica
  Transcript Sequence Number=SeqID_63340
LSHERYEVREKKSSKKVTWIQLNLFCFKKHVFYLCSVECLLLT

SEQ ID NO: 129315 - protein, 44 aa, Setaria italica
  Transcript Sequence Number=SeqID_63341
  Gene Ontology: Mol. function=nutrient reservoir activity
  Homolog annotation: Hit_ID=A9XEB7; Match level="QueryCoverage=93%, HitCoverage=25%, E-value=8e-10, Identity=80%"; Hit description=10kD delta canein
PFQQCHCGAISQIMQQQQLPSMFNPMATAIPPMFFQQPFAGVPF

SEQ ID NO: 129316 - protein, 70 aa, Setaria italica
  Transcript Sequence Number=SeqID_63342
  Gene Ontology: Mol. function=catalytic activity
  Homolog annotation: Hit_ID=B6SZF0; Match level="QueryCoverage=88%, HitCoverage=27%, E-value=2e-27, Identity=95%"; Hit description=Metal- dependent phosphohydrolase, HD subdomain
CLRLSLYYRILPRDNLSKEKYMSKEEKQTSINHFHEKLFKLKDMMKTEAGKRRAEKRHKFMEDFVAEFYE

SEQ ID NO: 129317 - protein, 32 aa, Setaria italica
  Transcript Sequence Number=SeqID_63343
LVCSTGFGLACHLGVLADLPTIGVGKNVGHLL

SEQ ID NO: 129318 - protein, 53 aa, Setaria italica
  Transcript Sequence Number=SeqID_63344
  Gene Ontology: Mol. function=magnesium ion binding; Cellular component=chloroplast; Biological process=gibberellin metabolic process
  Homolog annotation: Hit_ID=B9GSM9; Match level="QueryCoverage=96%, HitCoverage=6%, E-value=3e-17, Identity=68%"; Hit description =Copalyl diphosphate synthase
DLDIPYDHPALQEIYDRRDLKLNKIPKDVLHSIPTTLLHSIEGMPGLDWKRAG

SEQ ID NO: 129319 - protein, 148 aa, Setaria italica
  misc_feature (38)..(38): Xaa can be any naturally occurring amino acid
  Transcript Sequence Number=SeqID_63345
  Gene Ontology: Mol. function=binding; Cellular component=plasma membrane
  Homolog annotation: Hit_ID=B6TE00; Match level="QueryCoverage=90%, HitCoverage=29%, E-value=3e-56, Identity=74%"; Hit description =Nodulin-like protein
LLLALSPVAVAVKAQKLESIQHEEPTSSEQRIGLLREXGKENLNVLQAMGKLNFWLLFLAMACGMGSGLATVNNISQIGGSLGYTNKETSTLVSLWSIWNFSGRFGAGFISDHFLRLRGVGRPFFIGATLLIMSVGHGIISSGLPASL

SEQ ID NO: 129320 - protein, 121 aa, Setaria italica
  misc_feature (11)..(11): Xaa can be any naturally occurring amino acid
  misc_feature (32)..(32): Xaa can be any naturally occurring amino acid
  misc_feature (38)..(38): Xaa can be any naturally occurring amino acid
  Transcript Sequence Number=SeqID_63346
  Gene Ontology: Mol. function=serine-type endopeptidase activity; Cellular component=chloroplast envelope; Biological process =proteolysis
  Homolog annotation: Hit_ID=Q0DRY8; Match level="QueryCoverage=93%, HitCoverage=34%, E-value=2e-44, Identity=76%"; Hit description=ATP -dependent Clp protease proteolytic subunit
  Pfam annotation: Domain name=CLP_protease; Domain location=7-121; Score=-13.1; E_value=1.8e-07; Accession=PF00574.15; Description=Clp protease
ICLHLLLHGRXVYIGMPLVPAVTELVVAQLMXLEWMNXKEPVYIYINSTGTARDDGEPVGMESEGFAIYDAMMRMKAEIHTLCIGAAAGHACLVLAAGKKGKRYMFPHAKAMIQQPRITNQ

SEQ ID NO: 129321 - protein, 54 aa, Setaria italica
  Transcript Sequence Number=SeqID_63347
AWLVQHLGRSKWVDYILTVNTKIRPDTNERNNNGFVESSSQLSSRHHNILMGPL

SEQ ID NO: 129322 - protein, 75 aa, Setaria italica
  misc_feature (60)..(60): Xaa can be any naturally occurring amino acid
  misc_feature (68)..(68): Xaa can be any naturally occurring amino acid
  Transcript Sequence Number=SeqID_63348
  Gene Ontology: Mol. function=serine-type endopeptidase activity; Biological process=proteolysis
  Homolog annotation: Hit_ID=Q0DRY8; Match level="QueryCoverage=85%, HitCoverage=20%, E-value=6e-11, Identity=58%"; Hit description=ATP -dependent Clp protease proteolytic subunit
  Pfam annotation: Domain name=CLP_protease; Domain location=1-74; Score=-89.1; E_value=0.04; Accession=PF00574.15; Description=Clp protease
KGRWLGGSWSGGASCEGFAIYDAMMRMKAEIHTLCIGAAAGHACLVLAAGKKGKRYMFPXAKAMIQHXIPSYGMM

SEQ ID NO: 129323 - protein, 62 aa, Setaria italica
  Transcript Sequence Number=SeqID_63349
  Gene Ontology: Mol. function=transcription regulator activity; Cellular component=nucleus; Biological process=regulation of transcription
  Homolog annotation: Hit_ID=B6SY24; Match level="QueryCoverage=61%, HitCoverage=9%, E-value=2e-13, Identity=94%"; Hit description=BHLH transcription factor
  Subcellular localization annotation: CTP_CleavageSite=40; ConfidenceScore=5.17e-01
QSLQRQVEFLSMKLATVNPLDFSNLPTLLQKDIFQACGPSASSVFSLESSSSGFPISSRILR

SEQ ID NO: 129324 - protein, 120 aa, Setaria italica
  Transcript Sequence Number=SeqID_63350
  Gene Ontology: Mol. function=transcription regulator activity; Cellular component=nucleus; Biological process=regulation of transcription
  Homolog annotation: Hit_ID=B6U6D0; Match level="QueryCoverage=99%, HitCoverage=33%, E-value=1e-40, Identity=71%"; Hit description=BHLH transcription factor
  Pfam annotation: Domain name=HLH; Domain location=61-111; Score=30.3; E_value=8.1e-06; Accession=PF00010.18; Description=Helix-loop-helix DNA-binding domain
DGKKCRVGAGGSPVKPKVEEATASDGSVEDKGQKKGKGKSSKPPVEPPKDYVHVRARRGQATDSHSLAERVRREKISQRMKFLQDLVPGCNKVVGKALMLDEIINYVQSLQQQVERMPLT

SEQ ID NO: 129325 - protein, 139 aa, Setaria italica
  Transcript Sequence Number=SeqID_63351
ERIRLRNRKKRRRRIDLLYYGFVPGGGCAFNSAGEFSRRSFVFLFVCETVGSLASPLGCLSSLLAVAPATADSFSSRWFFRWRWRICASLLLSGVRAADVLSTDRGVLVESRRWIMRHIQALEPCVLAEDEDVLVLVGV

SEQ ID NO: 129326 - protein, 79 aa, Setaria italica
  Transcript Sequence Number=SeqID_63352
CTILDLLSYDGSVKEVDPASRDNVVKGSPWKEQDVEGLVSASEAVEDFGVEKPLEIENIVATVEDIGVVKPTEIENVVP

SEQ ID NO: 129327 - protein, 59 aa, Setaria italica
  Transcript Sequence Number=SeqID_63353
  Gene Ontology: Mol. function=zinc ion binding
MFDWFSINVNDSAEVAATLPATAHRYCVWQIYQNALQQLSQAFHGSKTLECNFKRCLFD

SEQ ID NO: 129328 - protein, 115 aa, Setaria italica
  misc_feature (66)..(66): Xaa can be any naturally occurring amino acid
  Transcript Sequence Number=SeqID_63354
  Gene Ontology: Mol. function=unfolded protein binding; Biological process=protein folding
  Homolog annotation: Hit_ID=B6TKS5; Match level="QueryCoverage=100%, HitCoverage=47%, E-value=3e-47, Identity=64%"; Hit description=DnaJ subfamily B member 13
  Pfam annotation: Domain name=DnaJ_C; Domain location=31-114; Score= -19.1; E_value=7.7e-05; Accession=PF01556.10; Description=DnaJ C terminal region
ISRDVLDAAGKPTNVEEILTIDIKPGWKKGTKITFPEKGNEMRNVVPSDLVFIIEERAHPKFKRDXPTYEEVVQGEGMPITREPSKKGNLRIKFQIKFPTNLTADQKSGIQQLLS

SEQ ID NO: 129329 - protein, 37 aa, Setaria italica
  misc_feature (1)..(1): Xaa can be any naturally occurring amino acid
  Transcript Sequence Number=SeqID_63355
  Gene Ontology: Mol. function=unfolded protein binding; Biological process=protein folding
  Homolog annotation: Hit_ID=B6TKS5; Match level="QueryCoverage=97%, HitCoverage=11%, E-value=3e-11, Identity=91%"; Hit description=DnaJ subfamily B member 13
XRKAPPIERQLACSLEDLYKGATKKMKISRDVLDAAG

SEQ ID NO: 129330 - protein, 135 aa, Setaria italica
  misc_feature (117)..(117): Xaa can be any naturally occurring amino acid
  Transcript Sequence Number=SeqID_63356
  Gene Ontology: Mol. function=unfolded protein binding; Biological process=protein folding
  Homolog annotation: Hit_ID=B6TKS5; Match level="QueryCoverage=90%, HitCoverage=37%, E-value=3e-60, Identity=89%"; Hit description=DnaJ subfamily B member 13
  Pfam annotation: Domain name=DnaJ_C; Domain location=20-135; Score =50.5; E_value=6.7e-12; Accession=PF01556.10; Description=DnaJ C terminal region
LEGRIPRRIRIIKPGWKKGTKITFPEKGNEMRNVVPSDLVFIIEERAHPKFKRDGNDLIYTHKISLVEALTGCTVQLTTLDGRNLTIPVKSVVSPTYEEVVQGEGMPITREPSKRGXLRIKFQIKFPTNLTADQS

SEQ ID NO: 129331 - protein, 64 aa, Setaria italica
  Transcript Sequence Number=SeqID_63357
TERALAYDRAAYRMRGSRALLNFPLRIGSEIAAATAAAAAGDKRQSPSLRPRRTRSFSTSSSSS

SEQ ID NO: 129332 - protein, 80 aa, Setaria italica
  Transcript Sequence Number=SeqID_63358
  Gene Ontology: Mol. function=potassium ion transmembrane transporter activity; Cellular component=membrane; Biological process=potassium ion transport
  Homolog annotation: Hit_ID=Q5Z6K9; Match level="QueryCoverage=100%, HitCoverage=10%, E-value=7e-36, Identity=88%"; Hit description =Potassium transporter 24
ILAAVVGSQAVITGTFSVIKQCCSFNCFPRVKIVHTSSTVHGQIYIPEINWILMVLCLAVTIGFRDTKHMANAQGLAVIT

SEQ ID NO: 129333 - protein, 134 aa, Setaria italica
  misc_feature (59)..(59): Xaa can be any naturally occurring amino acid
  Transcript Sequence Number=SeqID_63359
  Gene Ontology: Mol. function=potassium ion transmembrane transporter activity; Cellular component=membrane; Biological process=potassium ion transport
  Homolog annotation: Hit_ID=Q6YWQ4; Match level="QueryCoverage=86%, HitCoverage=14%, E-value=8e-47, Identity=75%"; Hit description =Potassium transporter 25
RIGPKEYRLYRVIVKYGYRDVQKDDLEFEKELVSNIAEFIRSSGEYDKNGFVEDTDMPXEKLSPVSTGIPLWEEDGDLDASASPHKEIDPQNIAPKRKKARFMIPKSAQVDSEVRRRRLDKEDYNRKRTKGKGT

SEQ ID NO: 129334 - protein, 82 aa, Setaria italica
  Transcript Sequence Number=SeqID_63360
  Subcellular localization annotation: CTP_CleavageSite=30; ConfidenceScore=5.59e-01
RLWYASSSVARHDSPPPPPRPRAGCLTFPCAAAAPPAASRSMCPAPAPAPARAPQCVTPAASMAANLVESPQGKQGIGAPNR

SEQ ID NO: 129335 - protein, 73 aa, Setaria italica
  Transcript Sequence Number=SeqID_63361
  Gene Ontology: Mol. function=potassium ion transmembrane transporter activity; Cellular component=membrane; Biological process=potassium ion transport
  Homolog annotation: Hit_ID=Q6YWQ4; Match level="QueryCoverage=90%, HitCoverage=8%, E-value=6e-26, Identity=89%"; Hit description =Potassium transporter 25
DFWYVYLTVHCRGCMYIPEINWMLMILCLAVTIGFRDTKHLANAQGLAVITVMLVTTCLMSLVIVLCWNKSIF

SEQ ID NO: 129336 - protein, 45 aa, Setaria italica
  Transcript Sequence Number=SeqID_63362
MLMQFKVPKRKKARFMIPKSAQVDSEVRRELQELMGTQRGGRHVL

SEQ ID NO: 129337 - protein, 41 aa, Setaria italica
  misc_feature (6)..(6): Xaa can be any naturally occurring amino acid
  Transcript Sequence Number=SeqID_63363
  Gene Ontology: Mol. function=transporter activity; Cellular component= integral to membrane; Biological process=transport
  Homolog annotation: Hit_ID=A9UEC8; Match level="QueryCoverage=97%, HitCoverage=29%, E-value=2e-11, Identity=82%"; Hit description =Aquaporin (Fragment)
FWSATXFILVYCIGGISGGHINPAVTFGLFVGRKLSLLRTV

SEQ ID NO: 129338 - protein, 72 aa, Setaria italica
  Transcript Sequence Number=SeqID_63364
GAVADDDGIWGWKIPSGGKGVKVQEFTSWMLSTASGLGNCLSRYVQDRFRSLVADPAEQESSVSTVNTTFVS

SEQ ID NO: 129339 - protein, 83 aa, Setaria italica
  misc_feature (23)..(23): Xaa can be any naturally occurring amino acid
  Transcript Sequence Number=SeqID_63365
LGNCLSRYVQDRFRSLVADPAEXTHHKQESSVSTVNTTFDTSDVYLLTRGRAWAIALSLRNKLSEKFLSASVIGMDTEDLLYR

SEQ ID NO: 129340 - protein, 59 aa, Setaria italica
  Transcript Sequence Number=SeqID_63366
KDTFYGSSGFLCAAHPIFHMLPPSAGKEKNFVYSHLHPQIRVYEAHPKPVGLAFGGTVG

SEQ ID NO: 129341 - protein, 49 aa, Setaria italica
  Transcript Sequence Number=SeqID_63367
TRHTAQQRFKNPEPHNSTTWRCLLRTGRPASVLLPKSTLFPSYWFFSLS

SEQ ID NO: 129342 - protein, 85 aa, Setaria italica
  misc_feature (57)..(57): Xaa can be any naturally occurring amino acid
  Transcript Sequence Number=SeqID_63368
  Gene Ontology: Mol. function=catalytic activity; Biological process =DNA integration
  Homolog annotation: Hit_ID=B8B5M4; Match level="QueryCoverage=40%, HitCoverage=7%, E-value=1e-10, Identity=82%"; Hit description =Superoxide dismutase [Cu-Zn]
NLDCKELMISTCKVTKAGIGGPLIDFDGNFIGMNFHGKEETHYLPKVYGSGKVEALXGPDVDEASYKKPNRWPVPEPTFGSLFFP

SEQ ID NO: 129343 - protein, 58 aa, Setaria italica
  Transcript Sequence Number=SeqID_63369
VLMLLNYHAHCHHVIMLLVYHYWYLVIDSLQLDAPDFEEEELWPLLYPNPLPVDDFTE

SEQ ID NO: 129344 - protein, 34 aa, Setaria italica
  Transcript Sequence Number=SeqID_63370
AGIGGPLIDFDGNFIGMNFHGKEETHYLPRSMVL

SEQ ID NO: 129345 - protein, 102 aa, Setaria italica
  Transcript Sequence Number=SeqID_63371
  Subcellular localization annotation: CTP_CleavageSite=91; ConfidenceScore=5.41e-01
VLFCHLFALLAFCASTTTATHVPWHLPPVTTLGAMNPCMQYCMMQQPFAMNPCMQYCTTQQAFAMGRFASPASMMLQQPWTLPFQQYWTPRDDAVSTWHHSD

SEQ ID NO: 129346 - protein, 70 aa, Setaria italica
  Transcript Sequence Number=SeqID_63372
  Subcellular localization annotation: CTP_CleavageSite=38; ConfidenceScore=5.05e-01
MNPCMQYCMMQQPYAVNPCMQYCMMQQALAMGRFASPASMMLQQPWTSPLQQYWTPRMMPSMMPFQQSHC

SEQ ID NO: 129347 - protein, 51 aa, Setaria italica
  Transcript Sequence Number=SeqID_63373
MDHGYGHKCSFGWFPLLFTSSWVARLETKTPFFFVMLNSGRVARVYTSIGH

SEQ ID NO: 129348 - protein, 72 aa, Setaria italica
  misc_feature (11)..(11): Xaa can be any naturally occurring amino acid
  misc_feature (29)..(29): Xaa can be any naturally occurring amino acid
  misc_feature (36)..(36): Xaa can be any naturally occurring amino acid
  misc_feature (62)..(62): Xaa can be any naturally occurring amino acid
  Transcript Sequence Number=SeqID_63374
  Gene Ontology: Mol. function=transferase activity, transferring alkyl or aryl (other than methyl) groups; Biological process=isoprenoid biosynthetic process
  Homolog annotation: Hit_ID=B6TAR5; Match level="QueryCoverage=100%, HitCoverage=17%, E-value=1e-28, Identity=88%"; Hit description =Prenyl transferase
LVGAENPVLVXAAEQIFGAGGKRLRPALXFLVSRAXAELAGLSELTTEHQRLAEIIEMIHTXSLIHDDVIDD

SEQ ID NO: 129349 - protein, 87 aa, Setaria italica
  Transcript Sequence Number=SeqID_63375
  Gene Ontology: Mol. function=transferase activity, transferring alkyl or aryl (other than methyl) groups; Cellular component=chloroplast; Biological process=isoprenoid biosynthetic process
  Homolog annotation: Hit_ID=Q1W5D1; Match level="QueryCoverage=74%, HitCoverage=15%, E-value=3e-20, Identity=73%"; Hit description =Solanesyl diphosphate synthase
LGKPAGSDLAKGNLTAPVIFALQDEPELREIIDSEFSETDSLAAAIDLVHRSGGIRRAHELAREERVELRTNTKNTRQVDLTERKNE

SEQ ID NO: 129350 - protein, 55 aa, Setaria italica
  Transcript Sequence Number=SeqID_63376
PFVVSKVLFTYLFVFLVVGVFYTGSSEKQGLHHIPRPPTPCAYILSECELTLQLL

SEQ ID NO: 129351 - protein, 81 aa, Setaria italica
  Transcript Sequence Number=SeqID_63377
  Gene Ontology: Mol. function=transferase activity, transferring alkyl or aryl (other than methyl) groups; Biological process=isoprenoid biosynthetic process
  Homolog annotation: Hit_ID=B6TAR5; Match level="QueryCoverage=98%, HitCoverage=20%, E-value=6e-25, Identity=76%"; Hit description =Prenyl transferase
LAAIDVPPQTIVTTASVPERISVSSLLEVVSGDLLNLNNNLKSLVGAENPVLVSAAEQIFGAGGKRLRPALVFLVSRATAE

SEQ ID NO: 129352 - protein, 56 aa, Setaria italica
  Transcript Sequence Number=SeqID_63378
  Subcellular localization annotation: CTP_CleavageSite=32; ConfidenceScore=5.36e-01
MLSLSCPGVSMSKKAFDSGQLASCRCSWPGARAAPRRQRTPLLFCSFRFVPFLPVL

SEQ ID NO: 129353 - protein, 70 aa, Setaria italica
  misc_feature (41)..(41): Xaa can be any naturally occurring amino acid
  Transcript Sequence Number=SeqID_63379
  Gene Ontology: Mol. function=protein tyrosine/serine/threonine phosphatase activity; Biological process=protein amino acid dephosphorylation
  Homolog annotation: Hit_ID=B6T896; Match level="QueryCoverage=62%, HitCoverage=21%, E-value=1e-15, Identity=93%"; Hit description =Protein-tyrosine phosphatase mitochondrial 1
ISDKWCTLKCRLIFPISIQFILLGAVPFPSDVPRLKQLGVXGVVTLNEPYETLVPTSLYQVTIPLFASCV

SEQ ID NO: 129354 - protein, 85 aa, Setaria italica
  Transcript Sequence Number=SeqID_63380
  Gene Ontology: Mol. function=protein tyrosine/serine/threonine phosphatase activity; Biological process=protein amino acid dephosphorylation
  Homolog annotation: Hit_ID=B6T896; Match level="QueryCoverage=52%, HitCoverage=21%, E-value=2e-17, Identity=93%"; Hit description =Protein-tyrosine phosphatase mitochondrial 1
GQQEQQEEEVGASGGGEVVRLKAKRALVGAGARVLFYPTLLYNVLRNRFEADFRWWDRVDQVVLSFCADCVVISDAIIGSCFNLL

SEQ ID NO: 129355 - protein, 67 aa, Setaria italica
  Transcript Sequence Number=SeqID_63381
VPETPDSRAQLTDPRPAARDPPPPDDLCVASPQIQLGRGRQEGAIQCPPPASGTASPQRSPARPSSP

SEQ ID NO: 129356 - protein, 100 aa, Setaria italica
  misc_feature (32)..(32): Xaa can be any naturally occurring amino acid
  misc_feature (48)..(48): Xaa can be any naturally occurring amino acid
  Transcript Sequence Number=SeqID_63382
KVISLCTTYSIHSLYVPEMEQSSNDQMMKRFXHQRQEDFNSVFYNANXHSSMQFNMDFADDNSLSSTTSHGRTDKNMGTNRSIQSKAEGLSFSPSRSLDA

SEQ ID NO: 129357 - protein, 85 aa, Setaria italica
  Transcript Sequence Number=SeqID_63383
VPLVVLFYFYFFYSVRLFVSRRAEFFRKKAEHICRPVDGAAPFAVCSSCYKLLQMPVEKCIGRKKNRFQCGSCCQIISLKHDEGK

SEQ ID NO: 129358 - protein, 83 aa, Setaria italica
  Transcript Sequence Number=SeqID_63384
  Gene Ontology: Mol. function=binding; Cellular component=integral to membrane; Biological process=transport
  Homolog annotation: Hit_ID=B9RCC2; Match level="QueryCoverage=97%, HitCoverage=12%, E-value=4e-25, Identity=66%"; Hit description =Mitochondrial carrier protein, putative
  Pfam annotation: Domain name=Mito_carr; Domain location=1-48; Score= -15.8; E_value=0.096; Accession=PF00153.19; Description=Mitochondrial carrier protein
NALVGCLKRGGIASLYAGWGAVLCRNIPHSIVKFYAYESLKQSILKSAPENVKLSSGETLICGGFAGSTAALFTTPFDVVKTT

SEQ ID NO: 129359 - protein, 94 aa, Setaria italica
  Transcript Sequence Number=SeqID_63385
  Gene Ontology: Mol. function=nucleic acid binding; Cellular component= nucleolus
  Homolog annotation: Hit_ID=Q9SEE9; Match level="QueryCoverage=69%, HitCoverage=15%, E-value=2e-15, Identity=64%"; Hit description =Arginine/serine-rich protein
VEFKKRADAEKALLYMDGGQIDGNVVKLRFTLQPRQRAASPMKVPPPPPKRDAPQTDKGAGSAEKGMTQDKTYLREIQYYQRKERPRLTTYQRK

SEQ ID NO: 129360 - protein, 154 aa, Setaria italica
  misc_feature (132)..(132): Xaa can be any naturally occurring amino acid
  Transcript Sequence Number=SeqID_63386
  Gene Ontology: Mol. function=protein serine/threonine kinase activity; Cellular component=integral to membrane; Biological process=protein amino acid phosphorylation
  Homolog annotation: Hit_ID=Q654Z6; Match level="QueryCoverage=100%, HitCoverage=32%, E-value=3e-43, Identity=53%"; Hit description =Receptor protein kinase-like
SRGLYSVKIDVFGFGVLALVIISGRNNIILEEQGDTVGNLVRDAWQLWNDGRLHELVDTLLGDGYEIDEMVRFVQVALLCAQEDPVDRPTMSDVIAFLNFESTSSLPDPKPPSELINRGATGFNLSTCVGQXNRTIAITITSSAPVSSRVRIIV

SEQ ID NO: 129361 - protein, 138 aa, Setaria italica
  Transcript Sequence Number=SeqID_63387
  Gene Ontology: Mol. function=protein serine/threonine kinase activity; Cellular component=integral to membrane; Biological process=protein amino acid phosphorylation
  Homolog annotation: Hit_ID=Q654Z3; Match level="QueryCoverage=98%, HitCoverage=25%, E-value=2e-50, Identity=70%"; Hit description =Receptor protein kinase-like
MNPKIADFGSARTLSSDIAEGRTIRIVGTSGYIAPEYASRGLYSVKIDVFGFGVLALVIISGRNNIILEEQGDTVGNLVRDAWQLWNDGRLHELVDTLLGDGYEIDEMVRFVQVALLCAQEDPVDRPTMSDVIAFLKL

SEQ ID NO: 129362 - protein, 104 aa, Setaria italica
  Transcript Sequence Number=SeqID_63388
  Gene Ontology: Mol. function=DNA binding; Biological process =regulation of transcription, DNA-dependent
MLHEHPHLSQNLHQTDKSEGLQSEIFESGGVLALAAACSKFCIAVPAPGQTWLELPNRLPVIPRTKKQGRKVVILKDPCMRLWPVLYQCTPRFSGFITGWLTSA

SEQ ID NO: 129363 - protein, 122 aa, Setaria italica
  Transcript Sequence Number=SeqID_63389
  Gene Ontology: Cellular component=plasma membrane
  Homolog annotation: Hit_ID=B4FAY8; Match level="QueryCoverage=58%, HitCoverage=48%, E-value=8e-33, Identity=94%"; Hit description =Negatively light-regulated protein
  Pfam annotation: Domain name=Lg106; Domain location=50-119; Score =99.5; E_value=1.2e-26; Accession=PF07844.3; Description=Lg106-like protein
RPHSPNRRTHSLFLSSTGSPLLAQILSRQVQGQNEMDGMPSRQEEEAAIKKKYGGILPRKTPLISKDHERAYFDSADWALGKQGGVPNKPKGPLEALRPKLTRNLKLKQKTKKIKRKTVKRK

SEQ ID NO: 129364 - protein, 121 aa, Setaria italica
  misc_feature (11)..(11): Xaa can be any naturally occurring amino acid
  Transcript Sequence Number=SeqID_63390
  Gene Ontology: Mol. function=transcription regulator activity; Cellular component=nucleus
  Homolog annotation: Hit_ID=B6UCV4; Match level="QueryCoverage=86%, HitCoverage=40%, E-value=8e-20, Identity=53%"; Hit description=BHLH transcription factor
SDATRMVIQLXRSEAQQLKDTNGSLEEKIKELKAEKDELRDEKQKLKLEKESLEHQMKLMTSAPAYMPHPTLMPAPFPQAPLAPFHPQGQAAGQKLMMPFVSYPGPSCRIIASSDWSCYVN

SEQ ID NO: 129365 - protein, 44 aa, Setaria italica
  Transcript Sequence Number=SeqID_63391
LLITKLILLCLSLSLSPSLFFPRSFRCWPTRRSPTLNVYYCQAP

SEQ ID NO: 129366 - protein, 52 aa, Setaria italica
  Transcript Sequence Number=SeqID_63392
  Gene Ontology: Mol. function=4 iron, 4 sulfur cluster binding; Cellular component=nucleus; Biological process=base-excision repair
  Homolog annotation: Hit_ID=B3W6G6; Match level="QueryCoverage=86%, HitCoverage=2%, E-value=2e-22, Identity=100%"; Hit description =Putative transcriptional activator DEMETER
VVLYPMLENIQKYLWPRLCKLDQRTLYELHYQMITFGKVFCTKSKPNWIQLQ

SEQ ID NO: 129367 - protein, 130 aa, Setaria italica
  Transcript Sequence Number=SeqID_63393
  Gene Ontology: Mol. function=4 iron, 4 sulfur cluster binding; Cellular component=nucleus; Biological process=base-excision repair
  Homolog annotation: Hit_ID=B3W6G6; Match level="QueryCoverage=90%, HitCoverage=5%, E-value=1e-57, Identity=88%"; Hit description =Putative transcriptional activator DEMETER
RTTCKQYIEIEDADMSKALVAITPEAASIPTPKLKNISRLRTEHQVYELPDSHPLLEGLDQREPDDPCPYLLSIWTPGETAQSTDAPQTFCNSQESGKLCESATCFSCNSIREAQAQKVRGTILVSFLFM

SEQ ID NO: 129368 - protein, 96 aa, Setaria italica
  Transcript Sequence Number=SeqID_63394
  Gene Ontology: Mol. function=4 iron, 4 sulfur cluster binding; Cellular component=nucleus; Biological process=base-excision repair
  Homolog annotation: Hit_ID=B3W6G6; Match level="QueryCoverage=46%, HitCoverage=2%, E-value=1e-19, Identity=93%"; Hit description =Putative transcriptional activator DEMETER
KNISRLRTEHQVYELPDSHPLLEGLDQREPDDPCPYLLSIWTPGKKPIIFFLEQRRRTACHFIKKGSRTKCTKVTGEAATSPTHSTHTKPPLGKKP

SEQ ID NO: 129369 - protein, 112 aa, Setaria italica
  Transcript Sequence Number=SeqID_63395
  Gene Ontology: Mol. function=4 iron, 4 sulfur cluster binding; Cellular component=nucleus; Biological process=base-excision repair
  Homolog annotation: Hit_ID=B3W6G6; Match level="QueryCoverage=96%, HitCoverage=5%, E-value=8e-53, Identity=85%"; Hit description =Putative transcriptional activator DEMETER
TYFRRTEHQVYELPDSHPLLEGLDQREPDDPCPYLLSIWTPGETAQSTDAPQTFCNSQESGKLCESATCFSCNSIREAQAQKIPCRTAMRGSFPLNGTYFQVNEVFADHDSS

SEQ ID NO: 129370 - protein, 102 aa, Setaria italica
  Transcript Sequence Number=SeqID_63396
  Gene Ontology: Cellular component=cytoplasm; Biological process =response to stress
  Homolog annotation: Hit_ID=Q94KM0; Match level="QueryCoverage=77%, HitCoverage=48%, E-value=2e-35, Identity=89%"; Hit description=Small heat shock protein HSP17.8
  Pfam annotation: Domain name=HSP20; Domain location=2-100; Score =157.5; E_value=3.9e-44; Accession=PF00011.13; Description=Hsp20alpha crystallin family
LPGSYAFVVDMPGLGTGDIKVQVEDERVLVISGERRREEREDAKYLRMERRMGKFMRKFVIPDNADMDKISAVCKDGVLTVTVEKLPPPEPKKPKTIEVKIA

SEQ ID NO: 129371 - protein, 95 aa, Setaria italica
  Transcript Sequence Number=SeqID_63397
  Pfam annotation: Domain name=HSP20; Domain location=34-94; Score= -11.8; E_value=0.026; Accession=PF00011.13; Description=Hsp20alpha crystallin family
NHTSARTIHRSRNQATKATKRDPQRRDREKSDQDPRRRDGREDVRAGDSPDGGAAAPAGRFPDNADMDKISAVCKDGVLTVTVEKLPPPEPKSQA

SEQ ID NO: 129372 - protein, 118 aa, Setaria italica
  Transcript Sequence Number=SeqID_63398
  Gene Ontology: Mol. function=protein serine/threonine kinase activity; Biological process=protein amino acid phosphorylation
  Homolog annotation: Hit_ID=B6T9K5; Match level="QueryCoverage=90%, HitCoverage=25%, E-value=4e-55, Identity=95%"; Hit description =Serine/threonine-protein kinase receptor
HRDLKASNVLLDHKMSPKISDFGMAKIFEDDSDAINTGRIVGTYGYMAPEFALEGVFSVKSDVFSFGVLLLEILSGQRNGALYLEEHQQSLIQDAWKLWTQDLAAEFNRNPYDYGTTT

SEQ ID NO: 129373 - protein, 64 aa, Setaria italica
  Transcript Sequence Number=SeqID_63399
NLHILELHVTHSKIVALLFTLQARLCLNFPSGDLIITPFSDLLQRPHRGSIMVMDTSLIDWGDV

SEQ ID NO: 129374 - protein, 87 aa, Setaria italica
  misc_feature (18)..(18): Xaa can be any naturally occurring amino acid
  Transcript Sequence Number=SeqID_63400
NNLLDAASLDRNSALDLXLASAYGDASDSDEDVLNKKIQASNVSNELISHTIESPPNSSSNGGCDGTNMSSSSKERQQGPFFPVVFY

SEQ ID NO: 129375 - protein, 138 aa, Setaria italica
  misc_feature (92)..(92): Xaa can be any naturally occurring amino acid
  misc_feature (122)..(122): Xaa can be any naturally occurring amino acid
  Transcript Sequence Number=SeqID_63401
  Gene Ontology: Mol. function=prenyltransferase activity; Cellular component=integral to membrane
  Homolog annotation: Hit_ID=B6U7K6; Match level="QueryCoverage=98%, HitCoverage=42%, E-value=6e-65, Identity=77%"; Hit description =Homogentisate geranylgeranyl transferase
DIEIDKVNKPTLPLASGEYTPATGVAIVSVFAAMSFGVGWAVGSQPLFWALFISFVLGTAYSINLPYFRWKRFAVVAALCILAVRAVIVQLXFFLHIQDIPDIEGDRIFGIRSFSVRLGQKXVFWICVGLLEMAYSRC

SEQ ID NO: 129376 - protein, 94 aa, Setaria italica
  Transcript Sequence Number=SeqID_63402
  Gene Ontology: Mol. function=prenyltransferase activity; Cellular component=integral to membrane
  Homolog annotation: Hit_ID=B6U7K6; Match level="QueryCoverage=91%, HitCoverage=21%, E-value=8e-41, Identity=94%"; Hit description =Homogentisate geranylgeranyl transferase
MNIYIVGLNQLFDIEIDKVNKPTLPLASGEYTPATGVAIVSVFAAMSFGVGWAVGSQPLFWALFISFVLGTAYSINLPYFRWKRLSRQFQERNL

SEQ ID NO: 129377 - protein, 63 aa, Setaria italica
  misc_feature (28)..(28): Xaa can be any naturally occurring amino acid
  misc_feature (43)..(43): Xaa can be any naturally occurring amino acid
  Transcript Sequence Number=SeqID_63403
  Homolog annotation: Hit_ID=B6U7K6; Match level="QueryCoverage=55%, HitCoverage=8%, E-value=8e-11, Identity=94%"; Hit description =Homogentisate geranylgeranyl transferase
GYTKYAVPSISGISLNSAITTDIEGDRXIFGIRSFSVRLGQKXVFWICVGLLEMAYRRCDTDG

SEQ ID NO: 129378 - protein, 81 aa, Setaria italica
  Transcript Sequence Number=SeqID_63404
RQGNARSQPIQRQLTACQEHEASSPMEQPTDMEKKDASALQRSLSAVTYWSVLSLPRLGFCSEDHDGLVLRLTKAHHPSRQ

SEQ ID NO: 129379 - protein, 91 aa, Setaria italica
  Transcript Sequence Number=SeqID_63405
  Gene Ontology: Mol. function=DNA binding; Biological process =regulation of transcription
  Homolog annotation: Hit_ID=B4F7W7; Match level="QueryCoverage=61%, HitCoverage=17%, E-value=5e-25, Identity=96%"; Hit description=MYB -CC type transfactor
KGVLRIMGVPGLTIYHVKSHLQKYRLAKYIPDASTDGNKADNKDPGDLLAGLEGSSYEHTTLFTFDSLKKYMIQSLFVFPFEPTFGIFILA

SEQ ID NO: 129380 - protein, 75 aa, Setaria italica
  misc_feature (73)..(73): Xaa can be any naturally occurring amino acid
  Transcript Sequence Number=SeqID_63406
SLKLLIDSGLPISEALKLQMEVQKRLHEQLEVSLYYMFQLSILYLLLSYQNVFWDLVIYQDNHFSSVFHKKFXLL

SEQ ID NO: 129381 - protein, 52 aa, Setaria italica
  misc_feature (1)..(7): Xaa can be any naturally occurring amino acid
  Transcript Sequence Number=SeqID_63407
XXXXXXXVQESTEFRQNIITDPTTNKSPFLDHIQMISTSQVNAALNKEHKRR

SEQ ID NO: 129382 - protein, 73 aa, Setaria italica
  Transcript Sequence Number=SeqID_63408
  Homolog annotation: Hit_ID=B6SY06; Match level="QueryCoverage=64%, HitCoverage=9%, E-value=2e-12, Identity=76%"; Hit description=DNA binding protein
  Pfam annotation: Domain name=ELM2; Domain location=3-59; Score=7.7; E_ value=0.052; Accession=PF01448.16; Description=ELM2 domain
TGVPIGPEHQADIPEWRPRVSVSVTGGSGFCADLDCSSVSTSEPVSRGYEVETELQSRSGTKPEPRIVCECNW

SEQ ID NO: 129383 - protein, 59 aa, Setaria italica
  Transcript Sequence Number=SeqID_63409
  Gene Ontology: Biological process=proteolysis
  Homolog annotation: Hit_ID=B6T084; Match level="QueryCoverage=98%, HitCoverage=26%, E-value=4e-24, Identity=86%"; Hit description =Pyrrolidone-carboxylate peptidase
MTKQTTLPVKEISESLQQMGYDVAPSDDAGRFVCNYVYYHSLRFAEKHGIRSLFVHFPL

SEQ ID NO: 129384 - protein, 72 aa, Setaria italica
  Transcript Sequence Number=SeqID_63410
YKKTIVDHVISDLYLHLFYRFSFTFYRQYTPSNSKYTSLGHGHGLQYEALTDDFYVSMTFEQKAIKYFEKWF

SEQ ID NO: 129385 - protein, 81 aa, Setaria italica
  misc_feature (47)..(47): Xaa can be any naturally occurring amino acid
  Transcript Sequence Number=SeqID_63411
  Gene Ontology: Biological process=proteolysis
  Homolog annotation: Hit_ID=B9RFP0; Match level="QueryCoverage=98%, HitCoverage=33%, E-value=3e-27, Identity=68%"; Hit description =Pyroglutamyl-peptidase I, putative
QGQIIWIHFGVNSGATRFALENQAVNEATFRCPDELGWKPQLHCSNXRVPIVPADGSISRTRETTLPVNELTKSLRKIGYD

SEQ ID NO: 129386 - protein, 66 aa, Setaria italica
  Transcript Sequence Number=SeqID_63412
CIMACLACPPCWMCECIHAVQLQQLSAFCSNLNKHAFPLLAAVPYIYKPASIQVLRQSQGFTAQAA

SEQ ID NO: 129387 - protein, 73 aa, Setaria italica
  misc_feature (70)..(70): Xaa can be any naturally occurring amino acid
  Transcript Sequence Number=SeqID_63413
  Gene Ontology: Biological process=proteolysis
  Homolog annotation: Hit_ID=B6T084; Match level="QueryCoverage=73%, HitCoverage=24%, E-value=1e-19, Identity=74%"; Hit description =Pyrrolidone-carboxylate peptidase
SIVVLNVNLVFTTNQTTLPVNELTKSLRKIGYDVVPSDDAGRFVCNYVYYHSLRFAEQHGIKSLFVHVPXFLT

SEQ ID NO: 129388 - protein, 88 aa, Setaria italica
  misc_feature (87)..(87): Xaa can be any naturally occurring amino acid
  Transcript Sequence Number=SeqID_63414
NFLNPVTWTVTTEGPSDPIYPFEKHLIPKNSFPKSTAPELKKQVHGSDAYPYQSKPLGREAPRDARTRASRRSQQPYPSCVSRCCRXW

SEQ ID NO: 129389 - protein, 103 aa, Setaria italica
  misc_feature (6)..(6): Xaa can be any naturally occurring amino acid
  misc_feature (42)..(42): Xaa can be any naturally occurring amino acid
  Transcript Sequence Number=SeqID_63415
IESDDXDLDDEVDDGAEDEPEHEAEEAAVEPPMKTVAPPTAXPPKDTERQLSKNELKKKELAELDAVLAELGLSGNSSNAAQDGKIVNAAVHYVSPWCSMVLE

SEQ ID NO: 129390 - protein, 78 aa, Setaria italica
  Transcript Sequence Number=SeqID_63416
GDARGGAGKCLEAAVEPPMKTVAPPTAPPKDTERQLSKKELKKKELAELDAVLAELGLSGNSSNAAQDAEKKGAKPNW

SEQ ID NO: 129391 - protein, 62 aa, Setaria italica; identical to SEQ ID NO: 106367
  Transcript Sequence Number=SeqID_63417
  Subcellular localization annotation: CTP_CleavageSite=24; ConfidenceScore=5.30e-01

SEQ ID NO: 129392 - protein, 142 aa, Setaria italica
  misc_feature (130)..(130): Xaa can be any naturally occurring amino acid
  Transcript Sequence Number=SeqID_63418
  Gene Ontology: Mol. function=phosphoinositide binding; Biological process=cell communication
  Homolog annotation: Hit_ID=Q2RAA5; Match level="QueryCoverage=100%, HitCoverage=13%, E-value=2e-65, Identity=84%"; Hit description=Phox domain-containing protein, putative, expressed
HLPPKSFLSSSVDDYLVHQRCILLDKYLQDLLSIANIAEQHEVWDFLSASSKNYSAGKSTSVMKTLAVNVDDAMDDIVRQFKGVSDGLKRAVGTPPSSATAQFTDNRMSLSWNHEETDNQNLHHRTLKGXRSLSDGDSNYED

SEQ ID NO: 129393 - protein, 145 aa, Setaria italica
  misc_feature (19)..(19): Xaa can be any naturally occurring amino acid
  misc_feature (75)..(75): Xaa can be any naturally occurring amino acid
  Transcript Sequence Number=SeqID_63419
  Gene Ontology: Mol. function=phosphoinositide binding; Biological process=cell communication
  Homolog annotation: Hit_ID=Q2RAA5; Match level="QueryCoverage=100%, HitCoverage=13%, E-value=3e-68, Identity=82%"; Hit description=Phox domain-containing protein, putative, expressed
  Pfam annotation: Domain name=Nexin_C; Domain location=66-141; Score= -14.4; E_value=0.024; Accession=PF08628.4; Description=Sorting nexin C terminal
TYSGLDTQVSGQIQKPVRXYSDSSNMSSLNTFEDPTGIPPEWMPTNVSVPLLNLVEKVFQLKRRGWIRRQVLWIXKQILQLVMEDAIDEWIIRQINWLRRDDVIVQVIRWIQDTLWPNGIFFTKLDGYKGNSGISQFDKQSSGTG

SEQ ID NO: 129394 - protein, 65 aa, Setaria italica
  Transcript Sequence Number=SeqID_63420
GCRCHCAVASGKLLEPRLFPECSVFLLCCMPLKCLIQCLKIELSVHQVYLRSVPMKFKCLSMKNI

SEQ ID NO: 129395 - protein, 76 aa, Setaria italica
  Transcript Sequence Number=SeqID_63421
SAMDLISSLKFNIVLTSTNSAMTMLTGVVDFSNVIDDPRFPAALPSLRYQLVGERGCCHFKPLIILWPSRMLGSSV

SEQ ID NO: 129396 - protein, 62 aa, Setaria italica
  Transcript Sequence Number=SeqID_63422
AKHARRPQDYQWFEMTTATLPNQLISQARKSSRKSWIIDNIAKNPPLLSSALCSNLSETEIK

SEQ ID NO: 129397 - protein, 58 aa, Setaria italica
  Transcript Sequence Number=SeqID_63423
LKLVSFGLRNEINTNTTTSSHPNLLEECKTLMQHHFIPHIHIISINISNEVIPSQFIR

SEQ ID NO: 129398 - protein, 56 aa, Setaria italica
  Transcript Sequence Number=SeqID_63424
GEGINGDARFAAAPYDHWVLLDPAGGSPRPSARYKVLTSTRCCAGAKCSFFGCRGR

SEQ ID NO: 129399 - protein, 83 aa, Setaria italica
  misc_feature (48)..(48): Xaa can be any naturally occurring amino acid
  misc_feature (66)..(66): Xaa can be any naturally occurring amino acid
  Transcript Sequence Number=SeqID_63425
  Gene Ontology: Mol. function=acyl-CoA binding
  Homolog annotation: Hit_ID=Q9MA55; Match level="QueryCoverage=100%, HitCoverage=12%, E-value=2e-12, Identity=48%"; Hit description=Acyl -CoA-binding domain-containing protein 4
ISKELESVQNQLAAEGSRCQKLESQIAAARKRLESAGSLENELEVLRXQISQVEQTMTTTQRQKSXGGVWKWVAGSAEASDDE

SEQ ID NO: 129400 - protein, 111 aa, Setaria italica
  misc_feature (21)..(21): Xaa can be any naturally occurring amino acid
  Transcript Sequence Number=SeqID_63426
  Gene Ontology: Mol. function=acyl-CoA binding
  Homolog annotation: Hit_ID=B9T305; Match level="QueryCoverage=99%, HitCoverage=21%, E-value=6e-40, Identity=63%"; Hit description=Acyl -CoA binding protein, putative
  Pfam annotation: Domain name=Kelch_1; Domain location=24-69; Score =19.3; E_value=0.016; Accession=PF01344.17; Description=Kelch motif
DLYLLDLQTLEWSQPDTQGAXIAPRSGHAGTMIDENWYIVGGGDNASGSTDTIVMNASKFVWSVVTSISARDPLACEGLTLCSTTVDGEKFLISFGGYNGKYSNEVLNLRE

SEQ ID NO: 129401 - protein, 79 aa, Setaria italica
  misc_feature (63)..(63): Xaa can be any naturally occurring amino acid
  Transcript Sequence Number=SeqID_63427
  Gene Ontology: Mol. function=acyl-CoA binding
  Homolog annotation: Hit_ID=B9T305; Match level="QueryCoverage=100%, HitCoverage=16%, E-value=6e-23, Identity=56%"; Hit description=Acyl -CoA binding protein, putative
  Pfam annotation: Domain name=Kelch_1; Domain location=9-54; Score =19.3; E_value=0.016; Accession=PF01344.17; Description=Kelch motif
DTQGAHIAPRSGHAGTMIDENWYIVGGGDNASGSTDTIVMNASKFVWSVVTSISARDPLACEXDGEKFLISFGGYNGKY

SEQ ID NO: 129402 - protein, 57 aa, Setaria italica
  Transcript Sequence Number=SeqID_63428
GRKVRQTDRLLLIQDVQVFDFRTFTWSALNLTRDSNQLNHENNATGGSFPALAGHSL

SEQ ID NO: 129403 - protein, 41 aa, Setaria italica
  Transcript Sequence Number=SeqID_63429
MCSVVVLSELEMLLEAYFVVIDSTLNKLTSLKEYIDKVFSV

SEQ ID NO: 129404 - protein, 84 aa, Setaria italica
  misc_feature (42)..(42): Xaa can be any naturally occurring amino acid
  misc_feature (59)..(59): Xaa can be any naturally occurring amino acid
  Transcript Sequence Number=SeqID_63430
  Gene Ontology: Mol. function=protein kinase activity; Cellular component=integral to membrane; Biological process=protein amino acid phosphorylation
  Homolog annotation: Hit_ID=B9T6G8; Match level="QueryCoverage=89%, HitCoverage=11%, E-value=3e-18, Identity=57%"; Hit description =Nodulation receptor kinase, putative
STGIRGVTEKTPLDWNSRVKIILETAYGIAHIHAEGGTKLTXGNVKSTNVLVDKNHNPXVSDYGLSALMSVPVNASRVVVGYRA

SEQ ID NO: 129405 - protein, 107 aa, Setaria italica
  Transcript Sequence Number=SeqID_63431
  Gene Ontology: Mol. function=protein kinase activity; Cellular component=integral to membrane; Biological process=protein amino acid phosphorylation
  Homolog annotation: Hit_ID=B9SRR7; Match level="QueryCoverage=86%, HitCoverage=14%, E-value=2e-18, Identity=56%"; Hit description =Nodulation receptor kinase, putative
MLVVVVLVVCFLKRKHKDESDVESKGKGTVTRSEKPKQEFSSGVQIAEKNKLVFLEGCTYSFDLEDLLRASVEVLGKGELWNCLQKLILEDGTVVVVKRLKDVVAGK

SEQ ID NO: 129406 - protein, 86 aa, Setaria italica
  misc_feature (34)..(34): Xaa can be any naturally occurring amino acid
  Transcript Sequence Number=SeqID_63432
  Gene Ontology: Mol. function=protein kinase activity; Cellular component=integral to membrane; Biological process=protein amino acid phosphorylation
  Homolog annotation: Hit_ID=B9SRR7; Match level="QueryCoverage=70%, HitCoverage=9%, E-value=7e-15, Identity=63%"; Hit description =Nodulation receptor kinase, putative
LGKHANLVPLRAYYYSKDEKLIVYDYIDTGSVFXSMLHGIRGVTEKTPLDWNSRVKIILETNLFFSAIWTPLLNSCFGFSLLVTVP

SEQ ID NO: 129407 - protein, 82 aa, Setaria italica
  Transcript Sequence Number=SeqID_63433
GYLPRLEPTNQVRPYEQMESSPSRSSANVAKDTTKMYVRGGGKLGLLPKLDRSGQSLRCRHGPMAEQWLPHWEARRFLSGHW

SEQ ID NO: 129408 - protein, 58 aa, Setaria italica
  Transcript Sequence Number=SeqID_63434
  Gene Ontology: Mol. function=cysteine-type endopeptidase activity; Biological process=proteolysis
  Homolog annotation: Hit_ID=B6UBK1; Match level="QueryCoverage=81%, HitCoverage=10%, E-value=5e-20, Identity=97%"; Hit description=ICE -like protease p20 domain containing protein
  Pfam annotation: Domain name=MORN; Domain location=27-49; Score=35.5; E_value=2.1e-07; Accession=PF02493.12; Description=MORN repeat
HTHPQCRTCTRRSHGYGVHTCEDGSRYIGEFKRGVKHGLGHYHFRNGDTYAGEYFADR

SEQ ID NO: 129409 - protein, 95 aa, Setaria italica
  misc_feature (28)..(28): Xaa can be any naturally occurring amino acid
  Transcript Sequence Number=SeqID_63435
  Gene Ontology: Mol. function=transporter activity; Cellular component= integral to membrane; Biological process=transport
  Homolog annotation: Hit_ID=B6SRN7; Match level="QueryCoverage=84%, HitCoverage=19%, E-value=1e-20, Identity=70%"; Hit description =Glucose-6-phosphate/phosphate translocator 2
  Subcellular localization annotation: CTP_CleavageSite=36; ConfidenceScore=5.22e-01
LNFNMVGFMGAMISNLAFVVRTIFSKKXGMKGKSVSGMNYYACLSIMSLVILLPFAIAMEGPKVWATAFCQPAAHTLGPSMAMAKGRRITRDIIG

SEQ ID NO: 129410 - protein, 51 aa, Setaria italica
  Transcript Sequence Number=SeqID_63436
ICLVRPTLGFMGAMISNLAFVVRTIFSKKGMKGKSVSGMNYYACLSIMSPG

SEQ ID NO: 129411 - protein, 37 aa, Setaria italica
  Transcript Sequence Number=SeqID_63437
ICLVRPTVGFMGAMISNLAFVVRTIFSKKGMKGKSVS

SEQ ID NO: 129412 - protein, 87 aa, Setaria italica
  Transcript Sequence Number=SeqID_63438
  Gene Ontology: Mol. function=transporter activity; Cellular component= integral to membrane; Biological process=transport
  Homolog annotation: Hit_ID=A4UTS2; Match level="QueryCoverage=90%, HitCoverage=20%, E-value=2e-28, Identity=77%"; Hit description =Chloroplast glucose-6-phosphate/phosphate translocator
  Pfam annotation: Domain name=TPT; Domain location=2-78; Score=23.1; E_ value=2.8e-05; Accession=PF03151.8; Description=Triose-phosphate Transporter family
PGPNFVWWVAAQSVFYHLYNQVSYMSLDEISPLTFSIGNTMKRISVIVASIIIFQTPVQPINALGAAIAILGTFIYSQAKASKCLGI

SEQ ID NO: 129413 - protein, 74 aa, Setaria italica
  misc_feature (12)..(12): Xaa can be any naturally occurring amino acid
  Transcript Sequence Number=SeqID_63439
  Homolog annotation: Hit_ID=B6SRN7; Match level="QueryCoverage=86%, HitCoverage=15%, E-value=3e-11, Identity=62%"; Hit description =Glucose-6-phosphate/phosphate translocator 2
AFVVRTIFSKKXGMKGKSVSGMNYYACLSIMSLVILLPFAIAMEGPKVWATAFCQPAAHTLGPSMAMAKGRRIT

SEQ ID NO: 129414 - protein, 49 aa, Setaria italica
  Transcript Sequence Number=SeqID_63440
GQGLGARERQPLQLRRRRDHQVSLSWCSIGAPSSLISFDMILLALWFFG

SEQ ID NO: 129415 - protein, 85 aa, Setaria italica
  misc_feature (31)..(31): Xaa can be any naturally occurring amino acid
  Transcript Sequence Number=SeqID_63441
  Homolog annotation: Hit_ID=B6SJK3; Match level="QueryCoverage=82%, HitCoverage=17%, E-value=1e-13, Identity=54%"; Hit description=mTERF family protein
  Subcellular localization annotation: CTP_CleavageSite=27; ConfidenceScore=5.01e-01
GVQDAANGRTVIIVNSLQKNTMPRCSVLSMXWSGRLSKNTMLLHALIWACKISERYVLRYARDVPHVVKAYEGKLKFEGFRNSDV

SEQ ID NO: 129416 - protein, 118 aa, Setaria italica
  misc_feature (26)..(26): Xaa can be any naturally occurring amino acid
  misc_feature (47)..(47): Xaa can be any naturally occurring amino acid
  misc_feature (51)..(51): Xaa can be any naturally occurring amino acid
  misc_feature (89)..(89): Xaa can be any naturally occurring amino acid
  Transcript Sequence Number=SeqID_63442
  Homolog annotation: Hit_ID=B6SJK3; Match level="QueryCoverage=90%, HitCoverage=26%, E-value=3e-17, Identity=46%"; Hit description=mTERF family protein
LVVPITDCLVYRKVALYQSFGVSEDXGELFKEFKMQLMVLLISQETXEKFXLFFEVMTLEVCEVTGRTVIIVNSLQKNTMPRCSVLSMXMEWKIKQNTMLLHALIWACKISERYVLRY

SEQ ID NO: 129417 - protein, 137 aa, Setaria italica
  misc_feature (7)..(7): Xaa can be any naturally occurring amino acid
  Transcript Sequence Number=SeqID_63443
  Gene Ontology: Mol. function=protein binding; Cellular component =ribonucleoprotein complex; Biological process=translational elongation
  Homolog annotation: Hit_ID=Q9AYP4; Match level="QueryCoverage=65%, HitCoverage=48%, E-value=5e-45, Identity=97%"; Hit description=40S ribosomal protein S10
  Pfam annotation: Domain name=S10_plectin; Domain location=1-93; Score= 235.5; E_value=1.4e-67; Accession=PF03501.7; Description=PlectinS10 domain
NRNEICXKYLFKEGVLYAKKDYNLAKHPQIDVPNLQVIKLMQSFKSKEYVRETFSWQYYYWYLTNDGIEHLRNYLNLPSEIVPATLKKSARPPGRPFGSGPPGDRPRGPPRFEDRPRFGERDWVTVGWFLRYITFYL

SEQ ID NO: 129418 - protein, 85 aa, Setaria italica
  Transcript Sequence Number=SeqID_63444
  Gene Ontology: Mol. function=protein binding; Cellular component =ribonucleoprotein complex; Biological process=translational elongation
  Homolog annotation: Hit_ID=Q9AYP4; Match level="QueryCoverage=68%, HitCoverage=31%, E-value=3e-28, Identity=100%"; Hit description=40S ribosomal protein S10
  Pfam annotation: Domain name=S10_plectin; Domain location=1-61; Score= 113.4; E_value=7.4e-31; Accession=PF03501.7; Description=PlectinS10 domain
SNLQVIKLMQSFKSKEYVRETFSWQYYYWYLTNDGIEHLRNYLNLPSEIVPATLKKSARPPGRPFGSGPPGEPPKGGPQPKNLRT

SEQ ID NO: 129419 - protein, 95 aa, Setaria italica
  Transcript Sequence Number=SeqID_63445
  Gene Ontology: Cellular component=ribonucleoprotein complex
  Homolog annotation: Hit_ID=Q9AYP4; Match level="QueryCoverage=62%, HitCoverage=32%, E-value=3e-27, Identity=96%"; Hit description=40S ribosomal protein S10
  Pfam annotation: Domain name=S10_plectin; Domain location=27-93; Score=92.7; E_value=1.3e-24; Accession=PF03501.7; Description =PlectinS10 domain
DYNTPSLKRYLQISLRFFLAYSTPSLKRYYNLAKHPQIDVPNLQVIKLMQSFKSKEYVRETFSWQYYYWYLTNDGIEHLRNYLNLFIHGVKLPLV

SEQ ID NO: 129420 - protein, 110 aa, Setaria italica
  misc_feature (1)..(9): Xaa can be any naturally occurring amino acid
  Transcript Sequence Number=SeqID_63446
XXXXXXXXXVSKQENSFRKGNDMKPRLRRLLYWNQGIKIAQFFCICQHSPIRITLLVHNNCPSKLNASREGKHHVQTRGNFTPWMKRLGQHQSRCRRHGQSQVLSYLVTP

SEQ ID NO: 129421 - protein, 47 aa, Setaria italica
  Transcript Sequence Number=SeqID_63447
HENRTQMNTDIVHIITLVADPYNQFNRFGPIYRRYTRQYEVIILNIA

SEQ ID NO: 129422 - protein, 75 aa, Setaria italica
  Transcript Sequence Number=SeqID_63448
  Gene Ontology: Mol. function=serine-type endopeptidase activity; Biological process=proteolysis
  Homolog annotation: Hit_ID=Q5VQ13; Match level="QueryCoverage=98%, HitCoverage=25%, E-value=1e-25, Identity=84%"; Hit description=ATP -dependent Clp protease proteolytic subunit
  Subcellular localization annotation: CTP_CleavageSite=33; ConfidenceScore=5.80e-01
MAAPANSSCFHARAAASQTSSLSVGTRVFVGLRAQTKLGSSESSCPNVSAGFYTAVNRRISLGLSNKKATRARIS

SEQ ID NO: 129423 - protein, 57 aa, Setaria italica
  Transcript Sequence Number=SeqID_63449
  Subcellular localization annotation: CTP_CleavageSite=33; ConfidenceScore=5.37e-01
MAAPANSSCFHARAAASQTSSLSVGTRVFVGLRAQTKLGEREPTKLAEICAGFIFRV

SEQ ID NO: 129424 - protein, 94 aa, Setaria italica
  misc_feature (8)..(8): Xaa can be any naturally occurring amino acid
  misc_feature (16)..(16): Xaa can be any naturally occurring amino acid
  misc_feature (77)..(77): Xaa can be any naturally occurring amino acid
  Transcript Sequence Number=SeqID_63450
  Gene Ontology: Mol. function=calcium ion binding; Cellular component =membrane; Biological process=protein transport
  Homolog annotation: Hit_ID=Q9LLR3; Match level="QueryCoverage=100%, HitCoverage=14%, E-value=3e-34, Identity=75%"; Hit description =Vacuolar targeting receptor bp-80
KLVGDGYXTHCEASGXGRCQINNGGCWKETRNGKTVSACSNEEAKGCKCPTGFKGDGVNSCEDVDECKENLYCKCKXCACENIWGSYECSCGGS

SEQ ID NO: 129425 - protein, 145 aa, Setaria italica
  Transcript Sequence Number=SeqID_63451
  Gene Ontology: Mol. function=nucleoside-triphosphatase activity; Biological process=cell division
  Homolog annotation: Hit_ID=Q9SH62; Match level="QueryCoverage=75%, HitCoverage=13%, E-value=6e-51, Identity=84%"; Hit description =F22C12.12
  Pfam annotation: Domain name=AAA; Domain location=1-106; Score=12.1; E_value=2.1e-06; Accession=PF00004.21; Description=ATPase family associated with various cellular activities (AAA)
EAMRKIKNEFMTHWDGLLSRPDQRILVLAATNRPFDLDEAIIRRFERRIMVGLPSMESRELIMRRLLSKEKVDEGLDFKELATMTEGYSGSDLKNLCTTAAYRPVRELIQKERKKELEKLKREKGGAPSDSTKKKEKGRKTKYNY

SEQ ID NO: 129426 - protein, 85 aa, Setaria italica
  misc_feature (30)..(30): Xaa can be any naturally occurring amino acid
  Transcript Sequence Number=SeqID_63452
  Gene Ontology: Mol. function=nucleoside-triphosphatase activity; Biological process=cell division
  Homolog annotation: Hit_ID=B9RIQ4; Match level="QueryCoverage=98%, HitCoverage=10%, E-value=7e-35, Identity=79%"; Hit description=ATP binding protein, putative
HLVSWNSQLEEDMKMIQFQDNRNHILEVLXENDLECDDLGSICLSDTIGLSKYIEEIVVSAVSYHLMNNREPEYRNGKLVISAKR

SEQ ID NO: 129427 - protein, 102 aa, Setaria italica
  misc_feature (64)..(64): Xaa can be any naturally occurring amino acid
  Transcript Sequence Number=SeqID_63453
  Gene Ontology: Mol. function=protein serine/threonine kinase activity; Cellular component=plasma membrane; Biological process =protein amino acid phosphorylation
  Homolog annotation: Hit_ID=Q69Q47; Match level="QueryCoverage=96%, HitCoverage=21%, E-value=5e-47, Identity=92%"; Hit description=CBL -interacting protein kinase 24
  Pfam annotation: Domain name=NAF; Domain location=30-91; Score=101.7; E_value=2.6e-27; Accession=PF03822.6; Description=NAF domain
NCSSLDDVQAVFDNIEDKYVSEEVTHKDGGPLMMNAFEMITLSQGLDLSALFDRQQEFVKRQTXFVSRKPAMTIVATIEVVAESMGLKVHSQNYKLRLEGTS

SEQ ID NO: 129428 - protein, 102 aa, Setaria italica
  misc_feature (7)..(7): Xaa can be any naturally occurring amino acid
  misc_feature (15)..(15): Xaa can be any naturally occurring amino acid
  Transcript Sequence Number=SeqID_63454
  Gene Ontology: Mol. function=protein serine/threonine kinase activity; Cellular component=plasma membrane; Biological process =protein amino acid phosphorylation
  Homolog annotation: Hit_ID=Q69Q47; Match level="QueryCoverage=94%, HitCoverage=20%, E-value=6e-41, Identity=87%"; Hit description=CBL -interacting protein kinase 24
  Pfam annotation: Domain name=NAF; Domain location=70-102; Score=3.0; E_value=0.0029; Accession=PF03822.6; Description=NAF domain
SLIQRIXLDPNPKTXRITIEEIRADPWFKKNYVAIRRGEDENVSLDDVQAVFDNIEDKYVSEEVTHKDGGPLMMNAFEMITLSQGLDLSALFDRQQVICSSI

SEQ ID NO: 129429 - protein, 145 aa, Setaria italica
  misc_feature (79)..(79): Xaa can be any naturally occurring amino acid
  misc_feature (122)..(122): Xaa can be any naturally occurring amino acid
  Transcript Sequence Number=SeqID_63455
  Gene Ontology: Mol. function=protein serine/threonine kinase activity; Cellular component=plasma membrane; Biological process =protein amino acid phosphorylation
  Homolog annotation: Hit_ID=Q69Q47; Match level="QueryCoverage=97%, HitCoverage=31%, E-value=6e-64, Identity=83%"; Hit description=CBL -interacting protein kinase 24
  Pfam annotation: Domain name=NAF; Domain location=49-110; Score=97.7; E_value=3.9e-26; Accession=PF03822.6; Description=NAF domain
IRADPWFKKNYVAIRRGEDENVSLDDVQAVFDNIEDKYVSEEVTHKDGGPLMMNAFEMITLSQGLDLSALFDRQQAFIXRQTRFVSRKPAMTIVATIEVVAESMGLKVHSQNYKLRLEGTSXNRMGQFAVVLEVRSCSPSVLNWS

SEQ ID NO: 129430 - protein, 71 aa, Setaria italica
  Transcript Sequence Number=SeqID_63456
  Subcellular localization annotation: CTP_CleavageSite=43; ConfidenceScore=5.03e-01
LFTFFLASLVFPSMAVQASCDVQTVQFAISMKETLWLTRRGVSGQTGWRKQVNHLQLIYFVELFHNVQISD

SEQ ID NO: 129431 - protein, 65 aa, Setaria italica
  Transcript Sequence Number=SeqID_63457
  Gene Ontology: Mol. function=oxidoreductase activity; Cellular component=plastid inner membrane; Biological process=metabolic process
  Homolog annotation: Hit_ID=B6T2P8; Match level="QueryCoverage=87%, HitCoverage=16%, E-value=2e-21, Identity=91%"; Hit description =Chloroplastic quinone-oxidoreductase
RCLAFSQYGGGLAEYAVASESLTVKRPPEVSAAEGAGLPIAAGTALQALRSIGAKFDGTGQPLNV

SEQ ID NO: 129432 - protein, 73 aa, Setaria italica
  Transcript Sequence Number=SeqID_63458
  Gene Ontology: Mol. function=translation initiation factor activity; Cellular component=transcription factor complex; Biological process =regulation of transcription, DNA-dependent
KRKRNEDIKSSTPAETPAEATFNMLKRKGLGSKVSEGAVGELYKTKYEDGDANHQCHCRLLHHQRRSCNHDRM

SEQ ID NO: 129433 - protein, 83 aa, Setaria italica
  Transcript Sequence Number=SeqID_63459
  Gene Ontology: Mol. function=malate dehydrogenase (NADP+) activity; Cellular component=chloroplast; Biological process=carbohydrate metabolic process
  Homolog annotation: Hit_ID=P21528; Match level="QueryCoverage=86%, HitCoverage=16%, E-value=2e-29, Identity=80%"; Hit description =Malate dehydrogenase [NADP], chloroplastic
RRRRVPWQRELVARELAVFYDKISNMTIWGNHSTTQVPDFLNARIDGKPAKQVIGDTKWLEEEFTKIIQKRGGVLIQKWGRSS

SEQ ID NO: 129434 - protein, 61 aa, Setaria italica
  Transcript Sequence Number=SeqID_63460
  Gene Ontology: Cellular component=plasma membrane
  Homolog annotation: Hit_ID=Q53M64; Match level="QueryCoverage=100%, HitCoverage=19%, E-value=5e-24, Identity=85%"; Hit description =Similar to SAC domain protein 7
LCDQIKDYLRKHRYFLINDKDEKIEEQTGTVRTNCIDCLDRTNVTQSMIGRKILESQLQRI

SEQ ID NO: 129435 - protein, 60 aa, Setaria italica
  misc_feature (53)..(53): Xaa can be any naturally occurring amino acid
  Transcript Sequence Number=SeqID_63461
  Gene Ontology: Mol. function=malate dehydrogenase (NADP+) activity; Cellular component=chloroplast; Biological process=carbohydrate metabolic process
  Homolog annotation: Hit_ID=Q2MG93; Match level="QueryCoverage=75%, HitCoverage=10%, E-value=1e-18, Identity=88%"; Hit description=NADP -dependant malate dehydrogenase (Fragment)
SWYVRGVLQANQGIGVFYDKISNMTIWGNHSTTQVPDFLNARIDGKPAKQVIXDTKWLER

SEQ ID NO: 129436 - protein, 34 aa, Setaria italica
  Transcript Sequence Number=SeqID_63462
  Gene Ontology: Cellular component=plasma membrane
  Homolog annotation: Hit_ID=Q7XDB5; Match level="QueryCoverage=97%, HitCoverage=8%, E-value=1e-11, Identity=96%"; Hit description =Pleckstriny domain-containing protein, putative, expressed
GSWIVKQSVGKKACLVGQALEINYFRGSNYLEVS

SEQ ID NO: 129437 - protein, 101 aa, Setaria italica
  Transcript Sequence Number=SeqID_63463
KVLKTTSTRRCSSSRIDMKNIGKQYQTSAYVEHLALISTFCILNTLKSSSLTHCILDFSCQRIFTLNGHEIKCFHLLLLCCTHKLPSVFRSTFASTLRRPW

SEQ ID NO: 129438 - protein, 93 aa, Setaria italica
  Transcript Sequence Number=SeqID_63464
GIKVFTLDPVVQHQLAWTHLASMMALCAMSTQLIQGLDHNKNAILYILQIYGSAQPNLVFRCSFFESDLSYQYIISVNEILSSRTSVGLCIAS

SEQ ID NO: 129439 - protein, 57 aa, Setaria italica
  Transcript Sequence Number=SeqID_63465
QYDLPQPLTLELAVIIVVFFASLCSSGASGGHGHHHWYRSIRTYGGREPHLDSKGGG

SEQ ID NO: 129440 - protein, 99 aa, Setaria italica
  Transcript Sequence Number=SeqID_63466
  Gene Ontology: Mol. function=cyanate hydratase activity; Biological process=cyanate metabolic process
  Homolog annotation: Hit_ID=B6TTW1; Match level="QueryCoverage=95%, HitCoverage=67%, E-value=3e-39, Identity=73%"; Hit description =Cyanate hydratase
  Pfam annotation: Domain name=Cyanate_lyase; Domain location=6-85; Score=143.1; E_value=8.8e-40; Accession=PF02560.6; Description =Cyanate lyase C-terminal domain
VLSSPTVSGSLPTPYYSFHEPAIYILNEAVMHFGESIKEIINEEFGDGIMSAIDFYCSVDKVQGADGKDRVVVTFDGKYLPHTEQKSEHMMSRLARKTS

SEQ ID NO: 129441 - protein, 62 aa, Setaria italica
  Transcript Sequence Number=SeqID_63467
  Gene Ontology: Mol. function=cyanate hydratase activity; Biological process=cyanate metabolic process
  Homolog annotation: Hit_ID=B6TTW1; Match level="QueryCoverage=98%, HitCoverage=36%, E-value=3e-23, Identity=81%"; Hit description =Cyanate hydratase
  Pfam annotation: Domain name=Cyanate_lyase; Domain location=2-48; Score=50.5; E_value=6.5e-12; Accession=PF02560.6; Description =Cyanate lyase C-terminal domain
TKLLIDDFLDGIMSAIDFYCSVDKVQGADGKDRVVVTFDGKYLPHTEQKSEHMMSRLARKTS

SEQ ID NO: 129442 - protein, 71 aa, Setaria italica
  Transcript Sequence Number=SeqID_63468
  Gene Ontology: Mol. function=cyanate hydratase activity; Biological process=cyanate metabolic process
  Homolog annotation: Hit_ID=B6TTW1; Match level="QueryCoverage=74%, HitCoverage=31%, E-value=3e-22, Identity=92%"; Hit description =Cyanate hydratase
  Pfam annotation: Domain name=Cyanate_lyase; Domain location=10-57; Score=58.8; E_value=2e-14; Accession=PF02560.6; Description=Cyanate lyase C-terminal domain
NKELRTIELPIQPKLLIDDGIMSAIDFYCSVDKVQGADGKDRVVVTFDGKYLPHTEQKSEHMMSRLARKTS

SEQ ID NO: 129443 - protein, 63 aa, Setaria italica
  misc_feature (45)..(45): Xaa can be any naturally occurring amino acid
  Transcript Sequence Number=SeqID_63469
  Gene Ontology: Mol. function=cyanate hydratase activity; Biological process=cyanate metabolic process
  Homolog annotation: Hit_ID=Q9FWK4; Match level="QueryCoverage=100%, HitCoverage=35%, E-value=8e-20, Identity=84%"; Hit description =Cyanate hydratase
  Pfam annotation: Domain name=Cyanate_lyase; Domain location=1-63; Score=61.7; E_value=2.8e-15; Accession=PF02560.6; Description =Cyanate lyase C-terminal domain
IVHEPAIYRLNEAVMHFGESIKEIINEEFDCCSCMSAIDFLLVSXVDKVQGADGKDRVVVTFD

SEQ ID NO: 129444 - protein, 67 aa, Setaria italica
  misc_feature (53)..(53): Xaa can be any naturally occurring amino acid
  Transcript Sequence Number=SeqID_63470
  Gene Ontology: Mol. function=cyanate hydratase activity; Biological process=cyanate metabolic process
  Homolog annotation: Hit_ID=B6TTW1; Match level="QueryCoverage=88%, HitCoverage=37%, E-value=5e-17, Identity=72%"; Hit description =Cyanate hydratase
GDARGGAGKCLEADRVRFSGVAAETGLTNVYVAQLLRRQAQLKPDTAPKLRAXLPALTDDLVDLMMQ

SEQ ID NO: 129445 - protein, 45 aa, Setaria italica
  Transcript Sequence Number=SeqID_63471
  Homolog annotation: Hit_ID=Q01923; Match level="QueryCoverage=95%, HitCoverage=2%, E-value=9e-10, Identity=69%"; Hit description=DNA -directed RNA polymerase subunit beta''
IGTFSIMTRGKRHPLIDENKRISTFDSNIMLEPFHLNWHFLHHVS

SEQ ID NO: 129446 - protein, 69 aa, Setaria italica
  misc_feature (51)..(51): Xaa can be any naturally occurring amino acid
  Transcript Sequence Number=SeqID_63472
LFFFLPFAGCGSKEVCDEWLSDTYRMLLLCSSYICNEHCIGEGATRGKCGXSSSGPSASAPKNATESSD

SEQ ID NO: 129447 - protein, 88 aa, Setaria italica
  misc_feature (80)..(80): Xaa can be any naturally occurring amino acid
  Transcript Sequence Number=SeqID_63473
CSVKSGTKLQDTDGATSIPDPYSLCPQDKGVYTSWSSNNLCTDPCAAEIEEVRCVKLTTEDNSQESCKWYSAAGHLSQKXWVPVGKKE

SEQ ID NO: 129448 - protein, 58 aa, Setaria italica
  Transcript Sequence Number=SeqID_63474
RAQALYMMLKAEEMIMPSSFFYSFSWFWTWCCSCSCNLGPSVEKQEQHQVQNQEKEEM

SEQ ID NO: 129449 - protein, 57 aa, Setaria italica
  Transcript Sequence Number=SeqID_63475
KCKGTSKYVHRDCLDHWRAVKVSTAPLLPRDAQGLGGNRAKWAFSWLANLVASKCSN

SEQ ID NO: 129450 - protein, 52 aa, Setaria italica
  Transcript Sequence Number=SeqID_63476
  Homolog annotation: Hit_ID=Q6K5K9; Match level="QueryCoverage=100%, HitCoverage=11%, E-value=2e-12, Identity=65%"; Hit description =Avr9/Cf-9 rapidly elicited protein-like
FNRMKLKEVEVDEKINGSLALLAQGGTSRARRKAVGILEKMKRNMHNRHLSC

SEQ ID NO: 129451 - protein, 52 aa, Setaria italica
  misc_feature (20)..(20): Xaa can be any naturally occurring amino acid
  Transcript Sequence Number=SeqID_63477
TFLVTIIVSKKEVTESSGKXLVPVDVSAGTTDQIHQPKIEKAVLKLIELIEG

SEQ ID NO: 129452 - protein, 117 aa, Setaria italica
  misc_feature (9)..(9): Xaa can be any naturally occurring amino acid
  misc_feature (32)..(32): Xaa can be any naturally occurring amino acid
  Transcript Sequence Number=SeqID_63478
  Gene Ontology: Mol. function=protein binding; Cellular component =proteasome regulatory particle; Biological process=proteolysis
  Homolog annotation: Hit_ID=B4FCY9; Match level="QueryCoverage=82%, HitCoverage=35%, E-value=5e-34, Identity=72%"; Hit description=26S proteasome non-ATPase regulatory subunit 8
HTELELLPXEALNHPCIKYATELEQSFMEGAXNRFFNARQAVPHETYVYLMDLLAETVRDEVAECSVDAYDYLPISVAKKMLMFRSDQELLEYISEVPVISSSSLCHMCDINELLVS

SEQ ID NO: 129453 - protein, 76 aa, Setaria italica
  misc_feature (57)..(57): Xaa can be any naturally occurring amino acid
  Transcript Sequence Number=SeqID_63479
  Homolog annotation: Hit_ID=B9RTZ2; Match level="QueryCoverage=100%, HitCoverage=18%, E-value=2e-15, Identity=53%"; Hit description =Cyclin-L1, putative
GLSHTVLFNVAWNLINEGLQSSLWLQFKPHHIAAGAAFLAAKFLRYDIMPHPNFWHXFKTTPYIVQDVVQQLKELL

SEQ ID NO: 129454 - protein, 71 aa, Setaria italica
  Transcript Sequence Number=SeqID_63480
DMIFNMFAMYNRSIYLVCGDHCQKYVHIGIWSLSSVTDMCWYFEIIPIRFHLGFYSQLFVLLLLKFILKVT

SEQ ID NO: 129455 - protein, 51 aa, Setaria italica
  Transcript Sequence Number=SeqID_63481
FDNIMLSGGTCHSRIFKCHLIMTWSDLHGTKDLHSTLQQSCNCFSLLINPK

SEQ ID NO: 129456 - protein, 35 aa, Setaria italica
  Transcript Sequence Number=SeqID_63482
AMYNRSIYLVCGDHCQKYVNGSIVHGKHIEYHILK

SEQ ID NO: 129457 - protein, 49 aa, Setaria italica
  Transcript Sequence Number=SeqID_63483
KALHTVTFCNLEIPYCNTSFQICITNTSNVLKIRCFRENYSNWMNYFRI

SEQ ID NO: 129458 - protein, 96 aa, Setaria italica
  Transcript Sequence Number=SeqID_63484
YKRVSSRCNHVCTVTNTVCILDVVDMKLDHEILHCRGSFQRNFIFMLLYTIPIYIFLSPNTMCKHDWRCCDKYKGKYISLAWFITNTNTKITVSWC

SEQ ID NO: 129459 - protein, 75 aa, Setaria italica
  Transcript Sequence Number=SeqID_63485
LYSLPTLSSSSNREVWHEPPRNGWFLPNGDFMVSWCIGVKRRPDFFMRKPFIGFLLSFFINYVAMSAFLPMWQVI

SEQ ID NO: 129460 - protein, 76 aa, Setaria italica
  misc_feature (30)..(30): Xaa can be any naturally occurring amino acid
  Transcript Sequence Number=SeqID_63486
LSLTPSGCGILLMLCRVIELSNMHCLCMIXSMYCSARSSSRVYNLTLGVVLLSLVLYICLPCVGYRKEDFCFLSNT

SEQ ID NO: 129461 - protein, 44 aa, Setaria italica
  Transcript Sequence Number=SeqID_63487
MTGEKRISVFSQIPKENGELIQVLRYEASNHDVAYNIDLLHTSI

SEQ ID NO: 129462 - protein, 102 aa, Setaria italica
  Transcript Sequence Number=SeqID_63488
VTTRSHDCQINSSQGEKARLISARMDHQLSESLKSLPLKMVAYLYETVLLDIVTCNVYTYYSTTPGGFGEFVETGARSQSCFQKLYNEVDHGQQKSLILGYY

SEQ ID NO: 129463 - protein, 83 aa, Setaria italica
  Transcript Sequence Number=SeqID_63489
  Homolog annotation: Hit_ID=B4FQ36; Match level="QueryCoverage=84%, HitCoverage=26%, E-value=1e-20, Identity=74%"; Hit description =Proline-rich protein
  Pfam annotation: Domain name=DUF1210; Domain location=11-83; Score= -33.9; E_value=4.7e-05; Accession=PF06735.3; Description=Protein of unknown function (DUF1210)
VLSYSPLLFLHFTAVGPVDKSGAFSVPLAADLVGDDGELKRECFAQLHSASSEPCPGQEPSKIVAAPAVQGGGDKTFVALGGE

SEQ ID NO: 129464 - protein, 57 aa, Setaria italica
  Transcript Sequence Number=SeqID_63490
TNNPRVLRSETLWKRGPHCLSYVTANELNKSKIWTRGPQCLSRLQLMSYTKQIFMLP

SEQ ID NO: 129465 - protein, 49 aa, Setaria italica
  Transcript Sequence Number=SeqID_63491
RNVTKGSIPCRISIGTSVGTVYLFLMDSLSSALRQGWLDLASARHSNGP

SEQ ID NO: 129466 - protein, 137 aa, Setaria italica
  Transcript Sequence Number=SeqID_63492
  Gene Ontology: Mol. function=ATP-dependent helicase activity; Cellular component=intracellular; Biological process=gene silencing by RNA
  Homolog annotation: Hit_ID=Q8LMR2; Match level="QueryCoverage=90%, HitCoverage=6%, E-value=5e-68, Identity=96%"; Hit description =Endoribonuclease Dicer homolog 1
  Pfam annotation: Domain name=Ribonuclease_3; Domain location=16-131; Score=133.8; E_value=5.6e-37; Accession=PF00636.18; Description =RNase3 domain
AITHASRPSSGVSCYQRLEFVGDAVLDHLITKHLFFTYTDLPPGRLTDLRAAAVNNENFARIAVKHKLHVHLRHGSSALETQIREFVKDVQEELSKPGFNSFGLGDCKAPKVLGDIFESIAGAIISFVLVGLLITFD

SEQ ID NO: 129467 - protein, 64 aa, Setaria italica
  misc_feature (26)..(26): Xaa can be any naturally occurring amino acid
  Transcript Sequence Number=SeqID_63493
  Gene Ontology: Mol. function=ATP-dependent helicase activity; Cellular component=intracellular; Biological process=RNA processing
  Homolog annotation: Hit_ID=Q8LMR2; Match level="QueryCoverage=100%, HitCoverage=3%, E-value=2e-28, Identity=93%"; Hit description =Endoribonuclease Dicer homolog 1
VKHKLHVHLRHGSSALETQIREFVKXVQEELSKPGFNSFGLGDCKAPKVLGDIFESIAGAIFLE

SEQ ID NO: 129468 - protein, 88 aa, Setaria italica
  Transcript Sequence Number=SeqID_63494
  Homolog annotation: Hit_ID=B6SU89; Match level="QueryCoverage=37%, HitCoverage=14%, E-value=4e-10, Identity=96%"; Hit description =Nascent polypeptide-associated complex alpha subunit-like protein
SSLQFPSARRKHAAAAPAPPNPNPVPDDPPLPPSQEEEDEETPDAADEEEEVDETGIEPRDIDLVMTQASVPRAKAVKALKAHDGDIV

SEQ ID NO: 129469 - protein, 136 aa, Setaria italica
  misc_feature (123)..(123): Xaa can be any naturally occurring amino acid
  Transcript Sequence Number=SeqID_63495
NTGKARFVETRRWRDEDNNVVFIVTAVGVFMIQLEYVKSVCESFQEQFQNHQFSLHKFLYCLLQVITVLPRFCNIYCYFLVELFLYIHQKLKLNCLFCTSSHDIILRYCLCLNHAAFLSPTAXVLPQHNPRHYKHI

SEQ ID NO: 129470 - protein, 57 aa, Setaria italica
  Transcript Sequence Number=SeqID_63496
GEIRVSISKIDEENHLLSEILSSIVAQNSPASLPLRLCLTTHGHHDLSGRLAGSVWA

SEQ ID NO: 129471 - protein, 123 aa, Setaria italica
  misc_feature (109)..(109): Xaa can be any naturally occurring amino acid
  Transcript Sequence Number=SeqID_63497
KDSEPPIFPPQVSILLTAGDNCAPQILQYLLLFSCRTVSLYPPEIEAQLFVLHLVTITSPTTTPHPATLHSLLLRLARRRDHLPHALALLRRLPSPPSPRLLLPLILAXLRLRRQPQLFLSTF

SEQ ID NO: 129472 - protein, 135 aa, Setaria italica
  misc_feature (99)..(99): Xaa can be any naturally occurring amino acid
  misc_feature (131)..(131): Xaa can be any naturally occurring amino acid
  Transcript Sequence Number=SeqID_63498
  Gene Ontology: Cellular component=membrane; Biological process=Golgi organization and biogenesis
  Homolog annotation: Hit_ID=B9RAH9; Match level="QueryCoverage=98%, HitCoverage=16%, E-value=3e-21, Identity=42%"; Hit description =Conserved oligomeric Golgi complex component, putative
ISFRSCSLQLISRYTAWLSSGLSARKASDGSPNSPADAEWALSIPIDDFIYIMHDVHAVIGELSESGSFIGHVNQLLASCPIEVLNLVKQIILQAVEPXLEEVLPVIMNVMIGIIVKKSNEDLKHLKGITXTYRM

SEQ ID NO: 129473 - protein, 83 aa, Setaria italica
  Transcript Sequence Number=SeqID_63499
RLFQGVPTFPVSVKLQRSEESVFKKGRKILRVEREVSKTILRNHYKVFEYLNHKFQSSATGEIKHGTRLEAELGFTHYIASNR

SEQ ID NO: 129474 - protein, 45 aa, Setaria italica
  Transcript Sequence Number=SeqID_63500
FQLSSNDPKNRSSKKAARSLVPYYWPKQETSPPQSIQALRSLPRS

SEQ ID NO: 129475 - protein, 105 aa, Setaria italica
  Transcript Sequence Number=SeqID_63501
  Gene Ontology: Mol. function=zinc ion binding; Cellular component =nucleus; Biological process=regulation of transcription
  Homolog annotation: Hit_ID=Q0GLD3; Match level="QueryCoverage=63%, HitCoverage=42%, E-value=1e-26, Identity=79%"; Hit description=Dof19 (Fragment)
  Pfam annotation: Domain name=zf-Dof; Domain location=48-105; Score =104.7; E_value=3.2e-28; Accession=PF02701.7; Description=Dof domain, zinc finger
VVQNKQEAAMVASPPREEAAAARNIKANQAWQQQVAATGSGERKPRPQQEQGLNCPRCNSTNTKFCYYNNNSMTQPRYFCKACRRNWTQGGTLRNVPVGGRSGDS

SEQ ID NO: 129476 - protein, 79 aa, Setaria italica
  Transcript Sequence Number=SeqID_63502
  Gene Ontology: Mol. function=zinc ion binding; Cellular component =nucleus; Biological process=regulation of transcription
  Homolog annotation: Hit_ID=Q8S3R4; Match level="QueryCoverage=74%, HitCoverage=19%, E-value=1e-30, Identity=100%"; Hit description=Dof -like protein 34
  Pfam annotation: Domain name=zf-Dof; Domain location=4-66; Score =141.1; E_value=3.4e-39; Accession=PF02701.7; Description=Dof domain, zinc finger
LRPQHDQPLKCPRCESTHTKFCYYNNYSLSQPRYFCKTCRRYWTKGGSLRNVPVGGGCRKNKRASAKKPAAPPMLQAAH

SEQ ID NO: 129477 - protein, 62 aa, Setaria italica
  Transcript Sequence Number=SeqID_63503
  Subcellular localization annotation: CTP_CleavageSite=40; ConfidenceScore=5.31e-01
ALMTPQNSVEISHNAHRPHFLLLSHKMKRSSSSSVDHSPSCFGVSCNLQPKYVAVSPLFLLR

SEQ ID NO: 129478 - protein, 92 aa, Setaria italica
  misc_feature (66)..(66): Xaa can be any naturally occurring amino acid
  Transcript Sequence Number=SeqID_63504
  Homolog annotation: Hit_ID=B6SHG6; Match level="QueryCoverage=82%, HitCoverage=19%, E-value=6e-21, Identity=71%"; Hit description=AKIN gamma
HRTITTKDFLTAVRHHLQEQHEASPLLHDVITCKKDDTIKDIILKLDSQKIHRIYVVDDKGNTEGXVITLRDIISKSWLSIVSSVRPTYFWG

SEQ ID NO: 129479 - protein, 72 aa, Setaria italica
  Transcript Sequence Number=SeqID_63505
  Gene Ontology: Mol. function=nucleotide binding; Biological process =fatty acid biosynthetic process
  Homolog annotation: Hit_ID=B6SHG6; Match level="QueryCoverage=70%, HitCoverage=13%, E-value=5e-20, Identity=96%"; Hit description=AKIN gamma
YLDKFRWLHDRESKLRKFLSPPFLALQMSDTFLTMLLLLSKYRMKSLPVVEVGGDKIENIITQSSVMHMLAE

SEQ ID NO: 129480 - protein, 103 aa, Setaria italica
  misc_feature (41)..(41): Xaa can be any naturally occurring amino acid
  Transcript Sequence Number=SeqID_63506
  Gene Ontology: Mol. function=nucleotide binding; Biological process =fatty acid biosynthetic process
  Homolog annotation: Hit_ID=B6SHG6; Match level="QueryCoverage=60%, HitCoverage=15%, E-value=5e-26, Identity=98%"; Hit description=AKIN gamma
FSFRYYSRSSFLSRSLRLPVRQVIEIPSDASLAETVEILSXKNKILSAPIRNVEAPEDASWMDKYIGIVEFAGIAMWLLSQSDAAANATTGSGNGIGSPVSNL

SEQ ID NO: 129481 - protein, 60 aa, Setaria italica
  Transcript Sequence Number=SeqID_63507
  Homolog annotation: Hit_ID=B6SHG6; Match level="QueryCoverage=90%, HitCoverage=15%, E-value=2e-14, Identity=68%"; Hit description=AKIN gamma
LSAPIRNVEAPEDASWMDKYIGIVEFAGIAMWLLSQVCNHGTGTYISVLSSQSGRLARYV

SEQ ID NO: 129482 - protein, 122 aa, Setaria italica
  misc_feature (14)..(14): Xaa can be any naturally occurring amino acid
  misc_feature (28)..(28): Xaa can be any naturally occurring amino acid
  misc_feature (41)..(41): Xaa can be any naturally occurring amino acid
  misc_feature (77)..(77): Xaa can be any naturally occurring amino acid
  misc_feature (86)..(86): Xaa can be any naturally occurring amino acid
  misc_feature (89)..(89): Xaa can be any naturally occurring amino acid
  Transcript Sequence Number=SeqID_63508
  Gene Ontology: Mol. function=nucleotide binding; Biological process =fatty acid biosynthetic process
  Homolog annotation: Hit_ID=B6SHG6; Match level="QueryCoverage=100%, HitCoverage=30%, E-value=5e-42, Identity=73%"; Hit description=AKIN gamma
GNISIRDVQYLLTXPKIYKEHRTITTKXFLTAVRHHLLGSXNYEASPLLHDVITCKKDDTIKDIILKLDSQKIHRIXVVDDKGNTXGVXITLRDIISKLVHEPRHYFGDFFDGVVPLPANSS

SEQ ID NO: 129483 - protein, 50 aa, Setaria italica
  misc_feature (6)..(6): Xaa can be any naturally occurring amino acid
  Transcript Sequence Number=SeqID_63509
VYSVGXFEKSWRVTITSCTDLLCFAASIFLSSGCLYLLSRLSNTKGGSHT

SEQ ID NO: 129484 - protein, 76 aa, Setaria italica
  Transcript Sequence Number=SeqID_63510
REQSGDLSYWWRKRFESSCGGNEAQASHLRGGGVRRVGVEAEVARAVRGGVTQAFPRRRRRRIAARRPPRSHGGTD

SEQ ID NO: 129485 - protein, 48 aa, Setaria italica
  Transcript Sequence Number=SeqID_63511
MVCVPVLVRDLQRLSGFEQLDARVKELTSSQAELLERIQKLKQEVQNW

SEQ ID NO: 129486 - protein, 63 aa, Setaria italica
  misc_feature (46)..(46): Xaa can be any naturally occurring amino acid
  misc_feature (63)..(63): Xaa can be any naturally occurring amino acid
  Transcript Sequence Number=SeqID_63512
  Gene Ontology: Mol. function=receptor activity; Cellular component =endoplasmic reticulum lumen; Biological process=auxin mediated signaling pathway
  Homolog annotation: Hit_ID=Q56B53; Match level="QueryCoverage=76%, HitCoverage=23%, E-value=3e-10, Identity=62%"; Hit description=Auxin- binding protein (Fragment)
QCRYYFINSSTVWFLLSSMQHAFFQVEVWLQTFGPGKRTPIHRHSXEEIFRVLKGKALSFWGX

SEQ ID NO: 129487 - protein, 81 aa, Setaria italica
  Transcript Sequence Number=SeqID_63513
GTSTKTKYTEPTLCKHIRAPQWKDPSAIELCCSAVSVCIPHCSPQRMTLQTKGGNSISPIRYGCMYRQKGAKVLGNKMELS

SEQ ID NO: 129488 - protein, 145 aa, Setaria italica
  misc_feature (117)..(117): Xaa can be any naturally occurring amino acid
  Transcript Sequence Number=SeqID_63514
  Gene Ontology: Mol. function=aspartic-type endopeptidase activity; Cellular component=chromatin; Biological process=DNA integration
  Homolog annotation: Hit_ID=Q6ATH4; Match level="QueryCoverage=85%, HitCoverage=8%, E-value=2e-44, Identity=70%"; Hit description =Putative polyprotein
  Pfam annotation: Domain name=rve; Domain location=14-145; Score=54.3; E_value=4.8e-13; Accession=PF00665.18; Description=Integrase core domain
GKHTRLPFSSSHSITHAPFELVHCDVWTSPINSLSGFSYYLVCLDDYSHYCWVFPLGKKSEVHQHIVELAALAKTQFSLPLKCVQADNGTEFINTATTKFLAAQGTHLRLSCPYTSXPQNGKAERIIRLTGAARRTRRRRASPKP

SEQ ID NO: 129489 - protein, 67 aa, Setaria italica
  Transcript Sequence Number=SeqID_63515
SVDEALEMLVQHRISGFPVIDDNWKLVSFILKSFPQLSYRVIVFFYSVVIGPHELSSLSSVNLNYTN

SEQ ID NO: 129490 - protein, 86 aa, Setaria italica
  Transcript Sequence Number=SeqID_63516
CLALFFFFGKQLVVVFTILLFWETVSGSIHYLFIYYIYLMIQEMDWLTQIQTCSLRWIVLGRYLMIELLMLASVLTLKIVSYISAT

SEQ ID NO: 129491 - protein, 59 aa, Setaria italica
  Transcript Sequence Number=SeqID_63517
ELNAKALCDSSAFFRFLLYFETLIGELHYIYTECSSKFYLDTSRWIWCCMQINISCKGL

SEQ ID NO: 129492 - protein, 37 aa, Setaria italica
  Transcript Sequence Number=SeqID_63518
SLYETISEPFATYINLHTTPYPSAGVQVELRRLDNYK

SEQ ID NO: 129493 - protein, 54 aa, Setaria italica
  Transcript Sequence Number=SeqID_63519
LTFLFISAWSFFGHNKLIIKEQVLLNCSSTLPTWDKAASNLTLHSSKMIIIEDL

SEQ ID NO: 129494 - protein, 52 aa, Setaria italica
  Transcript Sequence Number=SeqID_63520
LAALSQVGRVEEQFSRTCSCKQHSSTRALTLLWSLCITKYKEIKAIIVKQEH

SEQ ID NO: 129495 - protein, 50 aa, Setaria italica
  Transcript Sequence Number=SeqID_63521
SGRFEHAWRIGDYVEYNPRQIYAMSRTIYNTSYQSFRALCTRRIKTSRYV

SEQ ID NO: 129496 - protein, 119 aa, Setaria italica
  misc_feature (13)..(13): Xaa can be any naturally occurring amino acid
  misc_feature (19)..(19): Xaa can be any naturally occurring amino acid
  misc_feature (33)..(33): Xaa can be any naturally occurring amino acid
  Transcript Sequence Number=SeqID_63522
  Gene Ontology: Mol. function=glutamate-tRNA ligase activity; Cellular component=cytoplasm; Biological process=tRNA aminoacylation for protein translation
  Homolog annotation: Hit_ID=B6SRU1; Match level="QueryCoverage=100%, HitCoverage=16%, E-value=5e-50, Identity=84%"; Hit description =Glutamyl-tRNA synthetase, cytoplasmic
  Pfam annotation: Domain name=tRNA-synt_1c_C; Domain location=1-94; Score=-21.6; E_value=0.00095; Accession=PF03950.10; Description=tRNA synthetases class I (E and Q), anti-codon binding domain
ITELVGELHLEGXVKTTKXLKTTWLADIEELPXLSLVEFDYLISKKKLEEDEDFLDNLNPCTRRETPALGDANMKNLKHGEVIQLERKGYYRCDAPFIRSSKPVVLFAIPDGRQQASLN

SEQ ID NO: 129497 - protein, 80 aa, Setaria italica
  Transcript Sequence Number=SeqID_63523
  Gene Ontology: Mol. function=glutamate-tRNA ligase activity; Cellular component=cytoplasm; Biological process=tRNA aminoacylation for protein translation
  Homolog annotation: Hit_ID=B6SRU1; Match level="QueryCoverage=63%, HitCoverage=7%, E-value=4e-20, Identity=86%"; Hit description =Glutamyl-tRNA synthetase, cytoplasmic
LVLFFLWVLSNCLIRSFGTIVCLVVGLEYAPMFLSGSEFENACSFVDGYLTSRTFVVGHGLTIADIAVWSNLAGIGQTVG

SEQ ID NO: 129498 - protein, 68 aa, Setaria italica
  Transcript Sequence Number=SeqID_63524
LTTTAMMTETANDQIMLRSFICSWMHGRYILRRFARWSYWASDCSEGAIHEIIDWSGTCSWSWMDCLP

SEQ ID NO: 129499 - protein, 89 aa, Setaria italica
  Transcript Sequence Number=SeqID_63525
  Gene Ontology: Mol. function=sugar:hydrogen symporter activity; Biological process=carbohydrate transport
  Homolog annotation: Hit_ID=Q69M22; Match level="QueryCoverage=98%, HitCoverage=25%, E-value=6e-38, Identity=86%"; Hit description =Integral membrane protein-like
  Subcellular localization annotation: CTP_CleavageSite=36; ConfidenceScore=5.25e-01
VGQSWFELDAFVAVSLSCVFGLLISFFGFAARKAISATAFTVTGVVNKFLTVAINVMIWDKHASVFGLVCLLFTLAGGVLYQQSVTIKG

SEQ ID NO: 129500 - protein, 62 aa, Setaria italica
  Transcript Sequence Number=SeqID_63526
LFSYVYLTVYFVRVPGLYLSCLLSSYLSYKPAISFDPLQLPVCLLKCTNDAMVCGSSCATNL

SEQ ID NO: 129501 - protein, 82 aa, Setaria italica
  Transcript Sequence Number=SeqID_63527
MKAAAATLLMALVVAAAVTVVPSGAARPDDSATVGTFGHGHGHVGGRTWRDHHGGNRSPLAGLTECVTVCGSGVTKCMLDCY

SEQ ID NO: 129502 - protein, 53 aa, Setaria italica
  misc_feature (4)..(4): Xaa can be any naturally occurring amino acid
  Transcript Sequence Number=SeqID_63528
  Gene Ontology: Mol. function=oxidoreductase activity, acting on NADH or NADPH, quinone or similar compound as acceptor; Cellular component=integral to membrane; Biological process=ATP synthesis coupled electron transport
  Homolog annotation: Hit_ID=P12125; Match level="QueryCoverage=69%, HitCoverage=7%, E-value=6e-12, Identity=91%"; Hit description =NAD(P)H-quinone oxidoreductase chain 2, chloroplastic
SQKXRPWFYFISSTSLVISITALLFRWREQPIISFSGNFQTTNFNEQNNTRIY

SEQ ID NO: 129503 - protein, 97 aa, Setaria italica
  Transcript Sequence Number=SeqID_63529
  Gene Ontology: Mol. function=sequence-specific DNA binding; Cellular component=nucleus; Biological process=regulation of transcription, DNA-dependent
  Homolog annotation: Hit_ID=Q8GRL4; Match level="QueryCoverage=86%, HitCoverage=28%, E-value=3e-21, Identity=61%"; Hit description =Homeobox-leucine zipper protein HOX19
  Pfam annotation: Domain name=HALZ; Domain location=48-92; Score=77.1; E_value=6.5e-20; Accession=PF02183.10; Description=Homeobox associated leucine zipper
  Pfam annotation: Domain name=Homeobox; Domain location=3-47; Score =20.4; E_value=0.00012; Accession=PF00046.21; Description=Homeobox domain
  Pfam module annotation: Pfam domain module=HALZ::Homeobox; Domain location=48-92::3-47
  Subcellular localization annotation: CTP_CleavageSite=32; ConfidenceScore=5.32e-01
LKRSSRSADCSLVSLSPKQKVALAKQLNLRPRQVEVWFQNRRARTKLKQTEVDCEFLKRCCESLTEENRRLQRELQELRSLKFAAPPAAASHHFFNP

SEQ ID NO: 129504 - protein, 129 aa, Setaria italica
  Transcript Sequence Number=SeqID_63530
  Gene Ontology: Mol. function=sequence-specific DNA binding; Cellular component=nucleus; Biological process=regulation of transcription, DNA-dependent
  Homolog annotation: Hit_ID=B6TAL5; Match level="QueryCoverage=79%, HitCoverage=41%, E-value=2e-17, Identity=58%"; Hit description =Homeobox-leucine zipper protein HAT22
NKTLRPSSRSWARLEPSLSLSLPTKDSRLSAPVRIAAVKRELPMEEDDEATADRALYSVASSALVAADDDEGCNSRKKLRLTKEQSALLEDRFKEHSTLNPVSKIIKIYRVKIELSVFLVCILPLLMHG

SEQ ID NO: 129505 - protein, 82 aa, Setaria italica
  Transcript Sequence Number=SeqID_63531
  Gene Ontology: Mol. function=sequence-specific DNA binding; Cellular component=nucleus; Biological process=regulation of transcription, DNA-dependent
  Homolog annotation: Hit_ID=Q8GRL4; Match level="QueryCoverage=56%, HitCoverage=15%, E-value=3e-18, Identity=97%"; Hit description =Homeobox-leucine zipper protein HOX19
  Pfam annotation: Domain name=Homeobox; Domain location=38-82; Score =18.8; E_value=0.00017; Accession=PF00046.21; Description=Homeobox domain
VKRERVEEADGERASSTAAAARACGAGAEDDDDGSTRKKLRLTKEQSALLEDRFKEHSTLNPKQKVALAKQLNLRPRQVEVW

SEQ ID NO: 129506 - protein, 41 aa, Setaria italica
  Transcript Sequence Number=SeqID_63532
  Gene Ontology: Mol. function=DNA binding; Cellular component=nucleus; Biological process=regulation of transcription, DNA-dependent
  Homolog annotation: Hit_ID=B6TAL5; Match level="QueryCoverage=92%, HitCoverage=14%, E-value=9e-13, Identity=94%"; Hit description =Homeobox-leucine zipper protein HAT22
  Pfam annotation: Domain name=HALZ; Domain location=9-41; Score=42.8; E_value=1.4e-09; Accession=PF02183.10; Description=Homeobox associated leucine zipper
MDCCRTKLKQTEVDCELLKRCCETLTEENRRLHRELQQLRA

SEQ ID NO: 129507 - protein, 169 aa, Setaria italica
  misc_feature (99)..(99): Xaa can be any naturally occurring amino acid
  misc_feature (140)..(140): Xaa can be any naturally occurring amino acid
  Transcript Sequence Number=SeqID_63533
  Gene Ontology: Mol. function=oxidoreductase activity
  Homolog annotation: Hit_ID=B6U7J6; Match level="QueryCoverage=84%, HitCoverage=25%, E-value=8e-57, Identity=81%"; Hit description=L -ascorbate oxidase
  Pfam annotation: Domain name=Cu-oxidase; Domain location=5-86; Score=- 10.9; E_value=0.0034; Accession=PF00394.14; Description=Multicopper oxidase
TRIPETVRPARLDGEGVTVPTPAVDEEVEGSHTMQTTYSSLDVHLGQSYSVLLTADQPGFDYAVVVSTRFTTKIISTTAVLHYTNSAGKAPGPLPGGPXTIQIDWSLNQARSIRWNLTASGPRPNPQGSYHYGLVPVTRXTIRLANSAAIINGKQRYAVNSVSYVSPDT

SEQ ID NO: 129508 - protein, 111 aa, Setaria italica
  misc_feature (33)..(33): Xaa can be any naturally occurring amino acid
  misc_feature (99)..(99): Xaa can be any naturally occurring amino acid
  Transcript Sequence Number=SeqID_63534
  Gene Ontology: Mol. function=oxidoreductase activity
  Homolog annotation: Hit_ID=B6U7J6; Match level="QueryCoverage=79%, HitCoverage=15%, E-value=9e-25, Identity=73%"; Hit description=L -ascorbate oxidase
SGTVRPARLDGEGVTVPTPAVDEEVEGSHTMQXTTYSSLDVHLGQSYSVLPTTDRTKPGFDYAVVVSTRFTTKIISTTAVLHYTNSAGKAPGPLPGGPXPSQIDWSLNQAR

SEQ ID NO: 129509 - protein, 49 aa, Setaria italica
  Transcript Sequence Number=SeqID_63535
MEGQWTPASRQGYNLRDAIARYTLQVSLTQLLAAVHLDVSYYKNSKKHI

SEQ ID NO: 129510 - protein, 124 aa, Setaria italica
  misc_feature (59)..(59): Xaa can be any naturally occurring amino acid
  Transcript Sequence Number=SeqID_63536
  Gene Ontology: Mol. function=nucleic acid binding; Cellular component= ribonucleoprotein complex; Biological process=multicellular organismal development
  Homolog annotation: Hit_ID=Q6K271; Match level="QueryCoverage=100%, HitCoverage=16%, E-value=7e-49, Identity=75%"; Hit description=FCA
  Pfam annotation: Domain name=RRM_1; Domain location=1-70; Score=58.8; E_value=2e-14; Accession=PF00076.14; Description=RNA recognition motif. (a.k.a. RRM, RBD, o
FVAYLNKQATPKEIEEIFAPYGHVEDVYIMRDGMRQSRGCGFVKFSSKEPAVAAMNALXGTYIMRGCEQPLVIRFADPKRPRPGESRGGPAFGGPGFSPRSDAALVIRPTANLDEPRGRHMPSE

SEQ ID NO: 129511 - protein, 56 aa, Setaria italica
  Transcript Sequence Number=SeqID_63537
MVDPVCVHRCDLGHVSLVSDSCSPAGWYSHAGAAGGRFLGPIRLCFPYHCGMNLVE

SEQ ID NO: 129512 - protein, 44 aa, Setaria italica
  Transcript Sequence Number=SeqID_63538
  Gene Ontology: Mol. function=nucleic acid binding; Biological process= multicellular organismal development
  Homolog annotation: Hit_ID=Q6K271; Match level="QueryCoverage=81%, HitCoverage=4%, E-value=8e-14, Identity=91%"; Hit description=FCA
IIGIFTFAGCCFVKYATSEEADRAIRGLHNQYTLPGAMGPVQVR

SEQ ID NO: 129513 - protein, 48 aa, Setaria italica
  Transcript Sequence Number=SeqID_63539
DPKRPRPGESRGGPAFGGPGFSPRSDAALVIRFQFLYSLSYLVLHKDN

SEQ ID NO: 129514 - protein, 134 aa, Setaria italica
  misc_feature (109)..(109): Xaa can be any naturally occurring amino acid
  misc_feature (120)..(120): Xaa can be any naturally occurring amino acid
  Transcript Sequence Number=SeqID_63540
  Gene Ontology: Mol. function=nucleic acid binding
  Homolog annotation: Hit_ID=B6E012; Match level="QueryCoverage=96%, HitCoverage=15%, E-value=7e-14, Identity=42%"; Hit description =Flowering time control protein
  Subcellular localization annotation: CTP_CleavageSite=38; ConfidenceScore=5.50e-01
FPLVVFGWLLVTSADTAGFRPPMFPGNGSLSTQTAVPTSSHVGMNPPMVQGHHLGSQQIPPMQKPPGPPQNFPVQLQNAQQGQPLQGSIQQIGQLQVPQSTGPVSYGQXNMPSMQLPGQXPPASQPLMQQNASL

SEQ ID NO: 129515 - protein, 75 aa, Setaria italica
  Transcript Sequence Number=SeqID_63541
  Gene Ontology: Mol. function=nucleic acid binding; Biological process= multicellular organismal development
  Homolog annotation: Hit_ID=Q6DN79; Match level="QueryCoverage=48%, HitCoverage=5%, E-value=3e-13, Identity=88%"; Hit description=FCA gamma protein
  Pfam annotation: Domain name=WW; Domain location=1-30; Score=33.9; E _value=6.4e-07; Accession=PF00397.18; Description=WW domain
STCNWTEHSPPEGFKYYYNSVTRESKWEKPEEFVLYEQQQQKLLLLQQHQQKIAAQQLQYNQPTRVQVLLTNTNQ

SEQ ID NO: 129516 - protein, 120 aa, Setaria italica
  Transcript Sequence Number=SeqID_63542
  Gene Ontology: Mol. function=binding
  Homolog annotation: Hit_ID=Q8H9E4; Match level="QueryCoverage=61%, HitCoverage=7%, E-value=9e-31, Identity=85%"; Hit description =Putative TPR-containing nuclear phosphoprotein
SNALSMLGSLELQSDETWLTAKEHFRNAKEATKGDAYSLLQLGNWNYFAANRPEKKAPKFEATHREKAMELYQSVCCFTLSFPMCYLYQLKWMAHYYEIYITPYQILLSFKCSIHVAYLF

SEQ ID NO: 129517 - protein, 101 aa, Setaria italica
  misc_feature (50)..(50): Xaa can be any naturally occurring amino acid
  Transcript Sequence Number=SeqID_63543
  Gene Ontology: Mol. function=binding; Cellular component=nuclear speck
  Homolog annotation: Hit_ID=Q8H9E4; Match level="QueryCoverage=100%, HitCoverage=14%, E-value=7e-39, Identity=58%"; Hit description =Putative TPR-containing nuclear phosphoprotein
  Pfam annotation: Domain name=TPR_2; Domain location=14-47; Score =23.3; E_value=0.001; Accession=PF07719.9; Description=Tetratricopepti de repeat
YQNCLRKFFNNTDATILLYLARTHYEAEQWQDCRKTLLRAIHLAPSNYLXRFNVGVSMQKFSASTLQKTKRTVDEVHRDAAEQAEQQNKQKMEVARQICFG

SEQ ID NO: 129518 - protein, 73 aa, Setaria italica
  Transcript Sequence Number=SeqID_63544
GNDGDNSERAPDHLLAAAGLEDSDAEDDMVGLWSFSYSIYVHYFLLPFPVHVFFSGDTSNIDKHSIGKILRNK

SEQ ID NO: 129519 - protein, 45 aa, Setaria italica
  Transcript Sequence Number=SeqID_63545
MKLYICQQVLKQHRSNMFAANGIGILYAEKAKWDVAKEFVYTRLL

SEQ ID NO: 129520 - protein, 84 aa, Setaria italica
  Transcript Sequence Number=SeqID_63546
  Gene Ontology: Mol. function=binding
  Homolog annotation: Hit_ID=Q8H9E4; Match level="QueryCoverage=100%, HitCoverage=7%, E-value=2e-33, Identity=82%"; Hit description =Putative TPR-containing nuclear phosphoprotein
KAGEDVPVELLNGIGLLHFEKGEFEMAEQSFKEALGDGLWVSIMDGKVGSSMVNWSGQYKDQSFFHQLEEEGVPLELHSNKVTT

SEQ ID NO: 129521 - protein, 102 aa, Setaria italica
  Transcript Sequence Number=SeqID_63547
  Gene Ontology: Mol. function=transferase activity, transferring glycosyl groups; Biological process=metabolic process
  Homolog annotation: Hit_ID=C4MF47; Match level="QueryCoverage=80%, HitCoverage=17%, E-value=4e-30, Identity=74%"; Hit description=UDP -glycosyltransferase UGT74H5
LTERYLTDPDDRAYLDLLVNQFAGLDTADHVLVNSFYELQPQESEYMASAWRAKTVGPTVPSAYLDNRLPDDTSYGFHLYTPLTAMTRAWLVAMPQWSDQTM

SEQ ID NO: 129522 - protein, 141 aa, Setaria italica
  Transcript Sequence Number=SeqID_63548
  Gene Ontology: Mol. function=aspartic-type endopeptidase activity; Biological process=proteolysis
  Homolog annotation: Hit_ID=B6TNN1; Match level="QueryCoverage=78%, HitCoverage=23%, E-value=4e-46, Identity=84%"; Hit description =Aspartic proteinase nepenthesin-2
  Subcellular localization annotation: CTP_CleavageSite=83; ConfidenceScore=5.56e-01
LLNLFTLSFLCSFSFRSGVSISIGTSGTVITRLQRTAYSALSSAFKAGMKQYPRAPSSGILDTCFDFSGQRSITIPTVALVFSGGAVVNLDANGIILGSCLAFAGNSDDSSFGIIGNVQQRTFEVLYDVGGGSVGFRAGAC

SEQ ID NO: 129523 - protein, 128 aa, Setaria italica
  misc_feature (16)..(16): Xaa can be any naturally occurring amino acid
  misc_feature (23)..(23): Xaa can be any naturally occurring amino acid
  misc_feature (108)..(108): Xaa can be any naturally occurring amino acid
  Transcript Sequence Number=SeqID_63549
  Homolog annotation: Hit_ID=B9V0I6; Match level="QueryCoverage=97%, HitCoverage=28%, E-value=2e-26, Identity=48%"; Hit description=F-box family-1
ASEHSRIHIYAPNLVXLYIDDLXGRTPILDSMPSLIKAFVRITPDCEDACDKLLDPNCSQCECQYCGTSVNVGDGNNSHVLLKGLSEAKDLDLESAHDMFIFKMDLKXCPVFSKLKTLLLNEYWCMPG

SEQ ID NO: 129524 - protein, 91 aa, Setaria italica
  Transcript Sequence Number=SeqID_63550
MHVINYWIQTAHNVSVSIVALLLTLVMEITLMCFLKVYQKLRIWIWNLHTTWYTYIFPLIIITNPIATSLLDIDICQLDRIYLSLVLPSTY

SEQ ID NO: 129525 - protein, 110 aa, Setaria italica
  misc_feature (85)..(85): Xaa can be any naturally occurring amino acid
  Transcript Sequence Number=SeqID_63551
  Gene Ontology: Biological process=biosynthetic process
  Homolog annotation: Hit_ID=B9T3U9; Match level="QueryCoverage=97%, HitCoverage=10%, E-value=4e-19, Identity=48%"; Hit description =Transferase, transferring glycosyl groups, putative
VLVLTFVPLFTGDTREQHPLGERNEMWVKFFNFTLLKSMDEDLAEEADDGMHPGNDQWLWPLTGQVFWSGIADREREEKYIKKAXTKKLKNKVKLLERQKSGYKQKPLGQ

SEQ ID NO: 129526 - protein, 80 aa, Setaria italica
  Transcript Sequence Number=SeqID_63552
  Gene Ontology: Mol. function=pyridoxal phosphate binding; Cellular component=mitochondrial matrix; Biological process=arginine metabolic process
  Homolog annotation: Hit_ID=B9S0X8; Match level="QueryCoverage=90%, HitCoverage=15%, E-value=2e-32, Identity=86%"; Hit description =Ornithine aminotransferase, putative
PDGYLKAVRDLCSKHNILMIADEIQTGIARTGRMLACDWEGIRPDMVILGKALGAGVVPVSAVLADKDIMLCNTRTKGKQ

SEQ ID NO: 129527 - protein, 69 aa, Setaria italica; identical to SEQ ID NO: 106770
  Transcript Sequence Number=SeqID_63553

SEQ ID NO: 129528 - protein, 116 aa, Setaria italica
  misc_feature (16)..(16): Xaa can be any naturally occurring amino acid
  Transcript Sequence Number=SeqID_63554
  Gene Ontology: Mol. function=metal ion binding
KESPSGEGKILSIKIXNHQFYKLLPVKLDQEQLDELELEAKIQGTKISDVRVQVAENGQSESLYCNNCKLSASQFLRCCPACPFKLCLSCCHKIREGNYCSSTSLPLVSYLNSRTG

SEQ ID NO: 129529 - protein, 91 aa, Setaria italica
  Transcript Sequence Number=SeqID_63555
  Gene Ontology: Mol. function=metal ion binding
ACPFKLCLSCCHKIREGNMSDSTPEDKFKNRLLQQESVHEDGSITCPSIELGGCGDAPLNLIYASPSGQSEELSSDDELHAPGLILFLGSC

SEQ ID NO: 129530 - protein, 85 aa, Setaria italica
  Transcript Sequence Number=SeqID_63556
  Gene Ontology: Mol. function=racemase and epimerase activity, acting on carbohydrates and derivatives; Cellular component=integral to membrane; Biological process=carbohydrate metabolic process
  Homolog annotation: Hit_ID=B6SPN6; Match level="QueryCoverage=62%, HitCoverage=10%, E-value=1e-22, Identity=96%"; Hit description =Protein capI
  Subcellular localization annotation: CTP_CleavageSite=36; ConfidenceScore=5.38e-01
PSPRTTAPTARPRWTPRRSAAPPWRNARRPAPQTYVASNVAGLVSVFEVAAKHADPQPAIVWASSSSVYGLNTDAPFSEDHRTDR

SEQ ID NO: 129531 - protein, 78 aa, Setaria italica
  Transcript Sequence Number=SeqID_63557
VIQCVGACCSSHDRRAIHLHCISLYLYSPQLRFERGSSSLPLWKKNTIVLVNSATFQVIPLWVDGEKIILSYLGNVVD

SEQ ID NO: 129532 - protein, 71 aa, Setaria italica
  misc_feature (1)..(1): Xaa can be any naturally occurring amino acid
  Transcript Sequence Number=SeqID_63558
XKLNPLQGYSCTNWLPSLLGPLVLCFVAEHPHGSSHLVLFKAASVEESRSNKKMAHRSHQITVAPCPCHQY

SEQ ID NO: 129533 - protein, 32 aa, Setaria italica
  Transcript Sequence Number=SeqID_63559
AAQVNAVFLQDIGGKSPLSQWAIEFLSLMVQS

SEQ ID NO: 129534 - protein, 53 aa, Setaria italica
  Transcript Sequence Number=SeqID_63560
HSSCECYRTKKPLHRKAELRTQRYTLAVAGVSYHQDWEARSQGEGRQPQHGLG

SEQ ID NO: 129535 - protein, 140 aa, Setaria italica
  Transcript Sequence Number=SeqID_63561
  Gene Ontology: Mol. function=metal ion binding
  Homolog annotation: Hit_ID=B6SPK3; Match level="QueryCoverage=89%, HitCoverage=25%, E-value=6e-42, Identity=70%"; Hit description=Zinc ion binding protein
  Pfam annotation: Domain name=UIM; Domain location=16-33; Score=17.4; E_value=0.059; Accession=PF02809.12; Description=Ubiquitin interaction motif
  Pfam annotation: Domain name=UIM; Domain location=48-65; Score=8.6; E_ value=3.1; Accession=PF02809.12; Description=Ubiquitin interaction motif
  Pfam module annotation: Pfam domain module=UIM::UIM; Domain location =16-33::48-65
WHEGHSSDYNRDTYGDSDNEDIDRAIALSLAEEDQNKGKAAIDTHYDLEEDEQLARALQESLNAESPPRQNVPVENVPPRRNVPIEDVPPQQYVPAKEPPPHVYPGSGFRTCAGCHNPIGHGRFFVAGSVVRLIIMHSKL

SEQ ID NO: 129536 - protein, 124 aa, Setaria italica
  Transcript Sequence Number=SeqID_63562
  Gene Ontology: Mol. function=iron-sulfur cluster binding; Biological process=abscisic acid biosynthetic process
  Homolog annotation: Hit_ID=Q6Z351; Match level="QueryCoverage=70%, HitCoverage=6%, E-value=5e-35, Identity=80%"; Hit description =Putative aldehyde oxidase-like protein
  Pfam annotation: Domain name=Ald_Xan_dh_C; Domain location=21-111; Score=68.3; E_value=2.9e-17; Accession=PF01315.14; Description =Aldehyde oxidase and xanthine dehydrogenase, ab hammerhead domain
INFFKSVFLKGHHTYFFLGYIGEAVYVDDIPAPKHCLHGEFIYSTQPLAFVKNIKFKSSLASQKIITVVSAKDIPKEGQNIGSMTMFGDEPLFGGPIAEFAGQALGVVVLIYFIFKYSLLFPPP

SEQ ID NO: 129537 - protein, 131 aa, Setaria italica
  Transcript Sequence Number=SeqID_63563
  Gene Ontology: Mol. function=iron-sulfur cluster binding; Biological process=abscisic acid biosynthetic process
  Homolog annotation: Hit_ID=Q6Z351; Match level="QueryCoverage=99%, HitCoverage=9%, E-value=9e-54, Identity=79%"; Hit description =Putative aldehyde oxidase-like protein
  Pfam annotation: Domain name=Ald_Xan_dh_C; Domain location=16-126; Score=148.5; E_value=2.1e-41; Accession=PF01315.14; Description =Aldehyde oxidase and xanthine dehydrogenase, ab hammerhead domain
PIGEPMKKYGVELQASGEAVYVDDIPAPKHCLHGEFIYSTQPLAFVKNIKFKSSLASQKIITVVSAKDIPKEGQNIGSMTMFGDEPLFGGPIAEFAGQALGVVIAETQRHADMAAKQAVVEYDTEDFVSPT

SEQ ID NO: 129538 - protein, 62 aa, Setaria italica
  Transcript Sequence Number=SeqID_63564
IFIHLQVEGTSSVVSELAKLATQEQMLLDQSKDLLSTVAAIHVGDIFYICSFYSIILLLNFI

SEQ ID NO: 129539 - protein, 53 aa, Setaria italica
  Transcript Sequence Number=SeqID_63565
  Gene Ontology: Mol. function=DNA-directed RNA polymerase activity; Cellular component=nucleus; Biological process=transcription
  Homolog annotation: Hit_ID=B9G6G0; Match level="QueryCoverage=94%, HitCoverage=4%, E-value=4e-19, Identity=88%"; Hit description=DNA -directed RNA polymerase
KNFACQACKTSKGMETVAMPYVFRYLAAELAAMNIKLELRLSNKSELPPSQGS

SEQ ID NO: 129540 - protein, 65 aa, Setaria italica
  Transcript Sequence Number=SeqID_63566
EAILICCSAGAPALCSWQPAGAPAEQQIRIASEPRIMKFCIHQSSEAPGRRKLKRACSIAIVLAG

SEQ ID NO: 129541 - protein, 68 aa, Setaria italica
  misc_feature (7)..(7): Xaa can be any naturally occurring amino acid
  Transcript Sequence Number=SeqID_63567
  Gene Ontology: Mol. function=sucrose transmembrane transporter activity; Cellular component=integral to plasma membrane; Biological process=sucrose transport
  Homolog annotation: Hit_ID=Q0KIU7; Match level="QueryCoverage=100%, HitCoverage=12%, E-value=3e-26, Identity=79%"; Hit description =Sucrose transporter-like protein, putative
VTLVGFXADLGYILGDTTEHCSTYKGSRFRAAIVFILGFWMLDLANNTVQGPARALLADLSGPDQCNS

SEQ ID NO: 129542 - protein, 83 aa, Setaria italica
  misc_feature (7)..(7): Xaa can be any naturally occurring amino acid
  Transcript Sequence Number=SeqID_63568
DALRDLXSASRTPALFTSKCIVAELRRLGKSHAESFDSAQLLATTQVGFLFFSTVLPPSQLLVPFFLFYHSQLGCISIALRPW

SEQ ID NO: 129543 - protein, 94 aa, Setaria italica
  misc_feature (92)..(92): Xaa can be any naturally occurring amino acid
  Transcript Sequence Number=SeqID_63569
QKHYFPHKKTPCPPIIRDLQLFSTACFYIVLIIASKLDKSDSEARPISSKCQRNSPSVVSQATPPTKIFPDESPPAPLPSSPPTSPYPEPPXRT

SEQ ID NO: 129544 - protein, 78 aa, Setaria italica
  Transcript Sequence Number=SeqID_63570
LQPSEGRGDAAIVKKIDPENTYVFRSFSCFVFCRENHQLHQCIALRDVYSKAKLSPSLQAACKYNKDVDCWMPAASIS

SEQ ID NO: 129545 - protein, 106 aa, Setaria italica
  Transcript Sequence Number=SeqID_63571
DEGRARSVGDEEAAAATAEDDGDGGGAEIGAGGMGGGGGGGGGGTGGRGSGSSGGGGYGYGGGYRSAAAYYGSTAYGAYGRGYGYGNTAGYGSGYGSVYGGSMYGG

SEQ ID NO: 129546 - protein, 81 aa, Setaria italica
  Transcript Sequence Number=SeqID_63572
  Gene Ontology: Mol. function=nucleic acid binding; Cellular component= ribonucleoprotein complex
  Homolog annotation: Hit_ID=Q6YVH4; Match level="QueryCoverage=88%, HitCoverage=19%, E-value=4e-29, Identity=86%"; Hit description =Putative heterogeneous nuclearribonucleoprotein A2
MFLFGVGALAFGASGVLEDKHTKMPRGFGFVTFSDPSVIDKVLEDEHVIDGRTVEVKRTVPREEMTTKDGPKTRKIFIGGL

SEQ ID NO: 129547 - protein, 148 aa, Setaria italica
  misc_feature (99)..(99): Xaa can be any naturally occurring amino acid
  misc_feature (134)..(134): Xaa can be any naturally occurring amino acid
  Transcript Sequence Number=SeqID_63573
  Homolog annotation: Hit_ID=Q2HSS2; Match level="QueryCoverage=50%, HitCoverage=23%, E-value=3e-15, Identity=55%"; Hit description =F5O11.19, related
MGSPGSANGRHGEYVRIPEEVEVAVKGEADAAAALTVLRWRAIRWWAKVAVLGIFLAGAGAAAVVFLGPGLVIKKVVAPILYWESTTFSRPAIALICFXGAIALFPSVLLPSSPFMWLAGMTFGYLYGFLIITXGMSIGMSLPYFIGS

SEQ ID NO: 129548 - protein, 38 aa, Setaria italica
  Transcript Sequence Number=SeqID_63574
RLWCIWCLRWWCLWRGCLWRTVEGMAMEAMARLWVWFW

SEQ ID NO: 129549 - protein, 46 aa, Setaria italica
  Transcript Sequence Number=SeqID_63575
  Gene Ontology: Mol. function=transporter activity; Cellular component= mitochondrial inner membrane; Biological process=transport
  Homolog annotation: Hit_ID=B6UAY5; Match level="QueryCoverage=95%, HitCoverage=13%, E-value=2e-10, Identity=68%"; Hit description =Protein brittle-1
YRQRKGLRGLYRGILPEYCKVVPGVGIVFMTYEMLKAILTGLESDD

SEQ ID NO: 129550 - protein, 66 aa, Setaria italica
  Transcript Sequence Number=SeqID_63576
LHFLPWPSLFNSSLPPTKVVAYCATASPYVIGWSHMEVCLLVKSGWKSQPFYPADCKKMTLIGGCR

SEQ ID NO: 129551 - protein, 63 aa, Setaria italica
  Transcript Sequence Number=SeqID_63577
LSPDLLCIHLDHIHTHICIRRQIVDRYTGGPGLISCNHNKPLFISSPHRPTLYIEIDYHGRGK

SEQ ID NO: 129552 - protein, 42 aa, Setaria italica
  Transcript Sequence Number=SeqID_63578
LSSAKLKEMSGSDIFADGTPAPREYLGGVRKPPGDESSIALI

SEQ ID NO: 129553 - protein, 39 aa, Setaria italica
  Transcript Sequence Number=SeqID_63579
YNVESAESDSVTWLVSDTPVCDLIFGLCYLFHKFSVRRD

SEQ ID NO: 129554 - protein, 138 aa, Setaria italica
  Transcript Sequence Number=SeqID_63580
  Gene Ontology: Cellular component=integral to membrane
  Homolog annotation: Hit_ID=Q59IV6; Match level="QueryCoverage=98%, HitCoverage=38%, E-value=9e-35, Identity=56%"; Hit description =Plastidic phosphate translocator-like protein1
  Pfam annotation: Domain name=TPT; Domain location=1-97; Score=53.7; E_ value=7.3e-13; Accession=PF03151.8; Description=Triose-phosphate Transporter family
AFLVVPWVFVELPRLRAVGTFQPDLFVFGTNSLCAFALNLAVFLLVGKTSALTMNVAGVVKDWLLIAFSWSVIRDTVTPINLFGYGIAFLGVGYYNHVKLQALKAKEAQKKAAQADEEAGSLLQERDSHGDRKTDNQA

SEQ ID NO: 129555 - protein, 118 aa, Setaria italica
  Transcript Sequence Number=SeqID_63581
  Gene Ontology: Cellular component=integral to membrane
  Homolog annotation: Hit_ID=B9RP61; Match level="QueryCoverage=90%, HitCoverage=25%, E-value=2e-40, Identity=77%"; Hit description =Triose phosphate/phosphate translocator, non-green plastid, chloroplast, putative
  Subcellular localization annotation: CTP_CleavageSite=63; ConfidenceScore=5.33e-01
GALYALSLWFSNSAYIYLSVSFIQMLKALMPVAVYSLAVAFRTDSFRRASMLNMLGISAGVAVAAYGEARFDAFGVTLQLAAVAAEATRLVLIQILLTSRGMSLNPILPSSSYLLFVL

SEQ ID NO: 129556 - protein, 58 aa, Setaria italica
  Transcript Sequence Number=SeqID_63582
RAPRICLPPSPSPSASALSWLARAPAAAAHGSRCDAGSGGGWRRPVEHALRPALRCVA

SEQ ID NO: 129557 - protein, 107 aa, Setaria italica
  Transcript Sequence Number=SeqID_63583
  Gene Ontology: Cellular component=integral to membrane
  Homolog annotation: Hit_ID=B9RP61; Match level="QueryCoverage=45%, HitCoverage=11%, E-value=3e-18, Identity=81%"; Hit description =Triose phosphate/phosphate translocator, non-green plastid, chloroplast, putative
GRWVVAAADLGSGGWRGLGCEGAARGGKKGREWGGAGEEKVLLSYCYVAVWIFLSFSVIVYNKYILDPKMYNWPFPISLTMVHMAFCSSLAVALVRVLRVVDLPTSP

SEQ ID NO: 129558 - protein, 78 aa, Setaria italica
  Transcript Sequence Number=SeqID_63584
  Gene Ontology: Cellular component=integral to membrane
  Homolog annotation: Hit_ID=B9RP61; Match level="QueryCoverage=73%, HitCoverage=13%, E-value=2e-21, Identity=78%"; Hit description =Triose phosphate/phosphate translocator, non-green plastid, chloroplast, putative
MGRDGGGGGMSESVLRKVLLSYCYVAVWIFLSFSVIVYNKYILDPKMYNWPFPISLTMVHMAFCSSLAVALVRVLRVV

SEQ ID NO: 129559 - protein, 51 aa, Setaria italica
  Transcript Sequence Number=SeqID_63585
RECTELMNKVACQIKQHAFWRSASTAMSYRTAEACAPSVADEPPRTGADDC

SEQ ID NO: 129560 - protein, 83 aa, Setaria italica
  Transcript Sequence Number=SeqID_63586
RQPRGLHKLQGKCIGPFRDARIASGGLLENTDFDVWGAGGDKTASASSCALNNQQLFNPDHSMTNYRGSDLLDRLSAKDNDNA

SEQ ID NO: 129561 - protein, 110 aa, Setaria italica
  Transcript Sequence Number=SeqID_63587
  Gene Ontology: Mol. function=protein serine/threonine kinase activity; Cellular component=plasma membrane; Biological process =protein amino acid phosphorylation
  Homolog annotation: Hit_ID=B9SB26; Match level="QueryCoverage=99%, HitCoverage=11%, E-value=3e-28, Identity=58%"; Hit description =Kinase, putative
  Pfam annotation: Domain name=Pkinase_Tyr; Domain location=1-103; Score=-149.8; E_value=0.00092; Accession=PF07714.9; Description =Protein tyrosine kinase
QSQQGVKEFETEIEMLSRLRHRHLVSLIGYCDEQNEMILVYEHMANGTLRSHLYGSDLPALTWKQRLEICIGVGLSRVLFTLPFLTLLLVYFFVYRGIIHRDVKTTNILS

SEQ ID NO: 129562 - protein, 103 aa, Setaria italica
  Transcript Sequence Number=SeqID_63588
  Homolog annotation: Hit_ID=B6THU8; Match level="QueryCoverage=99%, HitCoverage=19%, E-value=6e-19, Identity=57%"; Hit description=Sad1 -unc84-like protein
  Subcellular localization annotation: CTP_CleavageSite=36; ConfidenceScore=5.33e-01
MSASTAAIPTANTNGNHALSLDSHSSQDVRRRTVVVAKKKASPELLAEGGVNGISEDKIASKKDLSHTIRGESVLDKPKYSSEARKDAVASAAAERRKKISTK

SEQ ID NO: 129563 - protein, 96 aa, Setaria italica
  misc_feature (45)..(45): Xaa can be any naturally occurring amino acid
  Transcript Sequence Number=SeqID_63589
  Homolog annotation: Hit_ID=B6THU8; Match level="QueryCoverage=96%, HitCoverage=20%, E-value=5e-40, Identity=81%"; Hit description=Sad1 -unc84-like protein
YCIDITLEDIRLYAKEIVEIEIARHSADGLGMVDYALGSGGGKVXSHSEPFMNGKNYFHSRNSVHKTAKKMLEPSFGQPGECFALKGSSGFVDVKL

SEQ ID NO: 129564 - protein, 61 aa, Setaria italica
  Transcript Sequence Number=SeqID_63590
  Homolog annotation: Hit_ID=B6THU8; Match level="QueryCoverage=100%, HitCoverage=13%, E-value=6e-24, Identity=83%"; Hit description=Sad1 -unc84-like protein
IVEIEIARHSADGLGMVDYALGSGGGKVVSHSEPFMNGKNYFHSRNSVHKTAKKMLEPSFG

SEQ ID NO: 129565 - protein, 84 aa, Setaria italica
  Transcript Sequence Number=SeqID_63591
  Gene Ontology: Mol. function=alpha-N-arabinofuranosidase activity; Biological process=L-arabinose metabolic process
  Homolog annotation: Hit_ID=Q2RAZ2; Match level="QueryCoverage=100%, HitCoverage=12%, E-value=5e-20, Identity=57%"; Hit description=Alpha- L-arabinofuranosidase C-terminus family protein, expressed
  Subcellular localization annotation: CTP_CleavageSite=33; ConfidenceScore=5.42e-01
IVNFGPHAVSLTISAQELQVGVDTMRSRVTVLTSSNVMDENSFSNPNNVVPVSRELPNAGEEMQALLAPYSFTSFDLALDQHER

SEQ ID NO: 129566 - protein, 31 aa, Setaria italica
  Transcript Sequence Number=SeqID_63592
NHHHHHHHHNHHQSLLRCFPRSMRRSASMKV

SEQ ID NO: 129567 - protein, 149 aa, Setaria italica
  Transcript Sequence Number=SeqID_63593
  Gene Ontology: Cellular component=plasma membrane
  Homolog annotation: Hit_ID=Q5K2M9; Match level="QueryCoverage=97%, HitCoverage=19%, E-value=6e-61, Identity=78%"; Hit description=START domain-containing protein
  Pfam annotation: Domain name=DUF1336; Domain location=1-149; Score =171.2; E_value=3.1e-48; Accession=PF07059.4; Description=Protein of unknown function (DUF1336)
NKIQKVPAGKYLMELVAIDWFKDTKRMDHVARRKGCAAQVAAEKGMFTFLVNIQIPGSSHYSLVLYFVSSSLKKGSLLQRFADGDDDFRNSRLKLIPSVPKGSWIVRQSVGSTPCLLGKAVDCSYLRGPEYLEVDVDIGSSAVANGVLG

SEQ ID NO: 129568 - protein, 46 aa, Setaria italica
  Transcript Sequence Number=SeqID_63594
  Homolog annotation: Hit_ID=Q5K2M9; Match level="QueryCoverage=97%, HitCoverage=6%, E-value=5e-12, Identity=77%"; Hit description=START domain-containing protein
MGAYDIEDALTWKRKLEFLIDQQQDSMTAKNRKAFASLDFDIDLGR

SEQ ID NO: 129569 - protein, 72 aa, Setaria italica
  Transcript Sequence Number=SeqID_63595
  Gene Ontology: Cellular component=plasma membrane
  Homolog annotation: Hit_ID=B9S1J0; Match level="QueryCoverage=100%, HitCoverage=11%, E-value=9e-20, Identity=57%"; Hit description=Lipid binding protein, putative
DWFKDTKRMDHVARRKGCAAQIPGSSHYSLVLYFVSSSLKKGSLLQRFADGDDDFRNSRLKLIPSVPKGSWI

SEQ ID NO: 129570 - protein, 102 aa, Setaria italica
  Transcript Sequence Number=SeqID_63596
  Homolog annotation: Hit_ID=Q6Z3H8; Match level="QueryCoverage=54%, HitCoverage=5%, E-value=1e-12, Identity=64%"; Hit description =Putative bzip-related transcription factor
LIRKLHGGEFQSSTLYYLEFHTIYSSYYSFSSSDVLVEVRYFCFICCLPQAMEKIRGLYDQKRKEQKRLYYSGAESHKLEAMEICVKKLSTKLTIAIQIVNS

SEQ ID NO: 129571 - protein, 114 aa, Setaria italica
  misc_feature (82)..(82): Xaa can be any naturally occurring amino acid
  Transcript Sequence Number=SeqID_63597
  Gene Ontology: Mol. function=glutamate-ammonia ligase activity; Biological process=nitrogen compound metabolic process
  Homolog annotation: Hit_ID=Q5MD07; Match level="QueryCoverage=100%, HitCoverage=27%, E-value=5e-48, Identity=62%"; Hit description =Glutamine synthetase (Fragment)
CPRNSLKESTQKLLLDEFNVTMKAGFENEFFLRRKLVSDGVEQWVPYDNTNYCSTSAFDGASSILQEIYSSLKASNIVVEQXPDLNDIGSGSHVHLSLWENDQNVFMGSSTDNF

SEQ ID NO: 129572 - protein, 57 aa, Setaria italica
  misc_feature (46)..(46): Xaa can be any naturally occurring amino acid
  Transcript Sequence Number=SeqID_63598
  Gene Ontology: Mol. function=glutamate-ammonia ligase activity; Biological process=nitrogen compound metabolic process
  Homolog annotation: Hit_ID=Q5MD07; Match level="QueryCoverage=85%, HitCoverage=8%, E-value=8e-20, Identity=91%"; Hit description =Glutamine synthetase (Fragment)
GNCTILFYLKELLELAPIKKVMFSTDGYAFPETYYLGANRSRDVVXRVLAAACEDGD

SEQ ID NO: 129573 - protein, 54 aa, Setaria italica
  Transcript Sequence Number=SeqID_63599
  Gene Ontology: Mol. function=glutamate-ammonia ligase activity; Biological process=nitrogen compound metabolic process
MNILNLLLTVCNQIVALKSIAAYRSGLEINPNVSKTDAEDGLRKELTGPRPIGL

SEQ ID NO: 129574 - protein, 100 aa, Setaria italica
  misc_feature (58)..(58): Xaa can be any naturally occurring amino acid
  misc_feature (74)..(74): Xaa can be any naturally occurring amino acid
  Transcript Sequence Number=SeqID_63600
  Homolog annotation: Hit_ID=B6TJ62; Match level="QueryCoverage=85%, HitCoverage=22%, E-value=4e-30, Identity=80%"; Hit description=TLD family protein
  Pfam annotation: Domain name=TLD; Domain location=1-99; Score=-14.3; E_value=0.0053; Accession=PF07534.8; Description=TLD
RLCSTWRHGISLSTLYRRSMLCPGFSLFGSGGIKKGTVFGGLVEAPLQPSSSKKYQGXTNNCFVFTNLHDRPVXYRPTGNFQYYSFGLQNSFSYFHALEI

SEQ ID NO: 129575 - protein, 83 aa, Setaria italica
  Transcript Sequence Number=SeqID_63601
  Homolog annotation: Hit_ID=B6TJ62; Match level="QueryCoverage=66%, HitCoverage=15%, E-value=2e-23, Identity=96%"; Hit description=TLD family protein
LLYSTWRHGISLSTLYRRSMLCPGFSLLLVGDKKGTVFGGLVEAPLQPSSSKKYQVSPLHCDKLFVTYFPCTEYFQNNLAGDQ

SEQ ID NO: 129576 - protein, 39 aa, Setaria italica
  Transcript Sequence Number=SeqID_63602
  Homolog annotation: Hit_ID=B6TJ62; Match level="QueryCoverage=100%, HitCoverage=10%, E-value=5e-15, Identity=89%"; Hit description=TLD family protein
DRPVIYRPTGANNYFTVCSADYLALGGGGHFALYLDGDL

SEQ ID NO: 129577 - protein, 38 aa, Setaria italica
  misc_feature (30)..(30): Xaa can be any naturally occurring amino acid
  Transcript Sequence Number=SeqID_63603
  Gene Ontology: Mol. function=phosphatidylcholine-sterol O -acyltransferase activity; Cellular component=integral to membrane
  Homolog annotation: Hit_ID=A6MH02; Match level="QueryCoverage=97%, HitCoverage=9%, E-value=1e-11, Identity=89%"; Hit description =Hemolysin III-related family protein (Fragment)
MLRLDYAGIAALIATSFYPPVYYSFMCYPXFCNLYLSF

SEQ ID NO: 129578 - protein, 85 aa, Setaria italica
  Transcript Sequence Number=SeqID_63604
  Subcellular localization annotation: CTP_CleavageSite=47; ConfidenceScore=5.17e-01
TLSTSAADSRHPGVRSPHQEGDGASSAIPMADKVGRRTPMSPHTPFLASLLSSPVFLFMGDFEFRLVWMFMSSSWLLGMNFCNSC

SEQ ID NO: 129579 - protein, 83 aa, Setaria italica
  Transcript Sequence Number=SeqID_63605
PVVLHFDRINHTFGPVRYLFKVLYICLVLFVSVNNFCGRNPNLHIQAAQKNMLSIKSKVTSTMYKNISSAEICALADCLRMQT

SEQ ID NO: 129580 - protein, 134 aa, Setaria italica
  misc_feature (98)..(98): Xaa can be any naturally occurring amino acid
  misc_feature (117)..(117): Xaa can be any naturally occurring amino acid
  misc_feature (128)..(128): Xaa can be any naturally occurring amino acid
  Transcript Sequence Number=SeqID_63606
LLGFGIGNEDSINQESSLIEPKKPKGEQVRGITGSALKVSPPFTPLTKVPKNSETKRDSNGASVDQNKKGGMDQTGSKKMSTEDCNRKEPQRPVNPFXKSSSSKEQSPSLLDSIKKXNVETEKVEKPXSKKVKV

SEQ ID NO: 129581 - protein, 61 aa, Setaria italica
  Transcript Sequence Number=SeqID_63607
ITHRKLSMACNSMSHCFLSPSLHISKFMGYIICHNQLAHANDQITSNKSEFQIILQISALT

SEQ ID NO: 129582 - protein, 63 aa, Setaria italica
  Transcript Sequence Number=SeqID_63608
RITRTSLPYKPRTIDNQWNGGSPWLVQGAYLPKLQLIHPCSYAVRCALQSSTSVNRPYYHGER

SEQ ID NO: 129583 - protein, 48 aa, Setaria italica
  misc_feature (7)..(7): Xaa can be any naturally occurring amino acid
  misc_feature (17)..(17): Xaa can be any naturally occurring amino acid
  Transcript Sequence Number=SeqID_63609
WGGGYNXGYGNGGGYGXGYGGGYGGGGGYGGGYGGGGYPGGGHHGGWN

SEQ ID NO: 129584 - protein, 123 aa, Setaria italica
  misc_feature (84)..(84): Xaa can be any naturally occurring amino acid
  misc_feature (106)..(106): Xaa can be any naturally occurring amino acid
  Transcript Sequence Number=SeqID_63610
  Gene Ontology: Mol. function=protein serine/threonine kinase activity; Cellular component=integral to membrane; Biological process=protein amino acid phosphorylation
  Homolog annotation: Hit_ID=Q6XAT2; Match level="QueryCoverage=98%, HitCoverage=30%, E-value=8e-41, Identity=55%"; Hit description =Leucine-rich repeat receptor-like protein kinase
  Pfam annotation: Domain name=LRR_1; Domain location=27-49; Score =16.4; E_value=0.12; Accession=PF00560.25; Description=Leucine Rich Repeat
  Pfam annotation: Domain name=LRR_1; Domain location=51-73; Score =10.9; E_value=2.5; Accession=PF00560.25; Description=Leucine Rich Repeat
  Pfam annotation: Domain name=LRR_1; Domain location=75-96; Score=7.1; E_value=13; Accession=PF00560.25; Description=Leucine Rich Repeat
  Pfam annotation: Domain name=LRR_1; Domain location=99-121; Score =8.5; E_value=7.1; Accession=PF00560.25; Description=Leucine Rich Repeat
  Pfam module annotation: Pfam domain module=LRR_1::LRR_1::LRR_1::LRR _1; Domain location=27-49::51-73::75-96::99-121
FLLVSLVFFKLNKLTGQIPDEIGDCVSLKYLDLSGNLLYGDIPFSISKLKQLEDLILKNNQLTGPIPSTLSQIPNLKTLDLAQXKLTGDIPRLIYWNEVLQYLGLXGNSLTGTLSPDMCQLTG

SEQ ID NO: 129585 - protein, 71 aa, Setaria italica
  Transcript Sequence Number=SeqID_63611
VYLSTGPIISTTGHALTSVWHQSSLTSSSDDGMLLHLTCDFVGHSHSPISVLMNLNKLTCLSCLCFYLPTL

SEQ ID NO: 129586 - protein, 69 aa, Setaria italica
  Transcript Sequence Number=SeqID_63612
  Gene Ontology: Mol. function=ATP-dependent helicase activity; Cellular component=nucleus; Biological process=mRNA processing
  Homolog annotation: Hit_ID=Q6K4U8; Match level="QueryCoverage=84%, HitCoverage=4%, E-value=3e-22, Identity=86%"; Hit description =Putative RNA helicase
SNQLLHLIDIRTGPETVIKYMTDGMLLREILVDRDLSSYSVVMLDEAHERTIYTDILFGLLKQLIRRRS

SEQ ID NO: 129587 - protein, 58 aa, Setaria italica
  Transcript Sequence Number=SeqID_63613
TPRQAHISSREQGGSRILHAMSSRWLKAEVYVNLFYKSSSCASLEVSWLFRSFIMIME

SEQ ID NO: 129588 - protein, 93 aa, Setaria italica
  misc_feature (51)..(51): Xaa can be any naturally occurring amino acid
  misc_feature (84)..(84): Xaa can be any naturally occurring amino acid
  Transcript Sequence Number=SeqID_63614
  Gene Ontology: Mol. function=ARF guanyl-nucleotide exchange factor activity; Cellular component=intracellular; Biological process =regulation of ARF protein signal transduction
  Homolog annotation: Hit_ID=B9S916; Match level="QueryCoverage=97%, HitCoverage=6%, E-value=8e-48, Identity=91%"; Hit description =Pattern formation protein, putative
  Pfam annotation: Domain name=Sec7; Domain location=10-93; Score= -41.3; E_value=3.1e-05; Accession=PF01369.12; Description=Sec7 domain
RHWVKFVRQRKYVKRRLMIGADHFNRDPKKGLEFLQGTHLLPEKLDPQSVXCFFRYTAGLDKNLVGDFLGNHDEFCVQVLHEFXQTFDFQEMK

SEQ ID NO: 129589 - protein, 47 aa, Setaria italica
  Transcript Sequence Number=SeqID_63615
FGTQRTSAMLYHIKYIYFTSIDVFNMIEHCRSLLVHRGLLQCSIILI

SEQ ID NO: 129590 - protein, 63 aa, Setaria italica
  Transcript Sequence Number=SeqID_63616
  Gene Ontology: Mol. function=transferase activity, transferring nitrogenous groups; Biological process=biosynthetic process
  Homolog annotation: Hit_ID=B6TK79; Match level="QueryCoverage=50%, HitCoverage=6%, E-value=4e-11, Identity=93%"; Hit description =Aspartate aminotransferase
MWFFNQVMICCYIFLDECYDISFFFMFYLMKIYEHIIYQPAKLTSFASLPGMWERTLTVNGFF

SEQ ID NO: 129591 - protein, 64 aa, Setaria italica
  Transcript Sequence Number=SeqID_63617
  Gene Ontology: Mol. function=metal ion binding; Cellular component =integral to membrane; Biological process=ubiquitin-dependent protein catabolic process
  Homolog annotation: Hit_ID=B6TT13; Match level="QueryCoverage=65%, HitCoverage=18%, E-value=1e-15, Identity=85%"; Hit description=RING -H2 finger protein ATL1Q
  Pfam annotation: Domain name=zf-C3HC4; Domain location=26-60; Score =12.2; E_value=0.0041; Accession=PF00097.17; Description=Zinc finger, C3HC4 type (RING finger)
CKCGWHLLCAVLLINADLIASLLQDLVAGETARRLPNCSHTFHQPCVDKWLVDHGSCPVCRQQV

SEQ ID NO: 129592 - protein, 98 aa, Setaria italica
  Transcript Sequence Number=SeqID_63618
HCGLGMTAPESCPASATTNIYLYIWSISTVHVWTRKESTKNLGNKRWKDHITINVSRDRSSSPRKVQWSGSQGSPTSARGRGSPCSSSCQSRPLRVGA

SEQ ID NO: 129593 - protein, 38 aa, Setaria italica
  Transcript Sequence Number=SeqID_63619
FINSGQVINHGEEPSPEIQMSLMDYHIMFSNNFLIFFS

SEQ ID NO: 129594 - protein, 78 aa, Setaria italica
  misc_feature (14)..(14): Xaa can be any naturally occurring amino acid
  Transcript Sequence Number=SeqID_63620
TRSDFTHIVFHELXISISYGYWAMVGQPLLMSVSDIYLVSTSSYNLEFLLLTYTPHSFFTHSRATWVAHLVELLHIRR

SEQ ID NO: 129595 - protein, 130 aa, Setaria italica
  misc_feature (49)..(49): Xaa can be any naturally occurring amino acid
  Transcript Sequence Number=SeqID_63621
  Gene Ontology: Mol. function=aminoacyl-tRNA ligase activity; Cellular component=cytoplasm; Biological process=tRNA aminoacylation for protein translation
  Homolog annotation: Hit_ID=B6T638; Match level="QueryCoverage=56%, HitCoverage=19%, E-value=2e-23, Identity=65%"; Hit description =Tyrosyl-tRNA synthetase
MLCNIFLSTSVTIEIWELAASCCSLPDLYLGESLLAVFDSFTNGIVQYXTFNVLQFDINRKIIHAFCPPKLVEGNPCLEYIKYIILPWYGKFEVVRKIEDGGDKTFLSMEELTADYLSGALQPDDLKLAL

SEQ ID NO: 129596 - protein, 60 aa, Setaria italica
  Transcript Sequence Number=SeqID_63622
NKEISARTVAHLCDSAHNIMKDLHDSTFYSRKRFLLCDTLNYAKKIFSPLVFSSEPTEIL

SEQ ID NO: 129597 - protein, 85 aa, Setaria italica
  Transcript Sequence Number=SeqID_63623
  Gene Ontology: Mol. function=3-oxoacyl-[acyl-carrier-protein] reductase activity; Cellular component=chloroplast; Biological process=fatty acid biosynthetic process
  Homolog annotation: Hit_ID=B6T8A3; Match level="QueryCoverage=92%, HitCoverage=25%, E-value=5e-36, Identity=96%"; Hit description=3 -oxoacyl-reductase
CVYFYCKMQGRIINIASVVGLTGNVGQANYSAAKAGVIGFTKTVAREYASRNINVNAIAPGFIASDMTAELGEELEKKILSTIPL

SEQ ID NO: 129598 - protein, 54 aa, Setaria italica
  Transcript Sequence Number=SeqID_63624
  Gene Ontology: Mol. function=3-oxoacyl-[acyl-carrier-protein] reductase activity; Cellular component=chloroplast; Biological process=fatty acid biosynthetic process
  Homolog annotation: Hit_ID=B6T8A3; Match level="QueryCoverage=87%, HitCoverage=14%, E-value=6e-19, Identity=100%"; Hit description=3 -oxoacyl-reductase
GLTGNVGQANYSAAKAGVIGFTKTVAREYASRNINVNAIAPGFIASDNRTRPKT

SEQ ID NO: 129599 - protein, 95 aa, Setaria italica
  Transcript Sequence Number=SeqID_63625
EPLQYRTTLRTSIAYVALILLFRCLHLLERAGPGHRGGQGIKLAVWGLSTLLTLMFSSKVADIMPLWAQLLVWAMGIFTIVAGFYAFFLARPDAP

SEQ ID NO: 129600 - protein, 72 aa, Setaria italica
  Transcript Sequence Number=SeqID_63626
LHLLERAGPGHRGGQGIKLAVWGLSTLLTLMFSSKVADIMPLWAQLLVWAMGIFTIVAGFYAFFLARPERQP

SEQ ID NO: 129601 - protein, 53 aa, Setaria italica
  Transcript Sequence Number=SeqID_63627
  Gene Ontology: Cellular component=chloroplast
MCQTLIYGYCNSVLQGKRIENGIYLGPIGCLTFEGRLSWKKKILAFIFERVRN

SEQ ID NO: 129602 - protein, 133 aa, Setaria italica
  Transcript Sequence Number=SeqID_63628
  Gene Ontology: Mol. function=metal ion binding
  Homolog annotation: Hit_ID=B6T239; Match level="QueryCoverage=91%, HitCoverage=23%, E-value=4e-41, Identity=76%"; Hit description=RING -H2 finger protein ATL2C
  Subcellular localization annotation: CTP_CleavageSite=72; ConfidenceScore=5.14e-01
GLSVGLLYVVRPKQQQPSKASVDKRESFSISKIWMRGGPRRKDVSSGGAIAAGSCSNSRRVSSFRLSSALQRAASDVGVAAAVPKRRADVVSPVTESEYNVSTWDKSASGSVVDWDLESAGGGHSLSSRADEA

SEQ ID NO: 129603 - protein, 44 aa, Setaria italica
  Transcript Sequence Number=SeqID_63629
LRSNIPCLHALECHLYIHLNPWDVWTGLYMHLSSCVISLLVKLN

SEQ ID NO: 129604 - protein, 63 aa, Setaria italica
  Transcript Sequence Number=SeqID_63630
RAGTSHLNGLVSSILGAVASSSQIKMLEVYWTDPMRKEQHQSPPCSCQCGCVLLSFRCWRGTS

SEQ ID NO: 129605 - protein, 84 aa, Setaria italica
  Transcript Sequence Number=SeqID_63631
  Homolog annotation: Hit_ID=B6TMF2; Match level="QueryCoverage=55%, HitCoverage=26%, E-value=5e-18, Identity=91%"; Hit description =Transmembrane protein 18
MAEEAAAAGSSVVGRAVEEVRSALNEHADVVAELFGRVSSELRTGFAPAVDSFIGFFHAVDWKVPPTHSLTNSSIYPSIMRAWI

SEQ ID NO: 129606 - protein, 56 aa, Setaria italica
  misc_feature (36)..(36): Xaa can be any naturally occurring amino acid
  Transcript Sequence Number=SeqID_63632
  Gene Ontology: Mol. function=hydrolase activity, hydrolyzing O -glycosyl compounds; Biological process=carbohydrate metabolic process
  Homolog annotation: Hit_ID=B9SGZ4; Match level="QueryCoverage=92%, HitCoverage=11%, E-value=2e-10, Identity=61%"; Hit description =Glucan endo-1,3-beta-glucosidase, putative
  Pfam annotation: Domain name=X8; Domain location=1-53; Score=12.2; E _value=2.3e-06; Accession=PF07983.5; Description=X8 domain
GSCFYPDNIASHASYAFNSYWQKNEADWLGGCNFGXGTALLINSDPSYLQCRFMLS

SEQ ID NO: 129607 - protein, 70 aa, Setaria italica
  Transcript Sequence Number=SeqID_63633
  Gene Ontology: Mol. function=hydrolase activity
  Homolog annotation: Hit_ID=B6T0Y0; Match level="QueryCoverage=80%, HitCoverage=13%, E-value=8e-14, Identity=69%"; Hit description =Ser/Thr protein phosphatase family
IPCVPCLSPVACLRVGAGEGPGVDALVVAGDVAETRDNFARTMEVLRDRFGAVFYVPGNHDLWLRREGGR

SEQ ID NO: 129608 - protein, 145 aa, Setaria italica
  Transcript Sequence Number=SeqID_63634
  Gene Ontology: Cellular component=ribonucleoprotein complex; Biological process=ribosome biogenesis
  Homolog annotation: Hit_ID=B6TTU7; Match level="QueryCoverage=95%, HitCoverage=30%, E-value=1e-75, Identity=95%"; Hit description =Protein SOF1
  Pfam annotation: Domain name=WD40; Domain location=100-138; Score =39.0; E_value=1.9e-08; Accession=PF00400.24; Description=WD domain, G-beta repeat
  Pfam annotation: Domain name=WD40; Domain location=14-53; Score=26.1; E_value=0.00014; Accession=PF00400.24; Description=WD domain, G-beta repeat
  Pfam module annotation: Pfam domain module=WD40::WD40; Domain location=100-138::14-53
VDYKVRIIWDPNRSEPVNSFEWGKDTVLSVRFDPGDCNILITSASDRSLTLYDLRMSSPARKLIMKTRCNSVCWNPREPMNFTAANEDTNCYSFDARRLEEAKIVHKGHVSAVMDIDYSPTGREFVTGSYDRTVRIFNYLGDHSR

SEQ ID NO: 129609 - protein, 137 aa, Setaria italica
  Transcript Sequence Number=SeqID_63635
  Gene Ontology: Mol. function=nucleic acid binding; Cellular component= cytoplasm; Biological process=multicellular organismal development
  Homolog annotation: Hit_ID=Q6K972; Match level="QueryCoverage=84%, HitCoverage=11%, E-value=4e-61, Identity=93%"; Hit description =Protein argonaute 1C
  Pfam annotation: Domain name=Piwi; Domain location=3-137; Score= -70.3; E_value=8e-05; Accession=PF02171.9; Description=Piwi domain
LWPILGGHEQQQLRDCCALQDEDLYKVWQDPQRGTVSGGMIRDLLISFKKSTGEKPQRIIFYRDGVSEGQFYQVLLYELHAIRKACASLEANYQPKVTFVVVQKRHHTRLFAHNHNDQNSIDRSGNILPGTVVDSKI

SEQ ID NO: 129610 - protein, 116 aa, Setaria italica
  misc_feature (29)..(29): Xaa can be any naturally occurring amino acid
  misc_feature (57)..(57): Xaa can be any naturally occurring amino acid
  Transcript Sequence Number=SeqID_63636
  Gene Ontology: Mol. function=nucleic acid binding; Cellular component= cytoplasm; Biological process=multicellular organismal development
  Homolog annotation: Hit_ID=Q6K972; Match level="QueryCoverage=73%, HitCoverage=8%, E-value=3e-37, Identity=88%"; Hit description =Protein argonaute 1C
RRNVQESVVRGFCHELALMCQASGMDFLXEPVLPPLYARPDQVERALKARYHDAMNXLGPQRRELDLLIGILPDNNGSLYGTWTAVLLASCLWILIIIVVHVRSLPSLLVSLPDAR

SEQ ID NO: 129611 - protein, 70 aa, Setaria italica
  Transcript Sequence Number=SeqID_63637
  Gene Ontology: Mol. function=nucleic acid binding; Cellular component= cytoplasm; Biological process=multicellular organismal development
  Homolog annotation: Hit_ID=Q6K972; Match level="QueryCoverage=81%, HitCoverage=5%, E-value=7e-30, Identity=98%"; Hit description =Protein argonaute 1C
EKDCLPRVGQWNMMNKKMVNGGKVRSWICVNFARNVQESVVRGFCHELALMCQASGMASILDTSPAKLPY

SEQ ID NO: 129612 - protein, 71 aa, Setaria italica
  Transcript Sequence Number=SeqID_63638
  Gene Ontology: Mol. function=nucleic acid binding; Cellular component= cytoplasm; Biological process=multicellular organismal development
  Homolog annotation: Hit_ID=A1E5M2; Match level="QueryCoverage=71%, HitCoverage=4%, E-value=1e-20, Identity=92%"; Hit description =Argonaute 2
MAAQVEVKLSRMADLRIYNLCYTYARCTRSVSIVPPAYYAHLAAFRARFYMEPETSDSGSVASGPAGRGQQ

SEQ ID NO: 129613 - protein, 37 aa, Setaria italica
  Transcript Sequence Number=SeqID_63639
KNKEPSMAAQVEVKLSRMADLRIYNLCLHLCKVHTLC

SEQ ID NO: 129614 - protein, 57 aa, Setaria italica
  Transcript Sequence Number=SeqID_63640
LPKNNLSKGQPYQLDLQNNLTSDSSLNYKDIKMYKGKHFGMMYFSLKLNSSEHPDKE

SEQ ID NO: 129615 - protein, 109 aa, Setaria italica
  Transcript Sequence Number=SeqID_63641
  Gene Ontology: Mol. function=protein tyrosine phosphatase activity; Biological process=dephosphorylation
  Homolog annotation: Hit_ID=B9RYC0; Match level="QueryCoverage=79%, HitCoverage=13%, E-value=6e-13, Identity=51%"; Hit description =Phosphoprotein phosphatase, putative
NLPVDHETMMENRVTLNPTDLDDFDKRKLPSPGFQVEVVLVDYDGSQAPKPKPAAGSDNKTDADSSGSTVAKESNAAPPESNKGTGSNDKDEVFSDSEGEDGSSKGRKE

SEQ ID NO: 129616 - protein, 61 aa, Setaria italica
  Transcript Sequence Number=SeqID_63642
  Subcellular localization annotation: CTP_CleavageSite=48; ConfidenceScore=5.25e-01
ATPPVTTVDPVRPAASTDSSSQVAGVDPAVISAPTAAPAKDAAGREAPASMFSTSGLSSWD

SEQ ID NO: 129617 - protein, 121 aa, Setaria italica
  Transcript Sequence Number=SeqID_63643
  Gene Ontology: Mol. function=protein tyrosine phosphatase activity; Biological process=dephosphorylation
  Homolog annotation: Hit_ID=B9RYC0; Match level="QueryCoverage=99%, HitCoverage=19%, E-value=6e-45, Identity=71%"; Hit description =Phosphoprotein phosphatase, putative
  Pfam annotation: Domain name=PTEN_C2; Domain location=5-96; Score =33.4; E_value=9.1e-07; Accession=PF10409.1; Description=C2 domain of PTEN tumour-suppressor pr
LSPLKHPRTKELMPEDFWFSAPKKGIMVFALPGEPGLAEVSGDFKIQFHDRQGDFYCWLNTTMMENRVTLNPTDLDDFDKRKLPSPGFQVEVVLVDYDGSQAPKPKPAAGSDNKTDADSSG

SEQ ID NO: 129618 - protein, 81 aa, Setaria italica
  misc_feature (36)..(36): Xaa can be any naturally occurring amino acid
  Transcript Sequence Number=SeqID_63644
  Gene Ontology: Mol. function=protein tyrosine phosphatase activity; Biological process=dephosphorylation
  Homolog annotation: Hit_ID=B9RYC0; Match level="QueryCoverage=92%, HitCoverage=15%, E-value=1e-32, Identity=67%"; Hit description =Phosphoprotein phosphatase, putative
SRSSILFLPTAEESIEYYNQKRCVDGKGLILPSQIXCMLRGFRLHRCPYWIRPSITVSNHNGVLFSTKKHPRTKELMPEDF

SEQ ID NO: 129619 - protein, 61 aa, Setaria italica
  Transcript Sequence Number=SeqID_63645
  Gene Ontology: Mol. function=protein tyrosine phosphatase activity; Biological process=dephosphorylation
  Homolog annotation: Hit_ID=Q8GZT8; Match level="QueryCoverage=72%, HitCoverage=7%, E-value=2e-19, Identity=88%"; Hit description=PTEN -like protein
PPRRCMLRGFRLHRCPYWIRPSITVSNHNGVLFSTKKHPRTKELMFAMEYSSSSYYGFFMA

SEQ ID NO: 129620 - protein, 64 aa, Setaria italica
  Transcript Sequence Number=SeqID_63646
  Gene Ontology: Cellular component=cell wall
  Homolog annotation: Hit_ID=O82161; Match level="QueryCoverage=78%, HitCoverage=15%, E-value=1e-16, Identity=80%"; Hit description=Phi-1 protein
RRAAACAGVYGRGAYPGYAGELLVDKATGASYNANGARGRKYLLPALYDPDTGDAQAHRHFIFH

SEQ ID NO: 129621 - protein, 96 aa, Setaria italica
  misc_feature (54)..(54): Xaa can be any naturally occurring amino acid
  Transcript Sequence Number=SeqID_63647
MMGLTGDWAFGLEPWTSPALEDLLPELSREEQLRLQSHLREHERILKRWKKNSXPICTFPDLRRREGFDAVKPLMGASVRFKGQLWFHVNFWARCR

SEQ ID NO: 129622 - protein, 41 aa, Setaria italica
  Transcript Sequence Number=SeqID_63648
  Homolog annotation: Hit_ID=Q53PZ5; Match level="QueryCoverage=95%, HitCoverage=3%, E-value=2e-14, Identity=82%"; Hit description =Transposon protein, putative, unclassified, expressed
DVWCQSQAGQPFFYWLDVGEGKELDLPECPRAKLKERQIDN

SEQ ID NO: 129623 - protein, 44 aa, Setaria italica
  Transcript Sequence Number=SeqID_63649
EGKIIHKQSGEPLDTSQGPKGTKWIASSALLLDTLEGLAPFLLQ

SEQ ID NO: 129624 - protein, 56 aa, Setaria italica
  Transcript Sequence Number=SeqID_63650
MNLLWCRKGLSRYYEGKSQSFACMSEVRCLEDLRKKDNPYQQKIKSCKSYVALGRD

SEQ ID NO: 129625 - protein, 58 aa, Setaria italica
  Transcript Sequence Number=SeqID_63651
GLRRRGVRRRQGDHFPDSGAAGQGDQDHQRLFVPQPLRRMNSDSIYDMASMMSQLPAK

SEQ ID NO: 129626 - protein, 87 aa, Setaria italica
  Transcript Sequence Number=SeqID_63652
  Gene Ontology: Cellular component=mitochondrial respiratory chain
  Homolog annotation: Hit_ID=B9T595; Match level="QueryCoverage=100%, HitCoverage=83%, E-value=4e-33, Identity=73%"; Hit description=NADH -ubiquinone oxidoreductase 12 kDa subunit, mitochondrial, putative
NPKNPYGDPVAMLEYREHLVREKWIQIETAKIIRERLRWCYRIEGINHHQKCRHLVDQYLEATRGVGWGKDARPPEFHEPKKVAEAE

SEQ ID NO: 129627 - protein, 45 aa, Setaria italica
  Transcript Sequence Number=SeqID_63653
MVRKAKVEFDEQPPDNFDPKNPDDLGGLDLDPLLPHQVLPDRGHQ

SEQ ID NO: 129628 - protein, 55 aa, Setaria italica
  Transcript Sequence Number=SeqID_63654
YCSKPILEKVQAQECFLGQHYLKSISSFRCKRTAAVPSYSFSWTTLFEVYQQLQM

SEQ ID NO: 129629 - protein, 58 aa, Setaria italica
  Transcript Sequence Number=SeqID_63655
TSAITHRNRGPFLAVGPAGFQDPGPAQVDCLFCCTCTQKHFFSVGAACIYQVASFFGE

SEQ ID NO: 129630 - protein, 42 aa, Setaria italica
  Transcript Sequence Number=SeqID_63656
  Gene Ontology: Mol. function=actin binding; Cellular component =cytoskeleton; Biological process=regulation of actin filament polymerization
  Homolog annotation: Hit_ID=B6TA39; Match level="QueryCoverage=92%, HitCoverage=10%, E-value=7e-13, Identity=84%"; Hit description=Actin- related protein 2/3 complex subunit 1B
HYRTCIVPLTKGRDGTIKRFSTSGLDGKIVVWDLENHITVAK

SEQ ID NO: 129631 - protein, 66 aa, Setaria italica
  Transcript Sequence Number=SeqID_63657
  Gene Ontology: Mol. function=actin binding; Cellular component =cytoskeleton; Biological process=regulation of actin filament polymerization
  Homolog annotation: Hit_ID=B6TA39; Match level="QueryCoverage=69%, HitCoverage=12%, E-value=4e-17, Identity=91%"; Hit description=Actin- related protein 2/3 complex subunit 1B
FFYWLGKLVLTQQIVTSLSEALGKLYGQSKQGTSSDTVEPSKPRGGAHENCITCIVPLNKRKGWYY

SEQ ID NO: 129632 - protein, 65 aa, Setaria italica
  Transcript Sequence Number=SeqID_63658
  Subcellular localization annotation: CTP_CleavageSite=59; ConfidenceScore=5.13e-01
YTSLLASIFLFIASPSFSVYHKCSIKISLHGFINCLRMNTVVWASAFLLPFKRIHCLLQAGSKRN

SEQ ID NO: 129633 - protein, 52 aa, Setaria italica
  Transcript Sequence Number=SeqID_63659
  Gene Ontology: Mol. function=nucleoside-triphosphatase activity; Cellular component=membrane
  Homolog annotation: Hit_ID=Q8GU82; Match level="QueryCoverage=100%, HitCoverage=3%, E-value=7e-12, Identity=65%"; Hit description=PDR -like ABC transporter
REIINFSSNLLGVNNEFDGSFELFSKATKLGEGSNLKTNYIIKILGLSDCAD

SEQ ID NO: 129634 - protein, 120 aa, Setaria italica
  Transcript Sequence Number=SeqID_63660
  Gene Ontology: Mol. function=chitinase activity; Cellular component =extracellular region; Biological process=cell wall catabolic process
  Homolog annotation: Hit_ID=O24007; Match level="QueryCoverage=85%, HitCoverage=60%, E-value=7e-44, Identity=80%"; Hit description =Chitinase (Fragment)
  Pfam annotation: Domain name=Glyco_hydro_19; Domain location=1-116; Score=73.4; E_value=8.6e-19; Accession=PF00182.11; Description =Chitinase class I
QTSHETNGGAAGQYTWGYCFKEEISKATSPPYYGRGPIQLTGQANYQQAGSAIGADLVGNPDLVSTDPVISFKTAIWFWMTAQSPKPSCHDVILGNWTPTSAVPSVLHHYRCAQPCCLLL

SEQ ID NO: 129635 - protein, 60 aa, Setaria italica
  Transcript Sequence Number=SeqID_63661
DVNTRVLFKKISYVRWIDHFDKQICVRPDGIYVLIAVCVYGSAIYFGLYYLPCQLDGSPS

SEQ ID NO: 129636 - protein, 86 aa, Setaria italica
  Transcript Sequence Number=SeqID_63662
  Gene Ontology: Mol. function=chitinase activity; Cellular component =vacuole; Biological process=cell wall catabolic process
  Homolog annotation: Hit_ID=O24007; Match level="QueryCoverage=88%, HitCoverage=43%, E-value=1e-27, Identity=75%"; Hit description =Chitinase (Fragment)
  Pfam annotation: Domain name=Glyco_hydro_19; Domain location=1-85; Score=-25.5; E_value=5.1e-07; Accession=PF00182.11; Description =Chitinase class I
VRSILGFLVLTAQSPKPSCHDVILGNWTPTSADTSAGRVPGYGVITNIINGGLECGMGPNDANVNRIGYYKHYCDMLGVGYGRTNL

SEQ ID NO: 129637 - protein, 75 aa, Setaria italica
  Transcript Sequence Number=SeqID_63663
  Gene Ontology: Mol. function=chitinase activity; Cellular component =extracellular region; Biological process=cell wall catabolic process
  Homolog annotation: Hit_ID=O04271; Match level="QueryCoverage=96%, HitCoverage=24%, E-value=1e-29, Identity=83%"; Hit description =Chitinase
  Pfam annotation: Domain name=Glyco_hydro_19; Domain location=1-75; Score=-55.7; E_value=4.9e-05; Accession=PF00182.11; Description =Chitinase class I
AGQYTWGYCFKEEISKATSPPYYGRGPIQLTGLMANYQQAGSAIGADLVGNPDLVSTDPVISFKTAIWFWMTAQS

SEQ ID NO: 129638 - protein, 122 aa, Setaria italica
  misc_feature (28)..(28): Xaa can be any naturally occurring amino acid
  Transcript Sequence Number=SeqID_63664
MCTGPMEPWGDAPKPRRRKQSDEEIARXLHRAMNSSPRISHTGPPKRPRGKAGDGKDGAAPGEGNREGRDDACNGSSTHAPIEAGGGLSNGCCEEKSSETTVPFVSKSIGGSLYCIGGDDPS

SEQ ID NO: 129639 - protein, 77 aa, Setaria italica
  Transcript Sequence Number=SeqID_63665
MLQRVEAMLLIMEFGTGNLSAARKVKIKRKELLLNQHNNKETEEPKETEPSVQPIGQDEPKDEWKMEQKKHGSPRQE

SEQ ID NO: 129640 - protein, 107 aa, Setaria italica
  misc_feature (81)..(81): Xaa can be any naturally occurring amino acid
  Transcript Sequence Number=SeqID_63666
  Gene Ontology: Mol. function=transposase activity; Biological process= transposition, DNA-mediated
DLTVMFGDIINDETDHWNPMTSNPIIPQNHDTPIDVDNDDGENLDGGRDDIHVSPTEEDNGGTAGSDIEEVSPSFDNGKRXSRVVIDKGKKAKTGTTLVIQEKLSEI

SEQ ID NO: 129641 - protein, 59 aa, Setaria italica
  Transcript Sequence Number=SeqID_63667
  Gene Ontology: Mol. function=electron carrier activity; Cellular component=chloroplast envelope
  Homolog annotation: Hit_ID=B9S1Y2; Match level="QueryCoverage=72%, HitCoverage=15%, E-value=5e-15, Identity=86%"; Hit description =Electron transporter, putative
MCVYVPPNLILSDIRGATDVDVKRLPKRPAPPRFGRKLTDAQKERATHICLDCGYIYFL

SEQ ID NO: 129642 - protein, 129 aa, Setaria italica
  misc_feature (119)..(119): Xaa can be any naturally occurring amino acid
  Transcript Sequence Number=SeqID_63668
  Gene Ontology: Mol. function=nucleic acid binding; Cellular component= nucleus; Biological process=mRNA processing
  Homolog annotation: Hit_ID=B9T4F5; Match level="QueryCoverage=92%, HitCoverage=24%, E-value=1e-24, Identity=49%"; Hit description =Polypyrimidine tract binding protein, putative
LTKAIFADVTTAAVAKQALEGHCIYDGGYCKLHLSYSRHTDLNVKAHDERSRDYTLSDPNAQLQAAAQAPAPGVAWQNTSAPAAPFYASTAASPPAGVGQVPAWNPNMQAGAFASASTXYPSQPMMANA

SEQ ID NO: 129643 - protein, 50 aa, Setaria italica
  Transcript Sequence Number=SeqID_63669
LIDFNILWTNNNEVGSISKTEYLLLFIQFDKSTLSQHCFPWSFLFSPWSN

SEQ ID NO: 129644 - protein, 66 aa, Setaria italica
  Transcript Sequence Number=SeqID_63670
  Gene Ontology: Mol. function=nucleic acid binding; Cellular component= nucleus; Biological process=mRNA processing
  Homolog annotation: Hit_ID=Q10KN7; Match level="QueryCoverage=72%, HitCoverage=15%, E-value=5e-17, Identity=87%"; Hit description =Polypyrimidine tract-binding protein, putative, expressed
SSIENMQYAVTVDVLHTVFSAFGTVQKIAMFEKNGGMQALIQYPGMLTQLHPTRYTLALVNSEIDS

SEQ ID NO: 129645 - protein, 29 aa, Setaria italica
  Transcript Sequence Number=SeqID_63671
GTSLFIQVTDERLNSKPLDHKYLYGAYFW

SEQ ID NO: 129646 - protein, 76 aa, Setaria italica
  Transcript Sequence Number=SeqID_63672
NRASSGSQQREVSGSLQWTRKKLAKGTGLSKKHDRLCNNRNSKQCPMLQYLITGVKRQGRKLTMESWAQPKCALIP

SEQ ID NO: 129647 - protein, 56 aa, Setaria italica
  Transcript Sequence Number=SeqID_63673
FFFFWFALVHVPATETSLHSVHYFRFLQVTAAEAWPIIGGSHSLSIALVARTAHDS

SEQ ID NO: 129648 - protein, 61 aa, Setaria italica
  Transcript Sequence Number=SeqID_63674
NSVVFLSYLVGINAVTAAYAVASILLSSFKSFARYDWLILVLDQVCLTQHLLCYFSLLRLT

SEQ ID NO: 129649 - protein, 71 aa, Setaria italica
  misc_feature (61)..(61): Xaa can be any naturally occurring amino acid
  misc_feature (65)..(65): Xaa can be any naturally occurring amino acid
  Transcript Sequence Number=SeqID_63675
  Gene Ontology: Mol. function=unfolded protein binding; Cellular component=chaperonin-containing T-complex; Biological process =cellular protein metabolic process
  Homolog annotation: Hit_ID=Q17P26; Match level="QueryCoverage=94%, HitCoverage=13%, E-value=5e-19, Identity=62%"; Hit description =Chaperonin
QTRRAATKYVESVIDEVLGSCEVFEEKQVGNERFNIFSGCPSGQTATIVLRGGADQFIEEXERSXHDAIMI

SEQ ID NO: 129650 - protein, 50 aa, Setaria italica
  Transcript Sequence Number=SeqID_63676
SHHQPRSPATTLSSKLIGGEKEFFASMVVDAVLAIGTFFIPIMLSLSSFP

SEQ ID NO: 129651 - protein, 49 aa, Setaria italica
  Transcript Sequence Number=SeqID_63677
PFELPYCPQPYNCELDCGGAKEFFASMVVDAVLAICNDDRLNLMVPPGT

SEQ ID NO: 129652 - protein, 76 aa, Setaria italica
  Transcript Sequence Number=SeqID_63678
  Gene Ontology: Mol. function=protein serine/threonine kinase activity; Biological process=protein amino acid phosphorylation
  Homolog annotation: Hit_ID=Q5KQI5; Match level="QueryCoverage=82%, HitCoverage=6%, E-value=1e-24, Identity=87%"; Hit description=Unkown protein
  Pfam annotation: Domain name=LRR_1; Domain location=34-55; Score=9.9; E_value=3.9; Accession=PF00560.25; Description=Leucine Rich Repeat
  Pfam annotation: Domain name=LRR_1; Domain location=57-76; Score=7.1; E_value=13; Accession=PF00560.25; Description=Leucine Rich Repeat
  Pfam module annotation: Pfam domain module=LRR_1::LRR_1; Domain location=34-55::57-76
  Subcellular localization annotation: CTP_CleavageSite=21; ConfidenceScore=5.31e-01
MYLFLTSYILVSSQADNNNFSGSSIPTTYSNISTLLKLSLRNCSLQGAIPDLSSIPQLGYLDISWNQLTGSIPTNK

SEQ ID NO: 129653 - protein, 44 aa, Setaria italica
  Transcript Sequence Number=SeqID_63679
SGSIPSELSRLPLLLHLLVDNNNLSGPLPPEFAKAPALKILCVT

SEQ ID NO: 129654 - protein, 57 aa, Setaria italica
  Transcript Sequence Number=SeqID_63680
KENGAMDPLTKPRDQAFQIPKDNLVPAINAQPDPLELKNDEDLTMSTTSSGSIEEAK

SEQ ID NO: 129655 - protein, 47 aa, Setaria italica
  Transcript Sequence Number=SeqID_63681
KPRDQAFQIPKDNLVPAINAQPDPLELKNDEDLTMSTTSSGSIEEAK

SEQ ID NO: 129656 - protein, 100 aa, Setaria italica
  Transcript Sequence Number=SeqID_63682
KIVTRSTSICTMRSLTQPQFVLLLDYRRHKKGGEKIADSNQKQLHLFFLLAFRAPAQIEWVSWPTLLKFSIAVVSRASQNYKRGLNGRNSLDGTSLNYAT

SEQ ID NO: 129657 - protein, 63 aa, Setaria italica
  Transcript Sequence Number=SeqID_63683
GLQPKAIAPFFLLAFRAPAQIEWVSWPTLLKFSIAVVSRASQNYKRGLNGRNSLDGTSLNYAT

SEQ ID NO: 129658 - protein, 41 aa, Setaria italica
  Transcript Sequence Number=SeqID_63684
LILNDDSLPNFLTVVDVIAMTMGFCSLFYSNLPSNFCLLKI

SEQ ID NO: 129659 - protein, 54 aa, Setaria italica
  Transcript Sequence Number=SeqID_63685
SALSYVQNSPFPDCMTDRLVHSMYVHLCVICYAAAKSQVSWCSNTSFLVLSLLL

SEQ ID NO: 129660 - protein, 49 aa, Setaria italica
  Transcript Sequence Number=SeqID_63686
NTEEDEQNIREQNGQIDAHNNQSYGHSQATMELTPGMAPDELMEACPAD

SEQ ID NO: 129661 - protein, 58 aa, Setaria italica
  Transcript Sequence Number=SeqID_63687
  Gene Ontology: Mol. function=RNA-directed DNA polymerase activity; Cellular component=chromatin; Biological process=chromatin assembly or disassembly
  Homolog annotation: Hit_ID=Q7Y006; Match level="QueryCoverage=100%, HitCoverage=5%, E-value=2e-19, Identity=70%"; Hit description =Putative polyprotein
ALQVAQVYMDNIYKLHGLPEAIITDRDKIFSSNVWQELFKLSDTQLLMSSSYHPQTDG

SEQ ID NO: 129662 - protein, 70 aa, Setaria italica
  Transcript Sequence Number=SeqID_63688
VLYRINVRGGWGFLDRVVSRIGGRPGIHFCSMPRCSLRFQEGNLLYMSYNHCNLDLFALEFHDSASWDAR

SEQ ID NO: 129663 - protein, 100 aa, Setaria italica
  Transcript Sequence Number=SeqID_63689
  Gene Ontology: Mol. function=nucleic acid binding; Cellular component= nucleus
  Homolog annotation: Hit_ID=Q0WVP4; Match level="QueryCoverage=82%, HitCoverage=14%, E-value=1e-13, Identity=39%"; Hit description=DNA -binding protein-like (Fragment)
VPGHFIHSCPNYGDTKYDSRRTSSLIPIISSSDNGIPAELARAMSSSVSDSLPAELHCPLCKKVMTDAMLTSKCCYDSFCDKSYLFSVIRHPGLHYCAIM

SEQ ID NO: 129664 - protein, 74 aa, Setaria italica
  Transcript Sequence Number=SeqID_63690
NIRKLFEFSRLLPQKGTAVYISYHLISAASITVLIDAASSSSASVNPLDFNVDSVTGLLDAIPSFSKTMGLKYK

SEQ ID NO: 129665 - protein, 109 aa, Setaria italica
  misc_feature (97)..(98): Xaa can be any naturally occurring amino acid
  Transcript Sequence Number=SeqID_63691
  Gene Ontology: Mol. function=ribonuclease inhibitor activity; Biological process=regulation of RNA metabolic process
  Homolog annotation: Hit_ID=B6T0A4; Match level="QueryCoverage=86%, HitCoverage=55%, E-value=2e-39, Identity=80%"; Hit description =Regulator of ribonuclease activity A
  Pfam annotation: Domain name=Methyltransf_6; Domain location=1-109; Score=36.7; E_value=1.3e-10; Accession=PF03737.7; Description =Demethylmenaquinone methyltransferase
DQQKLGAFRRFGRWDGEHEVFAGPIVTLKVYEDNVLIREFLEEKGHGRVLVVDGGGSMRCAILGGNPVQQAQNNGWAGIVVNGCIRDVDEINGCDIXXRALNSHPMKAN

SEQ ID NO: 129666 - protein, 93 aa, Setaria italica
  Transcript Sequence Number=SeqID_63692
  Subcellular localization annotation: CTP_CleavageSite=18; ConfidenceScore=5.24e-01
RGRRPLLLPLSPPGAAITAAPTRTLLAQSPSFLWSSFPGGDDWALCRRRAPTRYALPFPSLPAARNGDPRISYLYLDPTQLLCATAVLFAQIV

SEQ ID NO: 129667 - protein, 43 aa, Setaria italica
  Transcript Sequence Number=SeqID_63693
FERERWPENDDDDEGSSGGDTAESKAFWRTQHSQLHPGNIFWC

SEQ ID NO: 129668 - protein, 67 aa, Setaria italica
  Transcript Sequence Number=SeqID_63694
  Gene Ontology: Mol. function=microtubule motor activity; Cellular component=microtubule associated complex; Biological process =microtubule-based movement
  Homolog annotation: Hit_ID=UPI0000162DEC; Match level="QueryCoverage =95%, HitCoverage=5%, E-value=6e-26, Identity=83%"; Hit description =kinesin motor protein-related
TEVFSDIQPLIRSVLDGFNVCIFAYGQTGSGKTYTMSGPGTSKEDWGVNYRALNDLFEISLSRRNAF

SEQ ID NO: 129669 - protein, 75 aa, Setaria italica
  misc_feature (14)..(14): Xaa can be any naturally occurring amino acid
  Transcript Sequence Number=SeqID_63695
  Gene Ontology: Mol. function=microtubule motor activity; Cellular component=microtubule associated complex; Biological process =microtubule-based movement
  Homolog annotation: Hit_ID=Q93XF2; Match level="QueryCoverage=97%, HitCoverage=18%, E-value=3e-32, Identity=93%"; Hit description =Kinesin heavy chain (Fragment)
  Pfam annotation: Domain name=Kinesin; Domain location=1-70; Score= -174.2; E_value=0.00082; Accession=PF00225.15; Description=Kinesin motor domain
  Subcellular localization annotation: CTP_CleavageSite=30; ConfidenceScore=5.22e-01
SLSALGDVIFALAXKNAHVPYRNSKLTQVLQSSLGGQAKTLMFVQINPDTESYSETMSTLKFAERVSGVELGCLV

SEQ ID NO: 129670 - protein, 49 aa, Setaria italica
  Transcript Sequence Number=SeqID_63696
FMMHFDSYVICLNSNAMLNLLNYIPYNKTTRVQHNLSASYYRRMTLASQ

SEQ ID NO: 129671 - protein, 151 aa, Setaria italica
  misc_feature (137)..(137): Xaa can be any naturally occurring amino acid
  Transcript Sequence Number=SeqID_63697
  Gene Ontology: Mol. function=ribonuclease activity; Cellular component=nuclear exosome (RNase complex); Biological process =positive regulation of multicellular organism growth
  Homolog annotation: Hit_ID=B9S6W9; Match level="QueryCoverage=93%, HitCoverage=15%, E-value=1e-63, Identity=81%"; Hit description =Mitotic control protein dis3, putative
RLSKEHRGKCFNKLIRILATRCMTQAVYFCSGDLTFSEYYHYGLAASLYTHFTSPIRRYADVVVHRLLAAALEIAKLPPIFQDGPQLTGIADNLNYRHRNAQMASRASVELHTLIYFRTRPTDTEARIVKVKANGSXFVPKFGIEGPIHLT

SEQ ID NO: 129672 - protein, 69 aa, Setaria italica
  Transcript Sequence Number=SeqID_63698
  Homolog annotation: Hit_ID=B6TBV3; Match level="QueryCoverage=79%, HitCoverage=16%, E-value=6e-23, Identity=90%"; Hit description=PDE191
RDMGEVVDYPQFFRHGLKRSLEYRHKVLKQKNSSCSLSEMLDCNQKKFAMKFGWLQQFRSGNSRAASFA

SEQ ID NO: 129673 - protein, 129 aa, Setaria italica
  Transcript Sequence Number=SeqID_63699
  Gene Ontology: Mol. function=zinc ion binding; Cellular component =intracellular
  Homolog annotation: Hit_ID=B9RF68; Match level="QueryCoverage=61%, HitCoverage=3%, E-value=5e-28, Identity=72%"; Hit description=DNA polymerase
  Subcellular localization annotation: CTP_CleavageSite=31; ConfidenceScore=5.00e-01
MSKWTSNMVIPLRKSGLLILYFASNLQVCSSCNLRNACSRGYILTRKEDEARTLDVMRILLIYGFDHIKETVENKPLLKLKSLKTVVRKLIHEIVKLSAVPIDPNLPPPVIKKPPPKVKQPPPPPKKRV

SEQ ID NO: 129674 - protein, 121 aa, Setaria italica
  misc_feature (9)..(9): Xaa can be any naturally occurring amino acid
  misc_feature (33)..(33): Xaa can be any naturally occurring amino acid
  misc_feature (52)..(52): Xaa can be any naturally occurring amino acid
  misc_feature (58)..(58): Xaa can be any naturally occurring amino acid
  Transcript Sequence Number=SeqID_63700
  Gene Ontology: Mol. function=zinc ion binding; Cellular component =intracellular
  Homolog annotation: Hit_ID=B9RF68; Match level="QueryCoverage=99%, HitCoverage=5%, E-value=1e-42, Identity=67%"; Hit description=DNA polymerase
RDRFDILKXLPRKDLQILIGHGCPSMDAKAVFXAKLIRKLVHLDEGDVCSSXFRNACXRGYILTRKEDEARTLDVMRILLIYGFDHIKETVENKPLLKLKSLKTVVRKLIHEIVKLSAVPN

SEQ ID NO: 129675 - protein, 58 aa, Setaria italica
  Transcript Sequence Number=SeqID_63701
  Subcellular localization annotation: CTP_CleavageSite=52; ConfidenceScore=5.05e-01
MEGLSIQVTKNVVGEVKHEKYSKATRPPAPTPRRSSSTPRRRLQPSKTFHARTAHKEV

SEQ ID NO: 129676 - protein, 76 aa, Setaria italica
  Transcript Sequence Number=SeqID_63702
HSFKLARAVKLDQSTDAHDPPSSTRTGKDCPELLSEQMEGLSIQVTKNVVGEVKHEKYSKATRPRCGSSRCRSGRG

SEQ ID NO: 129677 - protein, 56 aa, Setaria italica
  Transcript Sequence Number=SeqID_63703
  Subcellular localization annotation: CTP_CleavageSite=42; ConfidenceScore=5.44e-01
MVQLSGPTWAVPLGRRDTRTASQASANSNLPSPSSSAATLVSAFASKGLDSRDLVA

SEQ ID NO: 129678 - protein, 62 aa, Setaria italica
  Transcript Sequence Number=SeqID_63704
HHHVNFSSIVSWHQILSISHTSTTSDGFTDCLKSVHKCTQDVRLSDKEYLLFREPKISPQVY

SEQ ID NO: 129679 - protein, 101 aa, Setaria italica
  misc_feature (31)..(31): Xaa can be any naturally occurring amino acid
  Transcript Sequence Number=SeqID_63705
QVGLQTTIGTKNSFYANSTHGWYVHCNIVLXFKPGPASSHASRAISWIYLFIMSHSPRPHASPSILCHQLIALHHWLPLVLVVNSVFLCNLSYLRLFLISF

SEQ ID NO: 129680 - protein, 81 aa, Setaria italica
  misc_feature (33)..(33): Xaa can be any naturally occurring amino acid
  Transcript Sequence Number=SeqID_63706
  Gene Ontology: Mol. function=catalytic activity; Cellular component =protein serine/threonine phosphatase complex; Biological process =protein amino acid dephosphorylation
  Homolog annotation: Hit_ID=Q9FQY2; Match level="QueryCoverage=100%, HitCoverage=28%, E-value=1e-34, Identity=74%"; Hit description =Protein phosphatase type-2C
NLSRAIGDMEFKQNKFLSPDKQILTANPDINIXQQLVDFIREHINNEESLSAVCERVLDRCLAPSTMGGEGCDNMTMILVQ

SEQ ID NO: 129681 - protein, 58 aa, Setaria italica
  Transcript Sequence Number=SeqID_63707
SCQRLIVHIEKKDAPDGFINEEDAHWSDEERGVQMPDVQEVYVSGNDDDNLGDIFDWY

SEQ ID NO: 129682 - protein, 103 aa, Setaria italica
  Transcript Sequence Number=SeqID_63708
  Gene Ontology: Mol. function=RNA-directed DNA polymerase activity; Cellular component=chromatin; Biological process=RNA-dependent DNA replication
  Homolog annotation: Hit_ID=Q7XW82; Match level="QueryCoverage=87%, HitCoverage=5%, E-value=2e-17, Identity=45%"; Hit description =OSJNBa0019J05.12 protein
QYKIVYKQGVSNRVADVLLRRPHYDHQLCVVSTCDPSWITVIVEGYNSDPSTLHILTKLAVSSNSVPHFSLQNGLLRFNGRLWIGTNKSLQPGADPERDCASG

SEQ ID NO: 129683 - protein, 48 aa, Setaria italica
  Transcript Sequence Number=SeqID_63709
GLHEEEKHAQEGICRAIQGRIQGPGCPGCSPGRDHGVPLTYVLFSLTK

SEQ ID NO: 129684 - protein, 83 aa, Setaria italica
  misc_feature (10)..(10): Xaa can be any naturally occurring amino acid
  Transcript Sequence Number=SeqID_63710
MGHIFKNVSXGKKPAALYKVKDSEVRSFIENCLAPAAERLSASELLRSSFLQNDSSLSSPPFSVSMVEIENVTRDGDQFDSFV

SEQ ID NO: 129685 - protein, 42 aa, Setaria italica
  Transcript Sequence Number=SeqID_63711
  Gene Ontology: Mol. function=DNA binding; Biological process =regulation of transcription
  Homolog annotation: Hit_ID=B6UC12; Match level="QueryCoverage=69%, HitCoverage=6%, E-value=5e-10, Identity=100%"; Hit description =ANAC075
NNNSVCIYPRSHPLIDEFIPTIDGEDGICYTHPEKLPGERAI

SEQ ID NO: 129686 - protein, 49 aa, Setaria italica
  Transcript Sequence Number=SeqID_63712
  Gene Ontology: Mol. function=DNA binding; Biological process =regulation of transcription
  Homolog annotation: Hit_ID=B6T7F9; Match level="QueryCoverage=85%, HitCoverage=13%, E-value=6e-12, Identity=82%"; Hit description =ANAC010
YTTGTRKRRKVHTDEQGGETRWHKTGKTRPVFTLVGAQVVLVHHPVGLL

SEQ ID NO: 129687 - protein, 134 aa, Setaria italica
  misc_feature (49)..(49): Xaa can be any naturally occurring amino acid
  Transcript Sequence Number=SeqID_63713
  Gene Ontology: Mol. function=microtubule motor activity; Cellular component=microtubule associated complex; Biological process =microtubule-based movement
  Homolog annotation: Hit_ID=Q2QMU6; Match level="QueryCoverage=73%, HitCoverage=3%, E-value=1e-26, Identity=62%"; Hit description =Kinesin motor domain containing protein, expressed
ELARYRVSNGKDPYEQIEEEELLRKKLDESEQDRSKLAENLSNLCTSIXKVAGVVNPEPDTSLLKALECLNQLQCRVPSLESEVEDLKLKCKLLREKARLSQLQSDSSSLSSGAKSGSTSTKVLKTRILPKTIY

SEQ ID NO: 129688 - protein, 50 aa, Setaria italica
  Transcript Sequence Number=SeqID_63714
FFFMIALNFIEYTQQMSQQVQYQQKEIAVPKWILIIPTTSLTVLGVGDDA

SEQ ID NO: 129689 - protein, 79 aa, Setaria italica
  Transcript Sequence Number=SeqID_63715
  Gene Ontology: Mol. function=pyridoxal phosphate binding
  Homolog annotation: Hit_ID=Q0KKQ1; Match level="QueryCoverage=54%, HitCoverage=2%, E-value=6e-14, Identity=79%"; Hit description=CGS1 mRNA stability 1
ETSATDLPADEGPEQASRSKWPEQSEELLGLIVNSLRALDSAVPHGCPEPRRRPQAVQKGHQKTGNLNEGSASDFLKMI

SEQ ID NO: 129690 - protein, 96 aa, Setaria italica
  misc_feature (71)..(71): Xaa can be any naturally occurring amino acid
  Transcript Sequence Number=SeqID_63716
  Gene Ontology: Mol. function=pyridoxal phosphate binding
  Homolog annotation: Hit_ID=Q0KKQ1; Match level="QueryCoverage=89%, HitCoverage=5%, E-value=6e-19, Identity=55%"; Hit description=CGS1 mRNA stability 1
VKNTILTKSQDAEPSLRLPVFGALSELEFESDIWKQASVHALELLSDSNDEPLVTAITYVLKAASHCQHLXLAVRAVRWRLKDLGTEVPDCVLDFL

SEQ ID NO: 129691 - protein, 117 aa, Setaria italica
  Transcript Sequence Number=SeqID_63717
  Gene Ontology: Mol. function=mismatched DNA binding; Biological process=mismatch repair
  Homolog annotation: Hit_ID=A4URL6; Match level="QueryCoverage=90%, HitCoverage=13%, E-value=1e-43, Identity=80%"; Hit description=MutS -like protein 5
  Pfam annotation: Domain name=MutS_V; Domain location=1-102; Score= -148.6; E_value=0.00036; Accession=PF00488.13; Description=MutS domain V
AHIGSFVPADSAIVGLTDRIFCAMGSKSMTTEQSTFMIDLHQVGTMLRHATLRSLCLLDEFGKGTLTEDGIGLLGGTISHFANCDFPPKVLLSTHLTEIFTGNYLPQVNGQYPFADA

SEQ ID NO: 129692 - protein, 58 aa, Setaria italica
  Transcript Sequence Number=SeqID_63718
GERWACQRTILSASKPSHSDVLPVGKFDGKVVSQQKKRKRATENLLVARAQSNSDVLL

SEQ ID NO: 129693 - protein, 69 aa, Setaria italica
  Transcript Sequence Number=SeqID_63719
MSYYGQQQPPVGVPPPQGPYLDRRLITSLVLHCSIHLTSASPLLDLAGYPGKDGYPPAGYPPAGYPPPA

SEQ ID NO: 129694 - protein, 32 aa, Setaria italica
  Transcript Sequence Number=SeqID_63720
TKDSTGDINFIIPLSTPNSYFFSLTLLLVLNF

SEQ ID NO: 129695 - protein, 60 aa, Setaria italica
  Transcript Sequence Number=SeqID_63721
ATVAEKVSSEVAEQLPEGGRLRTAAVIMEHASKEVAQEAHLAQDIIHKVDEIEEDVKAIH

SEQ ID NO: 129696 - protein, 66 aa, Setaria italica
  Transcript Sequence Number=SeqID_63722
VLCKVSLLGDFLGRVIMEHASKEVAQEAHLAQDIIHKVDEIEEDVKAIIEPIMDHSKHVHAKACHT

SEQ ID NO: 129697 - protein, 107 aa, Setaria italica
  misc_feature (77)..(77): Xaa can be any naturally occurring amino acid
  Transcript Sequence Number=SeqID_63723
  Subcellular localization annotation: CTP_CleavageSite=37; ConfidenceScore=5.47e-01
ATFERGKMVFLEDLSCSNGRTSPWTSPRASPTRPPCRRAARSASERGGALGVVLRICLVMRAFGLLPAFVSSDGFWXRRWIGHGPFGSGDGLLYVALILIVCCCFFN

SEQ ID NO: 129698 - protein, 74 aa, Setaria italica
  Transcript Sequence Number=SeqID_63724
SFLRLLLFARRREVVEDAGRRPEDDFAVRARLLEPSSIQVGGRRQLTSSVVISGTSNSLPLHLFSLQSKLGREG

SEQ ID NO: 129699 - protein, 91 aa, Setaria italica
  Transcript Sequence Number=SeqID_63725
AAGAPSEHAQISTQGSINQWTRKESSFGGRRKKSLHDGLPLIRRRSRITIHVVTILAPEENVSCNRKKVPGQEQQKRQQTYQNKKPGHRSR

SEQ ID NO: 129700 - protein, 69 aa, Setaria italica
  Transcript Sequence Number=SeqID_63726
  Gene Ontology: Mol. function=transcription regulator activity; Cellular component=nucleus; Biological process=regulation of transcription
  Homolog annotation: Hit_ID=Q10CH6; Match level="QueryCoverage=72%, HitCoverage=11%, E-value=7e-21, Identity=90%"; Hit description=Helix- loop-helix DNA-binding domain containing protein, expressed
MYLIVVNMFLFDILVEFIGCNNFQTDKASILDETIEYLKSLQMQVQIMWMTSGMAPMMFPGAHQFMPPM

SEQ ID NO: 129701 - protein, 48 aa, Setaria italica
  misc_feature (31)..(31): Xaa can be any naturally occurring amino acid
  Transcript Sequence Number=SeqID_63727
  Gene Ontology: Mol. function=transcription regulator activity; Cellular component=nucleus; Biological process=regulation of transcription
  Homolog annotation: Hit_ID=Q10CH6; Match level="QueryCoverage=81%, HitCoverage=9%, E-value=2e-10, Identity=82%"; Hit description=Helix -loop-helix DNA-binding domain containing protein, expressed
MDGNARPAANQRKPIVTDDDLVELLWHNGGXVAQPQAHQRPAPSERLD

SEQ ID NO: 129702 - protein, 62 aa, Setaria italica
  Transcript Sequence Number=SeqID_63728
  Gene Ontology: Mol. function=transferase activity; Cellular component= mitochondrion; Biological process=isoprenoid biosynthetic process
  Homolog annotation: Hit_ID=Q7XPX7; Match level="QueryCoverage=98%, HitCoverage=13%, E-value=1e-19, Identity=77%"; Hit description =OSJNBa0071I13.16 protein
IISPMTIAKTFQDDYLDCFANPNTIGKIGTDIEDHKCSWLIVQALGHANINQIEVLLVRNFL

SEQ ID NO: 129703 - protein, 113 aa, Setaria italica
  Transcript Sequence Number=SeqID_63729
  Gene Ontology: Mol. function=transferase activity; Cellular component= cytoplasm; Biological process=isoprenoid biosynthetic process
  Homolog annotation: Hit_ID=Q7XPX7; Match level="QueryCoverage=76%, HitCoverage=23%, E-value=2e-21, Identity=57%"; Hit description =OSJNBa0071I13.16 protein
KCSWLIVQALGHANINQIEVLLKNYGKKDSTSVSKVKSTYSTLDLKDMFSEFEDRAYNHLVTSIEAQHDRAAQEILKSFLKKIHRRKGRRVKSDSCGQQDSCSRQGDIFSPIL

SEQ ID NO: 129704 - protein, 29 aa, Setaria italica
  Transcript Sequence Number=SeqID_63730
LTNEGTGTPHRINHELYVCVLVHIHTVHD

SEQ ID NO: 129705 - protein, 47 aa, Setaria italica
  Transcript Sequence Number=SeqID_63731
SESIDREGDTMSGGGQDLQLPLIVSPSRSIDSLAAASLLLLLSLLFS

SEQ ID NO: 129706 - protein, 52 aa, Setaria italica
  Transcript Sequence Number=SeqID_63732
  Gene Ontology: Mol. function=DNA binding; Cellular component=nucleus; Biological process=regulation of transcription, DNA-dependent
  Homolog annotation: Hit_ID=A4HRC1; Match level="QueryCoverage=71%, HitCoverage=12%, E-value=4e-14, Identity=100%"; Hit description=NAC transcription factor
ISKKALVFYAGKAPKGEKTNWIMHEYRLADVDRSARKKNSLRVSISLLSSRR

SEQ ID NO: 129707 - protein, 80 aa, Setaria italica
  Transcript Sequence Number=SeqID_63733
KKTNNNALRLDDWVLCRIYNKKGVIERYDTVDDDEVAAAAADDVKPAAAKNPRGAAAPIEAEHPRGGRLVGSLVRSLVYL

SEQ ID NO: 129708 - protein, 58 aa, Setaria italica
  Transcript Sequence Number=SeqID_63734
  Subcellular localization annotation: CTP_CleavageSite=25; ConfidenceScore=5.15e-01
HSSLSAMITSHLPSLAPFPCGSFPRAMARSGAEIVCNCRSDHLNGELDTRPSCIRIRV

SEQ ID NO: 129709 - protein, 80 aa, Setaria italica
  Transcript Sequence Number=SeqID_63735
VISPADTELDDLDIDHGQWPGARMAAHASRSLIRSSERRPLQVREHVPEAAASTRAKSAGDGEPVLVHDPVGLDALGRFP

SEQ ID NO: 129710 - protein, 80 aa, Setaria italica
  Transcript Sequence Number=SeqID_63736
PIPCVPCIPCCVSQERYDTVDDDEVAAAAADDVKPAAAKNPRGAAAPMKVEMADYGGYYDDYDLETPSAGMLCFDRPSED

SEQ ID NO: 129711 - protein, 59 aa, Setaria italica
  misc_feature (46)..(46): Xaa can be any naturally occurring amino acid
  Transcript Sequence Number=SeqID_63737
  Gene Ontology: Cellular component=protein complex
  Homolog annotation: Hit_ID=Q8W425; Match level="QueryCoverage=100%, HitCoverage=14%, E-value=3e-25, Identity=93%"; Hit description=26S proteasome non-ATPase regulatory subunit 6
QVVDAPEILAVIGKVPHLSEFLNSLYNCQYKSFFVAFSGLAEQIKXLDRYLQPHFRYYM

SEQ ID NO: 129712 - protein, 53 aa, Setaria italica
  Transcript Sequence Number=SeqID_63738
  Subcellular localization annotation: CTP_CleavageSite=21; ConfidenceScore=5.05e-01
RSCNRNSNSYRSMTRESFCMRFSKKSPCLMVCPWLVKFLFSFSFLLFSFGFGF

SEQ ID NO: 129713 - protein, 71 aa, Setaria italica
  Transcript Sequence Number=SeqID_63739
  Gene Ontology: Mol. function=endopeptidase activity; Cellular component=protein complex; Biological process=cellular process
  Homolog annotation: Hit_ID=Q8W425; Match level="QueryCoverage=91%, HitCoverage=17%, E-value=2e-27, Identity=91%"; Hit description=26S proteasome non-ATPase regulatory subunit 6
RGFLITAYFSAGLTEQIKLDRYLQPHFRYYMREVRTVVYSQFLESYKSVTMEAMASAFGVTVDFIDQELSR

SEQ ID NO: 129714 - protein, 40 aa, Setaria italica
  Transcript Sequence Number=SeqID_63740
AAPSHGRYFCGQPWDTCTEFTLKTQVLLETCSRRKKSNAH

SEQ ID NO: 129715 - protein, 53 aa, Setaria italica
  Transcript Sequence Number=SeqID_63741
  Homolog annotation: Hit_ID=B6U4F2; Match level="QueryCoverage=88%, HitCoverage=7%, E-value=7e-15, Identity=85%"; Hit description=Signal recognition particle 68 kDa protein
QQELPQLQQLANSPDKALIQDLKSLSDNCRSNSCIEHATGIMEEESVPLKLSK

SEQ ID NO: 129716 - protein, 63 aa, Setaria italica
  Transcript Sequence Number=SeqID_63742
FLLSDANKQRNCTLAYTIFIWKSSSLNTLKGNMYTTRLCVTKSPIRHRHVTIKAKNNNPEGDE

SEQ ID NO: 129717 - protein, 83 aa, Setaria italica
  Transcript Sequence Number=SeqID_63743
  Homolog annotation: Hit_ID=B6U9Z7; Match level="QueryCoverage=42%, HitCoverage=5%, E-value=5e-12, Identity=94%"; Hit description=EMB2219
MVVRFFSYSLEDRIEPRHQTLVANRINMKLRYMLTGSDEEFAERVREAVERRARFEAGKGVAETIPDARETSEEEETTEAAAC

SEQ ID NO: 129718 - protein, 44 aa, Setaria italica
  Transcript Sequence Number=SeqID_63744
  Gene Ontology: Mol. function=binding
DLLLGVTLSNQARSAISATDRASWQCEALEMLGNAEKKIHGKDS

SEQ ID NO: 129719 - protein, 81 aa, Setaria italica
  Transcript Sequence Number=SeqID_63745
  Gene Ontology: Mol. function=oxidoreductase activity; Biological process=oxidation reduction
  Homolog annotation: Hit_ID=B6SZK3; Match level="QueryCoverage=69%, HitCoverage=15%, E-value=3e-20, Identity=76%"; Hit description =NAD(P)H-dependent oxidoreductase
RRLLTRWRDLREGEQVLELLHAKIPPAANQVEVNPCCRQNKLREFCRARGIQLCGYAALGGNGTPWANNSVMKCPVLGDLL

SEQ ID NO: 129720 - protein, 50 aa, Setaria italica
  Transcript Sequence Number=SeqID_63746
ESDTQRQKNGAIIIAVYPILNRSTRGNCQNRIHSNYDRPILLTVTPGRSV

SEQ ID NO: 129721 - protein, 46 aa, Setaria italica
  Transcript Sequence Number=SeqID_63747
  Gene Ontology: Mol. function=mannosyl-oligosaccharide glucosidase activity; Biological process=oligosaccharide metabolic process
  Homolog annotation: Hit_ID=Q8RZJ2; Match level="QueryCoverage=76%, HitCoverage=3%, E-value=5e-12, Identity=88%"; Hit description =Putative alpha-glucosidase 1
GFFWENYDQNNKGKGKGARSFTGWTSLLVLIMPASPFQLPCVFCGC

SEQ ID NO: 129722 - protein, 48 aa, Setaria italica
  Transcript Sequence Number=SeqID_63748
SKIIVGHAITLSHWMMACPTMRQGDNQSPTSIYWLGTDYHPVSLDVDQ

SEQ ID NO: 129723 - protein, 51 aa, Setaria italica
  Transcript Sequence Number=SeqID_63749
CCWKCKRVKCFQASLNGVNQIYSLLAAQNKVEFFGLPIAQVQPSVIQHGEA

SEQ ID NO: 129724 - protein, 122 aa, Setaria italica
  misc_feature (66)..(66): Xaa can be any naturally occurring amino acid
  Transcript Sequence Number=SeqID_63750
  Gene Ontology: Mol. function=aspartic-type endopeptidase activity; Cellular component=chromatin; Biological process=chromatin assembly or disassembly
  Homolog annotation: Hit_ID=Q2QLN6; Match level="QueryCoverage=88%, HitCoverage=8%, E-value=5e-21, Identity=42%"; Hit description =Retrotransposon protein, putative, unclassified
  Pfam annotation: Domain name=Chromo; Domain location=37-92; Score =30.8; E_value=5.5e-06; Accession=PF00385.16; Description='chromo' (CHRromatin Organisation MOdifier)
QTRNCHSIFGPFKILSKIGPVAYKLDLPASASIHPVFHVSQLKKALPSTHQGFSSVQQVLIKWSGXPESLATWEDMEALHQRFPAAPAWGQVGSLQGRGECQCTFCQASSKGDGKGSWASPF

SEQ ID NO: 129725 - protein, 76 aa, Setaria italica
  misc_feature (37)..(37): Xaa can be any naturally occurring amino acid
  Transcript Sequence Number=SeqID_63751
  Gene Ontology: Mol. function=RNA-directed DNA polymerase activity; Cellular component=chromatin; Biological process=chromatin assembly or disassembly
  Pfam annotation: Domain name=Chromo; Domain location=7-63; Score =33.9; E_value=6.7e-07; Accession=PF00385.16; Description='chromo' (CHRromatin Organisation MOdifier)
FLYPVSFSIVSQLKKALPSTHQGFSSVQQVLIKWSGXPESLATWEDMEALHQRFPAAPAWGQVGSLQGEGGVSVHL

SEQ ID NO: 129726 - protein, 46 aa, Setaria italica
  Transcript Sequence Number=SeqID_63752
FLFSLGYYYLIILLLPTVQSTGPDMLITKIITRVLINQSLGDPRPN

SEQ ID NO: 129727 - protein, 54 aa, Setaria italica
  Transcript Sequence Number=SeqID_63753
LPCTLGPVALMPMAPECCIDLSVISGSTYIKGVFGFQLNFSSCYIECLILIRSI

SEQ ID NO: 129728 - protein, 67 aa, Setaria italica
  Transcript Sequence Number=SeqID_63754
  Gene Ontology: Mol. function=transferase activity, transferring hexosyl groups; Cellular component=plasma membrane; Biological process=carbohydrate metabolic process
  Homolog annotation: Hit_ID=Q8H5W0; Match level="QueryCoverage=100%, HitCoverage=11%, E-value=2e-26, Identity=86%"; Hit description =Putative UDP-glucose:sterol glucosyltransferase
  Pfam annotation: Domain name=Glyco_transf_28; Domain location=1-67; Score=-11.4; E_value=0.031; Accession=PF03033.12; Description =Glycosyltransferase family 28 N-terminal domain
QPFIAIGKRLQDYGHRVRLATHANFKDFVMTTGLEFYPLGGDPKVLAGLQDMVKNKGFLPATPSEIP

SEQ ID NO: 129729 - protein, 43 aa, Setaria italica
  Transcript Sequence Number=SeqID_63755
IKDDKTGATYTVNSHDISSGWRFYWHRSLVLLLVTVVCSHLIC

SEQ ID NO: 129730 - protein, 63 aa, Setaria italica
  Transcript Sequence Number=SeqID_63756
  Gene Ontology: Mol. function=aspartic-type endopeptidase activity; Biological process=proteolysis
  Homolog annotation: Hit_ID=Q01KZ0; Match level="QueryCoverage=76%, HitCoverage=9%, E-value=3e-15, Identity=75%"; Hit description =OSIGBa0137O04.7 protein
LSPVCLAYLLLRVSVLCFQYSGSVDDGFPTITFHFEDDLALHVYPHEYFFANGNDVYCVGFQN

SEQ ID NO: 129731 - protein, 59 aa, Setaria italica
  Transcript Sequence Number=SeqID_63757
LHSDYLHHLKHYLYSFDSHCRDGSTGQAFQRTCRGLRSLRATPAVISMRAVEVPDEPRG

SEQ ID NO: 129732 - protein, 105 aa, Setaria italica
  Transcript Sequence Number=SeqID_63758
  Gene Ontology: Mol. function=transferase activity, transferring glycosyl groups; Cellular component=integral to membrane; Biological process=cellulose biosynthetic process
  Homolog annotation: Hit_ID=Q9LHZ7; Match level="QueryCoverage=95%, HitCoverage=8%, E-value=2e-40, Identity=78%"; Hit description =Cellulose synthase-like protein D2
LVNSFFLPVNNALLASRKMKFLQRIAYLNVGIYPFTSIFLIVYCFLPALSLFSGQFIVKTLNVAFLTYLLVITLTLCLLAVLEIKWSGISLEEWWRNEQFWLIGG

SEQ ID NO: 129733 - protein, 69 aa, Setaria italica
  Transcript Sequence Number=SeqID_63759
  Gene Ontology: Mol. function=transferase activity, transferring glycosyl groups; Cellular component=integral to membrane; Biological process=cell wall organization and biogenesis
  Homolog annotation: Hit_ID=B9IPJ4; Match level="QueryCoverage=84%, HitCoverage=5%, E-value=5e-27, Identity=94%"; Hit description =Cellulose synthase-like protein
WPQQLWRHQEGPGALTVPRDLLDASTVAEAISVISCWYEDKTEWGHRVGWIYGSVTEDVVTGYRMHNRG

SEQ ID NO: 129734 - protein, 130 aa, Setaria italica
  Transcript Sequence Number=SeqID_63760
  Gene Ontology: Cellular component=plasma membrane
  Homolog annotation: Hit_ID=Q75HX5; Match level="QueryCoverage=91%, HitCoverage=26%, E-value=2e-58, Identity=89%"; Hit description=Tubby- like F-box protein 8
  Pfam annotation: Domain name=Tub; Domain location=1-129; Score=29.3; E_value=6.6e-12; Accession=PF01167.10; Description=Tub family
RKTTCTEYVILRFLLADKRNRKTTCTEYVISMDADNISRSSSTYIGKLRSNFLGTKFMIYDTQPPYNGAVVPHAGRTSRRFNSKKVSPKVPTGSYNIAQVTYELNVLGTRGPRRMHCVMHSIPASAVEPG

SEQ ID NO: 129735 - protein, 70 aa, Setaria italica
  Transcript Sequence Number=SeqID_63761
  Gene Ontology: Cellular component=chloroplast
CLSTMVPSRGQAALLTFCTCISLGSVGLVLSIAVPEGGNNWFWLMTLSPLAYVSATLSSQQFRMKLPVQI

SEQ ID NO: 129736 - protein, 62 aa, Setaria italica
  Transcript Sequence Number=SeqID_63762
  Gene Ontology: Cellular component=chloroplast
CSRGVYYWTKASRKEEIKVKMILSDDGNVSEILVQGDDVQVEQMRKELKFSEKGMIYVKGIL

SEQ ID NO: 129737 - protein, 80 aa, Setaria italica
  Transcript Sequence Number=SeqID_63763
  Gene Ontology: Cellular component=chloroplast
VVSRRGGGEARARSLGVAGLWSLIKRSVKSKIVQKTFVKEGAQSMAPNQVAGEILSFFTRNNFTVSDRGEVITFEGTMVP

SEQ ID NO: 129738 - protein, 33 aa, Setaria italica
  Transcript Sequence Number=SeqID_63764
KEGRDQGKRFGVEQYEMRTFSKDREKLENLVTT

SEQ ID NO: 129739 - protein, 47 aa, Setaria italica
  Transcript Sequence Number=SeqID_63765
  Gene Ontology: Mol. function=hydrolase activity, acting on carbon -nitrogen (but not peptide) bonds, in linear amidines; Biological process=arginine metabolic process
  Homolog annotation: Hit_ID=P46637; Match level="QueryCoverage=100%, HitCoverage=13%, E-value=1e-18, Identity=91%"; Hit description =Arginase
YEMRTFSKDREKLENLKLGEGVKGVYVSVDVDCLDPAFAPGVSHIEP

SEQ ID NO: 129740 - protein, 39 aa, Setaria italica
  Transcript Sequence Number=SeqID_63766
  Gene Ontology: Mol. function=3-deoxy-manno-octulosonate cytidylyltransferase activity; Cellular component=cytoplasm; Biological process=lipopolysaccharide biosynthetic process
  Homolog annotation: Hit_ID=Q9M4G3; Match level="QueryCoverage=100%, HitCoverage=13%, E-value=1e-13, Identity=94%"; Hit description=CMP -KDO synthetase
VLENGYRMKVIKVDHDAHGVDAPEDVEKIEELMRARNIQ

SEQ ID NO: 129741 - protein, 45 aa, Setaria italica
  Transcript Sequence Number=SeqID_63767
MLSFHDYVVNHCMRLLAFVGSERCCEALQKLGKRYDIVVNIQGDE

SEQ ID NO: 129742 - protein, 145 aa, Setaria italica
  misc_feature (108)..(108): Xaa can be any naturally occurring amino acid
  Transcript Sequence Number=SeqID_63768
  Homolog annotation: Hit_ID=Q9FFF3; Match level="QueryCoverage=80%, HitCoverage=9%, E-value=5e-14, Identity=43%"; Hit description=Low density lipoprotein B-like protein
VKFSFVVLIESGNSQVSEKGVLQILLDLRFVGDVLSGGKNSSTITTETQTKQDSLPSTISKSSFRRKQSQSQADSAAIEPINKLINKLSQRLDPIDWATYRNRYLWEXTRKQSYKRYVVLPQADSAAIEPINKLINKTLTETGSD

SEQ ID NO: 129743 - protein, 49 aa, Setaria italica
  Transcript Sequence Number=SeqID_63769
  Gene Ontology: Mol. function=isoleucine-tRNA ligase activity; Cellular component=cytoplasm; Biological process=tRNA aminoacylation for protein translation
  Homolog annotation: Hit_ID=Q9SV89; Match level="QueryCoverage=97%, HitCoverage=3%, E-value=4e-15, Identity=70%"; Hit description =Isoleucine-tRNA ligase-like protein
TRSFKVMPYSTGCKTALSNFEAALDYRTVPDPAVMVSFPIVGDADNAAL

SEQ ID NO: 129744 - protein, 60 aa, Setaria italica
  Transcript Sequence Number=SeqID_63770
NNESFESGNSPLGGPSEAHLYCYLGSHGAQFLWVCRFDDGLKFVTRNRTQVNLTLRQDLT

SEQ ID NO: 129745 - protein, 123 aa, Setaria italica
  misc_feature (86)..(86): Xaa can be any naturally occurring amino acid
  Transcript Sequence Number=SeqID_63771
  Gene Ontology: Mol. function=zinc ion binding; Cellular component =nucleus
  Homolog annotation: Hit_ID=Q2HSZ7; Match level="QueryCoverage=100%, HitCoverage=10%, E-value=3e-33, Identity=53%"; Hit description =Cyclin-like F-box; FAR1; Zinc finger, SWIM-type
  Pfam annotation: Domain name=MULE; Domain location=57-123; Score =13.6; E_value=0.0031; Accession=PF10551.1; Description=MULE transposase domain
KFGEGDDEYIQKFFGNMQNKNPYFFYLVDLDYQGRLRNLFWSDARSRAANDYFGHDVVYFDTSYLTEKYDLPLVFFSGMNNHGQPXVLFGTGLLSDLNADSYAWLFRAFLACMKGRCPMAIIT

SEQ ID NO: 129746 - protein, 50 aa, Setaria italica
  Transcript Sequence Number=SeqID_63772
EPSAKFLPLVVCHGIHILRLVQDFRQSLQESEKSLYLKFTRGNLLWQMDS

SEQ ID NO: 129747 - protein, 87 aa, Setaria italica
  misc_feature (11)..(11): Xaa can be any naturally occurring amino acid
  Transcript Sequence Number=SeqID_63773
  Gene Ontology: Mol. function=zinc ion binding
VQGPPSASHLXEGPHMGVQGGIDLMEGIPNLSFGNHFGMDINHQHQVPSHQRMQQNNFMQVQAEPHGFASQWVYHPMLQVFVVNLGS

SEQ ID NO: 129748 - protein, 84 aa, Setaria italica
  Transcript Sequence Number=SeqID_63774
EFLEPAAAGPEPTALDPGGKGATASRPEVVGDGATTPSVAVDGEVATSPTAAADAISDQELVFLLWSSYLRWIDGSRVWRSSVA

SEQ ID NO: 129749 - protein, 90 aa, Setaria italica
  misc_feature (39)..(39): Xaa can be any naturally occurring amino acid
  misc_feature (64)..(64): Xaa can be any naturally occurring amino acid
  Transcript Sequence Number=SeqID_63775
ATLRMNPPVSCSISATELRHTRDPSIHLKWKTTGGKPIXDLEKKKVGKWKKGYVRGKMEKDKGXKEQQPRAHQRLRPLLRLGMSPLPRDC

SEQ ID NO: 129750 - protein, 116 aa, Setaria italica
  Transcript Sequence Number=SeqID_63776
QETRDIESEGTENHQQHGVSTFEEPAVDSEPNVDDQQVHEDKVPEVKDNQAMEAEEVIQQSNIDIPDDATGERSELTSEPDSYVQPAQHVDSENSQLEKAEETAGTVAIEETPTED

SEQ ID NO: 129751 - protein, 92 aa, Setaria italica
  misc_feature (41)..(41): Xaa can be any naturally occurring amino acid
  Transcript Sequence Number=SeqID_63777
ARERIEATKEINGIEAVNDGEQTENATSEDPSPTDNETTPXGHSAELNEEITGNETDDVKDEIQTFVELKDGACDLGETVLPTQGSENMIGI

SEQ ID NO: 129752 - protein, 72 aa, Setaria italica
  Transcript Sequence Number=SeqID_63778
FPEETSIAGPTEEVAKWKIHRASKLMQWMQMWCRKRCLNLNMLMSQQPMLMKPLKLKKSPNTAMLLLPRNFQ

SEQ ID NO: 129753 - protein, 80 aa, Setaria italica
  misc_feature (28)..(28): Xaa can be any naturally occurring amino acid
  Transcript Sequence Number=SeqID_63779
  Gene Ontology: Mol. function=peptidase activity; Cellular component =anchored to membrane; Biological process=lipid transport
  Homolog annotation: Hit_ID=B6U254; Match level="QueryCoverage=80%, HitCoverage=31%, E-value=3e-25, Identity=82%"; Hit description=Non -specific lipid-transfer protein
RAEGSTVATPDPTCCSGLKDVVRNEVAXLCQVFQGGQNLGISLNMTKALQLPAACKVKTPPVSKCHGTSWCCFLPLQSWS

SEQ ID NO: 129754 - protein, 36 aa, Setaria italica
  Transcript Sequence Number=SeqID_63780
  Gene Ontology: Mol. function=nucleotide binding
TPCTLKILPNRVYHKKDPIVCDVEVLEGIVKLGFPP

SEQ ID NO: 129755 - protein, 75 aa, Setaria italica
  Transcript Sequence Number=SeqID_63781
MRFSEDEDISVLLLLGKNPELWSLEHIFVAYCDVMPNNTLLHQIYTIFCKVQTYSFVLFYFYIISLFCFSSVGNN

SEQ ID NO: 129756 - protein, 48 aa, Setaria italica
  Transcript Sequence Number=SeqID_63782
MSKKRKSLKPTKSLRDAEEVLTPDYIVGDALDDLLSKLVRSVEVAKAY

SEQ ID NO: 129757 - protein, 131 aa, Setaria italica
  misc_feature (66)..(66): Xaa can be any naturally occurring amino acid
  Transcript Sequence Number=SeqID_63783
  Gene Ontology: Mol. function=oxidoreductase activity
  Homolog annotation: Hit_ID=B2CZM9; Match level="QueryCoverage=92%, HitCoverage=41%, E-value=3e-33, Identity=61%"; Hit description=X7 (Fragment)
DRFLDVVERYFSRSAEAKRLQERPHLHYQVGVTPEGVEVPRSLVDKDMQEKIRSMPEEFQPTTPKXGPDPKWRYMWRVGPRPANTRFKELNSEPVIPDGLPEWKETMDSWGSKMISAIEVVAEMAAIGFGL

SEQ ID NO: 129758 - protein, 118 aa, Setaria italica
  misc_feature (72)..(72): Xaa can be any naturally occurring amino acid
  Transcript Sequence Number=SeqID_63784
MVQQQPQPATSSGILDDDYKHLTDAVCRVYSHAPREFTIMDRVRNHEKELRRCSVIYAFGWIGMQGQESDGXCEFLELQGRRNSVRLHRSGFEELYVFSPGSQYQWYGKYAYVVVGPA

SEQ ID NO: 129759 - protein, 93 aa, Setaria italica
  Transcript Sequence Number=SeqID_63785
  Gene Ontology: Mol. function=nucleic acid binding; Cellular component= nucleus; Biological process=regulation of transcription, DNA-dependent
  Homolog annotation: Hit_ID=A2Q217; Match level="QueryCoverage=94%, HitCoverage=8%, E-value=7e-22, Identity=56%"; Hit description=HMG-I and HMG-Y, DNA-binding; Bromodomain; Helicase, C-terminal (Fragment)
SKVVKNVISKLWRRIDKEGHQIIPNISSWWRRNENSSFRGPAGSTLDLQKVEQRVDGFEYSAVTEFIVDMQQMLKSVVQHFSYRHEVRIEAET

SEQ ID NO: 129760 - protein, 85 aa, Setaria italica
  Transcript Sequence Number=SeqID_63786
  Subcellular localization annotation: CTP_CleavageSite=42; ConfidenceScore=5.11e-01
TCHNSIYFSGACTEPTFGNLDDVSSYPPPAHHPPLAPPTCRRASPRPPSSFLPFPSALHTYASPPPPSPSLSSPRPPEASRRLPP

SEQ ID NO: 129761 - protein, 86 aa, Setaria italica
  misc_feature (12)..(12): Xaa can be any naturally occurring amino acid
  Transcript Sequence Number=SeqID_63787
  Gene Ontology: Mol. function=nucleic acid binding
GEDEQVLQPKIXKRKRSIRIRPRPNAEKQEDKSGGEGVFPQRGTHLAFQGDGGYNSQFKSDLYACAFADPAARQQDAVHPIVKQKR

SEQ ID NO: 129762 - protein, 31 aa, Setaria italica
  Transcript Sequence Number=SeqID_63788
  Gene Ontology: Mol. function=nucleic acid binding; Cellular component= nucleus; Biological process=regulation of transcription, DNA-dependent
  Homolog annotation: Hit_ID=B9RDU3; Match level="QueryCoverage=100%, HitCoverage=1%, E-value=1e-10, Identity=96%"; Hit description=Chromo domain protein, putative
SLLRAGTLRDYQLVGLQWMLSLYNNKLNGIL

SEQ ID NO: 129763 - protein, 42 aa, Setaria italica
  Transcript Sequence Number=SeqID_63789
PFQRDGPTHSAEEDDWLETEKKVIIIHRLHCVSDHPSEWLRE

SEQ ID NO: 129764 - protein, 56 aa, Setaria italica
  Transcript Sequence Number=SeqID_63790
VVTHLHPHKVNLPSLCFPPVTMFPDLSILSRPSKPSKKDELILLHFRKGTSSHVYQ

SEQ ID NO: 129765 - protein, 79 aa, Setaria italica
  Transcript Sequence Number=SeqID_63791
SCFVLFSCNFYFVPGYSLQIPHAIYSHNLGVRFLLVPQSIFRGIESFFSVCRRKNVCAIGVHLCLPPDCKSLIFSLPVS

SEQ ID NO: 129766 - protein, 69 aa, Setaria italica
  Transcript Sequence Number=SeqID_63792
  Gene Ontology: Mol. function=transporter activity; Cellular component= mitochondrial inner membrane; Biological process=mitochondrial transport
  Homolog annotation: Hit_ID=B6THJ2; Match level="QueryCoverage=91%, HitCoverage=18%, E-value=6e-18, Identity=71%"; Hit description =Mitochondrial uncoupling protein 3
  Pfam annotation: Domain name=Mito_carr; Domain location=7-69; Score= -2.1; E_value=0.005; Accession=PF00153.19; Description=Mitochondrial carrier protein
DHVGDVPLSKKIAAGFTTGAIAITIANPTDLVKVRLQAEGKLAPGMPRRYAGAMDAYAKIARQVCSSPD

SEQ ID NO: 129767 - protein, 62 aa, Setaria italica
  Transcript Sequence Number=SeqID_63793
GAVVSLVDEIGSAAAVADGHHLKVSVDMSVSFVDLAAAARLVGPARPPARHPRRSPAANQRL

SEQ ID NO: 129768 - protein, 63 aa, Setaria italica
  Transcript Sequence Number=SeqID_63794
  Gene Ontology: Mol. function=protein binding; Cellular component =integral to membrane
  Homolog annotation: Hit_ID=B6SQ19; Match level="QueryCoverage=100%, HitCoverage=28%, E-value=8e-25, Identity=85%"; Hit description =Cleavage and polyadenylation specificity factor 5
AVKECIKLFLIRLPMSRQFIVPRNMKLLAVPLSQIHNNAQVYGPVISGIPNLLSKFALNVISD

SEQ ID NO: 129769 - protein, 47 aa, Setaria italica
  misc_feature (34)..(34): Xaa can be any naturally occurring amino acid
  Transcript Sequence Number=SeqID_63795
  Homolog annotation: Hit_ID=B6SQ19; Match level="QueryCoverage=89%, HitCoverage=18%, E-value=4e-12, Identity=88%"; Hit description =Cleavage and polyadenylation specificity factor 5
FPYMPPNFRMPKECIKLFLIRLPMSRQFIVPRNXMKLLAVPLYPRIQ

SEQ ID NO: 129770 - protein, 53 aa, Setaria italica
  Transcript Sequence Number=SeqID_63796
  Homolog annotation: Hit_ID=B6TKL3; Match level="QueryCoverage=58%, HitCoverage=6%, E-value=1e-09, Identity=90%"; Hit description=Purple acid phosphatase
MKIPYDAISLLMQERVYNGRLDPCGAVHITIGDGGNREGLAHRYHFAFIIHVP

SEQ ID NO: 129771 - protein, 163 aa, Setaria italica
  Transcript Sequence Number=SeqID_63797
  Gene Ontology: Cellular component=integral to membrane
  Homolog annotation: Hit_ID=Q2QXK0; Match level="QueryCoverage=86%, HitCoverage=42%, E-value=3e-42, Identity=59%"; Hit description =Transporter, putative, expressed
SIGIVSNCLLTILVWLFYSIGSNKALMATHGFSFATTLTGLHFATTTLMTLVMKWLGYIQPSYLPLPELVKFVFFANLSIVGMNVSLMWNSVGFYQIAKLCIIPVLCFLEILLDKVRYSRDTKLSIVLVLVGVAVCTVTDVSVNSQGLLAAAIAVWSTALQQH

SEQ ID NO: 129772 - protein, 82 aa, Setaria italica
  misc_feature (17)..(17): Xaa can be any naturally occurring amino acid
  Transcript Sequence Number=SeqID_63798
  Homolog annotation: Hit_ID=Q00RL3; Match level="QueryCoverage=84%, HitCoverage=14%, E-value=6e-27, Identity=77%"; Hit description =OSIGBa0117N13.4 protein
ENLELLLYENLATSQEXGFDSMGASSRKSSQARLLCFVVTAIAKLATCHSELLPRARVSLAKVARTRTSDRRVWQRACDYLG

SEQ ID NO: 129773 - protein, 79 aa, Setaria italica
  misc_feature (61)..(61): Xaa can be any naturally occurring amino acid
  Transcript Sequence Number=SeqID_63799
  Gene Ontology: Mol. function=substrate-specific transmembrane transporter activity; Cellular component=integral to membrane; Biological process=transmembrane transport
  Homolog annotation: Hit_ID=Q6H454; Match level="QueryCoverage=49%, HitCoverage=8%, E-value=5e-11, Identity=94%"; Hit description =Putative hexose transporter
DTEILVIYVLEAQSSRNIDSLYYYDSLHAVENLVVIVYAVALIGGSLFFLQQFAGINGVLXYFSSLTFRDVGITSGALD

SEQ ID NO: 129774 - protein, 65 aa, Setaria italica
  misc_feature (35)..(35): Xaa can be any naturally occurring amino acid
  misc_feature (49)..(49): Xaa can be any naturally occurring amino acid
  Transcript Sequence Number=SeqID_63800
  Gene Ontology: Mol. function=substrate-specific transmembrane transporter activity; Cellular component=integral to membrane; Biological process=transmembrane transport
  Homolog annotation: Hit_ID=Q6H454; Match level="QueryCoverage=98%, HitCoverage=14%, E-value=5e-16, Identity=67%"; Hit description =Putative hexose transporter
RLLREEFLVGIGIGVNTVLVPLYISEVAPTKYRGXLGTLCQIGTCLGIXLAALSLGIPSESDPHW

SEQ ID NO: 129775 - protein, 94 aa, Setaria italica
  Transcript Sequence Number=SeqID_63801
  Gene Ontology: Mol. function=protein binding
  Homolog annotation: Hit_ID=B3VTC5; Match level="QueryCoverage=93%, HitCoverage=9%, E-value=2e-25, Identity=69%"; Hit description =Cf2/Cf5-like disease resistance protein
  Pfam annotation: Domain name=LRR_1; Domain location=29-51; Score =15.2; E_value=0.28; Accession=PF00560.25; Description=Leucine Rich Repeat
  Pfam annotation: Domain name=LRR_1; Domain location=4-27; Score=6.6; E_value=16; Accession=PF00560.25; Description=Leucine Rich Repeat
  Pfam annotation: Domain name=LRR_1; Domain location=52-73; Score=5.4; E_value=28; Accession=PF00560.25; Description=Leucine Rich Repeat
  Pfam module annotation: Pfam domain module=LRR_1::LRR_1::LRR_1; Domain location=29-51::4-27::52-73
SDLNISDLNISDTGLIGVIPDWFWTTFSNATSLDLSYNQLSGKLPLDLEFMSSTVLLLQSNNLTGSVPRLPRSIYLLGHLKKFLNGQLPSKFWR

SEQ ID NO: 129776 - protein, 78 aa, Setaria italica
  Transcript Sequence Number=SeqID_63802
  Gene Ontology: Mol. function=oxidoreductase activity; Biological process=oxidation reduction
  Homolog annotation: Hit_ID=B6T4W5; Match level="QueryCoverage=97%, HitCoverage=22%, E-value=1e-34, Identity=92%"; Hit description =Hyoscyamine 6-dioxygenase
LLEHRVVTNLGVARTTVATFIMPTTDCLIGPAEEFLSEDNPPCYRTLTFGEFKRIYSVVKLGSSLNLTTNLKNVQKET

SEQ ID NO: 129777 - protein, 84 aa, Setaria italica
  Transcript Sequence Number=SeqID_63803
  Gene Ontology: Mol. function=oxidoreductase activity; Biological process=oxidation reduction
  Homolog annotation: Hit_ID=B6T4W5; Match level="QueryCoverage=97%, HitCoverage=24%, E-value=1e-28, Identity=73%"; Hit description =Hyoscyamine 6-dioxygenase
MDKMLHSAPIHTNLPDCFVFPADKRPPATAAVVSLPIIDLSRSRDEVRRAILDAGKEIGFFQVVNHGVSEQAMQDMEAVVDQGS

SEQ ID NO: 129778 - protein, 112 aa, Setaria italica
  misc_feature (13)..(13): Xaa can be any naturally occurring amino acid
  misc_feature (63)..(63): Xaa can be any naturally occurring amino acid
  misc_feature (84)..(84): Xaa can be any naturally occurring amino acid
  Transcript Sequence Number=SeqID_63804
  Gene Ontology: Mol. function=oxidoreductase activity; Biological process=oxidation reduction
  Homolog annotation: Hit_ID=B6T4W5; Match level="QueryCoverage=99%, HitCoverage=32%, E-value=4e-51, Identity=88%"; Hit description =Hyoscyamine 6-dioxygenase
  Pfam annotation: Domain name=2OG-FeII_Oxy; Domain location=1-74; Score=30.9; E_value=5.2e-06; Accession=PF03171.12; Description=2OG -Fe(II) oxygenase superfamily
RNLLTLLLPSMVXPGLEVAYYGDWIKVQPVPNAFVVNFGCQLEVVTNGLLKSIEHRVVTNLGXARTTVATFIMPTTDCLIGPRXEFLSEDNPPCYRTLTFGEFKRIYSVVQN

SEQ ID NO: 129779 - protein, 134 aa, Setaria italica
  Transcript Sequence Number=SeqID_63805
PQQRRDFARIGSEITGNLTRPRTSWEAGKGEYLRHGGGQGIRAKGIRSSATGSGRSPAQPSRARIGAARGGRRGSRQERCVRGGYFCGRGDGQKGARATPRHSFKITQKFEGKKLTKILFKGKKLTLTASSSFL

SEQ ID NO: 129780 - protein, 68 aa, Setaria italica
  Transcript Sequence Number=SeqID_63806
  Homolog annotation: Hit_ID=B6U4V4; Match level="QueryCoverage=51%, HitCoverage=14%, E-value=4e-09, Identity=82%"; Hit description =Nucleic acid binding protein
LGKWVTQEEAYKSVANFQNRRWSILNFTNKSVLGLYYDSNSGFYYSDGLGKWVTQEEAYKSVLEVCTD

SEQ ID NO: 129781 - protein, 41 aa, Setaria italica
  Transcript Sequence Number=SeqID_63807
FPKTVTAMSRYEHMHPRKIICVHILLHLQTVRNTWLAQNAN

SEQ ID NO: 129782 - protein, 87 aa, Setaria italica
  misc_feature (8)..(8): Xaa can be any naturally occurring amino acid
  Transcript Sequence Number=SeqID_63808
GYQTLIRXGPNKKNTIYFNSSPISTVQLLHSIRKYTKLTNISDTESFHRPGQQNYVPPYEQGRVPGNRSGIRIRQMGRTLFLRFVTV

SEQ ID NO: 129783 - protein, 102 aa, Setaria italica
  misc_feature (33)..(33): Xaa can be any naturally occurring amino acid
  misc_feature (48)..(48): Xaa can be any naturally occurring amino acid
  Transcript Sequence Number=SeqID_63809
  Gene Ontology: Mol. function=transporter activity; Cellular component= membrane; Biological process=transport
  Homolog annotation: Hit_ID=B6TEJ2; Match level="QueryCoverage=78%, HitCoverage=14%, E-value=6e-38, Identity=95%"; Hit description =Permease I
WLYAYILTIGGAYKNSPPKTQVHCRVDRSGLLXGAPWISVPYPFQWGXAPTFDAGEAFAMMMTSFIVLVESTGAFIGASRIIDKVDKLIELPTNYKLIKLRG

SEQ ID NO: 129784 - protein, 78 aa, Setaria italica
  Transcript Sequence Number=SeqID_63810
FYVHFVLTLLKSWQRESPLTILVRIKQAYYLPETEYVHWARSHPEYSKSQVVGLVNLVATMKGWKRKTRLETVEKIEA

SEQ ID NO: 129785 - protein, 57 aa, Setaria italica
  Transcript Sequence Number=SeqID_63811
KFLHGLILLLGEFKHYKTRLDHGGISKELQHLLMEYGIESIAEVLVEGLSRVKRCIN

SEQ ID NO: 129786 - protein, 48 aa, Setaria italica
  Transcript Sequence Number=SeqID_63812
LMVAAHCISKCKAFISAPFHSRETFHQDRSQSGRHLPDHQSSRLKAAL

SEQ ID NO: 129787 - protein, 38 aa, Setaria italica
  Transcript Sequence Number=SeqID_63813
NLVATMKGWKRKTRLETVEKIEAQNLPPGLRLNLLNCF

SEQ ID NO: 129788 - protein, 60 aa, Setaria italica
  Transcript Sequence Number=SeqID_63814
  Gene Ontology: Mol. function=nucleic acid binding; Cellular component= nucleus; Biological process=regulation of transcription, DNA-dependent
  Homolog annotation: Hit_ID=B9H0U7; Match level="QueryCoverage=100%, HitCoverage=9%, E-value=7e-13, Identity=50%"; Hit description =Chromatin remodeling complex subunit (Fragment)
EEKHHETAFKKEVIPKLWFEWSEHCTTEDFKLSQVDIDDSGDELLDTKAVRQDIKALYRR

SEQ ID NO: 129789 - protein, 39 aa, Setaria italica
  Transcript Sequence Number=SeqID_63815
LVVVTTCTTEDFKLSQVDIDDSGDELLDTKAVRQDIKAL

SEQ ID NO: 129790 - protein, 82 aa, Setaria italica
  Transcript Sequence Number=SeqID_63816
  Gene Ontology: Mol. function=RNA binding; Cellular component =chloroplast
  Homolog annotation: Hit_ID=B6TPG8; Match level="QueryCoverage=100%, HitCoverage=26%, E-value=1e-37, Identity=90%"; Hit description=RNA -binding S4
IIKDAMLAIEKLADIKAVAQGGYPQAERCRISVGHPDSMTSNPDVVAALSISGNFRLEPCSHGDFLGAILGTGITREKVGDI

SEQ ID NO: 129791 - protein, 128 aa, Setaria italica
  Transcript Sequence Number=SeqID_63817
  Gene Ontology: Mol. function=structural constituent of ribosome; Cellular component=intracellular; Biological process=translation
  Homolog annotation: Hit_ID=B6SQA2; Match level="QueryCoverage=95%, HitCoverage=83%, E-value=2e-54, Identity=86%"; Hit description=60S ribosomal protein L28
  Pfam annotation: Domain name=Ribosomal_L28e; Domain location=7-125; Score=177.2; E_value=4.8e-50; Accession=PF01778.9; Description =Ribosomal L28e protein family
  Subcellular localization annotation: CTP_CleavageSite=58; ConfidenceScore=5.00e-01
TRKELFFLVKQFGNSNAKVQFSKEPNNLYNVHSYKYSGLANKKTVTVQPASGKEMAVVLSTTKTKKQNKPASLYHKSVMRKEFRKMAKAVKNQVADNYYRPDLTKPALARLSAVYRSLQVAKSRNLET

SEQ ID NO: 129792 - protein, 77 aa, Setaria italica
  Transcript Sequence Number=SeqID_63818
  Gene Ontology: Mol. function=structural constituent of ribosome; Cellular component=intracellular; Biological process=translation
  Homolog annotation: Hit_ID=B6SQA2; Match level="QueryCoverage=84%, HitCoverage=44%, E-value=3e-25, Identity=86%"; Hit description=60S ribosomal protein L28
  Pfam annotation: Domain name=Ribosomal_L28e; Domain location=1-75; Score=30.5; E_value=4.3e-07; Accession=PF01778.9; Description =Ribosomal L28e protein family
  Subcellular localization annotation: CTP_CleavageSite=37; ConfidenceScore=5.05e-01
SKEPNNLYNVHSYKYSGLANKKTVTVQPASGKEMAVVLSTTKTKKQNKPASLYHKSVMRKEFRKMDQRTSTKKPRYD

SEQ ID NO: 129793 - protein, 129 aa, Setaria italica
  Transcript Sequence Number=SeqID_63819
  Gene Ontology: Mol. function=structural molecule activity; Cellular component=viral capsid; Biological process=chitin-based larval cuticle pattern formation
  Homolog annotation: Hit_ID=Q2PYY1; Match level="QueryCoverage=100%, HitCoverage=41%, E-value=3e-51, Identity=76%"; Hit description =Protein transport SEC13-like protein
  Pfam annotation: Domain name=WD40; Domain location=43-85; Score=37.3; E_value=6.1e-08; Accession=PF00400.24; Description=WD domain, G-beta repeat
SMAPGALISAGPSGQYEYVQKLASGGCDNTVKVWKLTNGSWRMDCFPALQMHKDWVRDVAWAPNLGLPKSTMASASQDGTVVIWTAAKEGEQWEGRVLYDFRTPVWRLSWSLTGNILAVSDGNNNVTLW

SEQ ID NO: 129794 - protein, 68 aa, Setaria italica
  Transcript Sequence Number=SeqID_63820
  Gene Ontology: Mol. function=structural molecule activity; Cellular component=viral capsid; Biological process=intracellular protein transmembrane transport
  Homolog annotation: Hit_ID=Q8LAS2; Match level="QueryCoverage=100%, HitCoverage=22%, E-value=7e-23, Identity=73%"; Hit description =Transport protein SEC13, putative
  Pfam annotation: Domain name=WD40; Domain location=1-39; Score=25.2; E_value=0.00027; Accession=PF00400.24; Description=WD domain, G-beta repeat
MPPHKIETGHQDVVHDIAMDYYGKRLATASSDNTIKIIGVSGASHQQLATLSGHQGPVWQVAWAHPKV

SEQ ID NO: 129795 - protein, 98 aa, Setaria italica
  Transcript Sequence Number=SeqID_63821
  Gene Ontology: Mol. function=phosphoserine phosphatase activity; Cellular component=chloroplast; Biological process=L-serine biosynthetic process
  Homolog annotation: Hit_ID=B6SU38; Match level="QueryCoverage=98%, HitCoverage=32%, E-value=3e-36, Identity=72%"; Hit description =Phosphoserine phosphatase
PSIDQVQDCIEKRPPRISNGISELIEKLKARNTDVYLVSGGFQQMIKSVALELGVPHENIFANQLLFGTSGEYVGFDPTKPTSRSGGKAVAVQHIRQV

SEQ ID NO: 129796 - protein, 86 aa, Setaria italica
  misc_feature (21)..(21): Xaa can be any naturally occurring amino acid
  Transcript Sequence Number=SeqID_63822
ELLALKKKALTLRREGKVDEXLRKAKILEKQLEEQEILGEAEDSDDDLAAIIRNMDDDKHDDILMDDTKFKAGFFFGDKNKIFTKT

SEQ ID NO: 129797 - protein, 83 aa, Setaria italica
  Transcript Sequence Number=SeqID_63823
SQNSRLCGARASRRRQVQHCCCVTAEFAPQLHHQGRQGPRKTPRTGGRESERSSMENLKEVHRFSISLNPCLPVNKSFLASRL

SEQ ID NO: 129798 - protein, 62 aa, Setaria italica
  Transcript Sequence Number=SeqID_63824
  Gene Ontology: Mol. function=protein serine/threonine kinase activity; Biological process=protein amino acid phosphorylation
  Homolog annotation: Hit_ID=B6SVE4; Match level="QueryCoverage=87%, HitCoverage=7%, E-value=3e-23, Identity=92%"; Hit description=MAPKKK5
SLEGKEFLQCCFKRNPAERPTASELLDHPFIRNSSHYNKHGSIHSFAGIKVNVGTFFFLHDQ

SEQ ID NO: 129799 - protein, 102 aa, Setaria italica
  misc_feature (73)..(102): Xaa can be any naturally occurring amino acid
  Transcript Sequence Number=SeqID_63825
  Subcellular localization annotation: CTP_CleavageSite=26; ConfidenceScore=5.06e-01
HTFLPSWTRHVKPTAIRRRRHESLPVVSLFTTVVKVHSFSLVDQNPEMHVLLLLLLLLVLSLFLLTNTKLNKXXXXXXXXXXXXXXXXXXXXXXXXXXXXXX

SEQ ID NO: 129800 - protein, 57 aa, Setaria italica
  Transcript Sequence Number=SeqID_63826
GGGEKRIEVDGVENLDAFRAAVELMYEPDPMRWLAAAGVSLAIDVLEVRKRNWEHLS

SEQ ID NO: 129801 - protein, 120 aa, Setaria italica
  misc_feature (75)..(75): Xaa can be any naturally occurring amino acid
  Transcript Sequence Number=SeqID_63827
  Homolog annotation: Hit_ID=Q7XLJ0; Match level="QueryCoverage=81%, HitCoverage=17%, E-value=2e-40, Identity=81%"; Hit description =OSJNBa0009K15.20 protein
SDAVACSRCVASHRCARGYGSSIMFDRGIKSCLTYIEAVPWSENEEDKLKNLFARFTFDEAISQDILARLRPHSXKSSDDLTVQLIQSVTSSTNSGARKDMQSLVNGLLSKSSVYQKDYL

SEQ ID NO: 129802 - protein, 39 aa, Setaria italica
  Transcript Sequence Number=SeqID_63828
MAKLALALILLLAVAASASASASIDMDLGFLSAGAGRRE

SEQ ID NO: 129803 - protein, 65 aa, Setaria italica
  misc_feature (32)..(32): Xaa can be any naturally occurring amino acid
  Transcript Sequence Number=SeqID_63829
  Subcellular localization annotation: CTP_CleavageSite=42; ConfidenceScore=5.10e-01
EFYPRVRDFATAIVRRTMQFADWLLNLPSPVXVTVSSRLPCSSSLASQLNETNTFYLHLFDLSSC

SEQ ID NO: 129804 - protein, 111 aa, Setaria italica
  Transcript Sequence Number=SeqID_63830
  Gene Ontology: Mol. function=protein serine/threonine phosphatase activity; Cellular component=protein serine/threonine phosphatase complex; Biological process=protein amino acid dephosphorylation
  Homolog annotation: Hit_ID=Q6L5H6; Match level="QueryCoverage=98%, HitCoverage=28%, E-value=1e-54, Identity=94%"; Hit description =Probable protein phosphatase 2C 50
  Pfam annotation: Domain name=PP2C; Domain location=1-111; Score= -31.2; E_value=0.00045; Accession=PF00481.13; Description=Protein phosphatase 2C
VVANCGDSRVVLCRGKEPVALSIDHKPDRKDERGRIEALGGKVIQWNGYRVSGILAMSRSIGDRYLKPFVIPKPEVTVIPRAKDDDCLVLASDGLWDVVSNEEACKVARSY

SEQ ID NO: 129805 - protein, 66 aa, Setaria italica
  Transcript Sequence Number=SeqID_63831
  Gene Ontology: Mol. function=protein serine/threonine phosphatase activity; Cellular component=protein serine/threonine phosphatase complex; Biological process=protein amino acid dephosphorylation
  Homolog annotation: Hit_ID=Q6L5H6; Match level="QueryCoverage=81%, HitCoverage=13%, E-value=4e-10, Identity=62%"; Hit description =Probable protein phosphatase 2C 50
ASRLVGGVPESRPVAAENVGSTAVVAVVCSSHLVVANCGDSRVVLCRGKEPVALSIDHKVRSFVES

SEQ ID NO: 129806 - protein, 48 aa, Setaria italica
  Transcript Sequence Number=SeqID_63832
  Gene Ontology: Mol. function=protein serine/threonine phosphatase activity; Cellular component=protein serine/threonine phosphatase complex; Biological process=protein amino acid dephosphorylation
  Homolog annotation: Hit_ID=Q6L5H6; Match level="QueryCoverage=77%, HitCoverage=9%, E-value=6e-12, Identity=91%"; Hit description =Probable protein phosphatase 2C 50
HLLFQPDRKDERGRIEALGGKVIQWNGYRVSGILAMSRSIGMNAHSCA

SEQ ID NO: 129807 - protein, 41 aa, Setaria italica
  Transcript Sequence Number=SeqID_63833
PIPCVPCLSPVACLRLCTWEEVFILRVYETGSGFSPWELDY

SEQ ID NO: 129808 - protein, 109 aa, Setaria italica
  Transcript Sequence Number=SeqID_63834
  Gene Ontology: Mol. function=oxidoreductase activity; Biological process=oxidation reduction
  Homolog annotation: Hit_ID=B6SSL8; Match level="QueryCoverage=100%, HitCoverage=30%, E-value=1e-51, Identity=85%"; Hit description =Leucoanthocyanidin dioxygenase
  Pfam annotation: Domain name=2OG-FeII_Oxy; Domain location=1-60; Score=12.0; E_value=0.011; Accession=PF03171.12; Description=2OG -Fe(II) oxygenase superfamily
GLQVLRDGVWYDVPTKPHTLLINLGDQMEIMSNGIFKSPVHRVVTNAKKERLSVVLFYSVDPEREIQPVGRLIDENHPALYKKVKVKEYVAGLYEHFSQGKMVIETAKI

SEQ ID NO: 129809 - protein, 100 aa, Setaria italica
  misc_feature (15)..(15): Xaa can be any naturally occurring amino acid
  Transcript Sequence Number=SeqID_63835
  Subcellular localization annotation: CTP_CleavageSite=71; ConfidenceScore=5.52e-01
STSSTSLLRNVIISXRQSFILSLSLFDRPLIGSVNNGKVLLQMLPSFAFILSTTTLNFFTTSFTERVILPPQELRENIFVVLHMINIGLILLERLPRHFP

SEQ ID NO: 129810 - protein, 128 aa, Setaria italica
  Transcript Sequence Number=SeqID_63836
NIAKNSCSAAPTGMDMSKMRRGWRLVILSLLDSWLWSVGPWSSLKSSCSSWCGLVKHDVVAGEDAALLGVGAHGRFPACAGVQNLCPLKRIRAACENLNVVAIGLQVAVKDQLPAAAVLRPHRLVAIG

SEQ ID NO: 129811 - protein, 152 aa, Setaria italica
  Transcript Sequence Number=SeqID_63837
NLETNSDNIQVQAVQKDREPHALSAPMCLANGHDSTVLRAGLIFSMMLRFSQADLILFRGHRFWTPAQAGKRPWAPTPQQGGILTGNNVVLHQATPAAARTFQGRPGGPRDHNHESSKDRITSRHPRRIFDMSMVRVAHACPIDDQCRRFKG

SEQ ID NO: 129812 - protein, 59 aa, Setaria italica
  Transcript Sequence Number=SeqID_63838
YLACAYIFFSGYAQASNSSMTAKDFTNDTGRVDYIRDYLTFLAFSNKVLCSTLPSSRVF

SEQ ID NO: 129813 - protein, 105 aa, Setaria italica
  misc_feature (35)..(35): Xaa can be any naturally occurring amino acid
  misc_feature (54)..(54): Xaa can be any naturally occurring amino acid
  Transcript Sequence Number=SeqID_63839
  Gene Ontology: Mol. function=hydrolase activity, hydrolyzing O -glycosyl compounds; Biological process=carbohydrate metabolic process
  Homolog annotation: Hit_ID=Q2MV13; Match level="QueryCoverage=60%, HitCoverage=12%, E-value=2e-23, Identity=71%"; Hit description=Beta -mannosidase 4
PCPWPCASAAVDRGQFPDGFLFGTTTSAYQIEGAXFEGNRGLSNWDVFAHTPGXIEDGSNGDTADDHYHRYMVSWCFSFSKMQIVSKENRLDDCCAMKIYTGNVV

SEQ ID NO: 129814 - protein, 136 aa, Setaria italica
  misc_feature (9)..(9): Xaa can be any naturally occurring amino acid
  Transcript Sequence Number=SeqID_63840
  Gene Ontology: Mol. function=hydrolase activity, hydrolyzing O -glycosyl compounds; Biological process=carbohydrate metabolic process
  Homolog annotation: Hit_ID=Q7XSK1; Match level="QueryCoverage=89%, HitCoverage=42%, E-value=4e-48, Identity=69%"; Hit description =OSJNBa0004N05.25 protein
  Pfam annotation: Domain name=Glyco_hydro_1; Domain location=1-135; Score=-263.8; E_value=2.1e-05; Accession=PF00232.10; Description =Glycosyl hydrolase family 1
HRYMEDIEXMHSMGVNSYRFSIAWTRILPRGRFGHVNPDGVAFYNNLIDALLQKGIQPFVTISHYDIPQELETQYGGWLSPEIQKDFGYLAEVCFMMFGDRVKFWITFNQPNLWLKFSYMDGFVTLPGRLVLLSLT

SEQ ID NO: 129815 - protein, 130 aa, Setaria italica
  misc_feature (21)..(21): Xaa can be any naturally occurring amino acid
  misc_feature (60)..(60): Xaa can be any naturally occurring amino acid
  Transcript Sequence Number=SeqID_63841
  Gene Ontology: Mol. function=hydrolase activity, hydrolyzing O -glycosyl compounds; Biological process=carbohydrate metabolic process
  Homolog annotation: Hit_ID=B9RWJ7; Match level="QueryCoverage=99%, HitCoverage=33%, E-value=5e-46, Identity=62%"; Hit description=Beta -glucosidase, putative
  Pfam annotation: Domain name=Glyco_hydro_1; Domain location=1-130; Score=-330.3; E_value=0.047; Accession=PF00232.10; Description =Glycosyl hydrolase family 1
IGIQPFVTISHYDIPQELENXYGGWLSPEIQKDFGYLAEVCFMMFGDRVKFWITFNQPNXWLKFSYMDGLYPPGRCSQPFGNCAFGNSSIEPYIAGHNMILSHANAVSIYRKKYQGKQGGHIGISMCSRW

SEQ ID NO: 129816 - protein, 55 aa, Setaria italica
  Transcript Sequence Number=SeqID_63842
EVWCHRALAAAPPVRLTKQHYKLSNCKQNLGVKRQRTTILQKNPKPFDRRMWRFQ

SEQ ID NO: 129817 - protein, 76 aa, Setaria italica
  Transcript Sequence Number=SeqID_63843
ELPNCSSSFVLLLNALTEVLTLIQRRHIEQVKVVLPAVLKVMSATVSECDEEHGKAAVDLFNAAHGIGNAIQEMCK

SEQ ID NO: 129818 - protein, 75 aa, Setaria italica
  Transcript Sequence Number=SeqID_63844
MLLFLLLSSAHVRVIMLLIYSAFAISFSRMCMLTLHLHSSILINVQGYLYMPTLCLLTNHDGSVTCRAFWLSLCL

SEQ ID NO: 129819 - protein, 62 aa, Setaria italica
  Transcript Sequence Number=SeqID_63845
TLIRMEECKCRVSIHILEKLIAKAEYINNIITLTCALDSNKNNNIHGRTFRIGAYEIPTIRK

SEQ ID NO: 129820 - protein, 99 aa, Setaria italica
  Transcript Sequence Number=SeqID_63846
  Subcellular localization annotation: CTP_CleavageSite=53; ConfidenceScore=5.47e-01
LPPEVPLPLPSLRSPFFPVAGGDRVPFSLLRRAVNASGPHRRLRSGGGCVLVRASGLDSSTGRGRGPFGRGRFGDMPAFCAYEGEAERSLLCLPLSFVV

SEQ ID NO: 129821 - protein, 108 aa, Setaria italica
  misc_feature (26)..(26): Xaa can be any naturally occurring amino acid
  Transcript Sequence Number=SeqID_63847
  Gene Ontology: Mol. function=metal ion binding; Cellular component =nucleus
  Homolog annotation: Hit_ID=B9RUU8; Match level="QueryCoverage=73%, HitCoverage=3%, E-value=2e-24, Identity=62%"; Hit description=DNA binding protein, putative
  Pfam annotation: Domain name=FYRN; Domain location=25-72; Score=68.2; E_value=3e-17; Accession=PF05964.6; Description=FY-rich N-terminus
SLPKFLVEKSSHQPHHCPVVLPVQYXDFFITSLGEIDNRTSYHNSYQIWPVGFTSYWHDRVTGSLFECEVCDGGNFGPMFKVRRVPCSAFQLPDASTTVCPNIVRKAE

SEQ ID NO: 129822 - protein, 51 aa, Setaria italica
  Transcript Sequence Number=SeqID_63848
  Homolog annotation: Hit_ID=Q3T8Z0; Match level="QueryCoverage=90%, HitCoverage=5%, E-value=1e-19, Identity=97%"; Hit description =Autophagy protein 9
MAYMKVFGRNLFWYTVVFGTIATVSRKVVADELQVIDPEGAMTLVVQHTHY

SEQ ID NO: 129823 - protein, 64 aa, Setaria italica
  Transcript Sequence Number=SeqID_63849
FNLKKNWVTASRYDPYMEAGWHRATNTGYAMAISFVFVSMYGSYLEAVTQFNLKKNTKNSHICP

SEQ ID NO: 129824 - protein, 69 aa, Setaria italica
  Transcript Sequence Number=SeqID_63850
FVLFLLWLCLVPHCYFTSCCHDLYYSYYGCCSSGHTILCYKLTHIEGIVQIMTAACESRAMPMENKTPP

SEQ ID NO: 129825 - protein, 72 aa, Setaria italica
  misc_feature (47)..(47): Xaa can be any naturally occurring amino acid
  misc_feature (63)..(63): Xaa can be any naturally occurring amino acid
  Transcript Sequence Number=SeqID_63851
  Gene Ontology: Mol. function=GDP-L-fucose synthase activity; Biological process=cellular metabolic process
  Homolog annotation: Hit_ID=Q67WR2; Match level="QueryCoverage=100%, HitCoverage=21%, E-value=6e-30, Identity=91%"; Hit description =Probable GDP-L-fucose synthase 1
NSHVLPALIRRFHEAKACDAPEVVVWGSGSPLREFLHVDDLADAVIXFLMDHYSGLEHVNVGXGSEVTIKEL

SEQ ID NO: 129826 - protein, 77 aa, Setaria italica
  Transcript Sequence Number=SeqID_63852
  Homolog annotation: Hit_ID=B5AEK5; Match level="QueryCoverage=88%, HitCoverage=33%, E-value=1e-16, Identity=69%"; Hit description=BZIP transcription factor
MYFFSNVADQQEMFEREIGRLRQLFQQQQQQQQHVPQQQAPTHSRSNSRDLDSQFANLSLKHGDPNSTRDAVSGLRI

SEQ ID NO: 129827 - protein, 53 aa, Setaria italica
  Transcript Sequence Number=SeqID_63853
QQNIMLDLENKALKQRLESLSQEHLIKRCKYSSFFPICQYRTLGFLCDLSSWF

SEQ ID NO: 129828 - protein, 147 aa, Setaria italica
  misc_feature (57)..(57): Xaa can be any naturally occurring amino acid
  misc_feature (75)..(75): Xaa can be any naturally occurring amino acid
  Transcript Sequence Number=SeqID_63854
  Pfam annotation: Domain name=Homeobox; Domain location=23-91; Score =7.6; E_value=0.0022; Accession=PF00046.21; Description=Homeobox domain
MMNGRGMGRPPSARSSDGMLAAAPFRFLPAEVEEMEARLQPLQNPSPNHVAVEELAXEFSASAERIGKVVIDPKXVKTWFCNRRYYSRERKAARAAQAQEKSSARGVGAYYHLAAGSSAAVQAGSSSGSISMDGSQVQYEAKSARDG

SEQ ID NO: 129829 - protein, 53 aa, Setaria italica
  Transcript Sequence Number=SeqID_63855
RLDLSTDVPESFILHGYDRKSYTGIPKLIRNHHFLALELSSTFLCHPVTKNSL

SEQ ID NO: 129830 - protein, 41 aa, Setaria italica
  Transcript Sequence Number=SeqID_63856
RNERLIGRIRTSIIIEYLDARSLACDGFLQQWDLGEWWLVC

SEQ ID NO: 129831 - protein, 73 aa, Setaria italica
  Transcript Sequence Number=SeqID_63857
TIHEELMGNPSITIYEEHRIHILWQRTQHDFIYMWDQGHIFPRSNHLNGSAARRRRPPTEGRKTERTLRKPKT

SEQ ID NO: 129832 - protein, 46 aa, Setaria italica
  misc_feature (26)..(26): Xaa can be any naturally occurring amino acid
  Transcript Sequence Number=SeqID_63858
RCETFSKLKRLHLGEWFLSGGCYPLXYLLRRSPSVEKVILQLDTGI

SEQ ID NO: 129833 - protein, 71 aa, Setaria italica
  Transcript Sequence Number=SeqID_63859
LDSNRTIWIRASDTWKTCYFLPPDDDSINDLASATGCAQLMYSLVFLIAYFHSSHVLFRRKTALRRIVVMA

SEQ ID NO: 129834 - protein, 55 aa, Setaria italica
  Transcript Sequence Number=SeqID_63860
IIYTTTIAISRKLRQHKISISFVKKHEQQLAGNFRNHPKINNFLQWIYKMQYDET

SEQ ID NO: 129835 - protein, 65 aa, Setaria italica
  Transcript Sequence Number=SeqID_63861
TRPCMPVLIYLHASRLTQACRVLCVRRRILQHPCSELVTHRIGWRGETVKLCNYMSMCCGKLACL

SEQ ID NO: 129836 - protein, 123 aa, Setaria italica
  misc_feature (48)..(48): Xaa can be any naturally occurring amino acid
  misc_feature (99)..(99): Xaa can be any naturally occurring amino acid
  Transcript Sequence Number=SeqID_63862
  Gene Ontology: Cellular component=chloroplast envelope
  Homolog annotation: Hit_ID=Q9LI74; Match level="QueryCoverage=73%, HitCoverage=8%, E-value=5e-19, Identity=53%"; Hit description =Protein CHUP1, chloroplastic
LNLTYPSFRDAATSRYTRFQIPWEWMKQDAGIVSQIKLQSVKLANRKXLENGSTSELEAIKGGPEEEELMLQGVRFAFRVHQFAGGFDVDTMRAFQELXKEKASMCRIQRKKQSRHLRQHTLV

SEQ ID NO: 129837 - protein, 108 aa, Setaria italica
  Transcript Sequence Number=SeqID_63863
  Homolog annotation: Hit_ID=Q5VPC4; Match level="QueryCoverage=84%, HitCoverage=15%, E-value=7e-40, Identity=85%"; Hit description =Pherophorin-like protein
DDELSRLVDERAVLKHFEWPEHKADALREAAFGYCDLKKLEGEAASFRDDARQPCAAALKKMQALFEKLEHGVYNLARVRDAATSRYTLFHPLPRGSGTGCTGFVGRS

SEQ ID NO: 129838 - protein, 87 aa, Setaria italica
  misc_feature (10)..(10): Xaa can be any naturally occurring amino acid
  misc_feature (22)..(22): Xaa can be any naturally occurring amino acid
  Transcript Sequence Number=SeqID_63864
  Homolog annotation: Hit_ID=B6U646; Match level="QueryCoverage=64%, HitCoverage=14%, E-value=3e-14, Identity=79%"; Hit description =Pherophorin like protein
  Subcellular localization annotation: CTP_CleavageSite=23; ConfidenceScore=5.34e-01
PAPPPPPPPXPPPSRRPFGAAXPAGVRSGQCVRRVPEVVEFYHSLMRRESKRDGCAASEAANGGGVAAARDMIGEIENRSAHLLAIK

SEQ ID NO: 129839 - protein, 71 aa, Setaria italica
  misc_feature (20)..(20): Xaa can be any naturally occurring amino acid
  misc_feature (42)..(42): Xaa can be any naturally occurring amino acid
  Transcript Sequence Number=SeqID_63865
MMELYHGYLEDHFNLHKLSXAAVPVRMGVYERPAPAPVMGMXWNSDPFKVDSGQATSGSTVMEADKKFDNR

SEQ ID NO: 129840 - protein, 38 aa, Setaria italica
  Transcript Sequence Number=SeqID_63866
SGMWKTPAERFFLWIGGFRPSEVLKVAGSDSLTVQLQT

SEQ ID NO: 129841 - protein, 57 aa, Setaria italica
  Transcript Sequence Number=SeqID_63867
  Gene Ontology: Mol. function=protein dimerization activity; Cellular component=nucleus; Biological process=regulation of transcription, DNA-dependent
  Homolog annotation: Hit_ID=B9T1D2; Match level="QueryCoverage=75%, HitCoverage=12%, E-value=2e-10, Identity=69%"; Hit description =Transcription factor TGA1, putative
FLWIGGFRPSEVLKILRPQLEPLTEPQLMAVGGLQHTSTQAEDLRHATWDRQGTQGI

SEQ ID NO: 129842 - protein, 60 aa, Setaria italica
  Transcript Sequence Number=SeqID_63868
  Gene Ontology: Mol. function=binding
  Homolog annotation: Hit_ID=Q9M7X4; Match level="QueryCoverage=96%, HitCoverage=6%, E-value=3e-13, Identity=56%"; Hit description =F3E22.19 protein
NGDRYNMLHSTFLDLLDFIRKENLEFLIEYVAESFWDQLVKFERLESIQAFKLKYQQVEK

SEQ ID NO: 129843 - protein, 116 aa, Setaria italica
  Transcript Sequence Number=SeqID_63869
RIFAYSELFHCVSYYNSVTPLLEQRMPVKLSFDPCNLKVKGEKGCISITEFKQQYHIYEKETWTGKTLTIKSEPRVLYGNYGYSVWYSVFIDLLKWIVFVCEMCLSALHIEIQVYV

SEQ ID NO: 129844 - protein, 130 aa, Setaria italica
  Transcript Sequence Number=SeqID_63870
  Gene Ontology: Mol. function=molecular_function; Cellular component =cellular_component; Biological process=ubiquitin-dependent protein catabolic process
  Homolog annotation: Hit_ID=C1BTE0; Match level="QueryCoverage=61%, HitCoverage=50%, E-value=2e-16, Identity=51%"; Hit description=DCN1 -like protein 1
  Pfam annotation: Domain name=DUF298; Domain location=1-75; Score =22.3; E_value=3.5e-06; Accession=PF03556.7; Description=Domain of unknown function (DUF298)
PFERAVAAWKIVLNGRFRLLDRWCNFVEKYQRHNISEDTWQQLLAFSRCVNEDLEGYDPRGAWPVLIDDFVEQMHRIYHSTDCSSAMESQCTISSTFKGLDLLPGSKRKCPPHFRSNEEDVELSDSFTRY

SEQ ID NO: 129845 - protein, 64 aa, Setaria italica
  Transcript Sequence Number=SeqID_63871
LARLCSLGHYIIQLVLLAFVLLGTVSGGTNVKARQGLVELSHAIDGIEGMRLAVLSTLLYAMYF

SEQ ID NO: 129846 - protein, 37 aa, Setaria italica
  Transcript Sequence Number=SeqID_63872
RLLDRWCNFVEKYQRHNISEDTWQQLLAFSRCLACSD

SEQ ID NO: 129847 - protein, 115 aa, Setaria italica
  misc_feature (51)..(51): Xaa can be any naturally occurring amino acid
  Transcript Sequence Number=SeqID_63873
  Gene Ontology: Cellular component=outer membrane
  Homolog annotation: Hit_ID=B6SPX1; Match level="QueryCoverage=84%, HitCoverage=18%, E-value=4e-40, Identity=80%"; Hit description=Outer membrane protein, OMP85 family protein
SPHFKEHLMGVFCLALLSTMNHNLAYNLTWRKLTDPARMSSNSVQEQLGHXFLSSVKYAYTVDQRDSSIRPTRGYAFLSSSQVGGLAPGSKYSRFLRQVYLDFLCPLSFELLRKY

SEQ ID NO: 129848 - protein, 108 aa, Setaria italica
  Transcript Sequence Number=SeqID_63874
  Gene Ontology: Cellular component=outer membrane
  Homolog annotation: Hit_ID=Q2RBM6; Match level="QueryCoverage=90%, HitCoverage=16%, E-value=1e-23, Identity=61%"; Hit description=Outer membrane protein, OMP85 family protein
MFILLLVPCQEFDLRVALPLGVLNGALNAGVAAGVIHPLERGSTGSVSPLSERFYLGGNRSLVCRLGGPSSLLGFKTRGLGATELRTCDPNNSENGTSTSPELNGLGR

SEQ ID NO: 129849 - protein, 56 aa, Setaria italica
  Transcript Sequence Number=SeqID_63875
LRFTLISLVLACGFDVMTCKAQKQKGSGWELQFPLLISRFWTELDETMLYKDLLRE

SEQ ID NO: 129850 - protein, 44 aa, Setaria italica
  Transcript Sequence Number=SeqID_63876
  Gene Ontology: Cellular component=outer membrane
  Homolog annotation: Hit_ID=B6SPX1; Match level="QueryCoverage=97%, HitCoverage=8%, E-value=7e-15, Identity=81%"; Hit description=Outer membrane protein, OMP85 family protein
RSSAGFGVVVPTRLFRIEVNYCHILRQFDHDKGKTGIQFNFASP

SEQ ID NO: 129851 - protein, 130 aa, Setaria italica
  misc_feature (119)..(119): Xaa can be any naturally occurring amino acid
  Transcript Sequence Number=SeqID_63877
  Homolog annotation: Hit_ID=B9SPR5; Match level="QueryCoverage=71%, HitCoverage=10%, E-value=8e-19, Identity=51%"; Hit description =Ubiquinone biosynthesis protein coq-8, putative
KLNPKPNPKLTKEKKKRTTRKIKGCTVPTGNLQDVSNTDKNGYSQLRTSDANDEAAAGSGGRIFSSDKILDAFMGVGEYQSMVHPNGKFGLGFRRYNNPSGGTLRCFGHSGMGGSTGFXDVENNFAMAVM

SEQ ID NO: 129852 - protein, 114 aa, Setaria italica
  misc_feature (53)..(53): Xaa can be any naturally occurring amino acid
  Transcript Sequence Number=SeqID_63878
  Homolog annotation: Hit_ID=B9SPR5; Match level="QueryCoverage=96%, HitCoverage=8%, E-value=2e-20, Identity=48%"; Hit description =Ubiquinone biosynthesis protein coq-8, putative
SRHHEPFAESTLLGSLMHGQIPNSQWIYDSPANSDVESKLRNYLLELGSDKIXLGIQVGFSYESNTCTVILYKYYVPYICFFHQVCAYKDGKVIIDTAAGMLGKYDPRPVQHDS

SEQ ID NO: 129853 - protein, 77 aa, Setaria italica
  Transcript Sequence Number=SeqID_63879
  Homolog annotation: Hit_ID=B9SPR5; Match level="QueryCoverage=79%, HitCoverage=6%, E-value=2e-11, Identity=58%"; Hit description =Ubiquinone biosynthesis protein coq-8, putative
RLATLTVDTEELQKLSGIRAGPGVPPELLSNIAQMASGVPVLFNTLNVRRAIIPAANGHCSARALCLRITYCLVVFV

SEQ ID NO: 129854 - protein, 40 aa, Setaria italica
  Transcript Sequence Number=SeqID_63880
GSGSSSSALCFMVEIKFLWCLLAPFYKSLIEWISVGRTSV

SEQ ID NO: 129855 - protein, 110 aa, Setaria italica
  misc_feature (36)..(36): Xaa can be any naturally occurring amino acid
  Transcript Sequence Number=SeqID_63881
  Gene Ontology: Mol. function=microtubule motor activity; Cellular component=microtubule associated complex; Biological process =microtubule-based movement
  Homolog annotation: Hit_ID=Q8L5E3; Match level="QueryCoverage=99%, HitCoverage=41%, E-value=2e-40, Identity=62%"; Hit description =Putative CENP-E-like kinetochore protein (Fragment)
DRRESELIKIIDDAKCREHELENELASMWVLVSKSXSELQSSDNGSWDGLSTIEEARAAYNFERRRCKELESVVSRLKGEDLRGLGVKVLEELQNFHVEALSRICQEKMA

SEQ ID NO: 129856 - protein, 138 aa, Setaria italica
  Transcript Sequence Number=SeqID_63882
LDRIASAFNDACHKFDSLEHIDRKELLALLCTPGVGLKLGGRVTANYYTRTPPQRNNQHARTGGRAESDRRYQVSRFTGSRTVHKNPQANTTAHQAGVQFRNHPQVRQTAVAHPNHSPQNYTTVHQTAPYQNLLLVSY

SEQ ID NO: 129857 - protein, 96 aa, Setaria italica
  Transcript Sequence Number=SeqID_63883
  Subcellular localization annotation: CTP_CleavageSite=11; ConfidenceScore=5.01e-01
GVGLKLGGRVTANYYTRTPPQRNNQHARTGGRAESDRRYQVSRFTGSRTVHKNPQANTTAHQAGVQFRNHPQVRQTAVAHPNHSPQNYTTVHQTAP

SEQ ID NO: 129858 - protein, 44 aa, Setaria italica
  Transcript Sequence Number=SeqID_63884
  Gene Ontology: Cellular component=chloroplast
  Homolog annotation: Hit_ID=B9SAK5; Match level="QueryCoverage=81%, HitCoverage=12%, E-value=9e-11, Identity=83%"; Hit description=Amino acid binding protein, putative
MLYRSTGRKIDDPELLEAVRLTIINNMIQYHPESSSQLASGGNI

SEQ ID NO: 129859 - protein, 64 aa, Setaria italica
  Transcript Sequence Number=SeqID_63885
  Homolog annotation: Hit_ID=B6U344; Match level="QueryCoverage=87%, HitCoverage=73%, E-value=2e-13, Identity=50%"; Hit description =Negatively light-regulated protein
  Pfam annotation: Domain name=Lg106; Domain location=13-64; Score =25.7; E_value=1.7e-05; Accession=PF07844.3; Description=Lg106-like protein
TFEVVLCLQASFQGKYGGISPKKPLINKDHERAYFDSADWVLGKQQGASSNSAKVPAAETLKPK

SEQ ID NO: 129860 - protein, 64 aa, Setaria italica
  misc_feature (33)..(33): Xaa can be any naturally occurring amino acid
  Transcript Sequence Number=SeqID_63886
MAALGNFHTCTDKEGERGGPWHHQLAAVSRVLXHSLFNSWLVRNLAIGNISNFKLVVAISISEI

SEQ ID NO: 129861 - protein, 82 aa, Setaria italica
  Transcript Sequence Number=SeqID_63887
  Subcellular localization annotation: CTP_CleavageSite=77; ConfidenceScore=5.10e-01
HVYLWLSWQAVHCFCFCSSTCLGPQACYGLRGVLGFWSAKGLHRLSFSIRSGVMVCSFLLNLSNVVDSLRQFVIPCRCAKFL

SEQ ID NO: 129862 - protein, 115 aa, Setaria italica
  misc_feature (24)..(24): Xaa can be any naturally occurring amino acid
  Transcript Sequence Number=SeqID_63888
  Homolog annotation: Hit_ID=B9SED3; Match level="QueryCoverage=93%, HitCoverage=9%, E-value=3e-39, Identity=69%"; Hit description =Nucleotide binding protein, putative
GDIYVFNLEVQRQHWFISRMNGGXVTSGGFCPKNNALVITTSKNEVYVFDVEAKQLGEWSKRYTHHLPRSFQEFPGEVIGLSFPPQSSSIVVVYSTRAMCLIDFGLPVIEDVQLS

SEQ ID NO: 129863 - protein, 88 aa, Setaria italica
  misc_feature (79)..(79): Xaa can be any naturally occurring amino acid
  Transcript Sequence Number=SeqID_63889
  Homolog annotation: Hit_ID=B9SED3; Match level="QueryCoverage=56%, HitCoverage=4%, E-value=4e-13, Identity=66%"; Hit description =Nucleotide binding protein, putative
MRRWRAMMRGWRVVSRGRVWQVILYKVSKDDSGTSKNVVKEQVRKWVYVGYVRAHTHDVRALTMAVPICREDELSEEKXRLKIRRREK

SEQ ID NO: 129864 - protein, 46 aa, Setaria italica
  misc_feature (9)..(9): Xaa can be any naturally occurring amino acid
  Transcript Sequence Number=SeqID_63890
  Homolog annotation: Hit_ID=A3BMN9; Match level="QueryCoverage=86%, HitCoverage=6%, E-value=3e-10, Identity=80%"; Hit description =Probable protein arginine N-methyltransferase 3
TFEEPIAMXEEESTLGSSASVGTDECPATMLRSRISIVKAYQSDLS

SEQ ID NO: 129865 - protein, 50 aa, Setaria italica
  Transcript Sequence Number=SeqID_63891
NCWHFFLNRKLKFESALWGSQMFNIRTVMEHCHAIQLAGLIFAEFSATLY

SEQ ID NO: 129866 - protein, 89 aa, Setaria italica
  Transcript Sequence Number=SeqID_63892
  Gene Ontology: Mol. function=carbon-nitrogen ligase activity, with glutamine as amido-N-donor
  Homolog annotation: Hit_ID=B6SPG6; Match level="QueryCoverage=64%, HitCoverage=9%, E-value=2e-22, Identity=89%"; Hit description=Amidase
CLVLLAQPWDLHVNKIFRYEFKENHENWVNTVKPKLGLDISTCVLRAVNFAHDNIKSLYAIRNELRAALKNLLKVVFHLSPSLIHRFFN

SEQ ID NO: 129867 - protein, 71 aa, Setaria italica
  Transcript Sequence Number=SeqID_63893
  Homolog annotation: Hit_ID=B6UEC8; Match level="QueryCoverage=53%, HitCoverage=8%, E-value=2e-14, Identity=97%"; Hit description=GTP binding protein
  Pfam annotation: Domain name=HSBP1; Domain location=10-55; Score =34.7; E_value=3.8e-07; Accession=PF06825.4; Description=Heat shock factor binding protein 1
  Subcellular localization annotation: CTP_CleavageSite=32; ConfidenceScore=5.09e-01
MDSEPSSQNPTDMTAFVQNLLGQMQTRFESMSQNIVSKKGLSRCRRTLCQKNILICNHFIVFILFIFSLKR

SEQ ID NO: 129868 - protein, 34 aa, Setaria italica
  Transcript Sequence Number=SeqID_63894
CMLTDLTMCNSIQNQNLQKQSYLLGSAMRALNPC

SEQ ID NO: 129869 - protein, 106 aa, Setaria italica
  Transcript Sequence Number=SeqID_63895
  Gene Ontology: Mol. function=protein binding; Cellular component =cytosolic ribosome; Biological process=protein transport
  Homolog annotation: Hit_ID=B6T903; Match level="QueryCoverage=84%, HitCoverage=44%, E-value=7e-43, Identity=95%"; Hit description =Nascent polypeptide-associated complex alpha subunit-like protein
  Pfam annotation: Domain name=NAC; Domain location=8-67; Score=94.1; E_ value=4.9e-25; Accession=PF01849.10; Description=NAC domain
  Subcellular localization annotation: CTP_CleavageSite=30; ConfidenceScore=5.08e-01
SGKSKQSRSEKKSRKAMLKLGMKPITGVSRVTVKKSKNILFVISKPDVFKSPNSDTYVIFGEAKIEDLSSQLQTQAAEQFKAPDLSQMISKPETSGLGQEDNEEEG

SEQ ID NO: 129870 - protein, 57 aa, Setaria italica
  misc_feature (41)..(41): Xaa can be any naturally occurring amino acid
  Transcript Sequence Number=SeqID_63896
  Gene Ontology: Mol. function=transferase activity, transferring glycosyl groups; Cellular component=integral to membrane; Biological process=cell wall organization and biogenesis
  Homolog annotation: Hit_ID=B4FBD8; Match level="QueryCoverage=100%, HitCoverage=10%, E-value=5e-23, Identity=85%"; Hit description=CSLA1- cellulose synthase-like family A; mannan synthase
WERLHITELGVGTFLFSCGWYDLAYGRDHFYIYLFFQSIAXFFIIGFGYVGTIVPQS

SEQ ID NO: 129871 - protein, 112 aa, Setaria italica
  misc_feature (104)..(104): Xaa can be any naturally occurring amino acid
  Transcript Sequence Number=SeqID_63897
  Gene Ontology: Mol. function=transferase activity, transferring glycosyl groups; Cellular component=integral to membrane; Biological process=cell wall organization and biogenesis
  Homolog annotation: Hit_ID=B4FBD8; Match level="QueryCoverage=100%, HitCoverage=21%, E-value=3e-58, Identity=97%"; Hit description=CSLA1- cellulose synthase-like family A; mannan synthase
TAVNEAGGWKDRTTVEDMDLAIRASLKGWKFVYLGDVQVKSELPSTFKAFRFQQHRWSCGPANLFRKMLMEIVTNKKVTIWKKIHVIYNFFLIRKIIAHIITFXSFYCLIIP

SEQ ID NO: 129872 - protein, 58 aa, Setaria italica
  Transcript Sequence Number=SeqID_63898
  Gene Ontology: Mol. function=transferase activity, transferring glycosyl groups; Cellular component=integral to membrane; Biological process=cell wall organization and biogenesis
  Homolog annotation: Hit_ID=B4FBD8; Match level="QueryCoverage=70%, HitCoverage=7%, E-value=1e-15, Identity=85%"; Hit description=CSLA1 -cellulose synthase-like family A; mannan synthase
MCFKGRQDGFFQCTSNIQKKRIWERLHITELGVGTFLFSCGWYDLAYGRDHFYIYLFF

SEQ ID NO: 129873 - protein, 61 aa, Setaria italica
  Transcript Sequence Number=SeqID_63899
YKYKQLNGQRKTNLAMMEMQCLHLVHDLMFNLPHLCDLFSALTSLVSCLWWYSSSVSDMLV

SEQ ID NO: 129874 - protein, 72 aa, Setaria italica
  Transcript Sequence Number=SeqID_63900
MMGSRARLVSLLLAFLLARAAEAGGGSGSRYLTKDERWMNQRLDHFSPTVGESAGPECKAVLQEITKLVDEQ

SEQ ID NO: 129875 - protein, 89 aa, Setaria italica
  Transcript Sequence Number=SeqID_63901
IEPPKQPRSGRNQGSRSRIAGEVTGLAARTFHRQGLTFNRRRHLRNDQSRAIGASRSGVPPEAEQLSRIPGAAEPEASALRLSIPHLPS

SEQ ID NO: 129876 - protein, 90 aa, Setaria italica
  Transcript Sequence Number=SeqID_63902
  Gene Ontology: Mol. function=aspartate kinase activity; Cellular component=chloroplast; Biological process=amino acid biosynthetic process
  Homolog annotation: Hit_ID=Q5JK18; Match level="QueryCoverage=66%, HitCoverage=10%, E-value=8e-23, Identity=88%"; Hit description =Aspartokinase
HDMLDELEQLLKGIAMMKELTLRTRDYLVSFGECMSTRIFAAYLNKIGVKARQVLLDISFNHLKSVFFSGYECTNLHEFVVIFLSLFVGY

SEQ ID NO: 129877 - protein, 122 aa, Setaria italica
  misc_feature (50)..(50): Xaa can be any naturally occurring amino acid
  misc_feature (74)..(74): Xaa can be any naturally occurring amino acid
  Transcript Sequence Number=SeqID_63903
  Gene Ontology: Mol. function=aspartate kinase activity; Cellular component=chloroplast; Biological process=amino acid biosynthetic process
  Homolog annotation: Hit_ID=Q5JK18; Match level="QueryCoverage=96%, HitCoverage=22%, E-value=3e-63, Identity=87%"; Hit description =Aspartokinase
MTHFDIGFITTDDFGNADVLEATYPAVAKRLHGDWIRDPAIPVVTGFLGXGWKSGAVTTLGRGGSDLTATTIGXWKDVDGVLTCDPNIYPHAKTVPYLTFEEATELAYFGAQVLHPQSMRPD

SEQ ID NO: 129878 - protein, 99 aa, Setaria italica
  misc_feature (75)..(75): Xaa can be any naturally occurring amino acid
  misc_feature (92)..(92): Xaa can be any naturally occurring amino acid
  Transcript Sequence Number=SeqID_63904
  Gene Ontology: Mol. function=aspartate kinase activity; Cellular component=chloroplast; Biological process=amino acid biosynthetic process
  Homolog annotation: Hit_ID=Q9MAX0; Match level="QueryCoverage=87%, HitCoverage=24%, E-value=5e-31, Identity=80%"; Hit description =Aspartokinase (Fragment)
PFGYLFLICFYSYFQQRAIISLIGNVKRSSLILEKTFQVLRKCGVNIQMISQGASKVNMSLIVHDSEAKACIKAXHQAFFEDEDVLTQVETXNLLVGPI

SEQ ID NO: 129879 - protein, 75 aa, Setaria italica
  Transcript Sequence Number=SeqID_63905
  Gene Ontology: Mol. function=nucleotide binding; Cellular component =nucleus; Biological process=defense response
  Homolog annotation: Hit_ID=Q852D5; Match level="QueryCoverage=82%, HitCoverage=4%, E-value=2e-21, Identity=77%"; Hit description =Powdery mildew resistance protein PM3b, putative, expressed
TTRLAASPAIGALEKASNYLLDKYKVMEGMEKQHEVLKRKLPAILDVIADAEKQASSHREGVKKWLGVLKTVAYQ

SEQ ID NO: 129880 - protein, 78 aa, Setaria italica
  Transcript Sequence Number=SeqID_63906
  Gene Ontology: Mol. function=inositol-1,3,4-trisphosphate 5/6-kinase activity; Cellular component=intracellular; Biological process =inositol trisphosphate metabolic process
  Homolog annotation: Hit_ID=B6TBA5; Match level="QueryCoverage=100%, HitCoverage=20%, E-value=2e-36, Identity=94%"; Hit description =Inositol-tetrakisphosphate 1-kinase 3
DYHEEHPEVTVLDPPNAIEHLNNRQSMLEEVADLNLSNLYGEVCTPRQLVITKDPSSIPTAVAMAGLTWPLVAKPLVV

SEQ ID NO: 129881 - protein, 62 aa, Setaria italica
  misc_feature (33)..(33): Xaa can be any naturally occurring amino acid
  Transcript Sequence Number=SeqID_63907
  Gene Ontology: Mol. function=inositol-1,3,4-trisphosphate 5/6-kinase activity; Cellular component=intracellular; Biological process =inositol trisphosphate metabolic process
  Homolog annotation: Hit_ID=B6TBA5; Match level="QueryCoverage=96%, HitCoverage=15%, E-value=4e-25, Identity=90%"; Hit description =Inositol-tetrakisphosphate 1-kinase 3
RLGLRLFNVDMIRELGTKDRYYIIDINYFPGFXGKMPGYEIMFTDFLLSLAQSKYKKYLSGT

SEQ ID NO: 129882 - protein, 135 aa, Setaria italica
  misc_feature (15)..(15): Xaa can be any naturally occurring amino acid
  misc_feature (46)..(46): Xaa can be any naturally occurring amino acid
  Transcript Sequence Number=SeqID_63908
  Gene Ontology: Mol. function=inositol-1,3,4-trisphosphate 5/6-kinase activity; Cellular component=intracellular; Biological process =inositol trisphosphate metabolic process
  Homolog annotation: Hit_ID=B6TBA5; Match level="QueryCoverage=99%, HitCoverage=34%, E-value=1e-61, Identity=88%"; Hit description =Inositol-tetrakisphosphate 1-kinase 3
  Pfam annotation: Domain name=Ins134_P3_kin; Domain location=2-135; Score=-15.4; E_value=3.3e-10; Accession=PF05770.3; Description =Inositol 1, 3, 4-trisphosphate 56-kinase
CGLALTKKKVKSFLXSPKLLQLARKNGITFVSIDESLPLSEQGPFXMLFLHKITSKEWQQVLEDYHEEHPEVTVLDPPNAIEHLNNRQSMLEEVADLNLSNLYGEVCTPRQLVITKDPSSIPTAVAMAGLTWPLV

SEQ ID NO: 129883 - protein, 58 aa, Setaria italica
  Transcript Sequence Number=SeqID_63909
  Gene Ontology: Mol. function=inositol-1,3,4-trisphosphate 5/6-kinase activity; Cellular component=intracellular; Biological process =inositol trisphosphate metabolic process
  Homolog annotation: Hit_ID=B6TBA5; Match level="QueryCoverage=100%, HitCoverage=15%, E-value=1e-22, Identity=91%"; Hit description =Inositol-tetrakisphosphate 1-kinase 3
NIAGEVCTPRQLVITKDPSSIPTAVAMAGLTWPLVAKPLVVDGTSKGHELYLAYDEAS

SEQ ID NO: 129884 - protein, 29 aa, Setaria italica
  Transcript Sequence Number=SeqID_63910
NLTKQMWASIGCQEFHVLQQVRMMQNLTL

SEQ ID NO: 129885 - protein, 82 aa, Setaria italica
  Transcript Sequence Number=SeqID_63911
  Pfam annotation: Domain name=Metallothio_Pro; Domain location=11-59; Score=-4.9; E_value=0.011; Accession=PF02069.8; Description =Prokaryotic metallothionein
  Subcellular localization annotation: CTP_CleavageSite=42; ConfidenceScore=5.67e-01
ATLVISYDFLQHSSWVKCDCRSSLCFSMSSTVFLQNSSSSFCCSDVKGVGGNPCNSCGCPNRSFDPFCTINFRLPLLKVLPT

SEQ ID NO: 129886 - protein, 43 aa, Setaria italica
  Transcript Sequence Number=SeqID_63912
THLYTMVQSFGTEEMLCTTKMTQAGLPFLPQRIEIVPQMSYSL

SEQ ID NO: 129887 - protein, 43 aa, Setaria italica
  Transcript Sequence Number=SeqID_63913
IRLQIEHAYNINTSFIGFLHELNPHISLISALQATECWHLDYH

SEQ ID NO: 129888 - protein, 38 aa, Setaria italica
  Transcript Sequence Number=SeqID_63914
SFALGIQSQLICSCRFRAVSQLLLHTLFPCHLNLIMLN

SEQ ID NO: 129889 - protein, 46 aa, Setaria italica
  Transcript Sequence Number=SeqID_63915
  Gene Ontology: Mol. function=kinase activity
EPWLLQVILAANDMPSINDVTYPELMEIINKLKDADGKLAGVDASD

SEQ ID NO: 129890 - protein, 49 aa, Setaria italica
  Transcript Sequence Number=SeqID_63916
PIIVDYQREQIRTEVQMYLKSKEAHQIHSSNNFLTTLADTCTKPHRQLI

SEQ ID NO: 129891 - protein, 58 aa, Setaria italica
  misc_feature (39)..(39): Xaa can be any naturally occurring amino acid
  Transcript Sequence Number=SeqID_63917
  Gene Ontology: Mol. function=zinc ion binding; Cellular component =intracellular
  Homolog annotation: Hit_ID=B9RM85; Match level="QueryCoverage=100%, HitCoverage=50%, E-value=4e-11, Identity=55%"; Hit description =Transcription factor, putative
RTSAPDIKSMQIHHEARHPKLPFEPEKLLNLHSSTPVAXEATSSNSKPKPGIRGSLKK

SEQ ID NO: 129892 - protein, 98 aa, Setaria italica
  Transcript Sequence Number=SeqID_63918
  Gene Ontology: Mol. function=cysteine-type peptidase activity; Biological process=proteolysis
INIKEIHWYLAIINTQKCEIQILDSLCWDFNRGDLADTLQGLQYHLNIIGRQQNLISHNWKDLQEDINHFRYKLAGILLCWKTNTTQTTQNISLLGSS

SEQ ID NO: 129893 - protein, 87 aa, Setaria italica
  misc_feature (19)..(19): Xaa can be any naturally occurring amino acid
  Transcript Sequence Number=SeqID_63919
  Gene Ontology: Mol. function=cysteine-type peptidase activity; Biological process=proteolysis
WKQNMISHNWKDLQVISWXSSWIITEQLQEPMQKDGSSCGLFMLKFMEYWTGDSLSHPITQEDINHFRYKLAGILLCWKSQVTRFFT

SEQ ID NO: 129894 - protein, 89 aa, Setaria italica
  Transcript Sequence Number=SeqID_63920
MYMYCWCLPFSIREFSVYFPLLVPVYIYGPRAPVMNTSAIPNNFNFLSSTVLVLIYDLRIFYVYNNLIQFMKATQMKILVSSDQLQKLK

SEQ ID NO: 129895 - protein, 84 aa, Setaria italica
  Transcript Sequence Number=SeqID_63921
FGSNTMLGIALVFITGALGPYIHRYKKGKIYRNPPNTKGKSPTVHIHLTNTTRYLLFQVYHTFSINPSTPGFVGLEHFPLHKSS

SEQ ID NO: 129896 - protein, 82 aa, Setaria italica
  Transcript Sequence Number=SeqID_63922
  Subcellular localization annotation: CTP_CleavageSite=61; ConfidenceScore=5.70e-01
STPIACAVDSATRMDPRRAYLSLLSLSQARRRLFTAAPPPRRLGRRGGGGGRRRRSSTGMRSARRGGARRGINRGGVTRRGA

SEQ ID NO: 129897 - protein, 71 aa, Setaria italica
  Transcript Sequence Number=SeqID_63923
  Gene Ontology: Mol. function=translation release factor activity, codon specific; Cellular component=cytoplasm; Biological process =translational termination
  Homolog annotation: Hit_ID=B6UHD9; Match level="QueryCoverage=94%, HitCoverage=14%, E-value=3e-31, Identity=98%"; Hit description =Peptide chain release factor 2
  Pfam annotation: Domain name=RF-1; Domain location=2-71; Score=57.7; E_value=4.4e-14; Accession=PF00472.12; Description=Peptidyl-tRNA hydrolase domain
MAVEIPEEDLEISFTRAGGKGGQNVNKVETAVRMVHIPTGIAVRCSEERSQLANKIKALSRLKAKLLDDTA

SEQ ID NO: 129898 - protein, 146 aa, Setaria italica
  misc_feature (60)..(60): Xaa can be any naturally occurring amino acid
  Transcript Sequence Number=SeqID_63924
  Subcellular localization annotation: CTP_CleavageSite=27; ConfidenceScore=5.47e-01
MGIPNFQILASPLSTASSDDTTTTNVSDEHLSPPSSPSICFDSVSESDASTSSSVASDGXPPGSEPVVSKKPRLPVRSWLASDEIALLEAVSEHRQKHGRLPSPNHLAAALRSRLRAKDRLSADEISRRLRALRSRYDNAVLRMSR

SEQ ID NO: 129899 - protein, 80 aa, Setaria italica
  misc_feature (45)..(45): Xaa can be any naturally occurring amino acid
  Transcript Sequence Number=SeqID_63925
  Gene Ontology: Mol. function=electron carrier activity; Cellular component=peroxisome; Biological process=oxidation reduction
  Homolog annotation: Hit_ID=B6TS46; Match level="QueryCoverage=100%, HitCoverage=20%, E-value=3e-37, Identity=88%"; Hit description =Sulfite oxidase
ILNRDHGYPLRVVVPGVIGARSVKWLDSINISEEECQGFFTQKDXQNVPPTVDWDNIDWSTRRPQMDFPVQSAICTLEDV

SEQ ID NO: 129900 - protein, 77 aa, Setaria italica
  Transcript Sequence Number=SeqID_63926
  Gene Ontology: Mol. function=electron carrier activity; Cellular component=peroxisome; Biological process=oxidation reduction
  Homolog annotation: Hit_ID=B6TS46; Match level="QueryCoverage=50%, HitCoverage=9%, E-value=6e-15, Identity=89%"; Hit description =Sulfite oxidase
ILNRDHGYPLRVVVPGVIGARSVKWLDSINISEEECQVFRKYECYAFSTLFFQCSNLTAILRPGFFYAKKITKLFST

SEQ ID NO: 129901 - protein, 41 aa, Setaria italica
  misc_feature (31)..(31): Xaa can be any naturally occurring amino acid
  Transcript Sequence Number=SeqID_63927
IFQRTTNSFALFALLALCASATTATYVPLGXMNPCMQYCMM

SEQ ID NO: 129902 - protein, 85 aa, Setaria italica
  misc_feature (64)..(64): Xaa can be any naturally occurring amino acid
  misc_feature (74)..(74): Xaa can be any naturally occurring amino acid
  Transcript Sequence Number=SeqID_63928
  Gene Ontology: Mol. function=electron carrier activity; Cellular component=peroxisome; Biological process=oxidation reduction
  Homolog annotation: Hit_ID=B6TS46; Match level="QueryCoverage=82%, HitCoverage=17%, E-value=1e-26, Identity=85%"; Hit description =Sulfite oxidase
  Pfam annotation: Domain name=Mo-co_dimer; Domain location=1-77; Score= -13.6; E_value=6.6e-05; Accession=PF03404.8; Description=Mo-co oxidoreductase dimerisation domain
SKVLTLSYYVILVLVPQSDKWAWVLFEATLDIPANAEIVAKAVDSAANVQPENVEDIWNLRGIXLNTSWHRIKXQNSSCVGRSKL

SEQ ID NO: 129903 - protein, 161 aa, Setaria italica
  misc_feature (94)..(94): Xaa can be any naturally occurring amino acid
  Transcript Sequence Number=SeqID_63929
  Gene Ontology: Mol. function=aspartic-type endopeptidase activity; Cellular component=chromatin; Biological process=RNA-dependent DNA replication
  Homolog annotation: Hit_ID=Q8SA93; Match level="QueryCoverage=100%, HitCoverage=7%, E-value=6e-35, Identity=39%"; Hit description =Putative polyprotein
VMDVLNSLIEKVSTEGLLQPISTRSIYHCVSLYADDVVLFLHPVTTDLFNVHCGSDSLSLCSSGVSLKYLGLPLSIKKLSKAQLQPLIEKVAQXLIYFATALELPPWCLKAVDKIRRNFLWRGQKEAKEGHCLIAWPKVSRPKELGGLGILDLQRFGWALR

SEQ ID NO: 129904 - protein, 119 aa, Setaria italica
  misc_feature (9)..(9): Xaa can be any naturally occurring amino acid
  misc_feature (59)..(59): Xaa can be any naturally occurring amino acid
  Transcript Sequence Number=SeqID_63930
  Gene Ontology: Mol. function=aspartic-type endopeptidase activity; Cellular component=chromatin; Biological process=RNA-dependent DNA replication
  Homolog annotation: Hit_ID=Q8SA93; Match level="QueryCoverage=100%, HitCoverage=4%, E-value=1e-35, Identity=57%"; Hit description =Putative polyprotein
YLGLPLSIXKLSKAQLQPLIEKVADHLPGWKFELMNRAGRATYVQLVLTSVLIYFATAXELPPWCLKAVDKIRRNFLWRGQKEAKEGHCLIEWPKVSRPKELGGLGILDLQRFGWALRV

SEQ ID NO: 129905 - protein, 100 aa, Setaria italica
  Transcript Sequence Number=SeqID_63931
  Gene Ontology: Mol. function=transferase activity; Cellular component= cytoplasm; Biological process=protein amino acid O-linked glycosylation
  Homolog annotation: Hit_ID=Q6K769; Match level="QueryCoverage=99%, HitCoverage=10%, E-value=9e-39, Identity=74%"; Hit description =Putative O-linked N-acetyl glucosamine transferase
YLFRQQIKMSLLPSVQPFHAMAFPIDPTLALEISKKYADHYSLVASRFGLPAFSHPSCAPIKADDKTSRLRIGYVSSDFGNHPLSHLMGSVFGMHNNDIV

SEQ ID NO: 129906 - protein, 58 aa, Setaria italica
  Transcript Sequence Number=SeqID_63932
LCKWYQLFVQQEDEPCTGTEQLERLDYVEVQHALVATVLREMQAQKVRGTLLIPLTQV

SEQ ID NO: 129907 - protein, 55 aa, Setaria italica
  Transcript Sequence Number=SeqID_63933
VCLHVTLQVLCKLLNIKIDGRNFIRTVRAPRPLYARLHFPASKVVRGKKPGAARE

SEQ ID NO: 129908 - protein, 117 aa, Setaria italica
  misc_feature (55)..(55): Xaa can be any naturally occurring amino acid
  Transcript Sequence Number=SeqID_63934
  Gene Ontology: Mol. function=4 iron, 4 sulfur cluster binding; Biological process=base-excision repair
  Homolog annotation: Hit_ID=Q6K6R4; Match level="QueryCoverage=90%, HitCoverage=7%, E-value=6e-09, Identity=42%"; Hit description =Putative transcriptional activator DEMETER
NGPLSQERSTCPSDPSQQGDLPPIIKQNFQPLHSSEEVLFSKEHSSCGNDFVRNXTEAPFVESHVYSNLKEVHTTTREQVQSGCSQHDNDVSVQTTADEKHRSPKLVVVKPSNFFYF

SEQ ID NO: 129909 - protein, 45 aa, Setaria italica
  Transcript Sequence Number=SeqID_63935
  Homolog annotation: Hit_ID=B3W6G6; Match level="QueryCoverage=84%, HitCoverage=1%, E-value=1e-11, Identity=81%"; Hit description =Putative transcriptional activator DEMETER
MSAGFVCVRGFDRTVRAPRPLYARLHFPASKVVRGKKPGAAREEE

SEQ ID NO: 129910 - protein, 96 aa, Setaria italica
  Transcript Sequence Number=SeqID_63936
  Gene Ontology: Mol. function=4 iron, 4 sulfur cluster binding; Cellular component=nucleus; Biological process=base-excision repair
  Homolog annotation: Hit_ID=B3W6G6; Match level="QueryCoverage=96%, HitCoverage=4%, E-value=5e-43, Identity=87%"; Hit description =Putative transcriptional activator DEMETER
KQTKIEIEDADMSKALVAITPEAASLPTPKLKNVSRLRTEHQVYELPDSHPLLEGFEQREPDDPCPYLLSIWTPGETAQSTDAPKTFCNSGETGKN

SEQ ID NO: 129911 - protein, 74 aa, Setaria italica
  Transcript Sequence Number=SeqID_63937
  Gene Ontology: Mol. function=hydrolase activity, acting on glycosyl bonds; Cellular component=beta-galactosidase complex; Biological process=carbohydrate metabolic process
  Homolog annotation: Hit_ID=B8A0V4; Match level="QueryCoverage=94%, HitCoverage=8%, E-value=2e-36, Identity=100%"; Hit description=Beta -galactosidase
PYAPDPLINTCNGFYCDQFTPNSAAKPKMWTENWSGWFLSFGGAVPYRPVEDLAFAVARFYQRGGTFQNYYMVW

SEQ ID NO: 129912 - protein, 31 aa, Setaria italica
  misc_feature (7)..(7): Xaa can be any naturally occurring amino acid
  Transcript Sequence Number=SeqID_63938
QSGCVNXSCNYRGSYSSSKCLKKCGQPSQTL

SEQ ID NO: 129913 - protein, 49 aa, Setaria italica
  Transcript Sequence Number=SeqID_63939
GEVAVEGAVRPPEHVVRQLEVGDEHPCVDRHRRLRRHTQQEAKHQQQQQ

SEQ ID NO: 129914 - protein, 35 aa, Setaria italica
  Transcript Sequence Number=SeqID_63940
LFLIVVGSSCLPSQHHISRTLGIAVDNSSDTLHCW

SEQ ID NO: 129915 - protein, 57 aa, Setaria italica
  Transcript Sequence Number=SeqID_63941
VSTYFPIVVPILIVLVNAYVACYNALWMHLETSMYTIVCWFHFHGIRSVNLGFCSMA

SEQ ID NO: 129916 - protein, 54 aa, Setaria italica
  Transcript Sequence Number=SeqID_63942
  Gene Ontology: Mol. function=microtubule motor activity; Cellular component=microtubule associated complex
  Homolog annotation: Hit_ID=Q93XF7; Match level="QueryCoverage=94%, HitCoverage=4%, E-value=5e-12, Identity=70%"; Hit description =Kinesin heavy chain (Fragment)
IACLVQEIVNVLDEARNSSLRVVSTVEAHLAELQQLQENHSGQAASINTHADKA

SEQ ID NO: 129917 - protein, 57 aa, Setaria italica
  Transcript Sequence Number=SeqID_63943
HVLFLKLATRKQCMLHFLYPIFRILRLLEEEEERQRQQNCPQIEFLIVELSRKNKVD

SEQ ID NO: 129918 - protein, 46 aa, Setaria italica
  Transcript Sequence Number=SeqID_63944
  Gene Ontology: Mol. function=voltage-gated chloride channel activity; Cellular component=integral to membrane
  Homolog annotation: Hit_ID=Q2VBU9; Match level="QueryCoverage=86%, HitCoverage=4%, E-value=3e-15, Identity=87%"; Hit description =Chloride channel-like protein Osclc
GCLILSMQRAPVVGILTRHDFMPEHVLGLHPFLFKSRWKKVRLGKL

SEQ ID NO: 129919 - protein, 69 aa, Setaria italica
  misc_feature (7)..(7): Xaa can be any naturally occurring amino acid
  Transcript Sequence Number=SeqID_63945
  Gene Ontology: Mol. function=voltage-gated chloride channel activity; Cellular component=integral to membrane; Biological process=chloride transport
  Homolog annotation: Hit_ID=Q2VBU9; Match level="QueryCoverage=100%, HitCoverage=8%, E-value=6e-30, Identity=91%"; Hit description =Chloride channel-like protein Osclc
VDLHPFXNTSPYTVLETMSLAKALILFREVGLRHLLVLPKSSTRAPVVGILTRHDFMPEHVLGLHPFLF

SEQ ID NO: 129920 - protein, 92 aa, Setaria italica
  Transcript Sequence Number=SeqID_63946
  Gene Ontology: Mol. function=voltage-gated chloride channel activity; Cellular component=integral to membrane; Biological process=chloride transport
  Homolog annotation: Hit_ID=Q2VBU9; Match level="QueryCoverage=71%, HitCoverage=8%, E-value=6e-20, Identity=78%"; Hit description =Chloride channel-like protein Osclc
FSLIGPLSPYLFLVLFCCPCLFLYLVAAYGRLVGMLIGSQSTLDHGLFAVLGSAALLGGSMRMTVSVCVIILELTNNLRMLPLVMLVLLISK

SEQ ID NO: 129921 - protein, 37 aa, Setaria italica
  Transcript Sequence Number=SeqID_63947
EVNLVRHGSAFAVFLASNFALTMLAAVLTVYVAPAAP

SEQ ID NO: 129922 - protein, 145 aa, Setaria italica
  Transcript Sequence Number=SeqID_63948
  Gene Ontology: Mol. function=chitinase activity; Cellular component =cell wall; Biological process=cell wall catabolic process
  Homolog annotation: Hit_ID=B4G1H3; Match level="QueryCoverage=93%, HitCoverage=40%, E-value=2e-71, Identity=94%"; Hit description =Endochitinase A2
  Pfam annotation: Domain name=Glyco_hydro_19; Domain location=1-144; Score=6.6; E_value=4e-09; Accession=PF00182.11; Description =Chitinase class I
SSVVFFRSPSRGFLSTYRSVKQMQMMELCAFLGHVGAKTSCGYGVATGGPTAWGLCYNHEMSPDQTYCDKTYTQYPCVEGAEYYGRGAIPVYWNYNYGAAGDGIKADLLHHPEYLEQNATLAFMAAMWRWMTPIKKSQPSAHEAF

SEQ ID NO: 129923 - protein, 123 aa, Setaria italica
  Transcript Sequence Number=SeqID_63949
  Gene Ontology: Mol. function=chitinase activity; Cellular component =vacuole; Biological process=cell wall catabolic process
  Homolog annotation: Hit_ID=B4G1H3; Match level="QueryCoverage=88%, HitCoverage=33%, E-value=1e-57, Identity=95%"; Hit description =Endochitinase A2
  Pfam annotation: Domain name=Glyco_hydro_19; Domain location=3-121; Score=-24.8; E_value=4.6e-07; Accession=PF00182.11; Description =Chitinase class I
YLTCCTKYLITQYPCVEGAEYYGRGAIPVYWNYNYGAAGDGIKADLLHHPEYLEQNATLAFMAAMLRWMTPIKKSQPSAHEAFVGTWKPTKNDTLSKRLPGFGATMNILYGESICGRGFRRPP

SEQ ID NO: 129924 - protein, 87 aa, Setaria italica
  Transcript Sequence Number=SeqID_63950
  Gene Ontology: Mol. function=chitinase activity; Biological process =cell wall catabolic process
  Homolog annotation: Hit_ID=B4G1H3; Match level="QueryCoverage=70%, HitCoverage=18%, E-value=3e-26, Identity=86%"; Hit description =Endochitinase A2
MNASVAFCSKYSGWCNRSALNILYGESICGRGFLDAMNVIISHYQYYLDLMGVGREHSGDNRDCAEQAPFNPSSKPDDQQQQQQSGS

SEQ ID NO: 129925 - protein, 77 aa, Setaria italica
  Transcript Sequence Number=SeqID_63951
THPEVIFMVSACAEPSYRSPIPITAADSYLGVGFYYPHPNFGPLDLHQTFHPRVLSSTTSHLLPPAMAMVPEQEPNA

SEQ ID NO: 129926 - protein, 43 aa, Setaria italica
  misc_feature (18)..(18): Xaa can be any naturally occurring amino acid
  Transcript Sequence Number=SeqID_63952
  Homolog annotation: Hit_ID=Q8W0Q5; Match level="QueryCoverage=97%, HitCoverage=5%, E-value=1e-11, Identity=61%"; Hit description =Putative vegetative storage protein
GVCGDCHTVMKFISEISXRKIIVRDASRFHHFEGGKCSCSEFW

SEQ ID NO: 129927 - protein, 50 aa, Setaria italica
  Transcript Sequence Number=SeqID_63953
EMLVVSTILRVGSVLVVNSGSSSADVQLCLSPLGMVEALTLLRGHTFLVV

SEQ ID NO: 129928 - protein, 36 aa, Setaria italica
  Transcript Sequence Number=SeqID_63954
IKLILLNHEGLYIVDLIGYVSSESTNKSHKIAIYKC

SEQ ID NO: 129929 - protein, 81 aa, Setaria italica
  misc_feature (14)..(14): Xaa can be any naturally occurring amino acid
  Transcript Sequence Number=SeqID_63955
  Gene Ontology: Mol. function=protein serine/threonine kinase activity; Biological process=protein amino acid phosphorylation
  Homolog annotation: Hit_ID=B6SY15; Match level="QueryCoverage=82%, HitCoverage=10%, E-value=7e-22, Identity=77%"; Hit description =Protein kinase
AFVLLASLLAFFLXWRKRRHGNSKKKKKNPKICEEGSAERRSHPRPNTGSILFDIAELAKATNGFAERNLVGRGGFGAVYR

SEQ ID NO: 129930 - protein, 112 aa, Setaria italica
  misc_feature (33)..(33): Xaa can be any naturally occurring amino acid
  misc_feature (47)..(47): Xaa can be any naturally occurring amino acid
  Transcript Sequence Number=SeqID_63956
  Gene Ontology: Mol. function=manganese ion binding; Cellular component=chloroplast
  Homolog annotation: Hit_ID=B9SXJ5; Match level="QueryCoverage=81%, HitCoverage=30%, E-value=8e-32, Identity=75%"; Hit description =Mutt/nudix hydrolase, putative
QDSPAGILEVGESAADGASRETLEEACADVEIXSPFAQLDIPLIGQXSYIIFRARLKTPNFSPGSESLECALFALDDIPFDSLAFSSIIVTLRMVFTPPCSPCPTHHLFLPL

SEQ ID NO: 129931 - protein, 53 aa, Setaria italica
  Transcript Sequence Number=SeqID_63957
  Gene Ontology: Mol. function=hydrolase activity
  Homolog annotation: Hit_ID=B6TED1; Match level="QueryCoverage=67%, HitCoverage=20%, E-value=8e-12, Identity=94%"; Hit description=Nudix hydrolase 23
GESAADGASRETLEEACADVEIVSPFAQLDIPLIGQVSENWHSHKVVLYSVHH

SEQ ID NO: 129932 - protein, 60 aa, Setaria italica
  Transcript Sequence Number=SeqID_63958
PKEKPKEKNGNYKGLNNKTLTKAKHIQFQAPTTYLKLFQSTARRQTRLRWRFNPKEWSDR

SEQ ID NO: 129933 - protein, 62 aa, Setaria italica
  Transcript Sequence Number=SeqID_63959
  Gene Ontology: Mol. function=oxidoreductase activity; Cellular component=mitochondrial respiratory chain; Biological process =carotenoid biosynthetic process
  Homolog annotation: Hit_ID=O82522; Match level="QueryCoverage=62%, HitCoverage=11%, E-value=1e-14, Identity=94%"; Hit description =Alternative oxidase
TAFISVLHLYETFGWSRRADYIKVHFAESWNEFHHLLIMEVCLNLSFPLVNFMCARASYRCL

SEQ ID NO: 129934 - protein, 77 aa, Setaria italica
  misc_feature (48)..(48): Xaa can be any naturally occurring amino acid
  Transcript Sequence Number=SeqID_63960
  Gene Ontology: Mol. function=oxidoreductase activity; Cellular component=mitochondrial respiratory chain; Biological process =carotenoid biosynthetic process
  Homolog annotation: Hit_ID=O82522; Match level="QueryCoverage=100%, HitCoverage=18%, E-value=4e-25, Identity=76%"; Hit description =Alternative oxidase
LKLHEEELKRLPAPEAALNYYLNEDLYLFDEFQTARVPCSRRPKIDLXVASAHRFPYSIADNLYDVFVNIRDDEAEH

SEQ ID NO: 129935 - protein, 118 aa, Setaria italica
  misc_feature (114)..(115): Xaa can be any naturally occurring amino acid
  Transcript Sequence Number=SeqID_63961
  Subcellular localization annotation: CTP_CleavageSite=39; ConfidenceScore=5.16e-01
VHHPTDATNQPTDRPTITRSKNLPPQSANRTDHRLSAIKQSKDNSRQQPPPGATADDSETSRLVDLLDLGAGAAASRRRVLVHSRGAAHCSVFPSSLGYYSLVRLFCFNFWVFXXFYF

SEQ ID NO: 129936 - protein, 80 aa, Setaria italica
  Transcript Sequence Number=SeqID_63962
RSRRWRRAPYPCLGADVMLLQHSLAASKQLQFFQPPINTPQSSHKKSNNAHSILQNNQLEWPKYKEAAKLRRGKFAGGRV

SEQ ID NO: 129937 - protein, 80 aa, Setaria italica
  misc_feature (22)..(22): Xaa can be any naturally occurring amino acid
  Transcript Sequence Number=SeqID_63963
  Gene Ontology: Mol. function=nucleic acid binding; Cellular component= intracellular; Biological process=RNA processing
  Homolog annotation: Hit_ID=B6T4S9; Match level="QueryCoverage=50%, HitCoverage=9%, E-value=2e-10, Identity=77%"; Hit description=Gamma response I protein
NDMTVKQVADKLASLLPKMGDXFENITRQRNPGDTPFNLLKRKRLLVDQMMLSIKKWFHSSAFAVARVYGVPSIAISFNW

SEQ ID NO: 129938 - protein, 34 aa, Setaria italica
  Transcript Sequence Number=SeqID_63964
  Gene Ontology: Mol. function=nucleic acid binding; Cellular component= intracellular; Biological process=RNA processing
  Homolog annotation: Hit_ID=B6T4S9; Match level="QueryCoverage=94%, HitCoverage=7%, E-value=6e-11, Identity=96%"; Hit description=Gamma response I protein
QQSEDDIYEQYKKRMMLGYRYRPNPLNNPRKQYY

SEQ ID NO: 129939 - protein, 104 aa, Setaria italica
  Transcript Sequence Number=SeqID_63965
  Gene Ontology: Mol. function=nucleic acid binding; Cellular component= intracellular; Biological process=RNA processing
  Homolog annotation: Hit_ID=B6T4S9; Match level="QueryCoverage=100%, HitCoverage=24%, E-value=9e-35, Identity=67%"; Hit description=Gamma response I protein
  Pfam annotation: Domain name=G-patch; Domain location=21-66; Score =64.1; E_value=5.4e-16; Accession=PF01585.15; Description=G-patch domain
CNDAEAQKATKEAAEKAKIQADNIGHKLLSKMGWREGEGLGSERRGRADPIMAGDVKKDHLGVGAVKPGEVTSEDDIYEQYKKRMMLGYRYRPNPLNNPRKQYY

SEQ ID NO: 129940 - protein, 107 aa, Setaria italica
  misc_feature (50)..(50): Xaa can be any naturally occurring amino acid
  Transcript Sequence Number=SeqID_63966
  Gene Ontology: Mol. function=nucleic acid binding; Cellular component= intracellular; Biological process=RNA processing
  Homolog annotation: Hit_ID=B6T4S9; Match level="QueryCoverage=68%, HitCoverage=17%, E-value=3e-32, Identity=91%"; Hit description=Gamma response I protein
  Pfam annotation: Domain name=Surp; Domain location=41-87; Score=42.3; E_value=2e-09; Accession=PF01805.12; Description=Surp module
VVLVLSRPTKFLLQADAPVAATPAGAVAPPPPNDMTVKQVADKLASFVAXKNGRQFENITRQRNPGDTPFKFLFDKHCPDYKYYEFQLAEEEKALGQSKDAEAYKKC

SEQ ID NO: 129941 - protein, 87 aa, Setaria italica
  misc_feature (39)..(39): Xaa can be any naturally occurring amino acid
  misc_feature (65)..(65): Xaa can be any naturally occurring amino acid
  Transcript Sequence Number=SeqID_63967
  Gene Ontology: Mol. function=nucleic acid binding; Cellular component= intracellular; Biological process=RNA processing
  Homolog annotation: Hit_ID=B6T4S9; Match level="QueryCoverage=81%, HitCoverage=16%, E-value=1e-22, Identity=79%"; Hit description=Gamma response I protein
YKSWVICIFLFDKHCPDYKYYEFQLAEEEKALGRSNDAXASKNGFIASFKAPSGPYRSSFEQKSXNYQTTALALYGAYEGNLICCVT

SEQ ID NO: 129942 - protein, 43 aa, Setaria italica
  Transcript Sequence Number=SeqID_63968
VIQEGNTSHYETMLHVSTHHHGSEFKATKINTTQRTKLRLNPP

SEQ ID NO: 129943 - protein, 26 aa, Setaria italica
  Transcript Sequence Number=SeqID_63969
EQYKKRMMLGYRYRPNPLNNPRKQYY

SEQ ID NO: 129944 - protein, 102 aa, Setaria italica
  misc_feature (36)..(36): Xaa can be any naturally occurring amino acid
  misc_feature (60)..(60): Xaa can be any naturally occurring amino acid
  misc_feature (81)..(81): Xaa can be any naturally occurring amino acid
  misc_feature (88)..(88): Xaa can be any naturally occurring amino acid
  Transcript Sequence Number=SeqID_63970
  Gene Ontology: Mol. function=nucleic acid binding; Cellular component= intracellular; Biological process=RNA processing
  Homolog annotation: Hit_ID=B6T4S9; Match level="QueryCoverage=59%, HitCoverage=14%, E-value=1e-22, Identity=83%"; Hit description=Gamma response I protein
  Pfam annotation: Domain name=Surp; Domain location=28-74; Score=26.3; E_value=0.00013; Accession=PF01805.12; Description=Surp module
LVFFLSLLLICLVPYPLPKLYMTVKQVADKLAKFCXQKNGRQFENITRQRNPGDTPFKFXFDKHCPDYKYYEFQLAEDGKXLLVKSKXAEASKNASSSTASF

SEQ ID NO: 129945 - protein, 47 aa, Setaria italica
  Transcript Sequence Number=SeqID_63971
HTFILDCMQYRLVTLGMCLLIVLHTFILDCSQYYFSLFYLHIYKVLL

SEQ ID NO: 129946 - protein, 123 aa, Setaria italica
  Transcript Sequence Number=SeqID_63972
  Gene Ontology: Mol. function=nucleic acid binding; Cellular component= cytoplasm; Biological process=RNA processing
  Homolog annotation: Hit_ID=B6TMU5; Match level="QueryCoverage=74%, HitCoverage=46%, E-value=7e-41, Identity=83%"; Hit description=RNA -binding protein 8A
  Pfam annotation: Domain name=RRM_1; Domain location=15-85; Score =68.2; E_value=3.1e-17; Accession=PF00076.14; Description=RNA recognition motif. (a.k.a. RRM, RBD, o
RQRIRPQRSIEGWTILVCGVKEDAEEEDLHNVFGEFGRVKDLHLNLERRTGYAKGYALIEYESFEEAQAAIRAMNGTQLLTKTVYVDWAFSRGPIKNAMSTRPPRPRSRTPPRRLNALMLTPY

SEQ ID NO: 129947 - protein, 45 aa, Setaria italica
  Transcript Sequence Number=SeqID_63973
NKIFPMQNMSSDQSKTRKKANPDKLTKPKLTWLKDANEHLILNEH

SEQ ID NO: 129948 - protein, 34 aa, Setaria italica
  Transcript Sequence Number=SeqID_63974
LHHDLWRSFINVANKAYHLYYMSNINKRPPKVMM

SEQ ID NO: 129949 - protein, 45 aa, Setaria italica
  Transcript Sequence Number=SeqID_63975
LYFCELMNWDESDDHPETWAWKIMALCFRFPSAFNSGKLGLSLVS

SEQ ID NO: 129950 - protein, 56 aa, Setaria italica
  Transcript Sequence Number=SeqID_63976
  Subcellular localization annotation: CTP_CleavageSite=49; ConfidenceScore=5.09e-01
LLSFFFEGSFQFYSSMAGSQKFFMGPPQWGGGSLFTFIAWRLVPPKDLSSKSDSVN

SEQ ID NO: 129951 - protein, 49 aa, Setaria italica
  Transcript Sequence Number=SeqID_63977
PKHSTDVQLRLETTRTSILQLRLQGRLQTSRDANQAPSKAEQGLSVAGN

SEQ ID NO: 129952 - protein, 57 aa, Setaria italica
  Transcript Sequence Number=SeqID_63978
FRKIRANQVSLNTEKRFTNYHVKQDSLLFPNTAIDRCQLIYWQQPARFPVESYKLNT

SEQ ID NO: 129953 - protein, 66 aa, Setaria italica
  Transcript Sequence Number=SeqID_63979
  Homolog annotation: Hit_ID=B6TKR0; Match level="QueryCoverage=93%, HitCoverage=25%, E-value=2e-19, Identity=69%"; Hit description=N -acetylglucosaminyl-phosphatidylinositol de-N-acetylase
ICLDSYGVSGHPNHQDVHQGICKLLHVNGQGNIEAWELASLNILRKYSGPVALNLRRSTKIAKCQP

SEQ ID NO: 129954 - protein, 47 aa, Setaria italica
  Transcript Sequence Number=SeqID_63980
SAANKPSQKPFHQSHMEDAPKTRLEHVKLRLAGPCLQTFNSSLLIAS

SEQ ID NO: 129955 - protein, 127 aa, Setaria italica
  Transcript Sequence Number=SeqID_63981
  Subcellular localization annotation: CTP_CleavageSite=56; ConfidenceScore=5.62e-01
KSMSASQKPYSSSSAILHRERANKVFGKRSARLLDRFLPFVKFFVDSFTTACLPLRCSGVTCRREQRQAADRRRLLYPVVVQELRTNRCALLASNTPTTSLERCYKPSQKPFHQSHMEDAPKTDLNM

SEQ ID NO: 129956 - protein, 90 aa, Setaria italica
  Transcript Sequence Number=SeqID_63982
QDVSVASMRWSWSRRAWSRRGNHCAQSHNGSEISDAVVTLQTICVAAKFEGSTVYKNTSLEDMQLYDHSFLQDQRQFGCSACLAISSTID

SEQ ID NO: 129957 - protein, 52 aa, Setaria italica
  Transcript Sequence Number=SeqID_63983
  Gene Ontology: Mol. function=electron carrier activity; Biological process=oxidation reduction
  Homolog annotation: Hit_ID=Q8LL74; Match level="QueryCoverage=65%, HitCoverage=6%, E-value=7e-10, Identity=82%"; Hit description =Cytochrome P450 monooxygenase CYP72A16
HPEWQEQAREEVLNHFGRARPDFESLNRLKIVSMKSVFSCTPSVCRHLGQAS

SEQ ID NO: 129958 - protein, 111 aa, Setaria italica
  misc_feature (9)..(9): Xaa can be any naturally occurring amino acid
  misc_feature (25)..(25): Xaa can be any naturally occurring amino acid
  misc_feature (36)..(36): Xaa can be any naturally occurring amino acid
  Transcript Sequence Number=SeqID_63984
  Gene Ontology: Mol. function=electron carrier activity; Biological process=oxidation reduction
  Homolog annotation: Hit_ID=Q8LL74; Match level="QueryCoverage=98%, HitCoverage=20%, E-value=2e-36, Identity=69%"; Hit description =Cytochrome P450 monooxygenase CYP72A16
FQTIFIPGXWFLPTKNNRRMREIDXEIRTILHEIIXGKREKAMKNGETNNDDLLGLLLESNMKQSNGNAKLGLTTEDVIEECKLFYFAGMETTSVLLTWTLVVLSMHPELV

SEQ ID NO: 129959 - protein, 39 aa, Setaria italica
  Transcript Sequence Number=SeqID_63985
RSSCKGISIGVPLHLHLLELLFFVFTRNKYIVPLGSSLL

SEQ ID NO: 129960 - protein, 88 aa, Setaria italica
  misc_feature (5)..(5): Xaa can be any naturally occurring amino acid
  Transcript Sequence Number=SeqID_63986
ITSRXSNLAAYADSLERDHSVADLRSVVALSAVIPSAAPSAATPRPPHACNTDVLLCLSLSARTLLVNACEEGKSEMTEVFFNVKVVL

SEQ ID NO: 129961 - protein, 75 aa, Setaria italica
  Transcript Sequence Number=SeqID_63987
PSCGLPSAATPRPPHACNTDVLLCLSLSARTLLVNACEEGKSEMTEAFLMSKLYFNDKEVAAKEFLSVCLFICIF

SEQ ID NO: 129962 - protein, 83 aa, Setaria italica
  misc_feature (46)..(46): Xaa can be any naturally occurring amino acid
  Transcript Sequence Number=SeqID_63988
  Gene Ontology: Mol. function=nucleoside-triphosphatase activity; Cellular component=signal recognition particle, endoplasmic reticulum targeting; Biological process=SRP-dependent cotranslational protein targeting to membrane
  Homolog annotation: Hit_ID=P49968; Match level="QueryCoverage=66%, HitCoverage=10%, E-value=7e-16, Identity=78%"; Hit description =Signal recognition particle 54 kDa protein 1
QLFGSYMESDPVKIAVEGLEMYWKENCDLIFAGTSGSHKQEAALFXEEMRQVSEATAWNMCQALWTRFMNEAPAETELLPTYL

SEQ ID NO: 129963 - protein, 81 aa, Setaria italica
  Transcript Sequence Number=SeqID_63989
QYGTNRWCTPSYANGPLRFFRIIIYMGQAHISNNPPPDLKCPSEILPVSHCYLYTSVLARTVKLNSRLELQATFIHHLNNG

SEQ ID NO: 129964 - protein, 73 aa, Setaria italica
  Transcript Sequence Number=SeqID_63990
  Gene Ontology: Mol. function=nucleoside-triphosphatase activity; Cellular component=signal recognition particle, endoplasmic reticulum targeting; Biological process=SRP-dependent cotranslational protein targeting to membrane
  Homolog annotation: Hit_ID=P49967; Match level="QueryCoverage=63%, HitCoverage=9%, E-value=7e-12, Identity=69%"; Hit description=Signal recognition particle 54 kDa protein 3
EVALGGAKEASRHQPCASSSPDNLSLSIQLFGSYMESDPVKIAVEGLEMYWKENCDLIFAGTSGSHKQEAALF

SEQ ID NO: 129965 - protein, 40 aa, Setaria italica
  Transcript Sequence Number=SeqID_63991
AFHHEKIKVIAYSLFFSVDGFPFLHFKSQYVRLSDNAFSK

SEQ ID NO: 129966 - protein, 65 aa, Setaria italica
  Transcript Sequence Number=SeqID_63992
  Gene Ontology: Mol. function=electron carrier activity; Biological process=oxidation reduction
  Homolog annotation: Hit_ID=Q9ATU3; Match level="QueryCoverage=81%, HitCoverage=10%, E-value=3e-21, Identity=84%"; Hit description =Putative cytochrome P450
KDMELGGIRYPAGVNLLLPILFIHHDPDIWGKDASEFNPARFSDGISNATKHPETRGDRQGTQGI

SEQ ID NO: 129967 - protein, 79 aa, Setaria italica
  Transcript Sequence Number=SeqID_63993
FVLNARVLQLMRLEIPPVMPAEWIEMQPELLQLNDRASSDAQLDFSTDSARWLCCPVNLKWVSDLSRADPFLSSSRNWA

SEQ ID NO: 129968 - protein, 104 aa, Setaria italica
  misc_feature (104)..(104): Xaa can be any naturally occurring amino acid
  Transcript Sequence Number=SeqID_63994
  Gene Ontology: Mol. function=RNA binding; Cellular component =cytoplasm; Biological process=nuclear-transcribed mRNA catabolic process, deadenylation-dependent decay
  Homolog annotation: Hit_ID=B9SBN7; Match level="QueryCoverage=99%, HitCoverage=13%, E-value=8e-26, Identity=53%"; Hit description=RNA binding protein, putative
  Pfam annotation: Domain name=PUF; Domain location=13-47; Score=19.7; E_value=0.012; Accession=PF00806.11; Description=Pumilio-family RNA binding repeat
  Pfam annotation: Domain name=PUF; Domain location=49-83; Score=21.5; E_value=0.0035; Accession=PF00806.11; Description=Pumilio-family RNA binding repeat
  Pfam module annotation: Pfam domain module=PUF::PUF; Domain location =13-47::49-83
DRRMCIICEITKRQPAELIKVCCNPHGTRVMQKVIETINTTEASMVVTALSHGIVRLMTDTNGNHVVNRCLDTFLPEHRAFIIEAAASCYLQLARDRHGCCVLX

SEQ ID NO: 129969 - protein, 67 aa, Setaria italica
  Transcript Sequence Number=SeqID_63995
  Gene Ontology: Mol. function=threonine-type endopeptidase activity; Cellular component=proteasome core complex; Biological process =ubiquitin-dependent protein catabolic process
  Homolog annotation: Hit_ID=A2Q2I3; Match level="QueryCoverage=98%, HitCoverage=24%, E-value=4e-27, Identity=84%"; Hit description =Proteasome subunit beta type
MMDLPAKGGFSFDLCRRNDSLEKNGLKIPGFLKTGTTIVGLVFQDGVVLGADTRATEGPIVADKNCE

SEQ ID NO: 129970 - protein, 128 aa, Setaria italica
  misc_feature (10)..(10): Xaa can be any naturally occurring amino acid
  misc_feature (86)..(86): Xaa can be any naturally occurring amino acid
  Transcript Sequence Number=SeqID_63996
  Gene Ontology: Mol. function=protein serine/threonine kinase activity; Cellular component=protein kinase CK2 complex; Biological process=protein amino acid phosphorylation
  Homolog annotation: Hit_ID=Q8VX01; Match level="QueryCoverage=97%, HitCoverage=40%, E-value=1e-35, Identity=49%"; Hit description =Casein kinase II alpha subunit
  Pfam annotation: Domain name=Pkinase; Domain location=1-114; Score= -111.4; E_value=0.074; Accession=PF00069.17; Description=Protein kinase domain
KRQLRLIDWXLAEFYHPKMEYNARVASRCYKGPELLVDLLDYDYSLDLWSLGCMFASMIFRVDPFFSGQDNYDQLVKITENFYLLXAIDLVDKLLRYDHQERPTAKETMAHPYFNPIRSSESSRTNSQ

SEQ ID NO: 129971 - protein, 133 aa, Setaria italica
  misc_feature (75)..(75): Xaa can be any naturally occurring amino acid
  misc_feature (119)..(119): Xaa can be any naturally occurring amino acid
  Transcript Sequence Number=SeqID_63997
  Gene Ontology: Mol. function=protein serine/threonine kinase activity; Cellular component=protein kinase CK2 complex; Biological process=protein amino acid phosphorylation
  Homolog annotation: Hit_ID=Q8VX01; Match level="QueryCoverage=100%, HitCoverage=38%, E-value=5e-44, Identity=55%"; Hit description =Casein kinase II alpha subunit
  Pfam annotation: Domain name=Pkinase; Domain location=1-125; Score= -95.1; E_value=0.0079; Accession=PF00069.17; Description=Protein kinase domain
RLIDWGLAEFYHPKMEYNARVASRCYKGPELLVDLLDYDYSLDLWSLGCMFASMIFRVDPFFSGQDNYDQLVKIXRHNRKPWTKFVNARNIHLVSSEAIDLVDKLLRYDHQERPTAKEXMAHPYFNPIRSSES

SEQ ID NO: 129972 - protein, 50 aa, Setaria italica
  Transcript Sequence Number=SeqID_63998
LVKITEVLGTEDFYNYLEKYGLQLRLIDWGLAEFYHPKMEYNARVASGPL

SEQ ID NO: 129973 - protein, 43 aa, Setaria italica
  Transcript Sequence Number=SeqID_63999
  Homolog annotation: Hit_ID=B4FRR0; Match level="QueryCoverage=88%, HitCoverage=20%, E-value=5e-15, Identity=94%"; Hit description =Cation transport protein chaC
MAAAASPTWVFGYGSLIWNPGFAYDARVVGFVRDYRRVFYQGS

SEQ ID NO: 129974 - protein, 64 aa, Setaria italica
  Transcript Sequence Number=SeqID_64000
  Gene Ontology: Cellular component=chloroplast
MPKASFGKPEVVITPEGTVDSSKDEHIRISFAGLRRLILEAVTFGSFLWDVESFVDSRYHFVTN

SEQ ID NO: 129975 - protein, 51 aa, Setaria italica
  Transcript Sequence Number=SeqID_64001
ACRNSVTSWTSISGVQTCNVWLQRFGVTGYCWFMAIWSHLRTSFGEIIVFD

SEQ ID NO: 129976 - protein, 65 aa, Setaria italica
  Transcript Sequence Number=SeqID_64002
  Homolog annotation: Hit_ID=B6T6D2; Match level="QueryCoverage=70%, HitCoverage=27%, E-value=8e-17, Identity=93%"; Hit description =Disease resistance response protein 206
MVTKEPMFCNTIKTTPVVVFGNTVVIDDKLTEGTSQSSATVGRAQGYYMVASVANLELLVNMNVV

SEQ ID NO: 129977 - protein, 83 aa, Setaria italica
  Transcript Sequence Number=SeqID_64003
  Homolog annotation: Hit_ID=B6T6D2; Match level="QueryCoverage=74%, HitCoverage=37%, E-value=2e-23, Identity=88%"; Hit description =Disease resistance response protein 206
  Subcellular localization annotation: CTP_CleavageSite=51; ConfidenceScore=5.38e-01
PTAVRVVTARPSRRACKSAGVPTSVRVVSGPRGYFGNTVVIDDKLTEGTSRSSATVGRAQGYYMVASVANLELLVSMNVVLTS

SEQ ID NO: 129978 - protein, 115 aa, Setaria italica
  Transcript Sequence Number=SeqID_64004
  Gene Ontology: Mol. function=ATP binding; Biological process=apoptosis
  Homolog annotation: Hit_ID=Q8H5J9; Match level="QueryCoverage=100%, HitCoverage=22%, E-value=4e-14, Identity=36%"; Hit description =Fusarium resistance protein I2C-5-like
KMASIAMEMARKMQGSFMYAHIGSALLRANFSIKSWSMVLTNLREFLQKNMSLLGEEYPDDLKAKDHPQWTWNLTKQKHDEYFMLYEIYPRGSGAEEVPDITMIDLLFGCAQPRG

SEQ ID NO: 129979 - protein, 93 aa, Setaria italica
  Transcript Sequence Number=SeqID_64005
RSNIGSALLRANFSIKSWSMVLTNLREFLQKNMSLLGEEYPDDLKAKDHPQWTWNLTKQKHDEYFMLYEIYPRPRTSLAAEHIQIADLSLLYL

SEQ ID NO: 129980 - protein, 53 aa, Setaria italica
  Transcript Sequence Number=SeqID_64006
  Gene Ontology: Mol. function=transporter activity; Cellular component= mitochondrial inner membrane
  Homolog annotation: Hit_ID=Q2R030; Match level="QueryCoverage=77%, HitCoverage=12%, E-value=2e-11, Identity=80%"; Hit description=ADP ,ATP carrier protein 2, mitochondrial, putative, expressed
KGLLTTINYKKEVGANILSGMAGAGVLSGYDQLQQFASRHGHNFERKMKGVLK

SEQ ID NO: 129981 - protein, 68 aa, Setaria italica
  Transcript Sequence Number=SeqID_64007
  Gene Ontology: Mol. function=NAD-dependent histone deacetylase activity; Cellular component=chromatin silencing complex; Biological process=regulation of transcription, DNA-dependent
  Homolog annotation: Hit_ID=Q0Z9W4; Match level="QueryCoverage=80%, HitCoverage=15%, E-value=1e-18, Identity=85%"; Hit description=SIR2 -family protein HDAC1
MHQEHLCLHAVPSLTHMALVELERAGLLKFVISQNVDSLHLRSGFPREKLSELHGNSRTSKVCHKPEC

SEQ ID NO: 129982 - protein, 111 aa, Setaria italica
  Transcript Sequence Number=SeqID_64008
PLRKVKCRSMLEGERLISEQTHGTPHGSDCSSRIKLPLQSIHPYKIRLLEKNHQPEYQNCSGQKFKSNGPIRKELRGRDIQTMGFSRRYELSPVNVSIDLQTPPCCLCRSS

SEQ ID NO: 129983 - protein, 67 aa, Setaria italica
  Transcript Sequence Number=SeqID_64009
WEAEAECVGSTSNLLLILRQHASLWNYDNFTELKILDTPLRSGKRLGAYLGDSSSVGNFITTTRLHL

SEQ ID NO: 129984 - protein, 46 aa, Setaria italica
  Transcript Sequence Number=SeqID_64010
FISVSNSSYNPDNHHITIIQTLASVNSQAAFSYLVLLVIVLLISWS

SEQ ID NO: 129985 - protein, 55 aa, Setaria italica
  Transcript Sequence Number=SeqID_64011
VLARSSDWLVPDAGRVCIGFDFSDHISSSSRLPDSNHDMHRINNLIDAIYCEEKS

SEQ ID NO: 129986 - protein, 65 aa, Setaria italica
  Transcript Sequence Number=SeqID_64012
VLPDFICGFFHPVIYNALHKLDLAVTLHAHPLVEVQSILSKVSARCWPHSFCNFKLKNREISPSS

SEQ ID NO: 129987 - protein, 61 aa, Setaria italica
  Transcript Sequence Number=SeqID_64013
LQTNLSMTKQKQPHLYKQYVQLTNRNQAQNLGSQGKGGQTQLITEKSQSKPKITIYIEVEH

SEQ ID NO: 129988 - protein, 63 aa, Setaria italica
  Transcript Sequence Number=SeqID_64014
MMIASCDLCFPGMERHVLSFEAGAVLPDSGKWQAPAYCFNGSNADAPAPSPVDQLIRRGSSCS

SEQ ID NO: 129989 - protein, 130 aa, Setaria italica
  Transcript Sequence Number=SeqID_64015
  Gene Ontology: Mol. function=DNA topoisomerase (ATP-hydrolyzing) activity; Cellular component=chromosome
KADDSDDDKPLSLKINSSKMSSNCASRPVLQKAVAKVEQPDEDSDDDKPLASRLPTNAAPKSGGNASEDSEDEKPLAARFSKVSGSGNLKLTSSSKGLNNDSNGPRNLGKRPLDKQVKLLKLKFLSTYLL

SEQ ID NO: 129990 - protein, 123 aa, Setaria italica
  Transcript Sequence Number=SeqID_64016
  Gene Ontology: Mol. function=DNA topoisomerase (ATP-hydrolyzing) activity; Cellular component=chromosome; Biological process=DNA unwinding during replication
  Homolog annotation: Hit_ID=B2DDA6; Match level="QueryCoverage=70%, HitCoverage=9%, E-value=2e-35, Identity=75%"; Hit description =Topoisomerase I
  Pfam annotation: Domain name=Topoisom_I_N; Domain location=51-123; Score=-34.4; E_value=1e-07; Accession=PF02919.7; Description =Eukaryotic DNA topoisomerase I, DNA b
  Subcellular localization annotation: CTP_CleavageSite=30; ConfidenceScore=5.50e-01
MACLSKNVVKKSPASMKKGIKKMKGKVKTKMMKNSQFSKTMKVPPGSGGGKKWTTLEHNGVIFPPPYKPHGVKMLYNGQPVDLTPEQEEVATMFAVMKDTDYAGKPTFIENFFTDWRTLLGKN

SEQ ID NO: 129991 - protein, 99 aa, Setaria italica
  Transcript Sequence Number=SeqID_64017
SSAAHSSKSNSNDKSKLKRPLVKEENSDDSDDDVPIGLRKKVEEKKLKRVDEKADDSDDDKPLSLKINSSKMSSNCASRPVLQKAVAKVEQPDEDSDDD

SEQ ID NO: 129992 - protein, 72 aa, Setaria italica
  Transcript Sequence Number=SeqID_64018
  Gene Ontology: Mol. function=DNA topoisomerase (ATP-hydrolyzing) activity; Cellular component=chromosome; Biological process=DNA unwinding during replication
  Homolog annotation: Hit_ID=P93119; Match level="QueryCoverage=76%, HitCoverage=6%, E-value=4e-16, Identity=74%"; Hit description=DNA topoisomerase 1
ALQFDFLGKDSIRYFNTVEVEELVYKAIEGFRAGKKPGKDLFDQLDTTRLNAHLKEPNAWDLTRQKVSLPLT

SEQ ID NO: 129993 - protein, 60 aa, Setaria italica
  Transcript Sequence Number=SeqID_64019
  Gene Ontology: Mol. function=DNA topoisomerase (ATP-hydrolyzing) activity; Cellular component=chromosome; Biological process=DNA unwinding during replication
  Homolog annotation: Hit_ID=B9SSQ1; Match level="QueryCoverage=90%, HitCoverage=6%, E-value=6e-20, Identity=81%"; Hit description=DNA topoisomerase type I, putative
  Pfam annotation: Domain name=Topoisom_I_N; Domain location=1-60; Score=-106.1; E_value=0.0065; Accession=PF02919.7; Description =Eukaryotic DNA topoisomerase I, DNA b
HNGVIFPPPYKPHGVKMLYNGQPVDLTPEQEEVATMFAVMKDTDYAGKPTFINNMVFTKE

SEQ ID NO: 129994 - protein, 46 aa, Setaria italica
  Transcript Sequence Number=SeqID_64020
SQVCFESACTYNFFLDVSLAGVTYRTFVTTTRRISEAKMWQRGKLD

SEQ ID NO: 129995 - protein, 101 aa, Setaria italica
  Transcript Sequence Number=SeqID_64021
  Gene Ontology: Mol. function=manganese ion binding; Cellular component=nucleus; Biological process=response to DNA damage stimulus
  Homolog annotation: Hit_ID=A5YT63; Match level="QueryCoverage=86%, HitCoverage=12%, E-value=3e-43, Identity=98%"; Hit description=Mre11A
  Pfam annotation: Domain name=Mre11_DNA_bind; Domain location=1-101; Score=-38.0; E_value=9.5e-07; Accession=PF04152.6; Description=Mre11 DNA-binding presumed domain
VIFPGFRIIQLLQVRNLIEKSSQPTASRSEPKLPLVRIKVDYSGFSTINPQRFGQKYVGKVANPQDILIFSKSAKKRQATGDHIDDSEKLRPEELNQQTIR

SEQ ID NO: 129996 - protein, 91 aa, Setaria italica
  Transcript Sequence Number=SeqID_64022
YDDDVVVVDDIHLNNKMLSSSSSIVYCYFVFPLDMFCCCSQASLLLCFIWLCCTLVNLIIVSVQYVAAQIMLSATVFGFLTTLCGCNDGLL

SEQ ID NO: 129997 - protein, 123 aa, Setaria italica
  misc_feature (31)..(31): Xaa can be any naturally occurring amino acid
  Transcript Sequence Number=SeqID_64023
YFVDIPSIGRAMASAQELLKQVHEGEPISSXMLSDVYIFRIAIEALRMGLNNAARCHIDTRDKHGSEKLEFSELQSDEKCHILLVQALRSQLKEFDSVVAIVDASCLAGIKEYYLVTTSLFPF

SEQ ID NO: 129998 - protein, 101 aa, Setaria italica
  Transcript Sequence Number=SeqID_64024
  Gene Ontology: Mol. function=sequence-specific DNA binding; Cellular component=nucleus; Biological process=regulation of transcription, DNA-dependent
  Homolog annotation: Hit_ID=P24345; Match level="QueryCoverage=65%, HitCoverage=18%, E-value=3e-33, Identity=98%"; Hit description =Homeotic protein knotted-1
MTWPLCSPVTFTTDVLNYPVHIFLRMRINSSRAQQETQKVALAESTGLDLKQINNWFINQRKRHWKPSEEMHHLMMDGYHTTGAFYMDGHFINDGGLYRLG

SEQ ID NO: 129999 - protein, 76 aa, Setaria italica
  Transcript Sequence Number=SeqID_64025
KRREEDYSIEKCIDIVNAMERLSDEQKVDANEVFQSETIRKILVGAKKSSVRLIWLKKRLLGYVPFLSFVPCSSIG

SEQ ID NO: 130000 - protein, 104 aa, Setaria italica
  misc_feature (44)..(44): Xaa can be any naturally occurring amino acid
  Transcript Sequence Number=SeqID_64026
  Homolog annotation: Hit_ID=B9SC17; Match level="QueryCoverage=95%, HitCoverage=12%, E-value=1e-30, Identity=65%"; Hit description=Lipid binding protein, putative
SSNCDPSQFHGTLRRAKSENDPNSWSAPGGEKFMIRGKTYLTDXPRVVGGDPLLKLIAVDWFKVNERFDSVALHPKSLVQSEAAKKIPFILVINLARLPDKNQN

SEQ ID NO: 130001 - protein, 57 aa, Setaria italica
  Transcript Sequence Number=SeqID_64027
  Gene Ontology: Mol. function=branched-chain-amino-acid transaminase activity; Biological process=branched chain family amino acid metabolic process
  Homolog annotation: Hit_ID=B6THP1; Match level="QueryCoverage=78%, HitCoverage=11%, E-value=3e-15, Identity=86%"; Hit description =Branched-chain-amino-acid aminotransferase
EGHLHIYVRFLIIDAHVQVVSAQRRAKEKGHSDVLYLDSVHNKFVEEVSSCNIFMVK

SEQ ID NO: 130002 - protein, 75 aa, Setaria italica
  misc_feature (4)..(4): Xaa can be any naturally occurring amino acid
  misc_feature (8)..(8): Xaa can be any naturally occurring amino acid
  Transcript Sequence Number=SeqID_64028
  Subcellular localization annotation: CTP_CleavageSite=47; ConfidenceScore=5.18e-01
FFFXFFFXFFFLVSETSSSVFKNSNMKKIFYQYTKQWASSDSTRHGCCSTGAAYSVVKNKGITATSHKLFLTTTL

SEQ ID NO: 130003 - protein, 71 aa, Setaria italica
  Transcript Sequence Number=SeqID_64029
NMKKIFTNIPNNGQVLIVPGTVAALLEQLIPWSRTKELQPQATNYFSPRLSDMIAACIICLFIISESRGEK

SEQ ID NO: 130004 - protein, 113 aa, Setaria italica
  Transcript Sequence Number=SeqID_64030
  Gene Ontology: Mol. function=aminomethyltransferase activity; Cellular component=cytoplasm; Biological process=glycine catabolic process
  Homolog annotation: Hit_ID=B6SNX1; Match level="QueryCoverage=73%, HitCoverage=20%, E-value=4e-36, Identity=86%"; Hit description =Aminomethyltransferase
  Pfam annotation: Domain name=GCV_T_C; Domain location=24-109; Score= -8.6; E_value=0.095; Accession=PF08669.3; Description=Glycine cleavage T-protein C-terminal barrel
RFSYFNLILGLLKVKFLFCLRYVYLFVGCSIRKRLMPMKFVDEKGQELEQAVAPGSEVVDEASGKKIGTVSTALGSRGMGLLRLEEALKQGSSLRISDNRDVRVQAFKPDWWP

SEQ ID NO: 130005 - protein, 100 aa, Setaria italica
  Transcript Sequence Number=SeqID_64031
  Gene Ontology: Mol. function=protein binding; Cellular component =nucleus; Biological process=regulation of transcription, DNA -dependent
  Homolog annotation: Hit_ID=Q6ASS7; Match level="QueryCoverage=99%, HitCoverage=15%, E-value=2e-49, Identity=92%"; Hit description=MSI type nucleosome/chromatin assembly factor C, putative
  Pfam annotation: Domain name=WD40; Domain location=39-78; Score=28.0; E_value=3.8e-05; Accession=PF00400.24; Description=WD domain, G-beta repeat
SPKNETILASCCLGRRLMVWDLSRIDQEQTPEDAEDGPPELMFIHGGHTSKISDFSWNPCEDWVIASVAEDNILQIWQMAENIYHDEDDLPISDEPPKTS

SEQ ID NO: 130006 - protein, 58 aa, Setaria italica
  Transcript Sequence Number=SeqID_64032
  Gene Ontology: Mol. function=protein binding; Cellular component =nucleus; Biological process=regulation of transcription, DNA -dependent
  Homolog annotation: Hit_ID=Q6ASS7; Match level="QueryCoverage=98%, HitCoverage=8%, E-value=2e-19, Identity=80%"; Hit description=MSI type nucleosome/chromatin assembly factor C, putative
  Pfam annotation: Domain name=WD40; Domain location=17-56; Score=23.1; E_value=0.0012; Accession=PF00400.24; Description=WD domain, G-beta repeat
TPEDAEDGPPELMFIHGGHTSKISCHTSKISDFSWNPCEDWVIASVAEDNICHIWRML

SEQ ID NO: 130007 - protein, 49 aa, Setaria italica
  Transcript Sequence Number=SeqID_64033
FSTGKLGGNGSQLIKTDMHQHLLVIVFLTGEIRCVFCVVKQIRVPHGSK

SEQ ID NO: 130008 - protein, 101 aa, Setaria italica
  Transcript Sequence Number=SeqID_64034
LTGAASTRSGTDVQLEAQPYEPPHAPLESPHSTTDRRPRHHDRAVRRQRPILLGEACEVAGLEAGGRVGAGGGLAPGGGLGQGGHRPKKSVVPWSYVPVLR

SEQ ID NO: 130009 - protein, 69 aa, Setaria italica
  Transcript Sequence Number=SeqID_64035
LTRVASTRSGTDVQLEAQPYEPPHTPLESPHSTTYRRHGTMAEQFAGSGPSLENHIGVVMIGEPQPSPW

SEQ ID NO: 130010 - protein, 91 aa, Setaria italica
  Transcript Sequence Number=SeqID_64036
RQAMPNTRIISLSPRHPEKYMKKGPAYVDENCTYLAGKNFVDFGSVDWEKLLRNHGISDSSRVLVFFDDHQSELKRLKQALKAGFQHLIIL

SEQ ID NO: 130011 - protein, 106 aa, Setaria italica
  Transcript Sequence Number=SeqID_64037
  Gene Ontology: Mol. function=oxidoreductase activity; Biological process=oxidation reduction
  Homolog annotation: Hit_ID=C3SAD1; Match level="QueryCoverage=87%, HitCoverage=27%, E-value=4e-44, Identity=89%"; Hit description =Quinone oxidoreductase
  Subcellular localization annotation: CTP_CleavageSite=60; ConfidenceScore=5.04e-01
KVVLTLVLIDFLFGKDTYKASVECLASRGFMVSFGQSSGKPDPIPMSDLASKSLFLTRPSLMHYTATRDELLESAGEVFANVANGVLRVRVNHTYPLSEAARAHAD

SEQ ID NO: 130012 - protein, 67 aa, Setaria italica
  Transcript Sequence Number=SeqID_64038
  Gene Ontology: Mol. function=oxidoreductase activity; Biological process=oxidation reduction
  Homolog annotation: Hit_ID=Q10T48; Match level="QueryCoverage=80%, HitCoverage=14%, E-value=1e-13, Identity=74%"; Hit description =Oxidoreductase, zinc-binding dehydrogenase family protein, expressed
  Pfam annotation: Domain name=ADH_N; Domain location=3-59; Score=-3.5; E_value=0.0028; Accession=PF08240.4; Description=Alcohol dehydrogenase GroES-like doma
QFDRFPHAHNLGMEAVGVVTAVGPGLTGRKVGDVVAYAGNPMGSYAQEQILPASVAVPVPPSVDHKQ

SEQ ID NO: 130013 - protein, 59 aa, Setaria italica
  Transcript Sequence Number=SeqID_64039
HLWHQHQQLYCITLLLASTINRKSLFSWHNNTKARLTYSLGEISRAFVLYHLVTSEHHQ

SEQ ID NO: 130014 - protein, 86 aa, Setaria italica
  Transcript Sequence Number=SeqID_64040
  Gene Ontology: Cellular component=plasma membrane
  Homolog annotation: Hit_ID=Q9XI10; Match level="QueryCoverage=91%, HitCoverage=11%, E-value=1e-26, Identity=69%"; Hit description =F8K7.10 protein
GDPRYRTTNSRQTRSPDGEWIAFSSDRHNPGGGSFAIYMIHPNGTGLRRVVHSADGGRTNHPWFSPDSKTLVFTSDYAAVSAEPIS

SEQ ID NO: 130015 - protein, 46 aa, Setaria italica
  misc_feature (7)..(7): Xaa can be any naturally occurring amino acid
  Transcript Sequence Number=SeqID_64041
  Gene Ontology: Cellular component=extracellular region
  Homolog annotation: Hit_ID=Q850K7; Match level="QueryCoverage=100%, HitCoverage=17%, E-value=2e-12, Identity=78%"; Hit description =Expansin-like B1
PLNIRMXFSSGAPHRGDQKWLVSTSTIPQNWTAGATYDSGVQVQLQ

SEQ ID NO: 130016 - protein, 31 aa, Setaria italica
  Transcript Sequence Number=SeqID_64042
LNMIVHGRMILVESSVMRQKSVARDVICSVT

SEQ ID NO: 130017 - protein, 40 aa, Setaria italica
  Transcript Sequence Number=SeqID_64043
GRWGGEERRGEGEAVVVRGKSYDAIVTKMPFVPTKYYKPS

SEQ ID NO: 130018 - protein, 104 aa, Setaria italica
  Transcript Sequence Number=SeqID_64044
  Gene Ontology: Mol. function=hydrolase activity; Biological process =metabolic process
  Homolog annotation: Hit_ID=B6T563; Match level="QueryCoverage=99%, HitCoverage=32%, E-value=9e-53, Identity=94%"; Hit description =Pyrimidine-specific ribonucleoside hydrolase rihB
FFTSGADIYVVGLNITTQVSFTDKDLLELRNSKGKHAQFLCDVCKFYLDWHIESYGAPVIFLHDPVSFAALVRPDLFTFRKGVVRVETQGICAGHTSMDMLLKK

SEQ ID NO: 130019 - protein, 93 aa, Setaria italica
  misc_feature (74)..(74): Xaa can be any naturally occurring amino acid
  Transcript Sequence Number=SeqID_64045
  Gene Ontology: Mol. function=hydrolase activity; Biological process =metabolic process
  Homolog annotation: Hit_ID=B6T563; Match level="QueryCoverage=97%, HitCoverage=28%, E-value=9e-39, Identity=87%"; Hit description =Pyrimidine-specific ribonucleoside hydrolase rihB
LLVVFPDPTIKKVEQSAAEFLVDKVSQFPGEVSVLALGPLTNLALAIKKDPSFVKNVRKIVVLGGAFFSAGNAXPSAEANIHSDPEAADIVFT

SEQ ID NO: 130020 - protein, 50 aa, Setaria italica
  Transcript Sequence Number=SeqID_64046
  Gene Ontology: Mol. function=hydrolase activity
  Homolog annotation: Hit_ID=B6T563; Match level="QueryCoverage=96%, HitCoverage=15%, E-value=2e-20, Identity=95%"; Hit description =Pyrimidine-specific ribonucleoside hydrolase rihB
GICAGHTSMDMLLKKWNSENPWTGYSPISVAWTVDVPKMVAFVKELVTGE

SEQ ID NO: 130021 - protein, 102 aa, Setaria italica
  misc_feature (74)..(74): Xaa can be any naturally occurring amino acid
  Transcript Sequence Number=SeqID_64047
  Gene Ontology: Mol. function=CDP-diacylglycerol-glycerol-3-phosphate 3-phosphatidyltransferase activity; Cellular component=integral to membrane; Biological process=phospholipid biosynthetic process
  Homolog annotation: Hit_ID=B6TWM7; Match level="QueryCoverage=65%, HitCoverage=20%, E-value=2e-20, Identity=73%"; Hit description=CDP -diacylglycerol--glycerol-3-phosphate 3-phosphatidyltransferase
LRIAKFLRFLYPLLVFCSSVLIRSSTAKEISTLPQQAVAVNNLGKWKTATQMTALTLLLASRDPSLPAQGALVXPGVVLLYVSAGLAIWSLVVYMRKIWRIL

SEQ ID NO: 130022 - protein, 83 aa, Setaria italica
  misc_feature (49)..(83): Xaa can be any naturally occurring amino acid
  Transcript Sequence Number=SeqID_64048
  Subcellular localization annotation: CTP_CleavageSite=43; ConfidenceScore=5.21e-01
ACGVLPCNLHIIPYARSIQLFFSGVTKSRLRRAASFPKKFMLHFQKKKXXXXXXXXXXXXXXXXXXXXXXXXXXXXXXXXXXX

SEQ ID NO: 130023 - protein, 59 aa, Setaria italica
  misc_feature (15)..(15): Xaa can be any naturally occurring amino acid
  Transcript Sequence Number=SeqID_64049
  Gene Ontology: Mol. function=cysteine-type peptidase activity; Biological process=proteolysis
  Homolog annotation: Hit_ID=B6TMK2; Match level="QueryCoverage=84%, HitCoverage=12%, E-value=9e-18, Identity=86%"; Hit description =Sentrin-specific protease 2
LGGRSIRPSPLQHNXWDCGMFMLKYIDFHSRGLEPSFSQEHIMYFRKRTAKEILRLRAD

SEQ ID NO: 130024 - protein, 52 aa, Setaria italica
  Transcript Sequence Number=SeqID_64050
  Gene Ontology: Mol. function=cysteine-type peptidase activity; Biological process=proteolysis
  Homolog annotation: Hit_ID=B6TMK2; Match level="QueryCoverage=88%, HitCoverage=11%, E-value=5e-17, Identity=89%"; Hit description =Sentrin-specific protease 2
LRTKTINGWDCGMFMLKYIDFHSRGLEPSFSQEHIMYFRKRTAKEILRLRAD

SEQ ID NO: 130025 - protein, 49 aa, Setaria italica
  Transcript Sequence Number=SeqID_64051
AASLLTKKDPLKVEADTRLGELIQSFSDLGTIVENSNFELTGDREKMKE

SEQ ID NO: 130026 - protein, 74 aa, Setaria italica
  Transcript Sequence Number=SeqID_64052
  Gene Ontology: Mol. function=hydrolase activity
  Homolog annotation: Hit_ID=B9S6E3; Match level="QueryCoverage=97%, HitCoverage=18%, E-value=2e-14, Identity=61%"; Hit description =Alpha/beta hydrolase, putative
PELVRGVVLLNSAGQFADPNKPAAAPAEEEEESSPLSRFVVKPLKEAFQRVVLGFLFWQSKQPARVEKVLKSVT

SEQ ID NO: 130027 - protein, 85 aa, Setaria italica
  misc_feature (62)..(62): Xaa can be any naturally occurring amino acid
  Transcript Sequence Number=SeqID_64053
  Gene Ontology: Mol. function=substrate-specific transmembrane transporter activity; Cellular component=integral to membrane; Biological process=transmembrane transport
  Homolog annotation: Hit_ID=Q8GTR0; Match level="QueryCoverage=75%, HitCoverage=13%, E-value=8e-18, Identity=69%"; Hit description=Sugar transporter
QALAMEFCAESPQWLYKCGRTIEAEMQFEKLLGPLHVKSAMAELSRSERDDGESVKYSELSXGRHFNGTSYPVILFCCIYAALIT

SEQ ID NO: 130028 - protein, 138 aa, Setaria italica
  Transcript Sequence Number=SeqID_64054
  Gene Ontology: Mol. function=substrate-specific transmembrane transporter activity; Cellular component=integral to membrane; Biological process=transmembrane transport
  Homolog annotation: Hit_ID=Q8GTR0; Match level="QueryCoverage=68%, HitCoverage=19%, E-value=3e-21, Identity=56%"; Hit description=Sugar transporter
  Subcellular localization annotation: CTP_CleavageSite=60; ConfidenceScore=5.04e-01
FLAGSIIAMVLMDKLGRKMLLSGSFLGMAFSMGLQAIGANRHLGSTSVYLSVGGILLFVLSFSLGAGPVPGLLLPEIFPNKIRAKAVALCMSVHWVRSLLISGTCKLLYEEISISSVGQLYAIYLCYWFAFICFSSIG

SEQ ID NO: 130029 - protein, 37 aa, Setaria italica
  Transcript Sequence Number=SeqID_64055
  Homolog annotation: Hit_ID=B6T2Z5; Match level="QueryCoverage=100%, HitCoverage=16%, E-value=5e-12, Identity=89%"; Hit description =Cyclase/dehydrase
YEVFGRNVEFSWLARNMTPTKNQKIHWRSLEGLPNRG

SEQ ID NO: 130030 - protein, 119 aa, Setaria italica
  misc_feature (61)..(61): Xaa can be any naturally occurring amino acid
  Transcript Sequence Number=SeqID_64056
  Gene Ontology: Mol. function=protein serine/threonine kinase activity; Cellular component=plasma membrane; Biological process =protein amino acid phosphorylation
  Homolog annotation: Hit_ID=Q8S1Y6; Match level="QueryCoverage=100%, HitCoverage=23%, E-value=7e-57, Identity=79%"; Hit description =Putative CRK1 protein
  Pfam annotation: Domain name=Pkinase; Domain location=1-118; Score= -41.6; E_value=5.1e-06; Accession=PF00069.17; Description=Protein kinase domain
KQLLSGIEHCHNNGVLHRDIKSSNLLVSSDGILKIADFGLATSYDPDNMQPMTSQVITLWXRPPELLLGATHYGVGVDLWSVGCILAELLLGEPIFPGRTEVEQLHKIFKLCGTPSEDY

SEQ ID NO: 130031 - protein, 86 aa, Setaria italica
  misc_feature (46)..(46): Xaa can be any naturally occurring amino acid
  misc_feature (51)..(51): Xaa can be any naturally occurring amino acid
  misc_feature (66)..(66): Xaa can be any naturally occurring amino acid
  Transcript Sequence Number=SeqID_64057
  Gene Ontology: Mol. function=protein serine/threonine kinase activity; Cellular component=plasma membrane; Biological process =protein amino acid phosphorylation
  Homolog annotation: Hit_ID=Q8S1Y6; Match level="QueryCoverage=100%, HitCoverage=12%, E-value=6e-27, Identity=69%"; Hit description =Putative CRK1 protein
LLLGATHYGVGVDLWSVGCILAELLLGEPIFPGRTEVLGLVQLKCXILDKXCRMSLDLAINEWFVXVEQLHKIFKLCGTPSEDYWE

SEQ ID NO: 130032 - protein, 85 aa, Setaria italica
  Transcript Sequence Number=SeqID_64058
  Gene Ontology: Mol. function=GTP binding; Cellular component =intracellular
  Homolog annotation: Hit_ID=Q9AY71; Match level="QueryCoverage=92%, HitCoverage=18%, E-value=2e-26, Identity=77%"; Hit description=GTP -dependent nucleic acid-binding protein engD, putative, expressed
LAEPDSNPHVKEVAKAASDLESGIVTISAQVEAELAELPLEERVEYLKSLGVAASGLGNLVKATYDLLGLRTYFTTGDKVHLLSC

SEQ ID NO: 130033 - protein, 47 aa, Setaria italica
  Transcript Sequence Number=SeqID_64059
  Gene Ontology: Mol. function=GTP binding; Cellular component =intracellular
  Homolog annotation: Hit_ID=Q9AY71; Match level="QueryCoverage=93%, HitCoverage=10%, E-value=3e-16, Identity=90%"; Hit description=GTP -dependent nucleic acid-binding protein engD, putative, expressed
LDPQVVLCFEDDDIVHVNGKVDPRSDIDVINLELIFSDLEQIEKRLD

SEQ ID NO: 130034 - protein, 56 aa, Setaria italica
  Transcript Sequence Number=SeqID_64060
NELNDNKLTQAAEPTRFTQACLFRFRSCHFASYQCTWQISMGRTLFRGNDLFRNRN

SEQ ID NO: 130035 - protein, 54 aa, Setaria italica
  Transcript Sequence Number=SeqID_64061
MINKLTQAAEPTRFTQACLSGSEAVTSPVISALGKLVWVEHYSEGMIYSGTETN

SEQ ID NO: 130036 - protein, 156 aa, Setaria italica
  misc_feature (21)..(21): Xaa can be any naturally occurring amino acid
  misc_feature (106)..(106): Xaa can be any naturally occurring amino acid
  Transcript Sequence Number=SeqID_64062
  Gene Ontology: Mol. function=protein dimerization activity
  Homolog annotation: Hit_ID=Q7XE06; Match level="QueryCoverage=98%, HitCoverage=26%, E-value=1e-29, Identity=42%"; Hit description=HAT family dimerisation domain containing protein
  Pfam annotation: Domain name=hATC; Domain location=86-156; Score =48.5; E_value=2.5e-11; Accession=PF05699.6; Description=hAT family dimerisation domain
HDRKYDKYWADIHGLMAVAVXLDPRLKMTMLHACYIALFGEEAAGKYVTEAQELLTSLMKHYHVTDQDNVATSSAGAPSTVSAAAVLSIFKTLTANKRTTSFVRIXGARYPTLRLIARDILAIPITTVASESAFSTSGRVLSEHRSRLTPKMLEAF

SEQ ID NO: 130037 - protein, 131 aa, Setaria italica
  Transcript Sequence Number=SeqID_64063
  Gene Ontology: Mol. function=protein dimerization activity; Biological process=regulation of RNA metabolic process
  Homolog annotation: Hit_ID=Q8LNK9; Match level="QueryCoverage=98%, HitCoverage=16%, E-value=2e-46, Identity=61%"; Hit description=HAT family dimerisation domain containing protein
CRVAITTDLWTAENQKRGYMAVTGHFIDDSWTLRSCILRFMYVPCPHTGEVICDALHKCLQSWDLDRRVSTVTLDNCSANDNMIGLMDTRLGAANMLLKGKWLHMRCCAHILNLIVKDGMAVIGTAVAHIP

SEQ ID NO: 130038 - protein, 75 aa, Setaria italica
  Transcript Sequence Number=SeqID_64064
  Subcellular localization annotation: CTP_CleavageSite=43; ConfidenceScore=5.24e-01
QELLTSLMKHYHVTDQDNVATSSAGAPSTVSAAAVLSIFKTLTANKRTTSFVRSKNELDRYLEEVNSFLLLYCSN

SEQ ID NO: 130039 - protein, 37 aa, Setaria italica
  Transcript Sequence Number=SeqID_64065
KEKVFKKRLRVRRLRIRNLMIVQQQMIGHLLLMFVRN

SEQ ID NO: 130040 - protein, 43 aa, Setaria italica
  Transcript Sequence Number=SeqID_64066
ICFYYIFLYGGTYSTKLNLDHRVRLYPFDREKHQELLFSASYT

SEQ ID NO: 130041 - protein, 50 aa, Setaria italica
  misc_feature (17)..(17): Xaa can be any naturally occurring amino acid
  misc_feature (37)..(37): Xaa can be any naturally occurring amino acid
  Transcript Sequence Number=SeqID_64067
MHFLKQEGIDESLKLLXKMKEDGCGPNSDTFLMLMDXIFVLNESGNVLRV

SEQ ID NO: 130042 - protein, 82 aa, Setaria italica
  Transcript Sequence Number=SeqID_64068
SLAHFSLSVPKKLILVIVQSYNTMQLTERLSCRYYCYQSYPYVSSSVFVVVSDLCWSSVSCCCPSVFLIASLFVVSVVRAIL

SEQ ID NO: 130043 - protein, 80 aa, Setaria italica
  Transcript Sequence Number=SeqID_64069
  Gene Ontology: Mol. function=transferase activity; Biological process= biosynthetic process
  Homolog annotation: Hit_ID=B6T775; Match level="QueryCoverage=98%, HitCoverage=18%, E-value=6e-27, Identity=74%"; Hit description =Glycosyl transferase, group 1
TLDRLTEVTEGPFKGHLCAEPSVDHLRALMRHVFGDREEARSKGKKAREDMMERFSPEIVARIVADKIQQALVNTRSTED

SEQ ID NO: 130044 - protein, 85 aa, Setaria italica
  Transcript Sequence Number=SeqID_64070
  Gene Ontology: Mol. function=transferase activity; Biological process= biosynthetic process
  Homolog annotation: Hit_ID=B6T775; Match level="QueryCoverage=100%, HitCoverage=20%, E-value=4e-31, Identity=82%"; Hit description =Glycosyl transferase, group 1
YKAADAFVLQPWRGVGRPVVEAMAMALPVIVTNWSGPTEYLTEDNGYPLNVDRLTEVTEGPFKGHLCAEPSVDHLRALMRHVFGD

SEQ ID NO: 130045 - protein, 52 aa, Setaria italica
  Transcript Sequence Number=SeqID_64071
LPSCLGRLSKSIVCEDVGFPQVNHLCICCSFASVAAVVIRTYLMRLCCGKCP

SEQ ID NO: 130046 - protein, 83 aa, Setaria italica
  Transcript Sequence Number=SeqID_64072
  Homolog annotation: Hit_ID=Q2HSE5; Match level="QueryCoverage=98%, HitCoverage=10%, E-value=3e-23, Identity=62%"; Hit description=IMP dehydrogenase/GMP reductase, putative
ITYTSRMKTLIHRETDKIDIRADAELLRYKYENEQVIDAASTDASSPLPYQVYGNGKNGSQLSTRGTYDQLLERQKEHVQQFL

SEQ ID NO: 130047 - protein, 72 aa, Setaria italica
  Transcript Sequence Number=SeqID_64073
AEKHAALLTARAGARDPSAVPSICRISAALQYNSGMFSATGVVICFGSEIHMLVFYVINQLQQQQQQSLVLP

SEQ ID NO: 130048 - protein, 98 aa, Setaria italica
  misc_feature (19)..(19): Xaa can be any naturally occurring amino acid
  Transcript Sequence Number=SeqID_64074
  Gene Ontology: Mol. function=DNA (cytosine-5-)-methyltransferase activity; Cellular component=nucleus; Biological process=DNA methylation
  Homolog annotation: Hit_ID=O65343; Match level="QueryCoverage=97%, HitCoverage=6%, E-value=8e-35, Identity=71%"; Hit description =Cytosine-specific methyltransferase
VYILGSGFMRDDDGSCCSXAESVKSSSSSSKADQSDAGVPIYLSPIKEWLIEFGGSMICITIRTDVAWYKLRQPTKQYAPWCEPVLKTARLAVSIINP

SEQ ID NO: 130049 - protein, 63 aa, Setaria italica
  Transcript Sequence Number=SeqID_64075
  Subcellular localization annotation: CTP_CleavageSite=32; ConfidenceScore=5.73e-01
SLTESAKADLVKRPAVKASPTSTLKKVQSKTESSNGSSGSTRRVASNASLQSPRSVTSTAICS

SEQ ID NO: 130050 - protein, 67 aa, Setaria italica
  Transcript Sequence Number=SeqID_64076
  Gene Ontology: Mol. function=protein binding
  Homolog annotation: Hit_ID=Q69VA2; Match level="QueryCoverage=89%, HitCoverage=3%, E-value=8e-25, Identity=88%"; Hit description =Putative leucine rich repeat protein
MVTMNRTFQVELYRNDQHRFKIVVDSDNEVDLMVQTRHMRDVVILTIRGLAQKFNSTSLNTLLKIEA

SEQ ID NO: 130051 - protein, 119 aa, Setaria italica
  Transcript Sequence Number=SeqID_64077
  Gene Ontology: Mol. function=selenium binding; Cellular component =cytoplasm; Biological process=protein transport
  Homolog annotation: Hit_ID=B6TFC2; Match level="QueryCoverage=88%, HitCoverage=22%, E-value=2e-50, Identity=89%"; Hit description =Selenium-binding protein
  Pfam annotation: Domain name=SBP56; Domain location=1-119; Score= -234.7; E_value=5.1e-06; Accession=PF05694.3; Description=56kDa selenium binding protein (SBP56)
SLFLVQDRLCRVLNVVLPDNGQEEQYNVPQVKEHRLRGGPQMIQLSLDGKRIYVTNSLFSRWDEQFYGDDLVKKGSHMLQIDVDTDKGGLAINPNFFVDFSKEPDGPALAHEMRYPGGD

SEQ ID NO: 130052 - protein, 51 aa, Setaria italica
  Transcript Sequence Number=SeqID_64078
  Gene Ontology: Mol. function=selenium binding
  Homolog annotation: Hit_ID=Q5NKQ4; Match level="QueryCoverage=74%, HitCoverage=8%, E-value=1e-11, Identity=86%"; Hit description =Putative selenium binding protein
AVDVPAPAATNGGACCHAGAKGPGYATPLEAMEKGPREKLIYVTCVYNDNT

SEQ ID NO: 130053 - protein, 54 aa, Setaria italica
  Transcript Sequence Number=SeqID_64079
  Gene Ontology: Mol. function=protein binding
  Homolog annotation: Hit_ID=B9SAY0; Match level="QueryCoverage=77%, HitCoverage=2%, E-value=5e-12, Identity=76%"; Hit description =Protein phosphatases pp1 regulatory subunit, putative
ITRTLTSNCTVRWYRESSDGTRTRIDGANSVTYEVTDADYSCHLLFGYTPVRSD

SEQ ID NO: 130054 - protein, 50 aa, Setaria italica
  misc_feature (41)..(41): Xaa can be any naturally occurring amino acid
  Transcript Sequence Number=SeqID_64080
  Gene Ontology: Mol. function=selenium binding
  Homolog annotation: Hit_ID=B6TFC2; Match level="QueryCoverage=100%, HitCoverage=10%, E-value=3e-18, Identity=90%"; Hit description =Selenium-binding protein
NGQEEQYNVPQVKEHRLRGGPQMIQLSLDGKRIYVTNSLFXSRWDEQFYG

SEQ ID NO: 130055 - protein, 58 aa, Setaria italica
  Transcript Sequence Number=SeqID_64081
  Gene Ontology: Mol. function=protein binding
  Homolog annotation: Hit_ID=Q69VA2; Match level="QueryCoverage=74%, HitCoverage=2%, E-value=8e-12, Identity=76%"; Hit description =Putative leucine rich repeat protein
TIRGCEGSSLYRWYRESSDGTRTRIDGANSVTYEVTDADYSCHLLFENKCLDFEWFWQ

SEQ ID NO: 130056 - protein, 76 aa, Setaria italica
  Transcript Sequence Number=SeqID_64082
FFERMLPFNMVHVSVKMNKHLYVYCLSPGYFLFVCCTTAFSLVLLSEIFTNVKVKGFYFTSRVLELQDLFIAVCHE

SEQ ID NO: 130057 - protein, 106 aa, Setaria italica
  misc_feature (19)..(19): Xaa can be any naturally occurring amino acid
  Transcript Sequence Number=SeqID_64083
  Gene Ontology: Mol. function=protein tyrosine/serine/threonine phosphatase activity; Biological process=protein amino acid dephosphorylation
  Homolog annotation: Hit_ID=B6U4B9; Match level="QueryCoverage=100%, HitCoverage=38%, E-value=4e-51, Identity=90%"; Hit description=Dual specificity protein phosphatase 4
MRKRERENPCGICGHYHKXYEEGEVCGVCGHRWKPSDGEGTPAKHESAFPTEVLKDFLFLGSYDNASRSEVLKTLNVSHILNHMTVPDCHNLYKNSFTYHSLQRDR

SEQ ID NO: 130058 - protein, 69 aa, Setaria italica
  misc_feature (27)..(27): Xaa can be any naturally occurring amino acid
  Transcript Sequence Number=SeqID_64084
  Gene Ontology: Mol. function=protein tyrosine/serine/threonine phosphatase activity; Biological process=protein amino acid dephosphorylation
  Homolog annotation: Hit_ID=B6U4B9; Match level="QueryCoverage=95%, HitCoverage=24%, E-value=3e-21, Identity=72%"; Hit description=Dual specificity protein phosphatase 4
MLNLRKCERDKSRIPFHCMTGNSRSQXVVAAFLMKSRGWGLAQSFQWVKDQRPQVHLTDAFEHDLLAYE

SEQ ID NO: 130059 - protein, 72 aa, Setaria italica
  Transcript Sequence Number=SeqID_64085
  Gene Ontology: Mol. function=hydrolase activity, hydrolyzing O -glycosyl compounds; Biological process=carbohydrate metabolic process
  Homolog annotation: Hit_ID=Q69LM5; Match level="QueryCoverage=63%, HitCoverage=6%, E-value=2e-11, Identity=65%"; Hit description =Putative alpha-glucosidase II
NIHPDNIARNAFLPKCSNNLEYFLRRIVAPLLGKVLAQTKKGAHECAHTLPKGIWLPFDFADSHPDLPVLYL

SEQ ID NO: 130060 - protein, 47 aa, Setaria italica
  Transcript Sequence Number=SeqID_64086
MSLRRLNVTIRFGRPRPPLFVIFHLVPIHLEERAPHSGRATTSLSLA

SEQ ID NO: 130061 - protein, 41 aa, Setaria italica
  Transcript Sequence Number=SeqID_64087
VYLGCKNCTKERRSGPAKPNRDVQPPKRHLVTRFMGSIKFL

SEQ ID NO: 130062 - protein, 70 aa, Setaria italica
  Transcript Sequence Number=SeqID_64088
APQQRCMIHCGESELRGYFTLPDIIYKSHSQSSVGARSQGGTRAELGVCSALYTDPSNRSDRFGLTSAAE

SEQ ID NO: 130063 - protein, 47 aa, Setaria italica
  Transcript Sequence Number=SeqID_64089
SFYSFSKKAKPRKLVSLCLGTLGQHLEDIIADISEFAAFFPPHIKLI

SEQ ID NO: 130064 - protein, 102 aa, Setaria italica
  misc_feature (32)..(32): Xaa can be any naturally occurring amino acid
  misc_feature (83)..(83): Xaa can be any naturally occurring amino acid
  Transcript Sequence Number=SeqID_64090
QTSNLLQVLHHKECLMFTLAREMGNKDVDSQXGWPWDAMKTYAKQLPSLSCNENESSFLSSDLFRNAFCIIHQTGEQGVNLRXISQALHPLGMQSINLVVDT

SEQ ID NO: 130065 - protein, 69 aa, Setaria italica
  Transcript Sequence Number=SeqID_64091
KKSAMIRIQKREAALHSNNHEQPRRLRRLGPTFRRLQRLPLRRVNDRARRRVHHLRHATGDMQGTQGIG

SEQ ID NO: 130066 - protein, 65 aa, Setaria italica
  misc_feature (48)..(48): Xaa can be any naturally occurring amino acid
  Transcript Sequence Number=SeqID_64092
  Gene Ontology: Cellular component=chloroplast; Biological process =cell redox homeostasis
  Homolog annotation: Hit_ID=Q10M17; Match level="QueryCoverage=93%, HitCoverage=26%, E-value=9e-27, Identity=95%"; Hit description =Thioredoxin-like 1, putative, expressed
QSQLAQICQFAEQNPDVLFLQVNHEEHKSMCYSLHVHVLPFFRFYRGXAQGRLCSFSCTNATVRS

SEQ ID NO: 130067 - protein, 88 aa, Setaria italica
  misc_feature (10)..(10): Xaa can be any naturally occurring amino acid
  Transcript Sequence Number=SeqID_64093
  Subcellular localization annotation: CTP_CleavageSite=59; ConfidenceScore=5.62e-01
PCGSRAAPGXLLSRRRGAVATRMAPSAVRIGGSWRKTAFLGGRLAVGPRRSRSASRTLVASPVQVNIDLDVVIIYAFPFNLLFLLFFR

SEQ ID NO: 130068 - protein, 68 aa, Setaria italica
  Transcript Sequence Number=SeqID_64094
  Homolog annotation: Hit_ID=B6U6B7; Match level="QueryCoverage=66%, HitCoverage=16%, E-value=4e-10, Identity=75%"; Hit description =Thioredoxin-like 1
VILVVYLVYLVLSKQGTCSSPYTKKPELIPSGDAAAEVIAPEPTKLPAATKPSVKIGSEERSLVSSGR

SEQ ID NO: 130069 - protein, 85 aa, Setaria italica
  Transcript Sequence Number=SeqID_64095
  Gene Ontology: Biological process=cell redox homeostasis
  Homolog annotation: Hit_ID=B6U6B7; Match level="QueryCoverage=85%, HitCoverage=26%, E-value=1e-20, Identity=70%"; Hit description =Thioredoxin-like 1
QLTVVTNATIKKFKDALAKHKPDRCSIGPTRGLEESELLALAANKDLQFTYTKKPELIPSGDAAAEVIAPEPTKLPAAQACALLP

SEQ ID NO: 130070 - protein, 41 aa, Setaria italica
  Transcript Sequence Number=SeqID_64096
MCPLFVNLVIPMQIQADLLGSPVVRPADIETTALGAAYAAG

SEQ ID NO: 130071 - protein, 68 aa, Setaria italica
  Transcript Sequence Number=SeqID_64097
PIIVLLHMLNNFNVTACGIRPAHFVTSDLQSAISHELFSLQDSTLVRTWRRKKDNHLLAWIPKCSICV

SEQ ID NO: 130072 - protein, 65 aa, Setaria italica
  Transcript Sequence Number=SeqID_64098
PIIVLLHMLNNFNVTACGIRPAHFVTSDLQSAISHELFSLQDSTLVRTWRKKKGTNQFNLDLGIT

SEQ ID NO: 130073 - protein, 61 aa, Setaria italica
  Transcript Sequence Number=SeqID_64099
  Gene Ontology: Mol. function=electron carrier activity; Biological process=response to oxidative stress
  Homolog annotation: Hit_ID=B6TZQ7; Match level="QueryCoverage=68%, HitCoverage=12%, E-value=7e-10, Identity=66%"; Hit description =Peroxidase 12
FHLESCPQLETLVRSNVDAALRQNVRLTAGLLRLFFHDCFPQVPVLFVSSPLIDMMLFHPS

SEQ ID NO: 130074 - protein, 122 aa, Setaria italica
  Transcript Sequence Number=SeqID_64100
VPYYYCIKSSIFERTGLFQRLETRLKDMATEYWTYHCHLVGYTQVAKRPPPAHYISTTADHDDHNLVAQATTNTCDYNSRARASVALHPCSNGYNMLYPLHVDLDALPDQMDCDACPSASIM

SEQ ID NO: 130075 - protein, 69 aa, Setaria italica
  Transcript Sequence Number=SeqID_64101
ALPKPREPGEEDLLHLDRRRGLCGLLLDLITRETCMILISPNIKKVRSTCRGFAHSFSQKDHHTGQSCN

SEQ ID NO: 130076 - protein, 49 aa, Setaria italica
  Transcript Sequence Number=SeqID_64102
KSVRRQRSPLPVGLLPEGHLESCFHDCKRRYWDYSGRFLKLTCLILYFC

SEQ ID NO: 130077 - protein, 58 aa, Setaria italica
  Transcript Sequence Number=SeqID_64103
CRSSSIILSEEMRVVELMADLVATISICGEIGRSSIAAMRHNQWHVRWQAGGCTCKLM

SEQ ID NO: 130078 - protein, 30 aa, Setaria italica
  Transcript Sequence Number=SeqID_64104
VGDSRCILDAQGGTVSLLTVDHRLEENVEE

SEQ ID NO: 130079 - protein, 130 aa, Setaria italica
  misc_feature (13)..(13): Xaa can be any naturally occurring amino acid
  Transcript Sequence Number=SeqID_64105
  Gene Ontology: Mol. function=catalytic activity; Cellular component =plasma membrane
  Homolog annotation: Hit_ID=B6U1A8; Match level="QueryCoverage=97%, HitCoverage=26%, E-value=9e-61, Identity=92%"; Hit description =Protein phosphatase 2C ABI2
LVEFIVPVPYVKXQVKLSNAGGRLIIASDGIWDALPSEAAAKSCRGLPAELAAKQVVKEALRTRGLKDDTTCIVVDIIPPGQTIRPASPPKKMNKLKSLIFRKKAKDPSQKLTKQHSGAGVVEEIFEEGF

SEQ ID NO: 130080 - protein, 52 aa, Setaria italica
  Transcript Sequence Number=SeqID_64106
  Gene Ontology: Mol. function=catalytic activity; Cellular component =plasma membrane
  Homolog annotation: Hit_ID=B6U1A8; Match level="QueryCoverage=100%, HitCoverage=10%, E-value=3e-20, Identity=98%"; Hit description =Protein phosphatase 2C ABI2
LSNAGGRLIIASDGIWDALPSEAAAKSCRGLPAELAAKQVVKEALRTRGLKD

SEQ ID NO: 130081 - protein, 109 aa, Setaria italica
  Transcript Sequence Number=SeqID_64107
  Gene Ontology: Mol. function=oxidoreductase activity, acting on the CH-OH group of donors, NAD or NADP as acceptor; Cellular component =glyoxysome; Biological process=cellular carbohydrate metabolic process
  Homolog annotation: Hit_ID=Q42972; Match level="QueryCoverage=96%, HitCoverage=29%, E-value=2e-51, Identity=96%"; Hit description =Malate dehydrogenase, glyoxysomal
  Pfam annotation: Domain name=Ldh_1_N; Domain location=1-60; Score= -41.2; E_value=0.0069; Accession=PF00056.15; Description =lactatemalate dehydrogenase, NAD bin
GYVFLFNINAGIVRTLCEGIAKCCPKAIVNVISNPVNSTVPIAAEVFKKAGTYDPKRLLGVTTLDVVRANTFVGEVLGLDPREVNVPVIGGHAGVTILPLLSQVNPACS

SEQ ID NO: 130082 - protein, 84 aa, Setaria italica
  Transcript Sequence Number=SeqID_64108
  Gene Ontology: Mol. function=oxidoreductase activity, acting on the CH-OH group of donors, NAD or NADP as acceptor; Cellular component =glyoxysome; Biological process=cellular carbohydrate metabolic process
  Homolog annotation: Hit_ID=Q42972; Match level="QueryCoverage=88%, HitCoverage=20%, E-value=3e-32, Identity=93%"; Hit description =Malate dehydrogenase, glyoxysomal
  Pfam annotation: Domain name=Ldh_1_C; Domain location=2-82; Score= -47.5; E_value=0.019; Accession=PF02866.10; Description=lactatemalate dehydrogenase, alphabeta C-t
IFVLSYCLLSLRGLRGDAGIVECSYVASQVTELPFFASKVRLGRSGVEEILPLGPLNEFERAGLEKAKKELAESIQKGVSFINK

SEQ ID NO: 130083 - protein, 51 aa, Setaria italica
  Transcript Sequence Number=SeqID_64109
VNLLLVKTSSNNGVNNLHGCTKKDKYVVAETQHMSFYVGVGHLLDGRSHLL

SEQ ID NO: 130084 - protein, 76 aa, Setaria italica
  misc_feature (21)..(21): Xaa can be any naturally occurring amino acid
  Transcript Sequence Number=SeqID_64110
ARWQFLLLLCQQKLFRDRILXKNKELSRNGGILSLSHTILKLVVPECLKGSTDLVASVSRLKAKILSILLQLCEAE

SEQ ID NO: 130085 - protein, 66 aa, Setaria italica
  Transcript Sequence Number=SeqID_64111
FKATKVCINLGSLSDYAKTLIPNFLNEEDVQLLRWYILILHQKARKTCTQCSSPCQHKQALLTPLI

SEQ ID NO: 130086 - protein, 36 aa, Setaria italica
  Transcript Sequence Number=SeqID_64112
MRAAQIDPSAAAPPRSRFKRLFERQVPRVSPAERLP

SEQ ID NO: 130087 - protein, 40 aa, Setaria italica
  misc_feature (33)..(33): Xaa can be any naturally occurring amino acid
  Transcript Sequence Number=SeqID_64113
RLPLPPSLIRRGAARCCNCFHAGDTSDDEDGPXASADAAA

SEQ ID NO: 130088 - protein, 99 aa, Setaria italica
  Transcript Sequence Number=SeqID_64114
  Gene Ontology: Mol. function=protein domain specific binding; Cellular component=late endosome membrane; Biological process =protein transport
  Homolog annotation: Hit_ID=B6T5E0; Match level="QueryCoverage=96%, HitCoverage=45%, E-value=8e-44, Identity=92%"; Hit description =Charged multivesicular body protein 2b
  Pfam annotation: Domain name=Snf7; Domain location=5-99; Score=-22.0; E_value=0.00052; Accession=PF03357.13; Description=Snf7
TEDKTKTKNLTNATRGIERDIASLQQEEKKLVAEIKRTAKTGNEAATKILARQLIRLRQQISNLQGNRAQIRGIATHTQAMHANTSVATGLQSASKAMG

SEQ ID NO: 130089 - protein, 109 aa, Setaria italica
  misc_feature (1)..(28): Xaa can be any naturally occurring amino acid
  Transcript Sequence Number=SeqID_64115
XXXXXXXXXXXXXXXXXXXXXXXXXXXXFFFFFFYLHKPTYLLISNKGSTVNIYHFWNFRVKQTEHKTFVGQFCNSPLAARPLSCSSIITTHLPLATSMASLSSAAVTA

SEQ ID NO: 130090 - protein, 74 aa, Setaria italica
  Transcript Sequence Number=SeqID_64116
VVLYSLIIKQEMPRSQLQHAGDFRCMDCSETFRRDGAGHGSSTIANRTPSSVRAQELSPAGHNRRWSHYSRRRA

SEQ ID NO: 130091 - protein, 111 aa, Setaria italica
  Transcript Sequence Number=SeqID_64117
MLSSTSSHMRNIGNLDLLPRETRHYCHQSNIVCPCDIQLLQIGMYCASDWAKVSLVCKYMAEPAWHGNSYIGKLFLLIGQVSIFLEECKWFGRWENKIGQYSLMDSFRITL

SEQ ID NO: 130092 - protein, 103 aa, Setaria italica
  misc_feature (68)..(68): Xaa can be any naturally occurring amino acid
  Transcript Sequence Number=SeqID_64118
LLMELNSTSSQLREVCFELSHHLVNAFSKDVDLICYMENFMKSSGKWIDGTNMMDVPIASKHVFVLTXNSKKAHIPNAPLELDDDTDERQILHHLAIACRAFI

SEQ ID NO: 130093 - protein, 38 aa, Setaria italica
  Transcript Sequence Number=SeqID_64119
HPEDGSQLPIRLKYSVTFPKENHGISADCLLSIVLLWT

SEQ ID NO: 130094 - protein, 57 aa, Setaria italica
  Transcript Sequence Number=SeqID_64120
  Gene Ontology: Mol. function=structural constituent of ribosome; Cellular component=ribonucleoprotein complex; Biological process =translation
  Homolog annotation: Hit_ID=B9RUR2; Match level="QueryCoverage=85%, HitCoverage=44%, E-value=1e-17, Identity=89%"; Hit description=60S ribosomal protein L37a, putative
  Pfam annotation: Domain name=Ribosomal_L37ae; Domain location=2-56; Score=47.4; E_value=5.7e-11; Accession=PF01780.11; Description =Ribosomal L37ae protein family
YHRCCVSFQFAVKRKAVGIWGCKDCGKVKAGGAYTMNTASAVTVRSTIRRLSEQTEA

SEQ ID NO: 130095 - protein, 131 aa, Setaria italica
  misc_feature (48)..(48): Xaa can be any naturally occurring amino acid
  misc_feature (67)..(67): Xaa can be any naturally occurring amino acid
  Transcript Sequence Number=SeqID_64121
  Gene Ontology: Mol. function=catalytic activity
  Homolog annotation: Hit_ID=Q10QL5-4; Match level="QueryCoverage=96%, HitCoverage=22%, E-value=6e-30, Identity=54%"; Hit description =Isoform 4 of Probable protein phosphatase 2C BIPP2C1
ETLGFLVIRNGEVYEKSKPMVYGFNFPLQIEKGDEPLETRTGANNLTXKAVFHNMLTLTFGLIFTLXQNYTIDLEEGDAIVTATDGLFDNVYEHEVAAIISKSLQADLKPAVRINIILNKKSAPIGKQKTK

SEQ ID NO: 130096 - protein, 42 aa, Setaria italica
  Transcript Sequence Number=SeqID_64122
  Gene Ontology: Mol. function=catalytic activity
  Homolog annotation: Hit_ID=Q339D2; Match level="QueryCoverage=90%, HitCoverage=8%, E-value=4e-11, Identity=86%"; Hit description =Probable protein phosphatase 2C 71
ILGSGINAGLYARELMDGCKKFITENQGALDFGPEQILSKAA

SEQ ID NO: 130097 - protein, 32 aa, Setaria italica
  Transcript Sequence Number=SeqID_64123
HHNFRDPSIFWLCLRISKVMVLKHNQNIEGCS

SEQ ID NO: 130098 - protein, 127 aa, Setaria italica
  misc_feature (34)..(34): Xaa can be any naturally occurring amino acid
  misc_feature (50)..(50): Xaa can be any naturally occurring amino acid
  Transcript Sequence Number=SeqID_64124
  Gene Ontology: Mol. function=aspartic-type endopeptidase activity; Cellular component=chromatin; Biological process=DNA integration
  Homolog annotation: Hit_ID=Q336W4; Match level="QueryCoverage=78%, HitCoverage=7%, E-value=6e-26, Identity=53%"; Hit description =Retrotransposon protein, putative, unclassified
IYPLHNKNARPHSGDHQALHAYHTTELWHARLGXPGTASLHRILNTLVFXCSKSDTHTCHACRLSKHVRLPFFESTHVASFPFQLLHCDVWTSPIISNSGYKYYLVMLDDYSHFAWNLSFNDQQSTK

SEQ ID NO: 130099 - protein, 100 aa, Setaria italica
  Transcript Sequence Number=SeqID_64125
VPQIPPSLPSEPSQASEPATAMQVNSISSIAVAETSTTNRIEVCMGGKCKKSGALALLQEFEKTVGTGGAVVGCKCLGKCGLGPNVRLKEDEGTTRTEKV

SEQ ID NO: 130100 - protein, 67 aa, Setaria italica
  Transcript Sequence Number=SeqID_64126
MRTKNRGFMSANHGKCAAVAWSCTSVIYSCLYGVQDLVLCEDAEKDGVSCELIDLKTLIPWDKETVE

SEQ ID NO: 130101 - protein, 97 aa, Setaria italica
  Transcript Sequence Number=SeqID_64127
  Gene Ontology: Mol. function=catalytic activity; Cellular component =mitochondrial alpha-ketoglutarate dehydrogenase complex; Biological process=metabolic process
  Homolog annotation: Hit_ID=B6TX05; Match level="QueryCoverage=90%, HitCoverage=24%, E-value=3e-36, Identity=81%"; Hit description=3 -methyl-2-oxobutanoate dehydrogenase
EIQFADYIFPAFDQIVNEAAKFRYRSGNEFNCGGLTIRTPYGAVGHGGHYHSQSPEAFFCHVPGLKVKFAALAYSLHELLSFSQKMPNQHFPECIHL

SEQ ID NO: 130102 - protein, 45 aa, Setaria italica
  Transcript Sequence Number=SeqID_64128
  Gene Ontology: Mol. function=catalytic activity; Cellular component =mitochondrial alpha-ketoglutarate dehydrogenase complex; Biological process=metabolic process
  Homolog annotation: Hit_ID=B5LAT4; Match level="QueryCoverage=86%, HitCoverage=10%, E-value=4e-15, Identity=94%"; Hit description =Putative branched-chain alpha-keto acid dehydrogenase E1 beta subunit
GGVFRCTTGLADRFGKNRVFNTPLCEQGIAGFAIGLAAMVSSHNV

SEQ ID NO: 130103 - protein, 58 aa, Setaria italica
  Transcript Sequence Number=SeqID_64129
IKLHALLSVHLTSKNYHLCTTPTLVPGRKWKKGGKFPGQPQHKTCADFAIPPANTCAV

SEQ ID NO: 130104 - protein, 43 aa, Setaria italica
  Transcript Sequence Number=SeqID_64130
SARKQRFFAGNFMSNPDQYGGVSESPPGHSVGYFYGSTPENHR

SEQ ID NO: 130105 - protein, 117 aa, Setaria italica
  misc_feature (17)..(17): Xaa can be any naturally occurring amino acid
  misc_feature (75)..(75): Xaa can be any naturally occurring amino acid
  Transcript Sequence Number=SeqID_64131
  Gene Ontology: Cellular component=vacuole
ARSAAARYRSAVGLQVXEAFWRRNYMILVGAGGVIVCVALWRIMFGIASTFVGLSEGMAKYGFLALATAIVAFAXLEVMGAPLTGTDVRAFVMSGGGPKLKDFKFKLGGKRCFLIFP

SEQ ID NO: 130106 - protein, 112 aa, Setaria italica
  misc_feature (20)..(20): Xaa can be any naturally occurring amino acid
  Transcript Sequence Number=SeqID_64132
  Gene Ontology: Mol. function=DNA-3-methyladenine glycosylase I activity
  Homolog annotation: Hit_ID=B4FL85; Match level="QueryCoverage=63%, HitCoverage=21%, E-value=4e-29, Identity=81%"; Hit description=GMP synthase
  Subcellular localization annotation: CTP_CleavageSite=55; ConfidenceScore=5.42e-01
WEVQRSSSNLTLSSLSLSQXTPNDSSLSSSNSSWEPKVPLLYGGTFSPWGDVMVSLEMRREDDDKASDHDVEGGEEDFDCSEPGSMHRCSWITKNTGMKFADLHVFVSHALA

SEQ ID NO: 130107 - protein, 95 aa, Setaria italica
  Transcript Sequence Number=SeqID_64133
GGGGGGGGYGGGAGGGFGGGSGGGLGGGVGHGIGGGFGKGGGLGGGVGHGIGGGFGKGGGLGHGIGGGYGKGGGLGGGIGHGVGGGYGKGGGLGG

SEQ ID NO: 130108 - protein, 69 aa, Setaria italica
  Transcript Sequence Number=SeqID_64134
KCTIYQYQEVPQLFVKLFQETIYCVSRMAPDDNIFKMVSSIYHKVLTRIASSILPTKVTLPVIISFLIS

SEQ ID NO: 130109 - protein, 34 aa, Setaria italica
  Transcript Sequence Number=SeqID_64135
TEGRPVISGEYTLVYEDEEGDRVLVGDVPWELVA

SEQ ID NO: 130110 - protein, 42 aa, Setaria italica
  Transcript Sequence Number=SeqID_64136
TSCLNIYHSLHALVQHVLTIRRFLLDLGHTEALILSTLADYL

SEQ ID NO: 130111 - protein, 47 aa, Setaria italica
  Transcript Sequence Number=SeqID_64137
FPSTRLLSIHYALHDSSYFCNFIYPDVDLCLICMHICSQSSKHLLQM

SEQ ID NO: 130112 - protein, 51 aa, Setaria italica
  misc_feature (28)..(51): Xaa can be any naturally occurring amino acid
  Transcript Sequence Number=SeqID_64138
FVGTECYSSFMDSCSLVVKNFLYQIISXXXXXXXXXXXXXXXXXXXXXXXX

SEQ ID NO: 130113 - protein, 50 aa, Setaria italica
  Transcript Sequence Number=SeqID_64139
SMPYICACVLINFYYTSPFSISVATVLKNEHHSGTANLGRISTFESVLSF

SEQ ID NO: 130114 - protein, 103 aa, Setaria italica
  Transcript Sequence Number=SeqID_64140
YREITQEASSDISHAVMMPLANFWVPSVQRAAYSALIGSAPAPLCLLSTIMVPTSMIRWKDWSAARLVNHHQESHEDINQITTKNHEDTLHHSYLHSYSTHGG

SEQ ID NO: 130115 - protein, 45 aa, Setaria italica
  Transcript Sequence Number=SeqID_64141
CLQVSFLLLGCCQFIMRCMILHIFAIYLPSFQVMRPCGKLWARCA

SEQ ID NO: 130116 - protein, 80 aa, Setaria italica
  Transcript Sequence Number=SeqID_64142
EMSENVLYISIRRYRNFLSSRIASSIYHKVPTGISSSTYQKGIYKKEFHLRAVKNGILERTSKDLHDAAFNLICSSGLNS

SEQ ID NO: 130117 - protein, 54 aa, Setaria italica
  Transcript Sequence Number=SeqID_64143
ATVAVKRTEPKLPGQCVIDVPLDLGDRILRSLAIFNHQSATYTRMRDDARSLFA

SEQ ID NO: 130118 - protein, 54 aa, Setaria italica
  Transcript Sequence Number=SeqID_64144
QKTYVAHSIFPCLIHVVIYIAGKMECATKSFSLEEKHSRKPMFVLLQNNTQFTG

SEQ ID NO: 130119 - protein, 145 aa, Setaria italica
  misc_feature (41)..(41): Xaa can be any naturally occurring amino acid
  Transcript Sequence Number=SeqID_64145
  Gene Ontology: Mol. function=substrate-specific transmembrane transporter activity; Cellular component=integral to membrane; Biological process=transmembrane transport
  Homolog annotation: Hit_ID=Q94AZ2; Match level="QueryCoverage=78%, HitCoverage=21%, E-value=1e-45, Identity=83%"; Hit description=Sugar transport protein 13
NLLQRRNRPQLVIAVLLQIFQQFTGINAIMFYAPVLFNTLXGFKSDASLYSAVITGAVNVLSTLVSVYSVDRVGRRMLLLEAGVQMFLSQVAIAVVLGIKVTDHSDNLGHGWAINGGRSIGTRQPYVLPTLRPRYLGGIEDQPEG

SEQ ID NO: 130120 - protein, 83 aa, Setaria italica
  Transcript Sequence Number=SeqID_64146
  Gene Ontology: Mol. function=catalytic activity; Biological process =metabolic process
  Homolog annotation: Hit_ID=B6TQ72; Match level="QueryCoverage=100%, HitCoverage=49%, E-value=3e-34, Identity=86%"; Hit description =KHG/KDPG aldolase
VYPVSVMGGEVYMSALKKPFPLVPMVASQGIQIGSIKGYVEAGASAVVLSDAIFDKELMRKGKFSEISELASQATFEALQSTK

SEQ ID NO: 130121 - protein, 86 aa, Setaria italica
  Transcript Sequence Number=SeqID_64147
SLSAFISISILCTKSKRTKIVDMYSSKKLPRAKTLHPMKPTCCKEKNQVPTIQLADQDIRVMEASGLHDLHGGKSVGVFKDLTSGV

SEQ ID NO: 130122 - protein, 55 aa, Setaria italica
  Transcript Sequence Number=SeqID_64148
  Gene Ontology: Mol. function=phosphatase activity
  Homolog annotation: Hit_ID=Q6VEY3; Match level="QueryCoverage=67%, HitCoverage=8%, E-value=1e-10, Identity=83%"; Hit description=CTD -phosphatase-like protein
VSYLFCYCLVVLFLLVLVQSVYANQLLDMLDPENKLFSKRFFRESCLFTDSSYTK

SEQ ID NO: 130123 - protein, 89 aa, Setaria italica
  Transcript Sequence Number=SeqID_64149
  Gene Ontology: Mol. function=malate synthase activity; Cellular component=glyoxysome; Biological process=tricarboxylic acid cycle
  Homolog annotation: Hit_ID=Q43827; Match level="QueryCoverage=82%, HitCoverage=12%, E-value=1e-23, Identity=71%"; Hit description =Malate synthase, glyoxysomal
RRVAEADGAGHGVPQVHLPEAHVLIDGEPAIGCLVDFGLYFFHNHAAFRAGQGAGFGPFFYLPKMEHSREARIWNGVFERAEQAAGIER

SEQ ID NO: 130124 - protein, 58 aa, Setaria italica
  Transcript Sequence Number=SeqID_64150
PNDIQLIDAHLDCYIFQTMCLNKLEKGTTNQMKRHYSFGLLYFSKMCLNKLEKGPQIR

SEQ ID NO: 130125 - protein, 76 aa, Setaria italica
  Transcript Sequence Number=SeqID_64151
  Gene Ontology: Mol. function=translation initiation factor activity; Biological process=cellular metabolic process
  Homolog annotation: Hit_ID=Q338M7; Match level="QueryCoverage=100%, HitCoverage=18%, E-value=2e-37, Identity=93%"; Hit description =Initiation factor 2 subunit family protein, expressed
PSDLLDFGEFSDCMNFSTQDGSPLLNVVNPTFDYVPPKLVSLFVTDTGGHSPSYMYRLIAEYYSADDLVVQRKSTA

SEQ ID NO: 130126 - protein, 99 aa, Setaria italica
  Transcript Sequence Number=SeqID_64152
  Gene Ontology: Mol. function=transferase activity; Cellular component= chloroplast envelope; Biological process=biosynthetic process
  Homolog annotation: Hit_ID=B6T479; Match level="QueryCoverage=100%, HitCoverage=23%, E-value=2e-47, Identity=91%"; Hit description =Glycosyl transferase, group 1 family protein
IIHATSPWEFMVIGALAIAKMISVPMVMSYHTHLPAYIPRYNLNWLLEPTWSFIRCLHRAADLTLVPSVAIAEDFETAKVVPANRIRLWNKGFDSESFH

SEQ ID NO: 130127 - protein, 100 aa, Setaria italica
  Transcript Sequence Number=SeqID_64153
GELTRRTATRQEKFTPPPPRRREWNPMAHTVPVDGPVMAEEGGGGSAVGFLPYYYRWNRRSPLRLPPRVDWNGIQSSGAGWLRARRALAISGGAGILGGA

SEQ ID NO: 130128 - protein, 124 aa, Setaria italica
  misc_feature (44)..(44): Xaa can be any naturally occurring amino acid
  Transcript Sequence Number=SeqID_64154
  Gene Ontology: Mol. function=transferase activity, transferring phosphorus-containing groups; Cellular component=chloroplast; Biological process=phosphorylation
  Homolog annotation: Hit_ID=Q6AVA8; Match level="QueryCoverage=87%, HitCoverage=11%, E-value=3e-52, Identity=92%"; Hit description =Pyruvate, phosphate dikinase 1, chloroplastic
  Pfam annotation: Domain name=PEP-utilizers_C; Domain location=1-119; Score=-102.9; E_value=2.1e-07; Accession=PF02896.10; Description=PEP- utilising enzyme, TIM barrel domain
LLLGKPIDYKIGTMIEIPRAALVADEIAEQAEFFSFGTNDLLLXMTFGYSRDDVGKFLPIYLSQGILQHDPFEVLDQRGVGELVKFATERGRKARPNLKVGICGEHGGEPSYKLDNYFRQKYGD

SEQ ID NO: 130129 - protein, 25 aa, Setaria italica
  Transcript Sequence Number=SeqID_64155
LVRKVFPYLLFLPTSIVPTFLSLGP

SEQ ID NO: 130130 - protein, 85 aa, Setaria italica
  Transcript Sequence Number=SeqID_64156
  Gene Ontology: Mol. function=transferase activity, transferring glycosyl groups; Cellular component=integral to membrane; Biological process=cell wall organization and biogenesis
  Homolog annotation: Hit_ID=Q67X45; Match level="QueryCoverage=54%, HitCoverage=8%, E-value=2e-17, Identity=89%"; Hit description =Probable mannan synthase 3
VVAHVVPFMLYCVVIPLSVLIPEVTVPVWGVVYIPTTITLLYAIEHERYHMGNNLPNEKEAIDQIKLPPQRHLLSQNYLCTRLPE

SEQ ID NO: 130131 - protein, 50 aa, Setaria italica
  Transcript Sequence Number=SeqID_64157
TISSILDEVIRRTKHPMLASSIVQRKTGPLTDASTVVRFYKLIPLCRGTR

SEQ ID NO: 130132 - protein, 49 aa, Setaria italica
  Transcript Sequence Number=SeqID_64158
  Gene Ontology: Mol. function=receptor activity
CYIFCLVRNLSYNSLTGSLPPGLGQPSLVSLDLSSNEFTGSIPGTIGSS

SEQ ID NO: 130133 - protein, 70 aa, Setaria italica
  misc_feature (9)..(9): Xaa can be any naturally occurring amino acid
  misc_feature (33)..(33): Xaa can be any naturally occurring amino acid
  misc_feature (60)..(60): Xaa can be any naturally occurring amino acid
  misc_feature (62)..(62): Xaa can be any naturally occurring amino acid
  Transcript Sequence Number=SeqID_64159
  Homolog annotation: Hit_ID=B6SJK4; Match level="QueryCoverage=78%, HitCoverage=8%, E-value=6e-10, Identity=65%"; Hit description=HMG box family protein
KVPIIGGKXDLDLHQLYKEVTSRGGIDKARNGXMLLIQTLNFLNKVKAENRWREVTASFXFXATATNAFF

SEQ ID NO: 130134 - protein, 127 aa, Setaria italica
  Transcript Sequence Number=SeqID_64160
  Gene Ontology: Mol. function=nucleoside-triphosphatase activity; Cellular component=cell wall
  Homolog annotation: Hit_ID=B6U2J1; Match level="QueryCoverage=86%, HitCoverage=17%, E-value=9e-43, Identity=75%"; Hit description =ATPase family AAA domain-containing protein 3
KAMSEAQARILETKETEDVKRRLLVDQIKADREKWIEVINTTFEHIGGGLQTILTDQNKLVVAVGGLTALAAGIYTTREGARVVWGYVDRILGQPSLVRESSRGRYPWSGSLSRCLTKLVLLLSLNL

SEQ ID NO: 130135 - protein, 107 aa, Setaria italica
  Transcript Sequence Number=SeqID_64161
  Gene Ontology: Mol. function=sequence-specific DNA binding; Cellular component=nucleus; Biological process=regulation of transcription, DNA-dependent
  Homolog annotation: Hit_ID=Q41813; Match level="QueryCoverage=96%, HitCoverage=6%, E-value=3e-35, Identity=72%"; Hit description=Hox2b protein
SLFLLYWLFEVREPNIVLMEKPAADINDTISEKLMIQINLNEDIEEDIPPSQYTRCEERATMTPTAISTEVGPPGYGPGENFLQVSSRNTSCEQNVIMTPPAILREV

SEQ ID NO: 130136 - protein, 86 aa, Setaria italica
  misc_feature (33)..(33): Xaa can be any naturally occurring amino acid
  Transcript Sequence Number=SeqID_64162
  Gene Ontology: Mol. function=sequence-specific DNA binding; Cellular component=nucleus; Biological process=regulation of transcription, DNA-dependent
  Homolog annotation: Hit_ID=Q41812; Match level="QueryCoverage=89%, HitCoverage=19%, E-value=2e-22, Identity=65%"; Hit description=Hox2a protein
  Pfam annotation: Domain name=Homeobox; Domain location=26-83; Score =17.1; E_value=0.00025; Accession=PF00046.21; Description=Homeobox domain
KTRLNKVTRQSEHRTEVLCSNSSSSKASKHHFXGPIVSQKLKAHFEKDPYPSRATKESLAQELGLTFNQVSKWFSATRYYSRGAAA

SEQ ID NO: 130137 - protein, 58 aa, Setaria italica
  Transcript Sequence Number=SeqID_64163
LCTDESVAAKGALELCMTQMKIVLSSQQLPLDASMDNISFVVFILLSYGKLYCLLRFL

SEQ ID NO: 130138 - protein, 42 aa, Setaria italica
  Transcript Sequence Number=SeqID_64164
VYFEAAYEELAGDDTQASDAAISEIARMSVHRPEVEQSWNKN

SEQ ID NO: 130139 - protein, 83 aa, Setaria italica
  Transcript Sequence Number=SeqID_64165
QPHIFCRKALWSIQVLSPEMSLATVRTYIWKKPEDLILHYRVVIVHQGRIFLQKTHRGQDPRWMMGPKTQLMCFRHLSFPTVS

SEQ ID NO: 130140 - protein, 91 aa, Setaria italica
  Transcript Sequence Number=SeqID_64166
  Homolog annotation: Hit_ID=A6N0K8; Match level="QueryCoverage=92%, HitCoverage=100%, E-value=1e-23, Identity=63%"; Hit description=Wd -repeat protein 48 (Fragment)
VVEKLVLEKPLDGGSDSTFAMGLSSGQSQLSALDSSSRIGLKAWQKLKPIVVEILCNNQVLSPEMSLATVRTYIWKKPEDLILHYRVVQSR

SEQ ID NO: 130141 - protein, 48 aa, Setaria italica
  misc_feature (38)..(38): Xaa can be any naturally occurring amino acid
  Transcript Sequence Number=SeqID_64167
  Homolog annotation: Hit_ID=Q9MAB0; Match level="QueryCoverage=97%, HitCoverage=6%, E-value=1e-11, Identity=72%"; Hit description =T12H1.5 protein
TMDARLGCLSVHLDTPQCFSAEIYAVDLNVSGAQEDLXKINLAQEILP

SEQ ID NO: 130142 - protein, 40 aa, Setaria italica
  Transcript Sequence Number=SeqID_64168
  Homolog annotation: Hit_ID=B9REV1; Match level="QueryCoverage=92%, HitCoverage=4%, E-value=5e-12, Identity=91%"; Hit description =Nucleotide binding protein, putative
PNRHVTCLAAAEKNSNIVASGGLGGEVFIWDLDAALAPVA

SEQ ID NO: 130143 - protein, 68 aa, Setaria italica
  Transcript Sequence Number=SeqID_64169
HAVWASTSVPVSMPSNHGDFVCHQIVGRVCGDVMTQFWKSIINAKEPCLPTPKFLSVEVYCLICLSAN

SEQ ID NO: 130144 - protein, 80 aa, Setaria italica
  Transcript Sequence Number=SeqID_64170
ILCSNYVLSAHRYVEDGDEIRKYFAAFHLLDNFPAAVIVDDFADFFSERSCQQRYGTTRARDLAMVRVLALCHNAIGHAK

SEQ ID NO: 130145 - protein, 48 aa, Setaria italica
  Transcript Sequence Number=SeqID_64171
VLSYWYSVGPTFVLGKRYCQNKGPSATFGKTPSLRGYVVDPELGSNEG

SEQ ID NO: 130146 - protein, 70 aa, Setaria italica
  misc_feature (63)..(63): Xaa can be any naturally occurring amino acid
  Transcript Sequence Number=SeqID_64172
  Gene Ontology: Mol. function=nucleoside-triphosphatase activity; Cellular component=membrane
  Homolog annotation: Hit_ID=Q6X4V5; Match level="QueryCoverage=97%, HitCoverage=9%, E-value=3e-16, Identity=60%"; Hit description=ABC transporter
VLDDPLDRMTTSEAIRKLIASYSRSQYYYAAREKVNDISRIKGTVLDSGGSQASFLMQACTLXKRSFINM

SEQ ID NO: 130147 - protein, 64 aa, Setaria italica
  Transcript Sequence Number=SeqID_64173
HLIYFHETTTETGVVGANHFFICFQKEPINPEQSVMCHSAFFRCHFAHITCMYTCTQISFSSKT

SEQ ID NO: 130148 - protein, 35 aa, Setaria italica
  Transcript Sequence Number=SeqID_64174
QRSRLWSGGAYDSDTEDPDNVKSEGNDLIISSSTP

SEQ ID NO: 130149 - protein, 106 aa, Setaria italica
  misc_feature (89)..(89): Xaa can be any naturally occurring amino acid
  Transcript Sequence Number=SeqID_64175
  Gene Ontology: Cellular component=integral to membrane
  Homolog annotation: Hit_ID=B6U9E5; Match level="QueryCoverage=100%, HitCoverage=45%, E-value=1e-31, Identity=65%"; Hit description =Transmembrane protein PFT27
  Pfam annotation: Domain name=UPF0016; Domain location=1-52; Score =5.8; E_value=0.00032; Accession=PF01169.11; Description =Uncharacterized protein family UPF0016
SMSKSRKLVLAGCLTALTVMTALSACLGWAAPNLISRKWTHHVTTLLFFGFGIWSLWEGFKEDGDSEELAEVEAELDAAFKSNKGESKXKSKANEDTKKQQRPFLV

SEQ ID NO: 130150 - protein, 66 aa, Setaria italica
  Transcript Sequence Number=SeqID_64176
TYPFLVIGSSIFFQCLLSYASFLYGPCFEYWIYSCFIYLCLDSGHAPSQEARPGRLFDCTNITNFR

SEQ ID NO: 130151 - protein, 46 aa, Setaria italica
  Transcript Sequence Number=SeqID_64177
  Gene Ontology: Cellular component=integral to membrane
  Homolog annotation: Hit_ID=B6U9E5; Match level="QueryCoverage=100%, HitCoverage=19%, E-value=2e-18, Identity=100%"; Hit description =Transmembrane protein PFT27
  Pfam annotation: Domain name=UPF0016; Domain location=9-44; Score =6.9; E_value=0.00025; Accession=PF01169.11; Description =Uncharacterized protein family UPF0016
MAPSLLGGFTKSLAMTVLSEIGDKTFFAAAILAMRHPRKLVLAGCL

SEQ ID NO: 130152 - protein, 49 aa, Setaria italica
  misc_feature (18)..(18): Xaa can be any naturally occurring amino acid
  Transcript Sequence Number=SeqID_64178
  Gene Ontology: Mol. function=structural constituent of ribosome; Cellular component=intracellular; Biological process=translation
  Homolog annotation: Hit_ID=Q10LW7; Match level="QueryCoverage=91%, HitCoverage=19%, E-value=2e-10, Identity=75%"; Hit description=60S ribosomal protein L10, putative, expressed
SRAEYLKLKGEGRVVPDXGSNAKLLTWHGSLADRKPSRVVYPPSVAEHA

SEQ ID NO: 130153 - protein, 80 aa, Setaria italica
  Transcript Sequence Number=SeqID_64179
IHVPYLLMAKHRLLHLTALASSTDKHKQHAIVRVITITTVDSGPYTYATPRRVLLTLDTSQMYVGPFRGLNEADRSGTQV

SEQ ID NO: 130154 - protein, 54 aa, Setaria italica
  Transcript Sequence Number=SeqID_64180
  Homolog annotation: Hit_ID=Q01K95; Match level="QueryCoverage=100%, HitCoverage=2%, E-value=2e-09, Identity=61%"; Hit description =OSIGBa0148A10.3 protein
LGRISSISHGKSGDLARSTSNLGTLHSFLNDAYERVETVESCSANDTLAVIILY

SEQ ID NO: 130155 - protein, 52 aa, Setaria italica
  Transcript Sequence Number=SeqID_64181
  Pfam annotation: Domain name=efhand; Domain location=12-40; Score =33.7; E_value=7.6e-07; Accession=PF00036.24; Description=EF hand
RRPFSPRGDQKAIDDIILDVDKDKDGKISYEEFELMMKAGMDWRNTSRQYSR

SEQ ID NO: 130156 - protein, 59 aa, Setaria italica
  Transcript Sequence Number=SeqID_64182
  Homolog annotation: Hit_ID=B6T548; Match level="QueryCoverage=69%, HitCoverage=17%, E-value=6e-11, Identity=80%"; Hit description=F-box domain containing protein
VGFLLVFRICRCNSNYCSSRKISLNELTMSEGAEVLAILNRGAVHEVFRLRVSLADMDK

SEQ ID NO: 130157 - protein, 52 aa, Setaria italica
  Transcript Sequence Number=SeqID_64183
  Subcellular localization annotation: CTP_CleavageSite=16; ConfidenceScore=5.02e-01
LSKSKANMIHKLPRPNCSSKVNKVPTPKLKQHPFIVQSFSNFQAINPHNDAI

SEQ ID NO: 130158 - protein, 63 aa, Setaria italica
  Transcript Sequence Number=SeqID_64184
HVGSRACSIITILPVSTMDYSIKKETSLGGSTSSRKVRTKYYQINNKFRRQTLDQVINNSTTL

SEQ ID NO: 130159 - protein, 41 aa, Setaria italica
  Transcript Sequence Number=SeqID_64185
  Gene Ontology: Cellular component=plasma membrane
  Homolog annotation: Hit_ID=Q9FM19; Match level="QueryCoverage=97%, HitCoverage=13%, E-value=3e-13, Identity=77%"; Hit description =Hypersensitive-induced response protein
MGNLCCCVQVDQSTVAIREQFGKFDSVLEPGCHCMPWFIGK

SEQ ID NO: 130160 - protein, 61 aa, Setaria italica
  Transcript Sequence Number=SeqID_64186
IWGYRIKLQACLCLWLHDLFCCLHIYFGCSHACLEQVQIGNSPTYKLERKLGKGGFGQVYV

SEQ ID NO: 130161 - protein, 69 aa, Setaria italica
  Transcript Sequence Number=SeqID_64187
  Gene Ontology: Mol. function=sequence-specific DNA binding; Cellular component=nucleus; Biological process=regulation of transcription, DNA-dependent
  Homolog annotation: Hit_ID=Q69T58; Match level="QueryCoverage=72%, HitCoverage=7%, E-value=7e-21, Identity=96%"; Hit description =Homeobox-leucine zipper protein ROC8
SVCLLLSSAWRRVLTSVCLQWDVLSHGNQVQEVSRIPNGSHPGNCISLLRGLNASQNSILILQESCTDA

SEQ ID NO: 130162 - protein, 62 aa, Setaria italica
  Transcript Sequence Number=SeqID_64188
  Gene Ontology: Mol. function=aminoacyl-tRNA ligase activity
  Homolog annotation: Hit_ID=Q2R1H7; Match level="QueryCoverage=88%, HitCoverage=15%, E-value=3e-22, Identity=87%"; Hit description=TRNA synthetase, putative, expressed
LQNAPFFVAKLAIKTLPCIILFKKGIAVDRLIGFEDLGRKDDFSTRALENILKMKGSQLNPF

SEQ ID NO: 130163 - protein, 29 aa, Setaria italica
  Transcript Sequence Number=SeqID_64189
DCGDRTIRLCSLHNQVVLTPYHHYIARWS

SEQ ID NO: 130164 - protein, 68 aa, Setaria italica
  Transcript Sequence Number=SeqID_64190
  Gene Ontology: Mol. function=structural constituent of nuclear pore; Cellular component=nuclear pore; Biological process=nucleocytoplasmic transport
  Homolog annotation: Hit_ID=Q9LQU6; Match level="QueryCoverage=89%, HitCoverage=4%, E-value=2e-23, Identity=78%"; Hit description =F10B6.25
KLVQLTFHQLVCSEDGDQLAMRLISALMEYYIGPEGRGTVEEISTKLREGCPSYFNESDYKYLFHQGY

SEQ ID NO: 130165 - protein, 156 aa, Setaria italica
  misc_feature (32)..(32): Xaa can be any naturally occurring amino acid
  misc_feature (71)..(71): Xaa can be any naturally occurring amino acid
  misc_feature (96)..(96): Xaa can be any naturally occurring amino acid
  Transcript Sequence Number=SeqID_64191
  Gene Ontology: Mol. function=protein serine/threonine kinase activity; Cellular component=plasma membrane; Biological process =protein amino acid phosphorylation
  Homolog annotation: Hit_ID=Q32SF8; Match level="QueryCoverage=100%, HitCoverage=31%, E-value=5e-58, Identity=74%"; Hit description =Serine/threonine kinase
VGDKTHVSTRVMGTYGYCAPEYAMTGQLTLKXSDIYSFGVVLLEIITGRRAIDNTRAAGEQNLVAWMSASXLGSSVSSVLSLQSLVSYHLKGKSRXARPLFKDRRKFPLMADPALEGQYPSRGLYQALAVAAMCVQEQPSMRPLIGDVVTALTYLA

SEQ ID NO: 130166 - protein, 57 aa, Setaria italica
  Transcript Sequence Number=SeqID_64192
HNVLFSILSIYTSLSMDKDQNIAKEQHQWLTHATRFCSPAARVLSIALRPVMISETA

SEQ ID NO: 130167 - protein, 145 aa, Setaria italica
  misc_feature (114)..(114): Xaa can be any naturally occurring amino acid
  Transcript Sequence Number=SeqID_64193
  Gene Ontology: Mol. function=nucleotide binding; Biological process =defense response
  Homolog annotation: Hit_ID=Q6EST1; Match level="QueryCoverage=99%, HitCoverage=14%, E-value=8e-17, Identity=43%"; Hit description =Putative MLA1
QGLGDLTNLKVLEIDWWYIYGEVQVHHVDVEGHKEACISLLSKLVTTLRELHIMQDAADDILSFMASCGSTRPPLRKLIFRERRGPSVMPHQIISSLVNLTRLSIGLVSQEGIXILASLPMLLSITVRVTGNSGIRYTISSQGFQ

SEQ ID NO: 130168 - protein, 87 aa, Setaria italica
  Transcript Sequence Number=SeqID_64194
DKKTVRSRRIGPKLMASAATSVMGSVIGKLTAMLGDKYQFARDVEQGIRFLKDELSTMDAVLQKLADKDDDQMDPMDKDWRNKPCVR

SEQ ID NO: 130169 - protein, 165 aa, Setaria italica
  misc_feature (77)..(77): Xaa can be any naturally occurring amino acid
  Transcript Sequence Number=SeqID_64195
  Gene Ontology: Mol. function=nucleotide binding; Biological process =defense response
  Homolog annotation: Hit_ID=Q6EST1; Match level="QueryCoverage=89%, HitCoverage=13%, E-value=6e-20, Identity=44%"; Hit description =Putative MLA1
WCNSEECRVHDVILEFIVSKAVEDNFVTIWNRNGFSENYSSNKIRRLSIQHGISRRAEEMVKIKEHAAHIRSINIFXSNSLLVFKNISMVLSSQVLRVVNVLNKGDYIWEELYEDCYLGHVKSFGQMKYLRLENWSLICECKLPKDIEKLQHLREQLRIVKGYPD

SEQ ID NO: 130170 - protein, 83 aa, Setaria italica
  Transcript Sequence Number=SeqID_64196
YVNDGKVAFQVHRYLGHVKSFGQMKYLRLPRFSTCNFELPKDIEKLQHLETLDVRGSFLGKLPASILQLQRLVHLHVDAIVKL

SEQ ID NO: 130171 - protein, 84 aa, Setaria italica
  Transcript Sequence Number=SeqID_64197
SIHHGISMRAEEMVKIKEHAAHIRSINIFDPNLVLLIINTSMFLSSQVLRVLNIETRDEFLEEDCYLGHVKSFGQMKYLRLEIW

SEQ ID NO: 130172 - protein, 46 aa, Setaria italica
  Transcript Sequence Number=SeqID_64198
PKKYNKKQFDCRAFVSVSQTLDLKKLLRDILSQIVSKSEFDQSERW

SEQ ID NO: 130173 - protein, 57 aa, Setaria italica
  Transcript Sequence Number=SeqID_64199
  Homolog annotation: Hit_ID=Q2RAC5; Match level="QueryCoverage=100%, HitCoverage=11%, E-value=4e-18, Identity=77%"; Hit description =Cyclin-T1-3
HSPYRIPYSRNAEGGKLGNSWYFSRKEIEEYSFSRRDGIDLKKESHFRKTYCICLQD

SEQ ID NO: 130174 - protein, 82 aa, Setaria italica
  Transcript Sequence Number=SeqID_64200
  Subcellular localization annotation: CTP_CleavageSite=49; ConfidenceScore=5.68e-01
HAGSQPPRRHAAATPPPLPPPHRLYRRSPTSPPRPSGGAYPVRSALPCRAHQRTPAREEGSYRLLRLLSREEEHPTWMPCRQ

SEQ ID NO: 130175 - protein, 49 aa, Setaria italica
  Transcript Sequence Number=SeqID_64201
  Gene Ontology: Biological process=cell division
  Homolog annotation: Hit_ID=Q2RAC5; Match level="QueryCoverage=97%, HitCoverage=9%, E-value=2e-20, Identity=91%"; Hit description=Cyclin- T1-3
LGERLVLVTLGFDLNIHHPYKPLVEAIKRFKVAENALAQVAWNFVNDGD

SEQ ID NO: 130176 - protein, 45 aa, Setaria italica
  Transcript Sequence Number=SeqID_64202
TNRDNTEEGELSMDSQEYRSPEHGNRKRKDAHEHRYPERNSHKGV

SEQ ID NO: 130177 - protein, 45 aa, Setaria italica
  Transcript Sequence Number=SeqID_64203
  Gene Ontology: Biological process=cell division
  Homolog annotation: Hit_ID=Q2QQS5; Match level="QueryCoverage=97%, HitCoverage=8%, E-value=3e-13, Identity=79%"; Hit description=Cyclin- T1-4
QKNDRRTIATVCMFLAGKVEETPRPLRDVILLSYEINRSRIPFCG

SEQ ID NO: 130178 - protein, 61 aa, Setaria italica
  Transcript Sequence Number=SeqID_64204
KSQRFPCSIECKMVSSPKLAPHRLAPNIGVQNDCGASLGEDTILHSISECNMLKKPKIPLQ

SEQ ID NO: 130179 - protein, 57 aa, Setaria italica
  Transcript Sequence Number=SeqID_64205
ATSTLQQQCMSNQVLSISCNYRAQHKHPDNKYSRVKVPGLTCIATSTLQQPFTSANG

SEQ ID NO: 130180 - protein, 116 aa, Setaria italica
  Transcript Sequence Number=SeqID_64206
  Gene Ontology: Mol. function=transferase activity, transferring glycosyl groups
  Homolog annotation: Hit_ID=Q2RB54; Match level="QueryCoverage=86%, HitCoverage=15%, E-value=5e-28, Identity=60%"; Hit description =Glycosyl transferase family 8 protein, expressed
IVTRNSSEGHNCCISSQSSQRQMKTEYISVFGHSHFLLPDLLRNLNRVVVLDDDLIVQKDLSSLWNLDMDGKVVGAVQFCGVTLGQLRAYIAEHSFNSDACVWLSGLNVIELEKWR

SEQ ID NO: 130181 - protein, 53 aa, Setaria italica
  Transcript Sequence Number=SeqID_64207
RVCNFTPKVSRWCPSDVLDAELLTIARFCRGHFSLLAFWDLSIAFAGVYLGHL

SEQ ID NO: 130182 - protein, 45 aa, Setaria italica
  Transcript Sequence Number=SeqID_64208
QIYHLSDLTFFFLAGLFYFRYKEAELNMGENSCIDRCVSKYWQVT

SEQ ID NO: 130183 - protein, 67 aa, Setaria italica
  Transcript Sequence Number=SeqID_64209
LNIASHRSNAYSLRQLGSAAKERLSACIDTSYEKTSLQNLRQGYSDRPYRFLSDCTIEINLNARSLL

SEQ ID NO: 130184 - protein, 70 aa, Setaria italica
  Transcript Sequence Number=SeqID_64210
TKANRPKHQMYCLLGIFLRGKESGKHTSRDTQDNQLTDSYNLNWKNRRLHDNTEFNRGPMNNKQSAVQIQ

SEQ ID NO: 130185 - protein, 33 aa, Setaria italica
  Transcript Sequence Number=SeqID_64211
LIPRSHQSRATIVSAACDTSNSDHKNRTNGYPV

SEQ ID NO: 130186 - protein, 121 aa, Setaria italica
  misc_feature (46)..(46): Xaa can be any naturally occurring amino acid
  Transcript Sequence Number=SeqID_64212
  Gene Ontology: Mol. function=ceramidase activity; Cellular component =extracellular region; Biological process=multicellular organismal development
  Homolog annotation: Hit_ID=A9YFM2; Match level="QueryCoverage=85%, HitCoverage=13%, E-value=9e-48, Identity=90%"; Hit description =Neutral ceramidase
PGPGGYLQYVVYIVTSLGIHTHAGPGGYLQYVVYIVTSLGFVRQSXFDVIVNGIEQCIVEAHNNLRPGKIYVNKGDLLDAGVNRSPSAYLNNPPEERSKYQYTVDKEMTLIKFVDDELGPV

SEQ ID NO: 130187 - protein, 78 aa, Setaria italica
  Transcript Sequence Number=SeqID_64213
  Gene Ontology: Mol. function=phosphatidylcholine-sterol O -acyltransferase activity; Biological process=lipid metabolic process
  Homolog annotation: Hit_ID=Q6K3D9; Match level="QueryCoverage=46%, HitCoverage=5%, E-value=4e-14, Identity=91%"; Hit description =Phosphatidylcholine acyltransferase-like
HFDIGIALYILRIGPVLLLVSLIHGERKRRMGKTPYADMVLLGKVSGPLSSVWKEWVKWCVEFGIEANAIIAVPYDWR

SEQ ID NO: 130188 - protein, 62 aa, Setaria italica
  Transcript Sequence Number=SeqID_64214
  Gene Ontology: Mol. function=protein dimerization activity; Cellular component=nucleus; Biological process=regulation of transcription, DNA-dependent
  Homolog annotation: Hit_ID=A2ZRY8; Match level="QueryCoverage=90%, HitCoverage=27%, E-value=1e-20, Identity=80%"; Hit description=Auxin- responsive protein IAA4
YDSLLAKLRHMFKTPITYADVMEYHQRIPREKAAHVLTYEDQDGDWMMVGDVPWEYVSSAIK

SEQ ID NO: 130189 - protein, 83 aa, Setaria italica
  Transcript Sequence Number=SeqID_64215
YFKFSFLGFLICLFYSSYEHSHGSSITVTTHHHHHPSTGQHHDAEEPLLKHEAGCEGTQSAAKAAKKTYDHKYTNVTTVLIFT

SEQ ID NO: 130190 - protein, 66 aa, Setaria italica
  Transcript Sequence Number=SeqID_64216
PSPCSSFLFSVYLPLFCIIGVQFASMVLAPILKLLMSWAFDWADAEPIGPPLGLELEIELDILLSS

SEQ ID NO: 130191 - protein, 74 aa, Setaria italica
  Transcript Sequence Number=SeqID_64217
SPGTISAFNIISQLTQSLSWSQTMAKLTCSDLSALWFLELQANGHCSESYKVAQSRENCSLMTMHQLFRIENQM

SEQ ID NO: 130192 - protein, 113 aa, Setaria italica
  misc_feature (18)..(18): Xaa can be any naturally occurring amino acid
  Transcript Sequence Number=SeqID_64218
  Gene Ontology: Mol. function=protein dimerization activity; Cellular component=nucleus; Biological process=regulation of transcription, DNA-dependent
  Homolog annotation: Hit_ID=Q0JKG7; Match level="QueryCoverage=90%, HitCoverage=36%, E-value=7e-35, Identity=78%"; Hit description=Auxin- responsive protein IAA5
  Pfam annotation: Domain name=AUX_IAA; Domain location=1-113; Score= -3.8; E_value=4.1e-09; Accession=PF02309.8; Description=AUXIAA family
  Subcellular localization annotation: CTP_CleavageSite=32; ConfidenceScore=5.09e-01
SPPAAPPAAKAQVVGWPXPVDGNYRKNTLAASASKTKAPAEEAASGGGGPMYVKVSMDGAPYLRKVDIKMYSSYEDLSMALEKMFSCFITGQSGLRKSSTKDRLTNGSKADGL

SEQ ID NO: 130193 - protein, 65 aa, Setaria italica
  Transcript Sequence Number=SeqID_64219
TNIRGILDNPQELFQPSTSSPSYQATDYPSSDSHKQNPNHSSPPYTSTDYPTNEVHKPPSNYSPP

SEQ ID NO: 130194 - protein, 81 aa, Setaria italica
  Transcript Sequence Number=SeqID_64220
  Gene Ontology: Mol. function=zinc ion binding
  Homolog annotation: Hit_ID=Q7XDA5; Match level="QueryCoverage=98%, HitCoverage=26%, E-value=8e-22, Identity=75%"; Hit description=Zinc finger, C3HC4 type family protein, expressed
FPYAQERLLGFALGSVSMGGFVLHQRRAIYRSLAEADGSSYFYQPGEIISRKSSPELARVWNKAVDETLGRLVVYLSSRGW

SEQ ID NO: 130195 - protein, 54 aa, Setaria italica
  Transcript Sequence Number=SeqID_64221
LAHDEAILTVSIFPVAQPGEIISRKSSPELARVWNKAVDETLGRLVVYLSSRGW

SEQ ID NO: 130196 - protein, 68 aa, Setaria italica
  Transcript Sequence Number=SeqID_64222
NYYDTLLIICKPLIIIKGIIVISYYFCILVPPNWYFLVLLFRYFMVLPLFPLFDFAGWTVLYFFKHSK

SEQ ID NO: 130197 - protein, 108 aa, Setaria italica
  misc_feature (39)..(39): Xaa can be any naturally occurring amino acid
  Transcript Sequence Number=SeqID_64223
  Gene Ontology: Cellular component=chloroplast
  Homolog annotation: Hit_ID=B9R8H7; Match level="QueryCoverage=100%, HitCoverage=17%, E-value=7e-24, Identity=47%"; Hit description =Pentatricopeptide repeat-containing protein, putative
AKCGCIGDAKGGFQQLCDVDDVVLWTAMIAGHDALFVHXAYNTSVLRACACLAALEPGKQLHAQIIKCGFGLGGSVGSALSTMYSKCGNLEDGMVVFRSMPDKDVIAW

SEQ ID NO: 130198 - protein, 81 aa, Setaria italica
  misc_feature (62)..(62): Xaa can be any naturally occurring amino acid
  Transcript Sequence Number=SeqID_64224
PVPYVFHNHDIRYKLFGKFFGRHDVKSNKLSIHPTGAIFMIQSVPLQDLLFYHAFSGSGREXGDPSSTACGYTESAFRKSL

SEQ ID NO: 130199 - protein, 58 aa, Setaria italica
  Transcript Sequence Number=SeqID_64225
MYSKKLWTIMHLLAQLVVTQNPLSGKACEKQILLIQFILGLCLFISCCIILPLSIASA

SEQ ID NO: 130200 - protein, 57 aa, Setaria italica
  Transcript Sequence Number=SeqID_64226
RSSSNSEEVKCLPGGKAKKKNTWITTWPTCISASNSHMEAGDSIQGSHYMKEGPLLF

SEQ ID NO: 130201 - protein, 49 aa, Setaria italica
  Transcript Sequence Number=SeqID_64227
PSQQTTLKAKRRIIEHKLDIIFQAFHACHPSEAQSLYVVAAYVIWRLEP

SEQ ID NO: 130202 - protein, 70 aa, Setaria italica
  Transcript Sequence Number=SeqID_64228
GEDVAEFEAERDVELRNNKKTQRRKNERIEAQERVQWRKEVELEKELDAALTSLMEKHKPDTFQAFQLAK

SEQ ID NO: 130203 - protein, 53 aa, Setaria italica
  Transcript Sequence Number=SeqID_64229
RTSVTYVASIQPTAELSNINTLIPRCPLFPSCLPWFFDFFPIVSQPSIGAGRP

SEQ ID NO: 130204 - protein, 47 aa, Setaria italica
  Transcript Sequence Number=SeqID_64230
  Gene Ontology: Mol. function=naphthoate synthase activity; Biological process=menaquinone biosynthetic process
  Homolog annotation: Hit_ID=B9SH93; Match level="QueryCoverage=95%, HitCoverage=13%, E-value=3e-09, Identity=62%"; Hit description =Naphthoate synthase, putative
PVDLHGRHQELGGNATLIFFAPVEAKEGKNAYMERRRPDFSKFPRKP

SEQ ID NO: 130205 - protein, 77 aa, Setaria italica
  Transcript Sequence Number=SeqID_64231
  Gene Ontology: Mol. function=naphthoate synthase activity; Biological process=menaquinone biosynthetic process
  Homolog annotation: Hit_ID=B9SH93; Match level="QueryCoverage=59%, HitCoverage=13%, E-value=5e-20, Identity=95%"; Hit description =Naphthoate synthase, putative
  Pfam annotation: Domain name=ECH; Domain location=5-77; Score=-62.8; E_value=0.033; Accession=PF00378.12; Description=Enoyl-CoA hydrataseisomerase family
IIPLFLFRLHHPIDSSCAVYYQVAGYAVGGGHVLHMVCDMTIAADNAIFGQTGPKVGSFDAGYGSSIMSRLVGPKRA

SEQ ID NO: 130206 - protein, 68 aa, Setaria italica
  Transcript Sequence Number=SeqID_64232
  Gene Ontology: Mol. function=electron carrier activity; Biological process=oxidation reduction
  Homolog annotation: Hit_ID=Q2RB99; Match level="QueryCoverage=97%, HitCoverage=11%, E-value=6e-26, Identity=78%"; Hit description =Cytochrome P450 family protein
MPLANLPFGVGTRTCAGQNLAMVELKVILSLLLSRFEFALSPKYVHCPAFRLTIEPGNGVPLILKKLY

SEQ ID NO: 130207 - protein, 49 aa, Setaria italica
  Transcript Sequence Number=SeqID_64233
  Gene Ontology: Mol. function=catalytic activity; Cellular component =membrane; Biological process=plant-type hypersensitive response
  Homolog annotation: Hit_ID=Q9LLQ7; Match level="QueryCoverage=95%, HitCoverage=12%, E-value=3e-12, Identity=65%"; Hit description =Phosphatidic acid phosphatase alpha
MQLIAVIGPVVIFLMVYIRRRNVYDLHHAILGILFAVVITGVLTDAIKD

SEQ ID NO: 130208 - protein, 70 aa, Setaria italica
  Transcript Sequence Number=SeqID_64234
  Gene Ontology: Cellular component=plasma membrane
  Homolog annotation: Hit_ID=Q0GPD1; Match level="QueryCoverage=77%, HitCoverage=10%, E-value=9e-10, Identity=64%"; Hit description=BZIP transcription factor bZIP114 (Fragment)
RQLRHQESRGESQMSIDKTRAVVKDLHSRILVAIQRIDMISKNIEDLRDKELQPQLEELIGRYIYPFSLD

SEQ ID NO: 130209 - protein, 29 aa, Setaria italica
  Transcript Sequence Number=SeqID_64235
TFVESTLVQPTFVLDYPVEISPLAKPHRR

SEQ ID NO: 130210 - protein, 119 aa, Setaria italica
  misc_feature (15)..(15): Xaa can be any naturally occurring amino acid
  misc_feature (60)..(60): Xaa can be any naturally occurring amino acid
  Transcript Sequence Number=SeqID_64236
  Gene Ontology: Mol. function=aminoacyl-tRNA ligase activity; Cellular component=cytoplasm; Biological process=tRNA aminoacylation for protein translation
  Homolog annotation: Hit_ID=Q6K1T2; Match level="QueryCoverage=92%, HitCoverage=18%, E-value=9e-42, Identity=77%"; Hit description=Lysyl- tRNA synthetase
ILNFTTIEMYEAYSXYESMMNMAEEIVTRCAMATHGKLKVDYQGTEISLERPWRRETMHXLVKEATGIDFNNFGQDVESAKIAARGLPGIKVGSSESTSLQSCSSVGHVLNEVGFLYTF

SEQ ID NO: 130211 - protein, 84 aa, Setaria italica
  misc_feature (24)..(24): Xaa can be any naturally occurring amino acid
  misc_feature (29)..(29): Xaa can be any naturally occurring amino acid
  Transcript Sequence Number=SeqID_64237
  Gene Ontology: Mol. function=aminoacyl-tRNA ligase activity; Cellular component=cytoplasm; Biological process=tRNA aminoacylation for protein translation
  Homolog annotation: Hit_ID=Q6K1T2; Match level="QueryCoverage=78%, HitCoverage=10%, E-value=3e-22, Identity=78%"; Hit description=Lysyl- tRNA synthetase
MATHGKLKVDYQGTEISLERPWRXETMHXLVKEATGIDFNNFGQDVESAKIAARGLPGIKVGSSESYFLLVLNFLLFFFIFLLF

SEQ ID NO: 130212 - protein, 74 aa, Setaria italica
  misc_feature (10)..(10): Xaa can be any naturally occurring amino acid
  misc_feature (22)..(22): Xaa can be any naturally occurring amino acid
  misc_feature (36)..(36): Xaa can be any naturally occurring amino acid
  Transcript Sequence Number=SeqID_64238
  Gene Ontology: Mol. function=transporter activity; Cellular component= membrane; Biological process=transport
  Homolog annotation: Hit_ID=Q6JN48; Match level="QueryCoverage=62%, HitCoverage=3%, E-value=1e-10, Identity=65%"; Hit description =Ethylene insensitive 2
FNACLAGFAXFFCFVLGLLVSXPKVSINMNVMFPKXLSGENAYSLMALLGGNVIAHNFYVHSSVVQVNQAVSCS

SEQ ID NO: 130213 - protein, 119 aa, Setaria italica
  misc_feature (4)..(4): Xaa can be any naturally occurring amino acid
  misc_feature (18)..(18): Xaa can be any naturally occurring amino acid
  misc_feature (22)..(22): Xaa can be any naturally occurring amino acid
  Transcript Sequence Number=SeqID_64239
  Gene Ontology: Cellular component=microtubule
  Homolog annotation: Hit_ID=Q7XKB3; Match level="QueryCoverage=99%, HitCoverage=12%, E-value=2e-44, Identity=74%"; Hit description =OSJNBa0064G10.18 protein
NWEXRDQSPSHEEPTTSXSSLXPTGRSYSSRGSNQASETPTIASDEDVLSLLMEQHELFLSSTRSRLTKLQIIHQMWVRNDIRGVLSAMEKMCDHAVSADMASVLMEKSETITLDLCTY

SEQ ID NO: 130214 - protein, 61 aa, Setaria italica
  Transcript Sequence Number=SeqID_64240
  Homolog annotation: Hit_ID=Q7XKB3; Match level="QueryCoverage=72%, HitCoverage=4%, E-value=1e-17, Identity=93%"; Hit description =OSJNBa0064G10.18 protein
KAITTVQDVICLFFHCRRERCNLCFIELEKVKNKLPFLTRRKGAVANAAQELTLVFQEVMS

SEQ ID NO: 130215 - protein, 35 aa, Setaria italica
  Transcript Sequence Number=SeqID_64241
EQQVPHQMWVRNDIRGVLSAMEKMCDHAVSADMAS

SEQ ID NO: 130216 - protein, 84 aa, Setaria italica
  Transcript Sequence Number=SeqID_64242
KEVDASVTRDICVSVQSFKHVHYSLLLHEMYYHTVVNQSLGMISLIEIESCCHILLLTWSLPSNALSVFCLLDKHPFFLGEKEQ

SEQ ID NO: 130217 - protein, 43 aa, Setaria italica
  Transcript Sequence Number=SeqID_64243
  Subcellular localization annotation: CTP_CleavageSite=34; ConfidenceScore=5.11e-01
YPGGLMNNRPFGNSNNSIKVPNSNATSTISSSPSSNAGGQIEG

SEQ ID NO: 130218 - protein, 75 aa, Setaria italica
  Transcript Sequence Number=SeqID_64244
  Gene Ontology: Mol. function=transporter activity; Cellular component= mitochondrial inner membrane; Biological process=transport
  Homolog annotation: Hit_ID=B6UAY5; Match level="QueryCoverage=78%, HitCoverage=18%, E-value=2e-27, Identity=98%"; Hit description =Protein brittle-1
  Pfam annotation: Domain name=Mito_carr; Domain location=5-67; Score =33.4; E_value=9.1e-07; Accession=PF00153.19; Description =Mitochondrial carrier protein
VILLSKYLQKTTRYYKGIFHAVSTICRDEGVKGLYKGLGATLLGVGPSIAISFSVYESLRSHWQMERCSSLLLSI

SEQ ID NO: 130219 - protein, 99 aa, Setaria italica
  Transcript Sequence Number=SeqID_64245
  Subcellular localization annotation: CTP_CleavageSite=72; ConfidenceScore=5.31e-01
NCRGPVGDAAHPPHQPHRGRHDLLRVAPSQAAVAPQSSSGFCAMAALNSISLLPKTCISVVVCACTIMFIVSFTTEGSRTSRRKRTNKNKERTESNGTG

SEQ ID NO: 130220 - protein, 41 aa, Setaria italica
  Transcript Sequence Number=SeqID_64246
  Gene Ontology: Mol. function=potassium ion transmembrane transporter activity; Cellular component=membrane; Biological process=potassium ion transport
  Homolog annotation: Hit_ID=Q9M7K3; Match level="QueryCoverage=97%, HitCoverage=5%, E-value=3e-15, Identity=100%"; Hit description=HAK2
GTEAMFADLGHFTAASIRLAFVGVIYPCLVLQYMGQAAFLY

SEQ ID NO: 130221 - protein, 49 aa, Setaria italica
  Transcript Sequence Number=SeqID_64247
YAFHVPKGNPYHSATSGEMAIYRANSLILRKVMPLAYSFGGACYPMATG

SEQ ID NO: 130222 - protein, 110 aa, Setaria italica
  Transcript Sequence Number=SeqID_64248
  Gene Ontology: Mol. function=transporter activity; Cellular component= mitochondrial membrane; Biological process=transport
  Homolog annotation: Hit_ID=B9T601; Match level="QueryCoverage=73%, HitCoverage=15%, E-value=3e-34, Identity=88%"; Hit description=Inner membrane transport protein yjjL, putative
TNLSFCFLPCLIFLLYCLFLLVGILGLPPWEIVAFLTSGLALSSFAFSGLYCTHQDISHEYASILLGITNTAGAVPGIVGVALTGYLLDSTHSWSISLFAPSIFFYLTGT

SEQ ID NO: 130223 - protein, 91 aa, Setaria italica
  Transcript Sequence Number=SeqID_64249
  Subcellular localization annotation: CTP_CleavageSite=46; ConfidenceScore=5.07e-01
GVQGTRNATCTDCKLSFSHPFKHLSDRTLLFYFFSRRYMQFEKNSNLMTYQENACIFMRDILMRAIKPCLPTKILRFGPWNHVKSENLIAI

SEQ ID NO: 130224 - protein, 85 aa, Setaria italica
  Transcript Sequence Number=SeqID_64250
KLFFLFGLVTVEFFQCNHHVENVYRIATAAFSNQDVAHVVFPVRSIKSMFCKCNNAMNNGGHSNNADTTSFGSEFLMTIRESIDL

SEQ ID NO: 130225 - protein, 54 aa, Setaria italica
  Transcript Sequence Number=SeqID_64251
  Gene Ontology: Mol. function=glutamate N-acetyltransferase activity; Biological process=arginine biosynthetic process
GKISSLVGTVNLSVQSPRGDISLGAIPLMKNGQPLPFDRSAASKYLKDAGDVHS

SEQ ID NO: 130226 - protein, 83 aa, Setaria italica
  Transcript Sequence Number=SeqID_64252
  Gene Ontology: Mol. function=glutamate N-acetyltransferase activity; Cellular component=chloroplast; Biological process=arginine biosynthetic process
  Homolog annotation: Hit_ID=B9SZB6; Match level="QueryCoverage=96%, HitCoverage=17%, E-value=2e-24, Identity=70%"; Hit description =Arginine biosynthesis protein argJ 1, putative
  Pfam annotation: Domain name=ArgJ; Domain location=1-83; Score= -316.8; E_value=0.011; Accession=PF01960.10; Description=ArgJ family
MLQVSSDVWREMVRTSVSRSFNQITVDGDTSTNDCVIAMASGLSGLSGILSLDSTEAQQFQACLDAVMQGLAKSIAWDGEGAT

SEQ ID NO: 130227 - protein, 105 aa, Setaria italica
  misc_feature (19)..(19): Xaa can be any naturally occurring amino acid
  misc_feature (44)..(44): Xaa can be any naturally occurring amino acid
  misc_feature (77)..(77): Xaa can be any naturally occurring amino acid
  Transcript Sequence Number=SeqID_64253
  Gene Ontology: Mol. function=RNA binding
  Homolog annotation: Hit_ID=B5KLZ8; Match level="QueryCoverage=90%, HitCoverage=60%, E-value=3e-40, Identity=87%"; Hit description =Putative pumilio-family RNA-binding domain-containing protein (Fragment)
  Pfam annotation: Domain name=PUF; Domain location=17-52; Score=23.6; E_value=0.00081; Accession=PF00806.11; Description=Pumilio-family RNA binding repeat
  Pfam annotation: Domain name=PUF; Domain location=54-88; Score=31.1; E_value=4.5e-06; Accession=PF00806.11; Description=Pumilio-family RNA binding repeat
  Pfam module annotation: Pfam domain module=PUF::PUF; Domain location =17-52::54-88
MHWHCGGNSQGQCIIDEIXQSACILAQDQYGNYVTQHVLERGKXAHERSQIITKLAGQVVTMSQNKFASNVIEKCFXHGDIAERDLLIRQIVEQTEGNDNLLVCI

SEQ ID NO: 130228 - protein, 113 aa, Setaria italica
  Transcript Sequence Number=SeqID_64254
  Gene Ontology: Mol. function=RNA binding
  Homolog annotation: Hit_ID=Q9M6S0; Match level="QueryCoverage=94%, HitCoverage=9%, E-value=2e-32, Identity=64%"; Hit description =Pumilio domain-containing protein PPD1
  Pfam annotation: Domain name=PUF; Domain location=11-45; Score=30.1; E_value=9.3e-06; Accession=PF00806.11; Description=Pumilio-family RNA binding repeat
  Pfam annotation: Domain name=PUF; Domain location=47-77; Score=19.2; E_value=0.017; Accession=PF00806.11; Description=Pumilio-family RNA binding repeat
  Pfam annotation: Domain name=PUF; Domain location=78-99; Score=2.3; E_ value=7.5; Accession=PF00806.11; Description=Pumilio-family RNA binding repeat
  Pfam module annotation: Pfam domain module=PUF::PUF::PUF; Domain location=11-45::47-77::78-99
RRRQRRDLATKLVGHVLPLSLQMYGCRVIQKALEVMEIDQKIDLVRELDGHVMRCVRDQNGNHVIQKCIECVPMNIFNGNHVIQKCIECVPTEHIGFIVSAFQGQVANLSMLT

SEQ ID NO: 130229 - protein, 70 aa, Setaria italica
  Transcript Sequence Number=SeqID_64255
  Gene Ontology: Mol. function=RNA binding
  Homolog annotation: Hit_ID=B6REK8; Match level="QueryCoverage=88%, HitCoverage=6%, E-value=3e-22, Identity=75%"; Hit description=Mpt5
  Pfam annotation: Domain name=PUF; Domain location=15-49; Score=30.1; E_value=9.3e-06; Accession=PF00806.11; Description=Pumilio-family RNA binding repeat
FEHGTREQRRDLATKLVGHVLPLSLQMYGCRVIQKALEVMEIDQKIDLVRELDGHVMRCVRDTKIGKYNS

SEQ ID NO: 130230 - protein, 68 aa, Setaria italica
  Transcript Sequence Number=SeqID_64256
  Gene Ontology: Mol. function=RNA binding
  Homolog annotation: Hit_ID=B9RHU5; Match level="QueryCoverage=97%, HitCoverage=6%, E-value=9e-28, Identity=83%"; Hit description =Pumilio, putative
  Pfam annotation: Domain name=PUF; Domain location=26-60; Score=32.9; E_value=1.3e-06; Accession=PF00806.11; Description=Pumilio-family RNA binding repeat
YCYGCRVIQKALEVMEIDQKIDLVRELDGHVMRCVRDQNGNHVIQKCIECVPTEHIGFIVSAFQGQVA

SEQ ID NO: 130231 - protein, 37 aa, Setaria italica
  Transcript Sequence Number=SeqID_64257
  Gene Ontology: Mol. function=RNA binding
VLPNSPTARRGGAVPNYPGMSPYVGVPMSYPTSPVFQ

SEQ ID NO: 130232 - protein, 62 aa, Setaria italica
  misc_feature (1)..(32): Xaa can be any naturally occurring amino acid
  Transcript Sequence Number=SeqID_64258
XXXXXXXXXXXXXXXXXXXXXXXXXXXXXXXXVTITAHTRFNYQTLINLQYCRCSTQLRTVT

SEQ ID NO: 130233 - protein, 143 aa, Setaria italica
  misc_feature (17)..(17): Xaa can be any naturally occurring amino acid
  misc_feature (73)..(73): Xaa can be any naturally occurring amino acid
  Transcript Sequence Number=SeqID_64259
  Gene Ontology: Mol. function=exodeoxyribonuclease III activity; Cellular component=nucleus; Biological process=DNA repair
  Homolog annotation: Hit_ID=B9SNU5; Match level="QueryCoverage=90%, HitCoverage=42%, E-value=3e-51, Identity=72%"; Hit description=Rad1 DNA damage checkpoint protein, putative
GDGAAAHGIVLTVEESXCLQSKVFLKRELFVEYDYAGDGRERFGLSLGLFVDCLNIFSAPGHASAVEIRYPGXPDMQLLLKSVDSPDACLYAEIRTRIPDTISWDYNFEHDGNTPVTFTVKSAVLKETIDDLEIGPRLPRQLQ

SEQ ID NO: 130234 - protein, 68 aa, Setaria italica
  misc_feature (21)..(21): Xaa can be any naturally occurring amino acid
  Transcript Sequence Number=SeqID_64260
RGTGRERFGLSLGLFVDCLNXFWPPGHASAVEIRYPWPRPCSFSSSMCALWCSCCARLSGCIQNCGKT

SEQ ID NO: 130235 - protein, 35 aa, Setaria italica
  Transcript Sequence Number=SeqID_64261
IVLQSDRHHVVPNQVNHKFLSLDSHLYPFILASTF

SEQ ID NO: 130236 - protein, 59 aa, Setaria italica
  Transcript Sequence Number=SeqID_64262
AWVLSLDVSFVRARSTSCKVNPCLFTEIVSCIEYFSYLACWKLMLLLATTALAREPLLK

SEQ ID NO: 130237 - protein, 37 aa, Setaria italica
  Transcript Sequence Number=SeqID_64263
AYREPCDVQVYFTNCLGDHPSKGTRASENTPVRHMVP

SEQ ID NO: 130238 - protein, 84 aa, Setaria italica
  Transcript Sequence Number=SeqID_64264
  Homolog annotation: Hit_ID=C3SA83; Match level="QueryCoverage=59%, HitCoverage=5%, E-value=3e-19, Identity=92%"; Hit description=FHA domain protein
EDDADEITWQTYKGQLTDRQEKTRSKIVKRMEKIANMKKEIDAIRVKDISQGGLTQGQQTQIAPTLSRMLSFKVSSRLSSSSII

SEQ ID NO: 130239 - protein, 62 aa, Setaria italica
  Transcript Sequence Number=SeqID_64265
FLLFFPFFLLSFFSFPLFLNLVIVVLQLQLHCPHRIWHQTSLQYCRHRTTPPQQELLMEVLQ

SEQ ID NO: 130240 - protein, 78 aa, Setaria italica
  Transcript Sequence Number=SeqID_64266
  Homolog annotation: Hit_ID=C3SA83; Match level="QueryCoverage=64%, HitCoverage=5%, E-value=8e-10, Identity=62%"; Hit description=FHA domain protein
TSAVEKPKDSSNETSTNKPAKVETDTSKNQENGSKPAFSLPKPQWLGDKRIIEPEENFINEEKAARTSCLTSRRCGSG

SEQ ID NO: 130241 - protein, 57 aa, Setaria italica
  Transcript Sequence Number=SeqID_64267
QKEGRPVYFTGALTGSNKLSYSPRIFSADHFDQNPLYALLHESIYCEGSSSKWSAEE

SEQ ID NO: 130242 - protein, 38 aa, Setaria italica
  Transcript Sequence Number=SeqID_64268
WHQVHQSIAMQTRKQDKNVTWCLMQKALLSVLSKHLNI

SEQ ID NO: 130243 - protein, 139 aa, Setaria italica
  misc_feature (25)..(25): Xaa can be any naturally occurring amino acid
  Transcript Sequence Number=SeqID_64269
  Gene Ontology: Mol. function=binding; Cellular component =mitochondrial inner membrane; Biological process=transport
  Homolog annotation: Hit_ID=B6TN88; Match level="QueryCoverage=94%, HitCoverage=34%, E-value=2e-55, Identity=77%"; Hit description =Protein brittle-1
  Pfam annotation: Domain name=Mito_carr; Domain location=12-93; Score =63.1; E_value=1.1e-15; Accession=PF00153.19; Description =Mitochondrial carrier protein
VLLVVRIVGELTVFGRLAAGACAGXYPLDVLRLRLAVQSGHSTMSQVALNMLREEGLASFYGGLGPSLIGIAPYIAVNFCVFDLMKKSVPEKYKNRTETSLATALLSATFATLMCYPLDTVRRQMQMKGTPYNTILMLF

SEQ ID NO: 130244 - protein, 93 aa, Setaria italica
  Transcript Sequence Number=SeqID_64270
  Gene Ontology: Mol. function=binding; Cellular component =mitochondrial inner membrane; Biological process=transport
  Homolog annotation: Hit_ID=B6TN88; Match level="QueryCoverage=100%, HitCoverage=23%, E-value=6e-38, Identity=79%"; Hit description =Protein brittle-1
  Pfam annotation: Domain name=Mito_carr; Domain location=1-42; Score= -15.1; E_value=0.083; Accession=PF00153.19; Description=Mitochondrial carrier protein
LREEGLASFYGGLGPSLIGIAPYIAVNFCVFDLMKKSVPEKYKNRTETSLATALLSATFATLMCYPLDTVRRQMQMKGTPYNTIFDAIPGIVE

SEQ ID NO: 130245 - protein, 56 aa, Setaria italica
  misc_feature (38)..(38): Xaa can be any naturally occurring amino acid
  Transcript Sequence Number=SeqID_64271
  Gene Ontology: Mol. function=binding; Cellular component =mitochondrial inner membrane
  Homolog annotation: Hit_ID=B6TN88; Match level="QueryCoverage=100%, HitCoverage=13%, E-value=1e-20, Identity=91%"; Hit description =Protein brittle-1
VTYPLDVLRLRLAVQSGHSTMSQVALNMLREEGLASFXTGGLGPSLIGIAPYIAVN

SEQ ID NO: 130246 - protein, 30 aa, Setaria italica
  Transcript Sequence Number=SeqID_64272
EHILFILVEDSVSMSLRNFLQNYNYTSQPI

SEQ ID NO: 130247 - protein, 82 aa, Setaria italica
  Transcript Sequence Number=SeqID_64273
KVWFCYFVLLKFFKVKLKSSTSSSKTQLPQIKHEREAVHHDGDTRLCGHEAVDACGLLIKYQKVMYHYLLLLAEEMVPAEGS

SEQ ID NO: 130248 - protein, 54 aa, Setaria italica
  Transcript Sequence Number=SeqID_64274
LELVLKSFVLGAGSSSSRGWHGYNKLIDSMHNRCWLVGSHGAKKAVLHSSPRDY

SEQ ID NO: 130249 - protein, 143 aa, Setaria italica
  misc_feature (22)..(22): Xaa can be any naturally occurring amino acid
  Transcript Sequence Number=SeqID_64275
  Gene Ontology: Mol. function=binding
  Homolog annotation: Hit_ID=B6U4A9; Match level="QueryCoverage=95%, HitCoverage=19%, E-value=2e-59, Identity=81%"; Hit description =Armadillo/beta-catenin-like repeat family protein
LRMIYQSKLAPKFDVNNGKNIXFVLSLLNSENENVTELAATIISHSCENSSEQLSLCSAGVPQKLVSLFGGSMNLRDACLDSVTAVIRNNREVASTFASTDHGKGFRSVVGLIHDRSPRTRLLACLCLIALGHASPLFYFSRY

SEQ ID NO: 130250 - protein, 100 aa, Setaria italica
  Transcript Sequence Number=SeqID_64276
  Gene Ontology: Mol. function=binding
  Homolog annotation: Hit_ID=B6U4A9; Match level="QueryCoverage=100%, HitCoverage=14%, E-value=5e-47, Identity=87%"; Hit description =Armadillo/beta-catenin-like repeat family protein
MNKEAVMNVLLPHRPDRIKPSFVVNFLQSKDKQLRVATLWCLLNLIYPKCEASSGRVIRLQTAGVIQQVKSMINDPCLDCKLRVRMLLEHCVDNADDCFM

SEQ ID NO: 130251 - protein, 77 aa, Setaria italica
  Transcript Sequence Number=SeqID_64277
IIRLGAGSSSSRGWHGYNKLIDSMHNRCWLVGSHGAKKGSSWLQLTRRDQLERLPAGAHVPQFRAIVVRNTVRQLLE

SEQ ID NO: 130252 - protein, 78 aa, Setaria italica
  Transcript Sequence Number=SeqID_64278
DVERVSGESADSILLTSGYSNYPSALFVTNTNSRFCPHLESNVPSPCLLLPAYLRDDGILHVLGNDSSSNQCATEIIV

SEQ ID NO: 130253 - protein, 78 aa, Setaria italica
  Transcript Sequence Number=SeqID_64279
  Subcellular localization annotation: CTP_CleavageSite=29; ConfidenceScore=5.06e-01
LIYLVGSSVLYIPAVYSELGGRRRNPWTRSSTLPANTTMPSTLQNQQEEAAIPPPAAARNVKKAKQQQAGGERMPRPQ

SEQ ID NO: 130254 - protein, 73 aa, Setaria italica
  Transcript Sequence Number=SeqID_64280
ARLLLLGLFTFLAAGRWWYRCLLLLVLESGRHSSVAGSVEDLVHGFLLLPPSSQQGVKDGGRTCTLRSNPSRR

SEQ ID NO: 130255 - protein, 68 aa, Setaria italica
  Transcript Sequence Number=SeqID_64281
  Gene Ontology: Mol. function=nucleotide binding; Cellular component =nucleus
  Homolog annotation: Hit_ID=Q2R482; Match level="QueryCoverage=95%, HitCoverage=6%, E-value=5e-29, Identity=89%"; Hit description=DNA replication licensing factor MCM2, putative, expressed
MYALHFEEIVSGATSRLTHVEVKVEDLKNKAQEYEIYDLKPFFSSAHFRDNSFILDEGRGIIRHPVAA

SEQ ID NO: 130256 - protein, 58 aa, Setaria italica
  Transcript Sequence Number=SeqID_64282
  Homolog annotation: Hit_ID=B6U8E8; Match level="QueryCoverage=75%, HitCoverage=14%, E-value=8e-14, Identity=81%"; Hit description =Phloem-specific lectin
RRRQRRRRRDDDGGCWVWLDRATGVRCYALSARRLSLPWDDGEFSWRFTPHPLSRFGC

SEQ ID NO: 130257 - protein, 141 aa, Setaria italica
  misc_feature (50)..(50): Xaa can be any naturally occurring amino acid
  misc_feature (119)..(119): Xaa can be any naturally occurring amino acid
  misc_feature (130)..(131): Xaa can be any naturally occurring amino acid
  Transcript Sequence Number=SeqID_64283
  Gene Ontology: Mol. function=metal ion binding; Cellular component =plasma membrane
  Homolog annotation: Hit_ID=Q109J5; Match level="QueryCoverage=93%, HitCoverage=21%, E-value=1e-59, Identity=85%"; Hit description =Dehydration-responsive protein, putative, expressed
  Pfam annotation: Domain name=DUF248; Domain location=7-141; Score= -272.7; E_value=2.8e-09; Accession=PF03141.8; Description=Putative methyltransferase
FVFVFPSYLHGYKVPIKWPKSRDVVWKANIPHTHLAKEKSDQNWMVEAGXKIKFPGGGTHFHHGADKYISKYCKYAKISKDNNINNEGMLRTVLDVGCGVASFGGYLLSSNVIAMSLVXQNDVHQNQIQXXLERGIPAYLG

SEQ ID NO: 130258 - protein, 50 aa, Setaria italica
  Transcript Sequence Number=SeqID_64284
SYFSYLNLILPLFLFLNCCSSLVTYKSARRGGGLLIEQAKEPAQFPHLCA

SEQ ID NO: 130259 - protein, 137 aa, Setaria italica
  misc_feature (68)..(68): Xaa can be any naturally occurring amino acid
  misc_feature (98)..(98): Xaa can be any naturally occurring amino acid
  misc_feature (116)..(116): Xaa can be any naturally occurring amino acid
  Transcript Sequence Number=SeqID_64285
  Homolog annotation: Hit_ID=B6V8G0; Match level="QueryCoverage=95%, HitCoverage=37%, E-value=2e-19, Identity=40%"; Hit description =COG5125-like protein
SSISLIAEALLDLATSLVTSVRSHSVLGITPSDFVAGLLKKFGKQRGPDDEHASLDWAGVGRAASHVXFMNAAGCATMVGPMKTEVKPRRVCIRKKRXTARPRGSARPEQLVDPHXKTKSDTDKNMSAIFNLLRRKK

SEQ ID NO: 130260 - protein, 95 aa, Setaria italica
  Transcript Sequence Number=SeqID_64286
  Homolog annotation: Hit_ID=B6V8G0; Match level="QueryCoverage=68%, HitCoverage=18%, E-value=3e-14, Identity=61%"; Hit description =COG5125-like protein
MFVTFKILSNFSTDHYQLLTIYSLLICSLWTHSETKSDTDKNMSAIFNLLRRKKNARLEHLVLNRTSFAQTVENVFALSFLVKDGRVEINVNDEG

SEQ ID NO: 130261 - protein, 77 aa, Setaria italica
  Transcript Sequence Number=SeqID_64287
GEETTSSLAASEDEEDMAGQRRRRRGEAARFGGGGGVQEDGGEALQARRVEGGGGRRPAMLPAAVSRVVAWRSFCKQ

SEQ ID NO: 130262 - protein, 39 aa, Setaria italica
  Transcript Sequence Number=SeqID_64288
PMLSSHRLMSFPNELVMALITCSSSVSCMWIAWMRTEWI

SEQ ID NO: 130263 - protein, 65 aa, Setaria italica
  Transcript Sequence Number=SeqID_64289
YPLCALPIPVACLRVYSSGARSHHDAFNYLPFLFLILCWGLYRVRWDNLNKFAHVVVDKNPHFIL

SEQ ID NO: 130264 - protein, 110 aa, Setaria italica
  misc_feature (66)..(66): Xaa can be any naturally occurring amino acid
  Transcript Sequence Number=SeqID_64290
  Gene Ontology: Mol. function=P-P-bond-hydrolysis-driven protein transmembrane transporter activity; Cellular component=chloroplast outer membrane; Biological process=intracellular protein transport
  Homolog annotation: Hit_ID=Q9M465; Match level="QueryCoverage=95%, HitCoverage=31%, E-value=1e-50, Identity=93%"; Hit description=Toc34- 2 protein
  Pfam annotation: Domain name=AIG1; Domain location=3-108; Score= -73.3; E_value=0.00024; Accession=PF04548.8; Description=AIG1 family
INEQAVEIIKRFLLGKTVDVLLYVDRLDAYRMDTLDEQVIRAITNSFGKDIWRRALVVLTHAQLSXPPDGIDYNEFFTRRSEALLRYIRSGAGINKREYGDFQLPNKTIR

SEQ ID NO: 130265 - protein, 44 aa, Setaria italica
  Transcript Sequence Number=SeqID_64291
CSVYCFHHFFLLYSRDTVVALFDELVINTKKLVTATSKGIEKWR

SEQ ID NO: 130266 - protein, 145 aa, Setaria italica
  misc_feature (76)..(76): Xaa can be any naturally occurring amino acid
  Transcript Sequence Number=SeqID_64292
  Gene Ontology: Mol. function=metal ion binding
  Homolog annotation: Hit_ID=Q2R2G7; Match level="QueryCoverage=100%, HitCoverage=38%, E-value=4e-59, Identity=72%"; Hit description=RWD domain containing protein, expressed
  Pfam annotation: Domain name=zf-C3HC4; Domain location=21-93; Score =19.9; E_value=0.00055; Accession=PF00097.17; Description=Zinc finger, C3HC4 type (RING finger)
VTLCEEAGEILSNMNHPAGDCPLCLYPLMREDKDGSELPFMKLMSCYHCFHSDCIMRWWEWLQHGDANLKERNTRXSGKHYNVNQNKGFCPVCRKVFDEKDIEHVRDLLGESTSRLESLTLDLGEDEKELFHSEAEQIRRKRIES

SEQ ID NO: 130267 - protein, 141 aa, Setaria italica
  Transcript Sequence Number=SeqID_64293
  Gene Ontology: Cellular component=integral to membrane
  Homolog annotation: Hit_ID=Q9LRT5; Match level="QueryCoverage=73%, HitCoverage=39%, E-value=9e-29, Identity=59%"; Hit description =Similarity to nodulin MtN3 protein
  Pfam annotation: Domain name=MtN3_slv; Domain location=37-123; Score =109.2; E_value=1.4e-29; Accession=PF03083.8; Description=MtN3saliva family
  Subcellular localization annotation: CTP_CleavageSite=14; ConfidenceScore=5.21e-01
VLSSVVPSSVGSLRSFVRSPFAAGVLLGAHTHEKRSLIVGSVCIFFGTLMYAAPLTVMKRVITTKSVEYMPFTLSFVSFLNGICWTTYALIRFDIFITIPNGIGTFLSSAQLILYFCYYGSTPKNDKSVELPVTASDDSNN

SEQ ID NO: 130268 - protein, 103 aa, Setaria italica
  misc_feature (43)..(43): Xaa can be any naturally occurring amino acid
  Transcript Sequence Number=SeqID_64294
  Gene Ontology: Mol. function=binding; Cellular component=plasma membrane; Biological process=ubiquitin-dependent protein catabolic process
  Homolog annotation: Hit_ID=UPI0000ECAD46; Match level="QueryCoverage =99%, HitCoverage=7%, E-value=3e-25, Identity=57%"; Hit description =Cullin-associated NEDD8-dissociated protein 2 (Cullin-associated and ...
  Homolog annotation: Hit description=neddylation-dissociated protein 2) (p120 CAND2).
VIESFQSPFEEIKSAASYALGNIAVGNLSKYLPFILDQIDNQXQKKQYLLLHSLKEVIVRQTVDHNGQSELQDSNIEKILALLFNHCESEEEGVRNVVAECFR

SEQ ID NO: 130269 - protein, 65 aa, Setaria italica
  Transcript Sequence Number=SeqID_64295
  Gene Ontology: Mol. function=binding; Cellular component=plasma membrane
RPNLEASAVDFRPYIGPIYNAILGRLANQDQDQEVKECAISCMSLVVSTFGDGLQRELPACLPIT

SEQ ID NO: 130270 - protein, 80 aa, Setaria italica
  Transcript Sequence Number=SeqID_64296
  Gene Ontology: Mol. function=binding; Cellular component=plasma membrane
  Homolog annotation: Hit_ID=UPI000186ED15; Match level="QueryCoverage =82%, HitCoverage=5%, E-value=1e-12, Identity=56%"; Hit description =Cullin-associated NEDD8-dissociated protein, putative
LVVSTFGDGLQRELPACLPILVDRMGNEITRLTAVKAFSVIANSPLRIDLSFVLDHVVSELTAFLRKVMIYIHEPLLTLF

SEQ ID NO: 130271 - protein, 87 aa, Setaria italica
  Transcript Sequence Number=SeqID_64297
  Gene Ontology: Mol. function=transporter activity; Cellular component= membrane; Biological process=oligopeptide transport
  Homolog annotation: Hit_ID=Q05085; Match level="QueryCoverage=72%, HitCoverage=10%, E-value=1e-23, Identity=82%"; Hit description =Nitrate/chlorate transporter
  Subcellular localization annotation: CTP_CleavageSite=62; ConfidenceScore=5.01e-01
YVLGIAVNLVTYLTATMHLGNAESANVVTNFMGTSFMLCLLGGFVADSFLGRYLTIAIFTAVQASVSHLSLHSPPSHLRLPKARDSL

SEQ ID NO: 130272 - protein, 93 aa, Setaria italica
  Transcript Sequence Number=SeqID_64298
  Gene Ontology: Mol. function=transporter activity; Cellular component= membrane; Biological process=oligopeptide transport
  Homolog annotation: Hit_ID=B9MSV1; Match level="QueryCoverage=79%, HitCoverage=18%, E-value=2e-13, Identity=49%"; Hit description =Putative nitrate chlorate transporter 1.1 (Fragment)
GLRVFPSIPRPGLPFYRFSFIGSILLTVPLYDRLIAPVVKRLTGNPHGLSPLQRVFVGLFLSVAGMAVAALIERHRQTTSKHGVTITVFLLMP

SEQ ID NO: 130273 - protein, 76 aa, Setaria italica
  Transcript Sequence Number=SeqID_64299
  Gene Ontology: Mol. function=transporter activity; Cellular component= membrane
  Homolog annotation: Hit_ID=Q7XAK5; Match level="QueryCoverage=69%, HitCoverage=8%, E-value=1e-08, Identity=66%"; Hit description =Nitrate transporter
  Subcellular localization annotation: CTP_CleavageSite=38; ConfidenceScore=5.08e-01
KTVVRMLPIWATTIMFWTVYAQMTTFLGVPGPNRPMDRAAIGPSFQIPAGSQTVVRMLPIWATTIMFWTVVICAYT

SEQ ID NO: 130274 - protein, 69 aa, Setaria italica
  Transcript Sequence Number=SeqID_64300
  Homolog annotation: Hit_ID=Q84S70; Match level="QueryCoverage=71%, HitCoverage=6%, E-value=4e-11, Identity=61%"; Hit description=Kelch -like protein
  Pfam annotation: Domain name=Dev_Cell_Death; Domain location=32-69; Score=-37.5; E_value=0.00086; Accession=PF10539.1; Description =Development and cell death domain
DFYAGTPSTPARTNAWYGTYSVAARNLREDELGGVIFGCKHNTMNECLTKQLFGLPSGHISYVKNVKPG

SEQ ID NO: 130275 - protein, 71 aa, Setaria italica
  Transcript Sequence Number=SeqID_64301
SPRVPSYPLVACLRARIACCSVSLPFCFVASNSTSKSLTYIRNHKYQTECLESTEWLMHRNNELNTKNAQK

SEQ ID NO: 130276 - protein, 90 aa, Setaria italica
  misc_feature (18)..(18): Xaa can be any naturally occurring amino acid
  misc_feature (28)..(28): Xaa can be any naturally occurring amino acid
  Transcript Sequence Number=SeqID_64302
  Gene Ontology: Mol. function=methyltransferase activity
  Homolog annotation: Hit_ID=B6T4Z4; Match level="QueryCoverage=91%, HitCoverage=25%, E-value=4e-36, Identity=87%"; Hit description=SLL2
HADDWFGTEVMDVRVGWXNLCSSKDLPXCSVLDIGTGSGRLLQQLAKQGFSDLTGIDYSEGAIELARNLAIRDGFEHINFLVSPSVKHIV

SEQ ID NO: 130277 - protein, 56 aa, Setaria italica
  misc_feature (7)..(7): Xaa can be any naturally occurring amino acid
  Transcript Sequence Number=SeqID_64303
RLLLDHXVPVPASASNALLAALSRAEWPHLAAEAYRLVLSSDSEQWQWSIRWLIRG

SEQ ID NO: 130278 - protein, 122 aa, Setaria italica
  Transcript Sequence Number=SeqID_64304
  Gene Ontology: Mol. function=electron carrier activity; Cellular component=integral to membrane; Biological process=oxidation reduction
  Homolog annotation: Hit_ID=B2D0N6; Match level="QueryCoverage=72%, HitCoverage=9%, E-value=3e-45, Identity=93%"; Hit description =Respiratory burst oxidase-like protein B2
NWKRIWVMTLWLSICIGLFIWKFIQYRNRAVFHIMGYCVTTAKGAAETLKFNMALVLFPVCRNTITWIRSKTKIGAVVPFNDNINFHKVKHMDSTSFEHSDESFHVKLSIPFKHSPFFVLDD

SEQ ID NO: 130279 - protein, 52 aa, Setaria italica
  Transcript Sequence Number=SeqID_64305
CILPLEEAMDEQSIPAKKPTSSTTFDRNTLFIHVYCHWKKLWSDYFCCSLNR

SEQ ID NO: 130280 - protein, 123 aa, Setaria italica
  misc_feature (67)..(67): Xaa can be any naturally occurring amino acid
  Transcript Sequence Number=SeqID_64306
  Gene Ontology: Mol. function=electron carrier activity; Cellular component=integral to membrane; Biological process=oxidation reduction
  Homolog annotation: Hit_ID=B2D0N6; Match level="QueryCoverage=87%, HitCoverage=11%, E-value=5e-50, Identity=87%"; Hit description =Respiratory burst oxidase-like protein B2
  Pfam annotation: Domain name=NADPH_Ox; Domain location=1-75; Score =108.5; E_value=2.3e-29; Accession=PF08414.2; Description=Respiratory burst NADPH oxidase
  Pfam annotation: Domain name=efhand; Domain location=76-104; Score =27.9; E_value=4.2e-05; Accession=PF00036.24; Description=EF hand
  Pfam module annotation: Pfam domain module=NADPH_Ox::efhand; Domain location=1-75::76-104
DGWAAVEKRFNQLQVDGVLLRSRFGKCIGMDGSDEFAVQVFDSLARKRGIVKQVLTKDELKDFWVVXLSDQGFDNRLRTFFDMVDKNADGRITAEEVKEIITLSASANKTLPKTRKETKTRKK

SEQ ID NO: 130281 - protein, 110 aa, Setaria italica
  Transcript Sequence Number=SeqID_64307
  Gene Ontology: Mol. function=electron carrier activity; Cellular component=integral to membrane; Biological process=oxidation reduction
  Homolog annotation: Hit_ID=B2D0N6; Match level="QueryCoverage=99%, HitCoverage=12%, E-value=3e-50, Identity=81%"; Hit description =Respiratory burst oxidase-like protein B2
KGTEGWTGVVMLVLMAIAFVLAQPWFRRNRLKDSNPLKKMTGFNAFWFTHHLFVIVYTLLVVHGICLYLSREWYKKTTWMYLAVPVLLYVSERIIRLFRSHDAVRIQKVP

SEQ ID NO: 130282 - protein, 55 aa, Setaria italica
  misc_feature (1)..(16): Xaa can be any naturally occurring amino acid
  Transcript Sequence Number=SeqID_64308
XXXXXXXXXXXXXXXXFLRNEIPCHYVSEVYVTFWHTYSQLSNIKMLYLFRLQQK

SEQ ID NO: 130283 - protein, 98 aa, Setaria italica
  Transcript Sequence Number=SeqID_64309
VYNPRIFNLHGVEDFDDAIYNLSYDLYTLYKFAPPPLEETAARVLPNQLVQDRDNARSAKRMKGHLSLLNEILQIEKGPWYLHMDSFLCSGSRLFLSP

SEQ ID NO: 130284 - protein, 68 aa, Setaria italica
  Transcript Sequence Number=SeqID_64310
HCLADLRTSSDEMRAHWFLPYFMTAALRISSSVFFHTPPFIMILILSASFPQPPPRVLLLRRGQSGGL

SEQ ID NO: 130285 - protein, 134 aa, Setaria italica
  Transcript Sequence Number=SeqID_64311
  Gene Ontology: Mol. function=protein serine/threonine kinase activity; Biological process=protein amino acid phosphorylation
  Homolog annotation: Hit_ID=Q2R2N0; Match level="QueryCoverage=94%, HitCoverage=57%, E-value=7e-45, Identity=72%"; Hit description =Protein kinase domain containing protein
  Pfam annotation: Domain name=Pkinase; Domain location=3-132; Score= -104.9; E_value=0.03; Accession=PF00069.17; Description=Protein kinase domain
  Pfam annotation: Domain name=Pkinase_Tyr; Domain location=9-134; Score=-102.4; E_value=6.4e-07; Accession=PF07714.9; Description =Protein tyrosine kinase
  Pfam module annotation: Pfam domain module=Pkinase::Pkinase_Tyr; Domain location=3-132::9-134
CWSFGVSSYKGILGDDCDLVAVKRYIRGDLREEFMEEVRIHSKIKHKNVVKLIGCCIGENTLTIVTEYVSGGNLDDALHKRKTSIPLDIRLGIAIGCAEALSYMHSMHLSSDSLVCHGDVKPANILLDDNLMAK

SEQ ID NO: 130286 - protein, 115 aa, Setaria italica
  misc_feature (82)..(82): Xaa can be any naturally occurring amino acid
  Transcript Sequence Number=SeqID_64312
  Gene Ontology: Mol. function=protein serine/threonine kinase activity; Biological process=protein amino acid phosphorylation
  Homolog annotation: Hit_ID=Q2R2N0; Match level="QueryCoverage=86%, HitCoverage=45%, E-value=2e-35, Identity=74%"; Hit description =Protein kinase domain containing protein
  Pfam annotation: Domain name=Pkinase_Tyr; Domain location=1-115; Score=-144.4; E_value=0.0004; Accession=PF07714.9; Description =Protein tyrosine kinase
GRKKNNNYVGRILEEEEFMEEVRIHSKIKHKNVVKLIGCCIGENTLTIVTEYVSGGNLDDALHKRKTSIPLDIRLGIAIGCXEALSYMHSMHLSSDSLVCHGDVKPANILLDDNL

SEQ ID NO: 130287 - protein, 48 aa, Setaria italica
  Transcript Sequence Number=SeqID_64313
RNNYNNKFRAGRRSKQKALIDLQGRFFGGRLVQSSFFDEERFGRNELA

SEQ ID NO: 130288 - protein, 75 aa, Setaria italica
  Transcript Sequence Number=SeqID_64314
  Gene Ontology: Mol. function=protein serine/threonine kinase activity; Biological process=protein amino acid phosphorylation
DKYYNTNLQPWLASNTTCESSQGEIDEIALVAEMCLRTKGETRPKMKEVELRLQLLKANISKTCKKGSKRGRETK

SEQ ID NO: 130289 - protein, 95 aa, Setaria italica
  Transcript Sequence Number=SeqID_64315
LHQVFVHLFLMHLLHRLQVLNHAVTISSWVFRARLMRMGIANRILLLNVFECYRTLHPEKEHQAWVIWLLPMGTCHRLCDLPISCLSRQCSLPHG

SEQ ID NO: 130290 - protein, 106 aa, Setaria italica
  Transcript Sequence Number=SeqID_64316
  Gene Ontology: Mol. function=nucleic acid binding; Cellular component= intracellular; Biological process=transport
  Homolog annotation: Hit_ID=B6T5S5; Match level="QueryCoverage=82%, HitCoverage=19%, E-value=7e-35, Identity=85%"; Hit description=RNA binding protein
  Subcellular localization annotation: CTP_CleavageSite=36; ConfidenceScore=5.16e-01
LKTAKAPPAFPVAQQVPVSKPSHPATESNQAQHLVMASSMVADKPRSDVYGEVAAHDDEESKSVLCLGNVPSSVSEADLENEFKKFGRLIPDGVAIRSRKETGGLI

SEQ ID NO: 130291 - protein, 136 aa, Setaria italica
  misc_feature (27)..(27): Xaa can be any naturally occurring amino acid
  Transcript Sequence Number=SeqID_64317
HHEEETQTTQITSEGRDVVDSYAYSEXTQQVVSSDNWGDEPLPEEPPSSFSNEIAVAPEEPVQPPPVPTPHVEEPVGEPVKKTYASILKTAKAPPAFPVAQQVPVSKPSHPATESNQVPSLFWFIGLSYFFIWFGS

SEQ ID NO: 130292 - protein, 62 aa, Setaria italica
  Transcript Sequence Number=SeqID_64318
HLEGRDVVDSYAYSEAPQQVVSSDNWGDEPLPEEPPSSSLVHQQAPPHEELAQEEVALAPLV

SEQ ID NO: 130293 - protein, 95 aa, Setaria italica
  misc_feature (47)..(47): Xaa can be any naturally occurring amino acid
  Transcript Sequence Number=SeqID_64319
TISLEHTRSLGINALSGSVPKELGKLVNLVSLSLSTNDLNGSLPPEXGYIDSSGLSGPLPPSFSKLTSLKTLYAYKRRFVNSIIHLTLCVILICD

SEQ ID NO: 130294 - protein, 115 aa, Setaria italica
  Transcript Sequence Number=SeqID_64320
  Gene Ontology: Mol. function=protein serine/threonine kinase activity; Biological process=protein amino acid phosphorylation
  Homolog annotation: Hit_ID=Q7XTP5; Match level="QueryCoverage=94%, HitCoverage=10%, E-value=2e-51, Identity=86%"; Hit description =OSJNBa0093O08.2 protein
  Pfam annotation: Domain name=Pkinase; Domain location=1-115; Score= -107.5; E_value=0.043; Accession=PF00069.17; Description=Protein kinase domain
  Pfam annotation: Domain name=Pkinase_Tyr; Domain location=1-115; Score=-124.5; E_value=1.9e-05; Accession=PF07714.9; Description =Protein tyrosine kinase
  Pfam module annotation: Pfam domain module=Pkinase::Pkinase_Tyr; Domain location=1-115::1-115
TNNTEILVKLYGCCLEGENPLLVYEYLENGSLDKALFGSGRKNLDWLTRFGICLGIARGLAYLHEESSIRVVHRDIKASNILLDTNFNPKISDFGLAKLYDDKKTHVSTKVAGTL

SEQ ID NO: 130295 - protein, 100 aa, Setaria italica
  Transcript Sequence Number=SeqID_64321
  Gene Ontology: Mol. function=protein serine/threonine kinase activity; Biological process=protein amino acid phosphorylation
  Homolog annotation: Hit_ID=Q7XTP6; Match level="QueryCoverage=97%, HitCoverage=9%, E-value=2e-41, Identity=82%"; Hit description =OSJNBa0093O08.1 protein
  Pfam annotation: Domain name=Pkinase_Tyr; Domain location=1-98; Score= -170.1; E_value=0.02; Accession=PF07714.9; Description=Protein tyrosine kinase
CLEGNNPLLVYEYLDNGSLDKALFGNGRLNLDWPTRFEICLGIARGLAYLHEESSIRVVHRDIKASNVLLDANLNSKISDFGLAKLCADMRVLVIIKFGE

SEQ ID NO: 130296 - protein, 64 aa, Setaria italica
  Transcript Sequence Number=SeqID_64322
  Gene Ontology: Mol. function=metalloendopeptidase activity; Cellular component=mitochondrial respiratory chain; Biological process =proteolysis
  Homolog annotation: Hit_ID=B9RQC8; Match level="QueryCoverage=73%, HitCoverage=9%, E-value=2e-14, Identity=82%"; Hit description =Mitochondrial processing peptidase alpha subunit, putative
AGYSGALAKPLMASESAVNRLDVSILEEFVAEHYTAPRMVLAASGVEHYTAPRMVLAASCSTPD

SEQ ID NO: 130297 - protein, 32 aa, Setaria italica
  Transcript Sequence Number=SeqID_64323
TISLEHTRSLGINALSGSVPKELGKLVNLVSL

SEQ ID NO: 130298 - protein, 88 aa, Setaria italica
  misc_feature (57)..(57): Xaa can be any naturally occurring amino acid
  Transcript Sequence Number=SeqID_64324
  Gene Ontology: Mol. function=metalloendopeptidase activity; Cellular component=mitochondrial respiratory chain; Biological process =proteolysis
  Homolog annotation: Hit_ID=B9RKE7; Match level="QueryCoverage=87%, HitCoverage=14%, E-value=4e-26, Identity=72%"; Hit description =Mitochondrial processing peptidase alpha subunit, putative
MHHRYSSFVHGKPAFLDWEVKEQLQKIKSEIAEVSANPQGLLLEALHSAGYSGALAXKPLMASESAVNRLDVSILEEFVAEHYTAPRM

SEQ ID NO: 130299 - protein, 78 aa, Setaria italica
  Transcript Sequence Number=SeqID_64325
  Gene Ontology: Mol. function=metalloendopeptidase activity; Cellular component=mitochondrial respiratory chain; Biological process =proteolysis
  Homolog annotation: Hit_ID=B9RQC8; Match level="QueryCoverage=84%, HitCoverage=13%, E-value=5e-20, Identity=75%"; Hit description =Mitochondrial processing peptidase alpha subunit, putative
KPLMASESAVNRLDVSILEEFVAEHYTAPRMVLAASGVEHDTLVSVVEPLLSDLPSVKRPEEPKSVAHTLHLLLRCQV

SEQ ID NO: 130300 - protein, 54 aa, Setaria italica
  Transcript Sequence Number=SeqID_64326
MVKLEQLYIDSSGLSGPLPPSFSKLTSLKTLYAYKRRFVNSIIHLTLCVILICD

SEQ ID NO: 130301 - protein, 75 aa, Setaria italica
  Transcript Sequence Number=SeqID_64327
RGQREGKEMRRPGPSSSCRHGSAALPTLLLLLLLLAASAQAQQARTRTDPVEGKRACLISFRLARGFKSACINPS

SEQ ID NO: 130302 - protein, 43 aa, Setaria italica
  Transcript Sequence Number=SeqID_64328
MLAASSVVVDCGSSRFISGSNNGSDNSIYQPDYTDLGPASYYV

SEQ ID NO: 130303 - protein, 56 aa, Setaria italica
  Transcript Sequence Number=SeqID_64329
  Gene Ontology: Mol. function=protein serine/threonine kinase activity; Biological process=protein amino acid phosphorylation
  Homolog annotation: Hit_ID=Q7XTR9; Match level="QueryCoverage=92%, HitCoverage=4%, E-value=2e-14, Identity=67%"; Hit description =OSJNBa0008M17.16 protein
ALCFQVWQLYEEGRPLDVVDPSLMEFVSDEVLRAIRVGLLCIQSSPRQRPSMSKVV

SEQ ID NO: 130304 - protein, 45 aa, Setaria italica
  Transcript Sequence Number=SeqID_64330
CYLYVIDEGFICYPSHDSTFYYISCIAETMKALPVDRQYRITVLL

SEQ ID NO: 130305 - protein, 46 aa, Setaria italica
  Transcript Sequence Number=SeqID_64331
ILYTSFHFCHVQQQPYSDICSYSTSCSSDFILFLLMLRRNFVFWSQ

SEQ ID NO: 130306 - protein, 129 aa, Setaria italica
  Transcript Sequence Number=SeqID_64332
  Gene Ontology: Mol. function=translation initiation factor activity; Biological process=translation
  Homolog annotation: Hit_ID=Q9XHR2; Match level="QueryCoverage=53%, HitCoverage=7%, E-value=1e-11, Identity=59%"; Hit description =Eukaryotic translation initiation factor 3 subunit A
KVTLRLNLKILRLPNLSLKSPSKLGESLISLAGVVENEHRRLLARKSIIEKRKEDLERQILEKEKEEESKRLSIQKKSADEERNRLLYEQKQRKLENVKRKRRGREKRLRGKLSLMLLQRSSDRERENW

SEQ ID NO: 130307 - protein, 64 aa, Setaria italica
  misc_feature (28)..(28): Xaa can be any naturally occurring amino acid
  Transcript Sequence Number=SeqID_64333
  Gene Ontology: Mol. function=translation initiation factor activity; Biological process=translation
  Homolog annotation: Hit_ID=Q70Z43; Match level="QueryCoverage=67%, HitCoverage=4%, E-value=5e-12, Identity=83%"; Hit description =Translation initiation factor 3
EFVQRRETEFGRLKKERDERINQLISSXKRERETVRKLMYYLNLEEQRIERLREEEEARKREGK

SEQ ID NO: 130308 - protein, 55 aa, Setaria italica
  Transcript Sequence Number=SeqID_64334
  Gene Ontology: Mol. function=translation initiation factor activity; Cellular component=cytoplasm; Biological process=translation
  Homolog annotation: Hit_ID=B9RFF6; Match level="QueryCoverage=78%, HitCoverage=4%, E-value=2e-18, Identity=100%"; Hit description =Eukaryotic translation initiation factor 3 subunit, putative
VSQRTVLEILRNNSKLEALYAMTAHRAFQFCKQYKRTTEFRRLCEIGKMVSDNLT

SEQ ID NO: 130309 - protein, 64 aa, Setaria italica
  Transcript Sequence Number=SeqID_64335
SSYESAHAPSAFVHRGVYSFPHPHFSSEHRRLLARKSIIEKRKEDLERQILEKEKEEESKRLSI

SEQ ID NO: 130310 - protein, 145 aa, Setaria italica
  Transcript Sequence Number=SeqID_64336
  Gene Ontology: Mol. function=acid-amino acid ligase activity; Cellular component=intracellular; Biological process=ubiquitin -dependent protein catabolic process
  Homolog annotation: Hit_ID=B9SGR6; Match level="QueryCoverage=84%, HitCoverage=7%, E-value=1e-22, Identity=42%"; Hit description =Ubiquitin protein ligase E3a, putative
VKLKLSYLKVKISFFLLVVSLLITQLSHVQENLQYTWLKDPFFTAILLGKLPGDLDGSDPSYNLLFMLKVLEGLNRFSYQLLMDEQINKFAEGTLQDINDLKVAIYPVPQHQFISSLLTNKLELQMQDSLFEDGLIPSWCVYLVE

SEQ ID NO: 130311 - protein, 125 aa, Setaria italica
  misc_feature (96)..(96): Xaa can be any naturally occurring amino acid
  Transcript Sequence Number=SeqID_64337
  Gene Ontology: Mol. function=acid-amino acid ligase activity; Cellular component=intracellular; Biological process=ubiquitin -dependent protein catabolic process
NGNSKLDDGNRSSKLRFLYNGVILQPSATFFESILRLMNKGQSDLEIDPSFWDEEHYITYRKRNRSKEISSQSSYNTQLSHVQENLQYTWLKDPFXTAILLGKLPGDLDGSDPSYNLLFMLKVLE

SEQ ID NO: 130312 - protein, 113 aa, Setaria italica
  misc_feature (92)..(92): Xaa can be any naturally occurring amino acid
  Transcript Sequence Number=SeqID_64338
  Gene Ontology: Mol. function=oxidoreductase activity; Cellular component=extracellular region; Biological process=oxidation reduction
  Homolog annotation: Hit_ID=Q339K6; Match level="QueryCoverage=82%, HitCoverage=15%, E-value=3e-34, Identity=72%"; Hit description =Laccase-15
  Pfam annotation: Domain name=Cu-oxidase_2; Domain location=2-113; Score=110.3; E_value=6.7e-30; Accession=PF07731.6; Description =Multicopper oxidase
GRTFGSGRFPYYGCLVGWKLVLFRAQRSLQGDSNPMHLHGHDMIVLAQGLGNYDPAKAVATYNLVNPLIKNTVLVPNLGWIAIRFVANNPGXWFMHCHYEFHLSMGMAAVFIV

SEQ ID NO: 130313 - protein, 47 aa, Setaria italica
  Transcript Sequence Number=SeqID_64339
MVPKMPDIHDTITSFYFHSNLTSLRHHGHSLVQQRVDERLYVVLSLG

SEQ ID NO: 130314 - protein, 56 aa, Setaria italica
  misc_feature (36)..(36): Xaa can be any naturally occurring amino acid
  Transcript Sequence Number=SeqID_64340
  Gene Ontology: Mol. function=oxidoreductase activity; Cellular component=extracellular region
  Homolog annotation: Hit_ID=Q339K6; Match level="QueryCoverage=96%, HitCoverage=9%, E-value=2e-15, Identity=70%"; Hit description =Laccase-15
NAEMARNMTKGIFLSDASASTVNGLVGDLFNCSGVXKEGYVLDVEPGKTYLLRIIN

SEQ ID NO: 130315 - protein, 53 aa, Setaria italica
  Transcript Sequence Number=SeqID_64341
CLNHQLTVNYSRSRGMAQVAVKHKEDIRQVMRRWFLRCLIYMTQLRRSISTAT

SEQ ID NO: 130316 - protein, 59 aa, Setaria italica
  Transcript Sequence Number=SeqID_64342
FCCRWETSAVGAILGRCGRLVLHFLLVTKRINQVMAAVVQLLTQFGVWTRVITQSGNRS

SEQ ID NO: 130317 - protein, 81 aa, Setaria italica
  misc_feature (30)..(30): Xaa can be any naturally occurring amino acid
  Transcript Sequence Number=SeqID_64343
SKHQIESTTETTAAITWLISFLLPAENVKXAFHIYPEWRQLPRFPTCEYERTQNHICLKHSYESCVWSVSESVHHITSLLV

SEQ ID NO: 130318 - protein, 82 aa, Setaria italica
  Transcript Sequence Number=SeqID_64344
LFVKYMPCRFSRSQVCKPTIGKVQIMVFKYANQPWQCLNHGIKVFKLGYSSDQAMAHRSKHRSNWSNREINLSSRKHRMIRR

SEQ ID NO: 130319 - protein, 75 aa, Setaria italica
  Transcript Sequence Number=SeqID_64345
SAVYGDQCMIQPDHNTVMYIWTLGSGRRWLRRPVPHAIISRILLRRGRPSPLCSGRAKRDGETDLPCAPSGRRFP

SEQ ID NO: 130320 - protein, 116 aa, Setaria italica
  Transcript Sequence Number=SeqID_64346
  Gene Ontology: Mol. function=metal ion binding
  Homolog annotation: Hit_ID=B6T839; Match level="QueryCoverage=93%, HitCoverage=37%, E-value=2e-27, Identity=53%"; Hit description=RHC1A
  Subcellular localization annotation: CTP_CleavageSite=49; ConfidenceScore=5.31e-01
MVQCLHGIIPWLVQHNSCPVCRHPLPSQRSGNANSTRTPSAYSNEAAVLGVTEADPEPVPINNGGANQETHSSFSFLWPFGPSSSNPTSYQYEETVDEPAVYDPNQIGYSEWYYDH

SEQ ID NO: 130321 - protein, 54 aa, Setaria italica
  Transcript Sequence Number=SeqID_64347
FFFVFFFWTGKKQPLIYRTGIYGHYRSVHCAQKSLFSLYTLTQVHTANEKQGIH

SEQ ID NO: 130322 - protein, 44 aa, Setaria italica
  Transcript Sequence Number=SeqID_64348
NTLINPWRSCGQFRKFRRPKVTRLTVMNCHAQMPTMSSQAPLCS

SEQ ID NO: 130323 - protein, 89 aa, Setaria italica
  Transcript Sequence Number=SeqID_64349
CSTDQQFCKALQHPQALVKTHAQHYLSYNEFHAKLHPVYNHTLLSLCAFKLRPFVVISSILLMSSSKLSIMALVMLQYVIILLGLCCFY

SEQ ID NO: 130324 - protein, 66 aa, Setaria italica
  misc_feature (32)..(32): Xaa can be any naturally occurring amino acid
  Transcript Sequence Number=SeqID_64350
  Gene Ontology: Biological process=cell division
  Homolog annotation: Hit_ID=Q2QQS5; Match level="QueryCoverage=100%, HitCoverage=11%, E-value=7e-27, Identity=84%"; Hit description =Cyclin-T1-4
NIHHAYKPLVEAIRRFNVGGANALPQVAWNFXNDGLRTSLCLQFEPHHIAAGAIFLAAKFLKVKLP

SEQ ID NO: 130325 - protein, 49 aa, Setaria italica
  Transcript Sequence Number=SeqID_64351
PRTYKLWQLFVYQVSIATAMVFCHRFTFANPMRKMIDELIAKNITNLLV

SEQ ID NO: 130326 - protein, 77 aa, Setaria italica
  misc_feature (1)..(23): Xaa can be any naturally occurring amino acid
  misc_feature (51)..(51): Xaa can be any naturally occurring amino acid
  Transcript Sequence Number=SeqID_64352
XXXXXXXXXXXXXXXXXXXXXXXPTNCSLDYLNCQQSNFTTRADIQQLIDXKMLHYTYKSDVMLDYNFLIFGCGNSI

SEQ ID NO: 130327 - protein, 38 aa, Setaria italica
  Transcript Sequence Number=SeqID_64353
PISWSIIVNLFLLSNYGSLYYSFLGRVKYCLSSKLVNY

SEQ ID NO: 130328 - protein, 44 aa, Setaria italica
  Transcript Sequence Number=SeqID_64354
  Pfam annotation: Domain name=PAM2; Domain location=12-29; Score=26.5; E_value=0.00011; Accession=PF07145.7; Description=Ataxin-2 C-terminal region
MSTEDKKLSMLNKGTALNPNAEEFVPSSLRTVNDASRRSDAALV

SEQ ID NO: 130329 - protein, 66 aa, Setaria italica
  Transcript Sequence Number=SeqID_64355
PYYFPPPPPPAYSAPPQYGSEQYYRPSGYYSAPAPAPASSECPPPIPSPTAFDAAAASGAAQGVRP

SEQ ID NO: 130330 - protein, 39 aa, Setaria italica
  Transcript Sequence Number=SeqID_64356
SIIEICRPAGTGLLGNSVGMLSPTLRPVPVTPTAPRWPP

SEQ ID NO: 130331 - protein, 67 aa, Setaria italica
  Transcript Sequence Number=SeqID_64357
  Gene Ontology: Mol. function=nucleic acid binding; Cellular component= ribonucleoprotein complex; Biological process=embryonic development ending in birth or egg hatching
  Homolog annotation: Hit_ID=O22247; Match level="QueryCoverage=85%, HitCoverage=52%, E-value=4e-24, Identity=94%"; Hit description=Small nuclear ribonucleoprotein-like protein
  Pfam annotation: Domain name=LSM; Domain location=26-67; Score=18.6; E_value=0.0016; Accession=PF01423.14; Description=LSM domain
LYIFNHLQQAGKKEEEEFSTGPLSVLMMSVKNNTQVLINCRNNKKLLGRVRAFDRHCNMVLENVREM

SEQ ID NO: 130332 - protein, 120 aa, Setaria italica
  Transcript Sequence Number=SeqID_64358
  Gene Ontology: Mol. function=protein serine/threonine kinase activity; Biological process=protein amino acid phosphorylation
  Homolog annotation: Hit_ID=C4P7R9; Match level="QueryCoverage=66%, HitCoverage=18%, E-value=4e-24, Identity=73%"; Hit description=CBL -interacting protein kinase 19
  Pfam annotation: Domain name=NAF; Domain location=51-110; Score=97.0; E_value=6.6e-26; Accession=PF03822.6; Description=NAF domain
NNKITIPGALVSGNWNEYNLNPLTRIHWRASLVPAAASNANTVGGNQAVEKLTNLNAFDIISLSNGFDLSGIFEENSNKEEAKFTSTNTASTIITKLEEIAMSLRLKITKKCGGLLKMEC

SEQ ID NO: 130333 - protein, 54 aa, Setaria italica
  Transcript Sequence Number=SeqID_64359
  Gene Ontology: Mol. function=protein serine/threonine kinase activity; Biological process=protein amino acid phosphorylation
  Homolog annotation: Hit_ID=B6SH63; Match level="QueryCoverage=88%, HitCoverage=10%, E-value=8e-22, Identity=89%"; Hit description=CBL -interacting serine/threonine-protein kinase 15
YYYTCHNIWACGVILYVLLAGYLPFQDKNLVDMYKKICKAQLKWPSWFSSDIRK

SEQ ID NO: 130334 - protein, 118 aa, Setaria italica
  Transcript Sequence Number=SeqID_64360
  Gene Ontology: Mol. function=protein serine/threonine kinase activity; Biological process=protein amino acid phosphorylation
  Homolog annotation: Hit_ID=C4P7R9; Match level="QueryCoverage=99%, HitCoverage=26%, E-value=1e-34, Identity=65%"; Hit description=CBL -interacting protein kinase 19
  Pfam annotation: Domain name=NAF; Domain location=36-95; Score=97.0; E_value=6.6e-26; Accession=PF03822.6; Description=NAF domain
FDYTMNSTDNVMPIDMNLALDHSNANTVGGNQAVEKLTNLNAFDIISLSNGFDLSGIFEENSNKEEAKFTSTNTASTIITKLEEIAMSLRLKITKKCGGLLKMECSKPGRKGVMSLND

SEQ ID NO: 130335 - protein, 46 aa, Setaria italica
  Transcript Sequence Number=SeqID_64361
NSGLKYEDEKKKKSTLLSQQLEYIIESTIRVLVCHNLYYYYTCHNI

SEQ ID NO: 130336 - protein, 50 aa, Setaria italica
  Transcript Sequence Number=SeqID_64362
LQRILDPNPSTRISMEKIMEHPWFRIGHPNHGKLFDYTMNSTDNVMPIDM

SEQ ID NO: 130337 - protein, 44 aa, Setaria italica
  Transcript Sequence Number=SeqID_64363
LLLVIRLLLQGPKPSRGIASRRTLFSRTGVPLSLTESPILIPAI

SEQ ID NO: 130338 - protein, 69 aa, Setaria italica
  Transcript Sequence Number=SeqID_64364
  Homolog annotation: Hit_ID=B6UFI4; Match level="QueryCoverage=60%, HitCoverage=14%, E-value=2e-13, Identity=80%"; Hit description=ATPP2- A13
GGVVELVGRGAGGREEERVGDERGEMGKMDIFARLAKPVPFDGGRREFWVEKTKGGICMALSSKALVIT

SEQ ID NO: 130339 - protein, 122 aa, Setaria italica
  misc_feature (85)..(85): Xaa can be any naturally occurring amino acid
  misc_feature (117)..(117): Xaa can be any naturally occurring amino acid
  Transcript Sequence Number=SeqID_64365
  Gene Ontology: Mol. function=transferase activity; Cellular component= chloroplast envelope; Biological process=biosynthetic process
  Homolog annotation: Hit_ID=B6T479; Match level="QueryCoverage=93%, HitCoverage=27%, E-value=1e-45, Identity=76%"; Hit description =Glycosyl transferase, group 1 family protein
  Pfam annotation: Domain name=Glycos_transf_1; Domain location=4-121; Score=10.1; E_value=0.00011; Accession=PF00534.12; Description =Glycosyl transferases group 1
FFLTIFLCRAELEQMFSGMPAVFTGTLQGEELSQAYASGDVFVMPSESETLGFVVLEAMSSGVPVVGARAGGIPDIIPEDQEGRXSFLYTPGDVDDCVSKIERLLSCEELRETMGRXARKEM

SEQ ID NO: 130340 - protein, 42 aa, Setaria italica
  Transcript Sequence Number=SeqID_64366
SSYSAAIWFWRKKRAQLLRPVQWVVRKLVRPTTPGAAVAKQS

SEQ ID NO: 130341 - protein, 65 aa, Setaria italica
  Transcript Sequence Number=SeqID_64367
  Gene Ontology: Mol. function=threonine-type endopeptidase activity; Cellular component=proteasome core complex; Biological process =ubiquitin-dependent protein catabolic process
  Homolog annotation: Hit_ID=Q9LST7; Match level="QueryCoverage=50%, HitCoverage=16%, E-value=8e-11, Identity=93%"; Hit description =Proteasome subunit beta type-3
MDSQAPYKDSVSGTASESLYGACESMYKPNMEPDELFETVSQAPYKDSDAVPETTKSLASSFAPR

SEQ ID NO: 130342 - protein, 57 aa, Setaria italica
  Transcript Sequence Number=SeqID_64368
  Gene Ontology: Mol. function=threonine-type endopeptidase activity; Cellular component=proteasome core complex; Biological process =ubiquitin-dependent protein catabolic process
  Homolog annotation: Hit_ID=Q9LST7; Match level="QueryCoverage=89%, HitCoverage=25%, E-value=2e-20, Identity=92%"; Hit description =Proteasome subunit beta type-3
RCIFLRRELAKDFVVSGTASESLYGACESMYKPNMEPDELFETVSQALMSSVDRDCL

SEQ ID NO: 130343 - protein, 62 aa, Setaria italica
  Transcript Sequence Number=SeqID_64369
  Gene Ontology: Mol. function=nucleic acid binding; Biological process= response to stress
  Homolog annotation: Hit_ID=Q99070; Match level="QueryCoverage=54%, HitCoverage=20%, E-value=2e-09, Identity=85%"; Hit description =Glycine-rich RNA-binding protein 2
GFGFVTFSTEQSMLEAIENMNGKELDGRNITASHVDLRVQRERRGGHGGEELLRDRPATAAS

SEQ ID NO: 130344 - protein, 94 aa, Setaria italica
  Transcript Sequence Number=SeqID_64370
  Gene Ontology: Mol. function=transferase activity; Cellular component= integral to membrane; Biological process=vesicle-mediated transport
  Homolog annotation: Hit_ID=B6TVP5; Match level="QueryCoverage=81%, HitCoverage=36%, E-value=2e-33, Identity=90%"; Hit description=VAMP -like protein YKT62
  Pfam annotation: Domain name=Synaptobrevin; Domain location=1-82; Score=31.2; E_value=4.1e-06; Accession=PF00957.13; Description =Synaptobrevin
DSWKSATADGTQQWPFLTDALTKFQDPAEADKLMKIQRDLDETKIILHKTIESVLERGERLDSLVEKSSDLSAASQVTLSLLCQMNDFFVGIQV

SEQ ID NO: 130345 - protein, 35 aa, Setaria italica
  Transcript Sequence Number=SeqID_64371
YFSAVAFMDDHYPVRSAFSLLNKVLDEYQNLVVYM

SEQ ID NO: 130346 - protein, 39 aa, Setaria italica
  Transcript Sequence Number=SeqID_64372
MMLVGSTRLNDHQELRYTAIFTCKQPNSGDSGKIAASLT

SEQ ID NO: 130347 - protein, 109 aa, Setaria italica
  misc_feature (10)..(10): Xaa can be any naturally occurring amino acid
  misc_feature (30)..(30): Xaa can be any naturally occurring amino acid
  misc_feature (34)..(34): Xaa can be any naturally occurring amino acid
  misc_feature (73)..(73): Xaa can be any naturally occurring amino acid
  misc_feature (78)..(78): Xaa can be any naturally occurring amino acid
  Transcript Sequence Number=SeqID_64373
  Gene Ontology: Mol. function=nucleotide binding; Biological process =defense response
  Homolog annotation: Hit_ID=Q0ZHC6; Match level="QueryCoverage=96%, HitCoverage=10%, E-value=9e-22, Identity=58%"; Hit description=NBS -LRR type R protein Nbs9-75
KSLKKLQILXVVDMKGTSREVIEELGELSXLRKXLSVTSKGASENKYKIFCAAIEKLSSLQSLYVDAEGSSDXLGTLXEWLDSICSPPPLIRNLKLNGSLLDLPKWFGN

SEQ ID NO: 130348 - protein, 75 aa, Setaria italica
  misc_feature (45)..(45): Xaa can be any naturally occurring amino acid
  misc_feature (62)..(62): Xaa can be any naturally occurring amino acid
  misc_feature (71)..(71): Xaa can be any naturally occurring amino acid
  Transcript Sequence Number=SeqID_64374
  Gene Ontology: Mol. function=nucleotide binding
  Homolog annotation: Hit_ID=Q0ZHC6; Match level="QueryCoverage=86%, HitCoverage=6%, E-value=2e-12, Identity=53%"; Hit description=NBS -LRR type R protein Nbs9-75
KESFSIAAQNILYLFSLQSLYVDAEGSSDVGTLEWLDSICSPPPXIRNLKLNGSLLDLPKWXGNLKQLVKXHFIK

SEQ ID NO: 130349 - protein, 78 aa, Setaria italica
  Transcript Sequence Number=SeqID_64375
MEVMRRSVHEGQVKKMGGEDNWKEERCGPQRDREWRRKGGEGKEGKDRLAVQRATREAHERAFAEVRAKAERIALERI

SEQ ID NO: 130350 - protein, 83 aa, Setaria italica
  Transcript Sequence Number=SeqID_64376
KSLPNHMKFLRKKCYSILLMKHAYRTKNERVNEVTSESLIHEEMTKHGIEENEDARGYFKRAMWIRYLDLLKRKVILRSGSAI

SEQ ID NO: 130351 - protein, 78 aa, Setaria italica
  Transcript Sequence Number=SeqID_64377
  Gene Ontology: Mol. function=heat shock protein binding; Cellular component=plasma membrane
  Homolog annotation: Hit_ID=Q9XHV5; Match level="QueryCoverage=89%, HitCoverage=4%, E-value=2e-31, Identity=91%"; Hit description =10A19I.11
  Pfam annotation: Domain name=DnaJ; Domain location=8-74; Score=-10.3; E_value=0.046; Accession=PF00226.23; Description=DnaJ domain
MQIFSSGQILGSDSGWQPVPLTELITAAGVKKAYRKATLCVHPDKVQQRGATIRQKYICEKVFDLLKEAWNKYNSEER

SEQ ID NO: 130352 - protein, 113 aa, Setaria italica
  misc_feature (101)..(101): Xaa can be any naturally occurring amino acid
  Transcript Sequence Number=SeqID_64378
  Gene Ontology: Mol. function=heat shock protein binding
  Homolog annotation: Hit_ID=Q8RYN2; Match level="QueryCoverage=70%, HitCoverage=5%, E-value=2e-23, Identity=74%"; Hit description =Auxilin-like protein
SLSSLVERATAEARERAIEKAKAAADAKERMERFRGSFKDSFKAPNQDNQHEVQFQKTASNNHGKSKDIEVVEVESALRHKAKSERHQRTAERAAKALAEXMRYMLAQREQAE

SEQ ID NO: 130353 - protein, 91 aa, Setaria italica
  Transcript Sequence Number=SeqID_64379
MKKQKLMHFLGEGKLVESNVRTCGTCDEDPYQFQESQGSWGPQDLENRMDRVEDIVSHGEEREVQKSLLENVDKILVEEVLSHDGKEGQNH

SEQ ID NO: 130354 - protein, 83 aa, Setaria italica
  Transcript Sequence Number=SeqID_64380
  Subcellular localization annotation: CTP_CleavageSite=56; ConfidenceScore=5.61e-01
SPEKDSDPTSSQVVSHFASTSLCPLLVLSGDFWSSQLQGSDPSSLPVLSVFSNGVSSASLSLTSETSPSFPSLQQVLFLSAIS

SEQ ID NO: 130355 - protein, 124 aa, Setaria italica
  misc_feature (43)..(43): Xaa can be any naturally occurring amino acid
  misc_feature (106)..(106): Xaa can be any naturally occurring amino acid
  Transcript Sequence Number=SeqID_64381
TYNQASAETWKKDSLGVQRAKERENITRADSAFEKDNWSSRKXQEAKESERRLQKERELAEEKERRKLEEEERERERKKDRLAVERATREAHERAFAEAREMAEKXALERITAARQRASAEARE

SEQ ID NO: 130356 - protein, 111 aa, Setaria italica
  Transcript Sequence Number=SeqID_64382
  Gene Ontology: Mol. function=heat shock protein binding
  Homolog annotation: Hit_ID=Q9XHV5; Match level="QueryCoverage=88%, HitCoverage=7%, E-value=3e-11, Identity=46%"; Hit description =10A19I.11
STLYCILVFVVLSVPCTVEPSMDFVIDSRNLSHGPATNHVSRTDNGTMANDDSDKNPSSVSASVRSPESDFIVDQKQPSASWTPISGNVSANENHKTSDSHSTRSTVTPDY

SEQ ID NO: 130357 - protein, 34 aa, Setaria italica
  Transcript Sequence Number=SeqID_64383
KGFKTTCQAALEKASREARMKAERAAVALSTAEA

SEQ ID NO: 130358 - protein, 142 aa, Setaria italica
  Transcript Sequence Number=SeqID_64384
  Gene Ontology: Mol. function=heat shock protein binding
  Homolog annotation: Hit_ID=Q9XHV5; Match level="QueryCoverage=90%, HitCoverage=8%, E-value=2e-32, Identity=58%"; Hit description =10A19I.11
YRKKVRITYRNKILSVKKSSEEEKNHDDSLSDKHKKLSVDRFYHFDDNGKKVFPLEKPQKMMQRSTESCQISSKLEKLGKWKSGNDFFELTGDDQKCKTDEARREDDKCEQMNPITSVINDHSETELSAADSDLARYEKLWE

SEQ ID NO: 130359 - protein, 75 aa, Setaria italica
  Transcript Sequence Number=SeqID_64385
SELCGYYNSNLSGNPQHCLFMASLSIISSPSSTHPLFSFHYKFLKKSIDQKGIKTLAFTSNWTIRLEKKVLIVET

SEQ ID NO: 130360 - protein, 49 aa, Setaria italica
  Transcript Sequence Number=SeqID_64386
  Subcellular localization annotation: CTP_CleavageSite=13; ConfidenceScore=5.09e-01
QIGVVVAAQFTSNAQFVSQRGKLERLKQRTSSFRSQKLLLYMKNHVTTP

SEQ ID NO: 130361 - protein, 64 aa, Setaria italica
  misc_feature (39)..(39): Xaa can be any naturally occurring amino acid
  Transcript Sequence Number=SeqID_64387
YGYGTITIRTITIRPHVGVPWYGLNLGRGLASSHGHPYXMRPYGYSPYGYGRFPRFRRPRRPYF

SEQ ID NO: 130362 - protein, 82 aa, Setaria italica
  Transcript Sequence Number=SeqID_64388
  Gene Ontology: Mol. function=nucleic acid binding; Cellular component= nucleus; Biological process=nuclear-transcribed mRNA poly(A) tail shortening
  Homolog annotation: Hit_ID=B4FZJ1; Match level="QueryCoverage=95%, HitCoverage=38%, E-value=6e-30, Identity=80%"; Hit description =Polyadenylate-binding protein 2
  Pfam annotation: Domain name=RRM_1; Domain location=4-68; Score=53.3; E_value=9.4e-13; Accession=PF00076.14; Description=RNA recognition motif. (a.k.a. RRM, RBD, o
SQLQVDYACTPEEVQQHFNSCGTVNRVTILTDKFGQPKGFAYVEFVEVEAVQEAVKLNESELHGRQLKVAPKRTNVPGMKQP

SEQ ID NO: 130363 - protein, 69 aa, Setaria italica
  Transcript Sequence Number=SeqID_64389
  Gene Ontology: Mol. function=nucleic acid binding; Cellular component= nucleus; Biological process=nuclear-transcribed mRNA poly(A) tail shortening
  Homolog annotation: Hit_ID=B4FZJ1; Match level="QueryCoverage=94%, HitCoverage=32%, E-value=2e-21, Identity=76%"; Hit description =Polyadenylate-binding protein 2
  Pfam annotation: Domain name=RRM_1; Domain location=4-68; Score=53.3; E_value=9.4e-13; Accession=PF00076.14; Description=RNA recognition motif. (a.k.a. RRM, RBD, o
SQLQVDYACTPEEVQQHFNSCGTVNRVTILTDKFGQPKGFAYVEFVEVEAVQEAVKLNESELHGRQLKV

SEQ ID NO: 130364 - protein, 44 aa, Setaria italica
  misc_feature (2)..(2): Xaa can be any naturally occurring amino acid
  Transcript Sequence Number=SeqID_64390
FXILLLLVYPYYCRSVIGLLVPLLVLLGRFPLVFSVRPVVRPYF

SEQ ID NO: 130365 - protein, 80 aa, Setaria italica
  Transcript Sequence Number=SeqID_64391
  Gene Ontology: Mol. function=ferredoxin-nitrite reductase activity; Cellular component=chloroplast; Biological process=electron transport chain
  Homolog annotation: Hit_ID=B8YEL1; Match level="QueryCoverage=61%, HitCoverage=8%, E-value=5e-22, Identity=91%"; Hit description =Ferredoxin-nitrite reductase
ELAVLDRRHVRQIVDVRVSVPRPVRMHWTGCPNSCAQVQVADIGFMGCLTKGSDGKVCEAADIFVGGRVGSDSHQVIARH

SEQ ID NO: 130366 - protein, 86 aa, Setaria italica
  Transcript Sequence Number=SeqID_64392
  Gene Ontology: Mol. function=ferredoxin-nitrite reductase activity; Cellular component=chloroplast; Biological process=electron transport chain
  Homolog annotation: Hit_ID=P17847; Match level="QueryCoverage=67%, HitCoverage=10%, E-value=3e-26, Identity=91%"; Hit description =Ferredoxin--nitrite reductase, chloroplastic (Fragment)
GGERAASSRRGGRWGGEERRGEGEAVVEKRVSVPRPVRMHWTGCPNSCAQVQVADIGFMGCLTKGSDGKVCEAADIFVGGRVGSDS

SEQ ID NO: 130367 - protein, 65 aa, Setaria italica
  Transcript Sequence Number=SeqID_64393
  Gene Ontology: Mol. function=ferredoxin-nitrite reductase activity; Cellular component=chloroplast; Biological process=electron transport chain
  Homolog annotation: Hit_ID=P17847; Match level="QueryCoverage=93%, HitCoverage=10%, E-value=3e-28, Identity=93%"; Hit description =Ferredoxin--nitrite reductase, chloroplastic (Fragment)
LQFPQFCGQAIIETKARALQVTREVEKRVSVPRPVRMHWTGCPNSCAQVQVADIGFMGCLTKGSD

SEQ ID NO: 130368 - protein, 94 aa, Setaria italica
  Transcript Sequence Number=SeqID_64394
  Gene Ontology: Mol. function=oxidoreductase activity; Biological process=oxidation reduction
  Homolog annotation: Hit_ID=O24479; Match level="QueryCoverage=76%, HitCoverage=22%, E-value=1e-17, Identity=58%"; Hit description=B -keto acyl reductase
MFFLHRQVPIQVATKLASIRKPTFLAPSPEAYARAAVRRIGYEPRCTPYWTHALVGLLISLVPEPIADRMFLHRNLSIRARGRAKDAKKKATSR

SEQ ID NO: 130369 - protein, 69 aa, Setaria italica
  Transcript Sequence Number=SeqID_64395
  Gene Ontology: Mol. function=oxidoreductase activity; Cellular component=endoplasmic reticulum membrane; Biological process =oxidation reduction
  Homolog annotation: Hit_ID=Q6K5K6; Match level="QueryCoverage=81%, HitCoverage=22%, E-value=2e-18, Identity=75%"; Hit description =Putative b-keto acyl reductase
MRTGDKTSCGLFASYVDQFSRCMYVEYKSKGIDVQCQVPIQVATKLASIRKPTFLAPSPEAYARAAVRR

SEQ ID NO: 130370 - protein, 133 aa, Setaria italica
  misc_feature (76)..(76): Xaa can be any naturally occurring amino acid
  misc_feature (110)..(110): Xaa can be any naturally occurring amino acid
  Transcript Sequence Number=SeqID_64396
  Gene Ontology: Mol. function=acid phosphatase activity; Cellular component=plasma membrane
  Homolog annotation: Hit_ID=B6TC70; Match level="QueryCoverage=100%, HitCoverage=25%, E-value=7e-63, Identity=88%"; Hit description=Acid phosphatase
FLEWTDDLEGFVLKGYGESINYRMGLPLLKDVVQSMEEAIIAKEEHHPDGTYEKARLRFAHAETVVPFSCLLGLFXLEGSDFEKIQREEALDLPPMPPQGRNWKGSVVAXPFAGNNMLVLYQCPGKTSDGSNF

SEQ ID NO: 130371 - protein, 66 aa, Setaria italica
  Transcript Sequence Number=SeqID_64397
NTRRSKIILAHHYSGGGRSRVRHRLHVSGLFVDVSVCVVHYVLLWNKMGIAEGVQCLPLVSFTHNT

SEQ ID NO: 130372 - protein, 98 aa, Setaria italica
  misc_feature (93)..(93): Xaa can be any naturally occurring amino acid
  Transcript Sequence Number=SeqID_64398
  Gene Ontology: Mol. function=calcium-dependent phospholipid binding; Cellular component=cytoplasm; Biological process=response to stress
  Homolog annotation: Hit_ID=Q43863; Match level="QueryCoverage=90%, HitCoverage=28%, E-value=2e-42, Identity=92%"; Hit description =Annexin-like protein RJ4
  Pfam annotation: Domain name=Annexin; Domain location=7-73; Score =72.5; E_value=1.5e-18; Accession=PF00191.12; Description=Annexin
RLRVGSADGAVLANEAARKWQPGNRVLVEIACTRGSAQLFAVRQAYHERFKRSLEEDIAAHVTGDFRKLLVPLVSAYRYDGPEVNTRLAHSEXKMLHE

SEQ ID NO: 130373 - protein, 70 aa, Setaria italica
  Transcript Sequence Number=SeqID_64399
PLVHHSGMHLQVAPAAEVWSFRCMSKQRALLVVTAAFVILLREHIIRIFHTSWELRIIFSHLLYRRRRTN

SEQ ID NO: 130374 - protein, 67 aa, Setaria italica
  Transcript Sequence Number=SeqID_64400
  Gene Ontology: Cellular component=integral to membrane; Biological process=transport
  Homolog annotation: Hit_ID=B6SSF8; Match level="QueryCoverage=73%, HitCoverage=23%, E-value=4e-15, Identity=81%"; Hit description =Transmembrane emp24 domain-containing protein 10
THIQCTIWCCQLNATSFFLQGVELELQKLEVAVQAIHQNLIYLKTREAEMRIVSEKTNARVAWFSIL

SEQ ID NO: 130375 - protein, 63 aa, Setaria italica
  Transcript Sequence Number=SeqID_64401
  Gene Ontology: Mol. function=oxidoreductase activity
  Homolog annotation: Hit_ID=B9SV53; Match level="QueryCoverage=98%, HitCoverage=20%, E-value=3e-22, Identity=75%"; Hit description=Aldo -keto reductase, putative
GTYKAGPGVVGDAIAAAVKAGYRHIDCASLYNNEKEIGVALKKVFADGVVKREDLFVTSKIWY

SEQ ID NO: 130376 - protein, 60 aa, Setaria italica
  Transcript Sequence Number=SeqID_64402
LSSINFCTCINFLYSLSIQFSEISENVNHSNDQDDLRLQIERLRDKLQHFHKLHECAQQE

SEQ ID NO: 130377 - protein, 88 aa, Setaria italica
  Transcript Sequence Number=SeqID_64403
  Gene Ontology: Mol. function=hydrolase activity, acting on ester bonds; Biological process=lipid metabolic process
  Homolog annotation: Hit_ID=B9SYX7; Match level="QueryCoverage=55%, HitCoverage=8%, E-value=2e-15, Identity=77%"; Hit description=Zinc finger protein, putative
PPDFISEALGLPPLVPAYLDPAYGIQDFARGVCFASAGTGLDNKTAGVLVRTLSSVQHDCNGDVRDVSLAAHLKIAKFFWGARLRRQE

SEQ ID NO: 130378 - protein, 136 aa, Setaria italica
  misc_feature (66)..(66): Xaa can be any naturally occurring amino acid
  misc_feature (125)..(125): Xaa can be any naturally occurring amino acid
  Transcript Sequence Number=SeqID_64404
  Gene Ontology: Mol. function=hydrolase activity, hydrolyzing O -glycosyl compounds; Cellular component=extracellular region; Biological process=carbohydrate metabolic process
  Homolog annotation: Hit_ID=Q84U85; Match level="QueryCoverage=91%, HitCoverage=40%, E-value=1e-39, Identity=65%"; Hit description =Acidic class III chitinase
  Pfam annotation: Domain name=Glyco_hydro_18; Domain location=3-136; Score=-49.7; E_value=0.018; Accession=PF00704.20; Description =Glycosyl hydrolases family 18
EGGTTTETWPRNLWNNYLGGTSSSRPLGDAVLDGIDFDIELGAAKYWDRLARDLKNMGKKQQGGNXVLLSAAPQCPFPDEWDSGAIKTGLFDFVWVQFYNNPECQFSSGRSAFLAAWKQWESVPXAGKIFLGLPAS

SEQ ID NO: 130379 - protein, 101 aa, Setaria italica
  Transcript Sequence Number=SeqID_64405
  Gene Ontology: Mol. function=hydrolase activity, hydrolyzing O -glycosyl compounds; Cellular component=extracellular region; Biological process=polysaccharide catabolic process
  Homolog annotation: Hit_ID=P51614; Match level="QueryCoverage=99%, HitCoverage=33%, E-value=1e-26, Identity=58%"; Hit description =Acidic endochitinase
RPLGDAVLDGIDFDIELGAAKYWDRLARDLKNMGKKQQGGNGVLLSAAPQCPFPDEWDSGAIKTGLFDFVWVQFYNNPECQFSSGRSAFLAAWKQLGSSVV

SEQ ID NO: 130380 - protein, 41 aa, Setaria italica
  misc_feature (4)..(4): Xaa can be any naturally occurring amino acid
  Transcript Sequence Number=SeqID_64406
PFLXKFNWLCWELSPIVSRTVLRMELQFGIERTEHRCQCVS

SEQ ID NO: 130381 - protein, 52 aa, Setaria italica
  Transcript Sequence Number=SeqID_64407
  Gene Ontology: Cellular component=plasma membrane
  Homolog annotation: Hit_ID=O22633; Match level="QueryCoverage=73%, HitCoverage=48%, E-value=2e-13, Identity=94%"; Hit description=NOI protein
  Pfam annotation: Domain name=NOI; Domain location=1-49; Score=85.5; E_ value=1.9e-22; Accession=PF05627.3; Description=Nitrate-induced NOI protein
EKGSPLPKFGEWDVNDPASAEGFTVIFNKARDEKKTGGNSQGQDEQVKNEQQ

SEQ ID NO: 130382 - protein, 63 aa, Setaria italica
  misc_feature (1)..(11): Xaa can be any naturally occurring amino acid
  misc_feature (14)..(14): Xaa can be any naturally occurring amino acid
  Transcript Sequence Number=SeqID_64408
XXXXXXXXXXXGSXNGSIRSNVVVIRSTAYIHFTGQIMLNSLHHLAKRIISAPNISISFEEIK

SEQ ID NO: 130383 - protein, 143 aa, Setaria italica
  misc_feature (5)..(5): Xaa can be any naturally occurring amino acid
  Transcript Sequence Number=SeqID_64409
  Gene Ontology: Mol. function=calcium ion binding; Cellular component =spindle microtubule
  Homolog annotation: Hit_ID=Q84VG0; Match level="QueryCoverage=100%, HitCoverage=89%, E-value=2e-67, Identity=92%"; Hit description =Probable calcium-binding protein CML7
  Pfam annotation: Domain name=efhand; Domain location=115-143; Score =9.1; E_value=2.1; Accession=PF00036.24; Description=EF hand
  Pfam annotation: Domain name=efhand; Domain location=69-97; Score =24.2; E_value=0.00055; Accession=PF00036.24; Description=EF hand
  Pfam module annotation: Pfam domain module=efhand::efhand; Domain location=115-143::69-97
EAFSXFDTDGDGRIAPSELGVLMRSLGGNPTQAQLRDIAAQEKLTAPFDFPRFLDLMRAHLRPEPFDRPLRDAFRVLDKDASGTVSVADLRHVLTSIGEKLEPHEFDEWIREVDEFDEWIREVDVAPDGTIRYDDFIRRIVAK

SEQ ID NO: 130384 - protein, 69 aa, Setaria italica
  misc_feature (32)..(32): Xaa can be any naturally occurring amino acid
  Transcript Sequence Number=SeqID_64410
  Gene Ontology: Cellular component=chloroplast
  Homolog annotation: Hit_ID=Q94FY8; Match level="QueryCoverage=52%, HitCoverage=7%, E-value=6e-12, Identity=91%"; Hit description =Probable tocopherol cyclase, chloroplastic
LNNHCIIQIQCNVFSGASGEVSLTAAGGLRKXGLGDTYESPSLVQFMILCAFKLTFCFWFAQCSVKGMH

SEQ ID NO: 130385 - protein, 60 aa, Setaria italica
  misc_feature (10)..(10): Xaa can be any naturally occurring amino acid
  Transcript Sequence Number=SeqID_64411
  Gene Ontology: Cellular component=chloroplast
  Homolog annotation: Hit_ID=Q94FY8; Match level="QueryCoverage=96%, HitCoverage=10%, E-value=3e-15, Identity=74%"; Hit description =Probable tocopherol cyclase, chloroplastic
SSLTAAGGLXKIGLGDTYESPSLATLVFILQIGIHCDGNFFEFVPWTGTVSWDIALVGVL

SEQ ID NO: 130386 - protein, 87 aa, Setaria italica
  Transcript Sequence Number=SeqID_64412
  Pfam annotation: Domain name=Dehydrin; Domain location=24-85; Score= -25.7; E_value=0.029; Accession=PF00257.11; Description=Dehydrin
GDTVLARALPVHVGRSTQVWEVKLWKMDPSTGEKGPQIAESRVTLLSNLPLPEEHHKKDGEHKEGIVDKIKDKITGEHGDKSGEHKD

SEQ ID NO: 130387 - protein, 100 aa, Setaria italica
  Transcript Sequence Number=SeqID_64413
FPPIFFAHFSELFKSRRGSFEFRCTEASRSKFEAFPKLSASICARGWVTRAATVEAPLLVTAVGAPATATVTTTRRHRLPRRRRLRPNRLNVSLRTVPLP

SEQ ID NO: 130388 - protein, 94 aa, Setaria italica
  misc_feature (14)..(14): Xaa can be any naturally occurring amino acid
  Transcript Sequence Number=SeqID_64414
  Gene Ontology: Mol. function=methyltransferase activity; Cellular component=plasma membrane
  Homolog annotation: Hit_ID=B9R995; Match level="QueryCoverage=100%, HitCoverage=13%, E-value=1e-33, Identity=70%"; Hit description=ATP binding protein, putative
GFGGFAAAIESPNXWVMNVVPTIAKMPTLGAVYELGLIGIYHDWYDILHSKYVLKKCEAFSTYPRTYDLIHASGLFTLYKNKCSMEDILLEMDR

SEQ ID NO: 130389 - protein, 82 aa, Setaria italica
  Transcript Sequence Number=SeqID_64415
TQPGLKELSERMWSITILCFTLFTRFQREDKVTCADSWRCWKKNDLSGNIIHGSEMHVPHVLGLLKADGLSKCACMRRPQGF

SEQ ID NO: 130390 - protein, 58 aa, Setaria italica
  Transcript Sequence Number=SeqID_64416
IGIITITCTNSVLLNKKQANGWNEMFGLPVKCSTITREIHYTKQQHTNYNCDMPFATF

SEQ ID NO: 130391 - protein, 76 aa, Setaria italica
  Transcript Sequence Number=SeqID_64417
  Pfam annotation: Domain name=Got1; Domain location=30-76; Score= -43.9; E_value=0.029; Accession=PF04178.4; Description=Got1-like family
MVSFEMNDLKKIGLGLTGFGIFFSFLGIIFFFDKGLIAMGNILFLSGLGLTIGLKIKLIDKLLTTKDLKKLTKGTI

SEQ ID NO: 130392 - protein, 66 aa, Setaria italica
  Transcript Sequence Number=SeqID_64418
  Gene Ontology: Biological process=vesicle-mediated transport
  Homolog annotation: Hit_ID=Q339R2; Match level="QueryCoverage=87%, HitCoverage=30%, E-value=5e-20, Identity=84%"; Hit description=Got1 -like family protein, expressed
  Pfam annotation: Domain name=Got1; Domain location=6-61; Score=39.4; E_value=3.1e-10; Accession=PF04178.4; Description=Got1-like family
NLIWCLAFFLVLIGWPFFGMLLEAYGFIVLFSGFWPTLVVFLQRIPIIGWIFQQPFVTSFLDRYSR

SEQ ID NO: 130393 - protein, 106 aa, Setaria italica
  misc_feature (2)..(2): Xaa can be any naturally occurring amino acid
  misc_feature (29)..(29): Xaa can be any naturally occurring amino acid
  Transcript Sequence Number=SeqID_64419
  Subcellular localization annotation: CTP_CleavageSite=47; ConfidenceScore=5.26e-01
IXMLTRQNIDPVPANTRVPNYLAAQAFRXKSLPLRSPNPHIQTTLTRAMVFTGCDTRVVILKASWQEWGITLYITHTTGSEQNAVSHMSMSIKASSSSPSDAAPVR

SEQ ID NO: 130394 - protein, 66 aa, Setaria italica
  Transcript Sequence Number=SeqID_64420
  Homolog annotation: Hit_ID=B6UAN0; Match level="QueryCoverage=86%, HitCoverage=13%, E-value=2e-16, Identity=72%"; Hit description=DNA binding protein
  Pfam annotation: Domain name=PHD; Domain location=19-62; Score=8.9; E_ value=0.0028; Accession=PF00628.21; Description=PHD-finger
IKSKIKDDFTDSDANPMLACNTCGCLEHSLKMLICDSCEAAFHLSCCAPPIRFLTQAWRTVPFISW

SEQ ID NO: 130395 - protein, 57 aa, Setaria italica
  Transcript Sequence Number=SeqID_64421
  Subcellular localization annotation: CTP_CleavageSite=30; ConfidenceScore=5.33e-01
GQASMAQASTVLSRHSFGPCCRKHQLTCVSISNKPTTTTPTARRDKCLLSKWLFKLF

SEQ ID NO: 130396 - protein, 64 aa, Setaria italica
  Transcript Sequence Number=SeqID_64422
  Subcellular localization annotation: CTP_CleavageSite=45; ConfidenceScore=5.41e-01
LFPLVLFSLIFQTVSIANTNVPVLEYLNFNSSGVRPVGITTWVVTVGTIRKTVSRLLILSISMG

SEQ ID NO: 130397 - protein, 66 aa, Setaria italica
  Transcript Sequence Number=SeqID_64423
  Gene Ontology: Mol. function=receptor activity; Cellular component =integral to membrane
  Homolog annotation: Hit_ID=Q2R2X1; Match level="QueryCoverage=51%, HitCoverage=6%, E-value=2e-13, Identity=94%"; Hit description=Lung seven transmembrane receptor family protein, expressed
AKLEGCKQGEVIRRPSSDDPDWPYVLDTHFSANHRRRSRRRGWGAIMLPGREASACAFPLAFLGKP

SEQ ID NO: 130398 - protein, 122 aa, Setaria italica
  Transcript Sequence Number=SeqID_64424
  Gene Ontology: Mol. function=disulfide oxidoreductase activity; Cellular component=vacuole; Biological process=antigen processing and presentation of exogenous peptide antigen via MHC class II
  Homolog annotation: Hit_ID=B6TUH5; Match level="QueryCoverage=85%, HitCoverage=42%, E-value=1e-47, Identity=82%"; Hit description=Gamma- interferon-inducible lysosomal thiol reductase
  Pfam annotation: Domain name=GILT; Domain location=2-93; Score=48.0; E_value=3.6e-11; Accession=PF03227.8; Description=Gamma interferon inducible lysosomal thiol reductase (GILT)
NLRPRVLTKERTYLDAVGLTLVPYGNARVHAGGEITCQHGPNECLLNTVEACAIDAWPDLDVHFRFIYCVEELVMKRQYKKWDSCFQKLGLDPKPVTDCYKSEQGHKLELKYANQTNGSRAA

SEQ ID NO: 130399 - protein, 68 aa, Setaria italica
  Transcript Sequence Number=SeqID_64425
  Gene Ontology: Cellular component=vacuole
  Homolog annotation: Hit_ID=B6U3P7; Match level="QueryCoverage=95%, HitCoverage=25%, E-value=2e-26, Identity=83%"; Hit description=Gamma- interferon-inducible lysosomal thiol reductase
RRKELVMKRQYKKWDSCFQKLGLDPKPVTDCYKSEQGHKLELKYANQTNALVPPHRYVPWVVVDGQPC

SEQ ID NO: 130400 - protein, 57 aa, Setaria italica
  Transcript Sequence Number=SeqID_64426
  Gene Ontology: Mol. function=catalytic activity; Cellular component =plasma membrane; Biological process=metabolic process
  Homolog annotation: Hit_ID=O81614; Match level="QueryCoverage=77%, HitCoverage=6%, E-value=9e-17, Identity=86%"; Hit description =F8M12.15 protein
HYLFPQLKGFEFIKDVHLEPVPFDMDRDLITPTYKKKRPQLLKYYQVLLIAILLQSS

SEQ ID NO: 130401 - protein, 99 aa, Setaria italica
  Transcript Sequence Number=SeqID_64427
  Gene Ontology: Mol. function=catalytic activity; Cellular component =plasma membrane; Biological process=metabolic process
  Homolog annotation: Hit_ID=Q2I824; Match level="QueryCoverage=97%, HitCoverage=14%, E-value=1e-35, Identity=67%"; Hit description=ACS -like protein
LVVQKISSGGFIKSTLFNLAYKFKQFRMMRGAKHDEAAAICDKVVFSKVKEGLGGNVRVILSGAAPLATHVEEYLRVVTCAHVIQGYGLTETCAGHLIR

SEQ ID NO: 130402 - protein, 138 aa, Setaria italica
  misc_feature (9)..(9): Xaa can be any naturally occurring amino acid
  misc_feature (16)..(16): Xaa can be any naturally occurring amino acid
  misc_feature (49)..(49): Xaa can be any naturally occurring amino acid
  Transcript Sequence Number=SeqID_64428
  Gene Ontology: Mol. function=catalytic activity; Cellular component =plasma membrane; Biological process=metabolic process
  Homolog annotation: Hit_ID=Q2I824; Match level="QueryCoverage=94%, HitCoverage=19%, E-value=4e-50, Identity=72%"; Hit description=ACS -like protein
RSVIFHGAXIGFWRGXVKLLVEDIGVLKPTILCAVPRVLDRIFSGLQAXKISSGGFIKSTLFNLAYKFKQFRMMRGAKHDEAAAICDKVVFSKVKEGLGGNVRVILSGAAPLATHVEEYLRVVTCAHVIQGYGTLFVM

SEQ ID NO: 130403 - protein, 61 aa, Setaria italica
  Transcript Sequence Number=SeqID_64429
  Gene Ontology: Mol. function=catalytic activity; Biological process =metabolic process
GGRVGAKCSGAVAVEVVVALVRWADAGVDRLLNCVNEELAESDVYMSYLPLAHIFDRVVEE

SEQ ID NO: 130404 - protein, 67 aa, Setaria italica
  Transcript Sequence Number=SeqID_64430
  Gene Ontology: Mol. function=catalytic activity; Biological process =metabolic process
DCNCVYKFECPWVCSSHIYLIFQDYKLKISSGGFIKSTLFNLAYKFKQFRMMRGAKHDEAAAICDKD

SEQ ID NO: 130405 - protein, 131 aa, Setaria italica
  Transcript Sequence Number=SeqID_64431
  Gene Ontology: Mol. function=catalytic activity; Cellular component =plasma membrane; Biological process=metabolic process
  Homolog annotation: Hit_ID=Q2I824; Match level="QueryCoverage=89%, HitCoverage=17%, E-value=1e-51, Identity=77%"; Hit description=ACS -like protein
KRRQLLVTILRLNKFKQFRMMRGAKHDEAAAICDKVVFSKVKEGLGGNVRVILSGAAPLATHVEEYLRVVTCAHVIQGYGLTETCAGSFVSLPNQMSMVGTVGPPSANIDVRLESVPEMNYDALARTARGE

SEQ ID NO: 130406 - protein, 66 aa, Setaria italica
  Transcript Sequence Number=SeqID_64432
SQIMTINIITKALVKGSLKQFQKEIANIPMPAEPVMLHAFLSMQPLQRSQQHTARLRCESQTSNKK

SEQ ID NO: 130407 - protein, 72 aa, Setaria italica
  Transcript Sequence Number=SeqID_64433
  Subcellular localization annotation: CTP_CleavageSite=21; ConfidenceScore=5.08e-01
GGGGYIGGAFGAPPMYPPPPPASVDPSQSIATAPWATHNAVPPPPPPLSSTTDQPASYGADAEYDKFMSEMK

SEQ ID NO: 130408 - protein, 79 aa, Setaria italica
  misc_feature (50)..(50): Xaa can be any naturally occurring amino acid
  misc_feature (71)..(71): Xaa can be any naturally occurring amino acid
  Transcript Sequence Number=SeqID_64434
GSRQPEVPIEQKSGGPMLALTGSGGSGGASAGSGSNPPWSAGGGAAAIGXNGIKKDYDETNLYIGYLPPTXMDDAGLIS

SEQ ID NO: 130409 - protein, 48 aa, Setaria italica
  Transcript Sequence Number=SeqID_64435
PIERGKLPKLLPLVLVQLLTPVDEVLNEHKRQQLRELAALNGTIRDDE

SEQ ID NO: 130410 - protein, 66 aa, Setaria italica
  Transcript Sequence Number=SeqID_64436
SSDVLKWLYEYVCTILALFLFPLDQAEHGGEARFQSISPLPLALGPPARPPLPSAGLVVELRVLLV

SEQ ID NO: 130411 - protein, 95 aa, Setaria italica
  Transcript Sequence Number=SeqID_64437
  Gene Ontology: Mol. function=sequence-specific DNA binding; Cellular component=nucleus; Biological process=regulation of transcription, DNA-dependent
  Homolog annotation: Hit_ID=Q8VWM8; Match level="QueryCoverage=93%, HitCoverage=34%, E-value=7e-18, Identity=56%"; Hit description=MADS -box protein ZMM17
DDINDLEQQLEYDRQQSRARKHQLLNQQLDNLRRKEHILEDQNTFLYRMIHENQQAALGAEVKLGEMAPLAMLPPPAFGAPHPGCYYGGLLTLSR

SEQ ID NO: 130412 - protein, 86 aa, Setaria italica
  misc_feature (72)..(72): Xaa can be any naturally occurring amino acid
  misc_feature (77)..(77): Xaa can be any naturally occurring amino acid
  Transcript Sequence Number=SeqID_64438
  Gene Ontology: Mol. function=sequence-specific DNA binding; Cellular component=nucleus; Biological process=regulation of transcription, DNA-dependent
  Homolog annotation: Hit_ID=Q8VWM8; Match level="QueryCoverage=98%, HitCoverage=32%, E-value=2e-18, Identity=57%"; Hit description=MADS -box protein ZMM17
  Pfam annotation: Domain name=K-box; Domain location=1-86; Score=39.7; E_value=1.2e-08; Accession=PF01486.9; Description=K-box region
QDQQVFVEMTQMKNEMDKLETGIRRYSGDDLSSLTLDDINDLEQQLEYAVNKVRARKHQLLNQQLDNLRRKXHILEXQNTFLYRMI

SEQ ID NO: 130413 - protein, 55 aa, Setaria italica
  Transcript Sequence Number=SeqID_64439
  Homolog annotation: Hit_ID=B9T7P2; Match level="QueryCoverage=98%, HitCoverage=8%, E-value=3e-09, Identity=55%"; Hit description =Ankyrin repeat-containing protein, putative
IAAEKGFLDIVVELLKHSDKESLTRKNKSGFDALHVAAKEGHRGEHQLPRHHKPL

SEQ ID NO: 130414 - protein, 84 aa, Setaria italica
  misc_feature (4)..(4): Xaa can be any naturally occurring amino acid
  misc_feature (16)..(16): Xaa can be any naturally occurring amino acid
  Transcript Sequence Number=SeqID_64440
  Homolog annotation: Hit_ID=Q5QMH5; Match level="QueryCoverage=45%, HitCoverage=6%, E-value=1e-09, Identity=86%"; Hit description =Ankyrin-like protein
VTEXQKDVHTQLEQAXRKTNKNVYGIAKELRKLHREGINNATNSVTVVAVLFATVAFAAIFTSCPWSVNVICYLYFWFLFFSFS

SEQ ID NO: 130415 - protein, 78 aa, Setaria italica
  Transcript Sequence Number=SeqID_64441
CFPSFRSRKHPPPSTLTCPIPHIGIKINIFRESRFVVCMDGCMCNMMRSWSILVNQNLFRKVQLVIRILETRIRQLST

SEQ ID NO: 130416 - protein, 81 aa, Setaria italica
  misc_feature (56)..(56): Xaa can be any naturally occurring amino acid
  Transcript Sequence Number=SeqID_64442
  Gene Ontology: Mol. function=binding
CDLDQSYFILSVYGLRNDAIKEGDRVILYEPYYRILDASWKDKCYQFRSIRVDFPXQILINENAPAPHHVAHASIHAHNKP

SEQ ID NO: 130417 - protein, 64 aa, Setaria italica
  Transcript Sequence Number=SeqID_64443
  Homolog annotation: Hit_ID=Q8GRM2; Match level="QueryCoverage=70%, HitCoverage=3%, E-value=3e-09, Identity=60%"; Hit description=COP1 -interacting protein 7 (CIP7)-like
MSSSHSEAVEADTQSFTKPSVNEDVYNWAPSRISNNESEGAFAYSTRRTGPPKAFLRKGNGTHP

SEQ ID NO: 130418 - protein, 63 aa, Setaria italica
  Transcript Sequence Number=SeqID_64444
  Subcellular localization annotation: CTP_CleavageSite=34; ConfidenceScore=5.05e-01
NRNKEANRCLLVLGGSNFSDLRKENTRPSPGLRRATTRVQQKSFARSKSIIEESKSILKEDQS

SEQ ID NO: 130419 - protein, 61 aa, Setaria italica
  Transcript Sequence Number=SeqID_64445
  Subcellular localization annotation: CTP_CleavageSite=53; ConfidenceScore=5.23e-01
LQTERIWLSSQPCSVLGSHALPLTLLPAPIHKRSSRTVSSSYANRRNPPENPLAQSVPNFS

SEQ ID NO: 130420 - protein, 66 aa, Setaria italica
  Transcript Sequence Number=SeqID_64446
FLIRAISFWRQGLASGKAGTSRQPIDEESFQEDTEDVEEQPLVRRRSRRVPSENTESAQMVQPGPP

SEQ ID NO: 130421 - protein, 139 aa, Setaria italica
  misc_feature (29)..(29): Xaa can be any naturally occurring amino acid
  Transcript Sequence Number=SeqID_64447
  Gene Ontology: Mol. function=DNA binding; Biological process =regulation of transcription
  Homolog annotation: Hit_ID=Q10DS1; Match level="QueryCoverage=87%, HitCoverage=20%, E-value=2e-25, Identity=54%"; Hit description=Myb -like DNA-binding domain containing protein, expressed
LPVVEPKTSNAKESGDSTAIVDKSATDNXKGSNICASDPKQVKDKPSVEVEARDDSSSKGKDELNKTEDAVASPANVQEQKQSETLENGKMGEPNSIESVVANEEKGSGVTANQNDSITRLRRAASPTCLIFLVLVLCS

SEQ ID NO: 130422 - protein, 91 aa, Setaria italica
  Transcript Sequence Number=SeqID_64448
PPRSDDKSISRDDCPVVEPKTSNAKESGDSTAIVDKSATDNTKGSNICASDPKQVKDKPSVEVEARDDSSSKGKDELQLSTCKYCLVCLST

SEQ ID NO: 130423 - protein, 53 aa, Setaria italica
  Transcript Sequence Number=SeqID_64449
ILHSFRSIGVWNPDFSAAGPWHCVWRPYSGIAFGGLTAGLPYPGGNLLPATPG

SEQ ID NO: 130424 - protein, 95 aa, Setaria italica
  Transcript Sequence Number=SeqID_64450
  Gene Ontology: Mol. function=iron-sulfur cluster binding; Cellular component=mitochondrion
  Homolog annotation: Hit_ID=B6TVC7; Match level="QueryCoverage=96%, HitCoverage=55%, E-value=3e-42, Identity=91%"; Hit description =Ferredoxin
EPYLPTTLANSGLIEPASHRLEDIDACSAECEVHIAQEWLEKLPPPSYEERYVLTRASRNRELNKHARLGCQVVLAPELQGMVVAVPEPKPWDIP

SEQ ID NO: 130425 - protein, 53 aa, Setaria italica
  Transcript Sequence Number=SeqID_64451
RKAHSVKAAPSALPIVKARQLRDVPRLGLGDGDDHPLQLGREDDLAAQARVLV

SEQ ID NO: 130426 - protein, 128 aa, Setaria italica
  Transcript Sequence Number=SeqID_64452
  Gene Ontology: Mol. function=extracellular-glutamate-gated ion channel activity; Cellular component=integral to membrane; Biological process=G-protein coupled receptor protein signaling pathway
  Homolog annotation: Hit_ID=B9IAE8; Match level="QueryCoverage=62%, HitCoverage=8%, E-value=5e-22, Identity=58%"; Hit description =Glutamate-gated kainate-type ion channel receptor subunit GluR5
GRPLRIGVPYRTTYKQFVSRDPSGGPDGVSGYCVDVFKAAVELLPYPVPVSFVLFGDGVKNPSYGELVQRVADGFFDAAVMAHIPGVKGLRKAHSLELLAFTGDTITSPDSTYGCVKSTTRVRFVTIE

SEQ ID NO: 130427 - protein, 85 aa, Setaria italica
  Transcript Sequence Number=SeqID_64453
  Gene Ontology: Mol. function=extracellular-glutamate-gated ion channel activity; Cellular component=integral to membrane; Biological process=G-protein coupled receptor protein signaling pathway
  Homolog annotation: Hit_ID=B9S3N7; Match level="QueryCoverage=100%, HitCoverage=9%, E-value=1e-34, Identity=81%"; Hit description =Glutamate receptor 3 plant, putative
VTNRTRVVDFTQPYVESGLVIVSPVKAKSSNEWAFLKPFTPGMWAITAGFFLFVGAVVWILEHRFNPEFRGSPRKQMVTIFWFSF

SEQ ID NO: 130428 - protein, 55 aa, Setaria italica
  misc_feature (8)..(8): Xaa can be any naturally occurring amino acid
  Transcript Sequence Number=SeqID_64454
AASVNAWXGTASLMPLLGAFLADAYLGRYKSIIIACSLYVLVFLSGCCSSPSFQS

SEQ ID NO: 130429 - protein, 127 aa, Setaria italica
  Transcript Sequence Number=SeqID_64455
  Gene Ontology: Cellular component=membrane; Biological process=amino acid transport
  Homolog annotation: Hit_ID=B9SUA8; Match level="QueryCoverage=74%, HitCoverage=26%, E-value=1e-15, Identity=47%"; Hit description =Tyrosine-specific transport protein, putative
YETPNWEQVPAALPVIIFTLVFHDIAPVICAYLEGDLARIRLSILVGSLVPLVSLLVWDDIALGLATDLGGFDVQDMLKAEWSYTVVETFSLLAVGTSLIGTLLGASQFFIEQMTDLVSSSTKEHSK

SEQ ID NO: 130430 - protein, 118 aa, Setaria italica
  misc_feature (35)..(35): Xaa can be any naturally occurring amino acid
  misc_feature (46)..(46): Xaa can be any naturally occurring amino acid
  Transcript Sequence Number=SeqID_64456
  Gene Ontology: Cellular component=membrane; Biological process=amino acid transport
SLVPLVSLLVWDDIALGLATDLGGFDVQDMLKAEXGRRGTKNVPAXFSAICIAAQRFRWSYTVVETFSLLAVGTSLIGTLLGASQFFIEQMTDLVSSSTKEHVNIKEIEYKQKVTKLT

SEQ ID NO: 130431 - protein, 71 aa, Setaria italica
  misc_feature (44)..(71): Xaa can be any naturally occurring amino acid
  Transcript Sequence Number=SeqID_64457
SLHDWRLMFLIFMRISLFFLACLVGTNAESPMEKEMRLHCYKNXXXXXXXXXXXXXXXXXXXXXXXXXXXX

SEQ ID NO: 130432 - protein, 104 aa, Setaria italica
  Transcript Sequence Number=SeqID_64458
  Homolog annotation: Hit_ID=Q6YUW3; Match level="QueryCoverage=79%, HitCoverage=19%, E-value=5e-40, Identity=91%"; Hit description=Kelch repeat-containing F-box-like
TSFPAYCYTQHSTQHSTSFPAYCAAYNSWTTLGELPERPEAVNGWGIAFRGCGERLLVIGGPRVLGGGMIELHSWIPREGPLQWNMIGSKPSGNFVYNCAVMGC

SEQ ID NO: 130433 - protein, 73 aa, Setaria italica
  Transcript Sequence Number=SeqID_64459
  Subcellular localization annotation: CTP_CleavageSite=37; ConfidenceScore=5.60e-01
SYKMKSMKQGRRSRDDKARPFCRTTGTCVAVVVFRFSCAARRRRRPFGTRTMVPLVSLLGPCSLVARSWLISR

SEQ ID NO: 130434 - protein, 35 aa, Setaria italica
  Transcript Sequence Number=SeqID_64460
MAKSWFVPSNEQISPKLVHLLAIWNQRLISEKDIR

SEQ ID NO: 130435 - protein, 51 aa, Setaria italica
  Transcript Sequence Number=SeqID_64461
YYPEVLVLLYLVWGSPPLYVLFFLSILNEMTRSSLDQALAILSMQDLPMNA

SEQ ID NO: 130436 - protein, 49 aa, Setaria italica
  misc_feature (1)..(1): Xaa can be any naturally occurring amino acid
  Transcript Sequence Number=SeqID_64462
XFRTIYSTEDLFFNSCLIIHLGKYQYWRRIFGMFVPSFAEVTPTDICRH

SEQ ID NO: 130437 - protein, 99 aa, Setaria italica
  misc_feature (69)..(69): Xaa can be any naturally occurring amino acid
  misc_feature (82)..(82): Xaa can be any naturally occurring amino acid
  Transcript Sequence Number=SeqID_64463
  Homolog annotation: Hit_ID=B6TC94; Match level="QueryCoverage=72%, HitCoverage=28%, E-value=4e-21, Identity=72%"; Hit description=4/1 protein
MRACNYGKIFGKFLRIQFTIGEPWLLHCNYGYKEALMEIQALRVNYSTKNKKREALESHISYLNRDNEXLRRLYTETLFKVXTNQVKFHAEAQSLKDEL

SEQ ID NO: 130438 - protein, 43 aa, Setaria italica
  Transcript Sequence Number=SeqID_64464
ADTYQYELNISSVHLVSNGHHVHNLVLQGVLITNCTRITPCSL

SEQ ID NO: 130439 - protein, 83 aa, Setaria italica
  misc_feature (27)..(27): Xaa can be any naturally occurring amino acid
  Transcript Sequence Number=SeqID_64465
  Gene Ontology: Mol. function=peptidase activity; Cellular component =cytoplasm
  Homolog annotation: Hit_ID=B9T3Z6; Match level="QueryCoverage=98%, HitCoverage=7%, E-value=1e-28, Identity=73%"; Hit description =Protein binding protein, putative
IYHSDNLGLVAVDRNTVAVSISDIMLXFAAYPIEIPAEVVFLHPVHNFALVAYDPSALGVGASVVRAAKLLPEPALRTKEEIN

SEQ ID NO: 130440 - protein, 51 aa, Setaria italica
  Transcript Sequence Number=SeqID_64466
TGTPACHSPRVPSIYRFSLQHITSKGQQHIKLSQKSKHPIAQLLFPILLFT

SEQ ID NO: 130441 - protein, 59 aa, Setaria italica
  Transcript Sequence Number=SeqID_64467
  Subcellular localization annotation: CTP_CleavageSite=29; ConfidenceScore=5.06e-01
MVKFPQHYQTPPQFTQYSQPPHPATVNPSAAPPPPVPQQPEEPAPYGPPAQSYPPNAPP

SEQ ID NO: 130442 - protein, 74 aa, Setaria italica
  Transcript Sequence Number=SeqID_64468
  Homolog annotation: Hit_ID=B6SV28; Match level="QueryCoverage=62%, HitCoverage=8%, E-value=4e-17, Identity=86%"; Hit description =Proline-rich protein
  Pfam annotation: Domain name=UBA_3; Domain location=27-73; Score= -5.5; E_value=0.083; Accession=PF09288.2; Description=Fungal ubiquitin-associated domain
SSEAGCRHRSSACRAPVSSAPGGSSGTRVPIDDVIDKVATMGFSKEQVRATVRKLTENGQNVDLNMVLDKLMND

SEQ ID NO: 130443 - protein, 80 aa, Setaria italica
  Transcript Sequence Number=SeqID_64469
  Gene Ontology: Mol. function=peptidase activity; Cellular component =cytoplasm
  Homolog annotation: Hit_ID=B9T3Z6; Match level="QueryCoverage=81%, HitCoverage=5%, E-value=2e-27, Identity=81%"; Hit description =Protein binding protein, putative
LFYGKFRLLLVLLVLYALQWIIEINGQPTPDLETFIQVVKGLEDGEFVRVRTVHLNGKPRVLTLKQDLHYWPTWELSFEP

SEQ ID NO: 130444 - protein, 72 aa, Setaria italica
  misc_feature (40)..(40): Xaa can be any naturally occurring amino acid
  Transcript Sequence Number=SeqID_64470
LWLCLQVTKAAGEKWRSMSDEEKKKYGGGKKQEDKASKPXNKKKVILLGFCYFNGHLLVILRAVTSCTVRFP

SEQ ID NO: 130445 - protein, 67 aa, Setaria italica
  Transcript Sequence Number=SeqID_64471
LAKLQVPKAEDVQSENADAGQADSRQQPTPPQQTIQLQNQAPPLSQPPAPLPCFFPCLPNRSFLTFP

SEQ ID NO: 130446 - protein, 55 aa, Setaria italica
  Transcript Sequence Number=SeqID_64472
RTKNLLVDVSCACGLLFRCRFKASGAKRKKAGGPKRGLTPFFAFLAEFRPQYLEK

SEQ ID NO: 130447 - protein, 64 aa, Setaria italica
  misc_feature (31)..(31): Xaa can be any naturally occurring amino acid
  Transcript Sequence Number=SeqID_64473
WCDAFMQKESSIPVVQCSALLFHHILQKKKXSIVTEWEIECCRSFFSTLQKVNKTQGKNGYQTD

SEQ ID NO: 130448 - protein, 54 aa, Setaria italica
  Transcript Sequence Number=SeqID_64474
EKCNISAEPTTYTDCIRSTLSKCRSMILPGSHSYDASTAEASQVFSTNDGTSFP

SEQ ID NO: 130449 - protein, 54 aa, Setaria italica
  misc_feature (43)..(43): Xaa can be any naturally occurring amino acid
  Transcript Sequence Number=SeqID_64475
DSLLKPITKMVIGVAAMTVVAAVLFKEAKMPEWLASRLGTVNXPPWVLACMVIV

SEQ ID NO: 130450 - protein, 86 aa, Setaria italica
  misc_feature (77)..(77): Xaa can be any naturally occurring amino acid
  Transcript Sequence Number=SeqID_64476
  Gene Ontology: Mol. function=protein serine/threonine kinase activity; Biological process=protein amino acid phosphorylation
  Homolog annotation: Hit_ID=B9A1H1; Match level="QueryCoverage=74%, HitCoverage=6%, E-value=3e-19, Identity=68%"; Hit description =Putative LRR-kinase protein
FSFVLFFLVVIGEGSPISTVGDVYSLGISLLEMFTGRSPTDDMFRESVDLHKFSEAALPDRVLEIADPTIWLHNDAXDNITRSRVQ

SEQ ID NO: 130451 - protein, 75 aa, Setaria italica
  Transcript Sequence Number=SeqID_64477
  Gene Ontology: Mol. function=unfolded protein binding; Cellular component=cytoplasm; Biological process=cellular protein metabolic process
  Homolog annotation: Hit_ID=Q6YUK5; Match level="QueryCoverage=93%, HitCoverage=12%, E-value=4e-29, Identity=92%"; Hit description=T -complex protein 1, delta subunit
FVLRVFNPNSSIVTELRNRHARGEKNTGINVRKGQITNILEENVVQPLLVSTSAITLACECVRMILKIDDIVTVR

SEQ ID NO: 130452 - protein, 65 aa, Setaria italica
  Transcript Sequence Number=SeqID_64478
  Gene Ontology: Mol. function=unfolded protein binding; Cellular component=cytoplasm; Biological process=cellular protein metabolic process
  Homolog annotation: Hit_ID=A2YUU5; Match level="QueryCoverage=83%, HitCoverage=9%, E-value=2e-23, Identity=94%"; Hit description=T -complex protein 1, delta subunit
FGCAGGQEVAAARWAKELQGMESYCIKEYAEALEVIPYTLAENAGLNPISIVTELRNRHARGEKN

SEQ ID NO: 130453 - protein, 52 aa, Setaria italica
  Transcript Sequence Number=SeqID_64479
  Gene Ontology: Mol. function=unfolded protein binding; Cellular component=cytoplasm; Biological process=cellular protein metabolic process
  Homolog annotation: Hit_ID=A2YUU5; Match level="QueryCoverage=98%, HitCoverage=9%, E-value=7e-23, Identity=96%"; Hit description=T -complex protein 1, delta subunit
CFRCLVNKRFLIAGGGAPEIEMSMQLAAWAKELQGMESYCIKEYAEALEVIP

SEQ ID NO: 130454 - protein, 65 aa, Setaria italica
  misc_feature (11)..(11): Xaa can be any naturally occurring amino acid
  Transcript Sequence Number=SeqID_64480
  Gene Ontology: Mol. function=protein dimerization activity; Cellular component=nucleus
  Homolog annotation: Hit_ID=Q9AV47; Match level="QueryCoverage=86%, HitCoverage=8%, E-value=4e-15, Identity=66%"; Hit description=Auxin response factor 22
MVQLADMFGIXKAEIMSHLHYRDAAGAVKHTGEEPFSDFMKVARRLTITERGEGRLQKTYYNYVN

SEQ ID NO: 130455 - protein, 68 aa, Setaria italica
  Transcript Sequence Number=SeqID_64481
  Gene Ontology: Mol. function=carbon-nitrogen ligase activity, with glutamine as amido-N-donor
  Homolog annotation: Hit_ID=Q2QX53; Match level="QueryCoverage=97%, HitCoverage=10%, E-value=3e-28, Identity=89%"; Hit description =Amidase family protein, expressed
LPIAGNFLGLPAITVMVGHDKGGLPIGLQFIGRPWSEATLLHIAFAMQEACAKGHKKPAVFYDLLKKE

SEQ ID NO: 130456 - protein, 63 aa, Setaria italica
  misc_feature (36)..(36): Xaa can be any naturally occurring amino acid
  Transcript Sequence Number=SeqID_64482
IHSNSYESRNSKNDLQFGTDGVLYNFIHFSFNFQSXVPVYLYPVKEPCSVLVHELGSVTLWSC

SEQ ID NO: 130457 - protein, 50 aa, Setaria italica
  Transcript Sequence Number=SeqID_64483
TCYKVLCWKRCACYLAKGKIAKVPAKTEPKPIEGRSTINLNQYCIHKQNC

SEQ ID NO: 130458 - protein, 53 aa, Setaria italica
  Transcript Sequence Number=SeqID_64484
  Gene Ontology: Mol. function=actin binding; Cellular component =nucleus; Biological process=cytoskeleton organization and biogenesis
  Homolog annotation: Hit_ID=A0MLT6; Match level="QueryCoverage=84%, HitCoverage=10%, E-value=2e-11, Identity=68%"; Hit description=Myb -like transcription factor
  Pfam annotation: Domain name=Myb_DNA-binding; Domain location=9-53; Score=36.8; E_value=8.7e-08; Accession=PF00249.23; Description=Myb -like DNA-binding domain
SITNLQQAKTIWTENDDIELIKAHKIHGNRWSMIARQLPGRSENAVKNHWNAT

SEQ ID NO: 130459 - protein, 93 aa, Setaria italica
  Transcript Sequence Number=SeqID_64485
  Homolog annotation: Hit_ID=B6U114; Match level="QueryCoverage=56%, HitCoverage=7%, E-value=4e-17, Identity=75%"; Hit description=GTP -ase activating protein for Arf containing protein
HHAFRQSHLRILDRLNMSQDIFTALYPTSTPMMPGWQRAPQFGMGYSMQYPAGVFQGMQAYPQAAFPQPTYQQPVYPQHAYPQPQPNPNPTQP

SEQ ID NO: 130460 - protein, 88 aa, Setaria italica
  Transcript Sequence Number=SeqID_64486
  Gene Ontology: Mol. function=ARF GTPase activator activity; Biological process=regulation of ARF GTPase activity
  Homolog annotation: Hit_ID=B6U114; Match level="QueryCoverage=100%, HitCoverage=12%, E-value=3e-34, Identity=84%"; Hit description=GTP -ase activating protein for Arf containing protein
  Subcellular localization annotation: CTP_CleavageSite=65; ConfidenceScore=5.65e-01
MSNQGSSVQQSPLAAPTAGLPSQVTANPQGTSGIQGAASSNDSKSSGRKELPADIFTALYPTSTPMMPGWQRAPQFGMGYSMQYPAGV

SEQ ID NO: 130461 - protein, 49 aa, Setaria italica
  Transcript Sequence Number=SeqID_64487
VVEAGCGGGAGAVGSRSPPNGSYSDRRSYSGRSDDRNSRFSYSHFGHSQ

SEQ ID NO: 130462 - protein, 72 aa, Setaria italica
  Transcript Sequence Number=SeqID_64488
  Gene Ontology: Mol. function=ARF GTPase activator activity; Biological process=regulation of ARF GTPase activity
  Homolog annotation: Hit_ID=B6U114; Match level="QueryCoverage=83%, HitCoverage=8%, E-value=5e-20, Identity=83%"; Hit description=GTP -ase activating protein for Arf containing protein
NNKRHSQKEHYSLYQQHPVNAPAPQPVLDKGNSAPSVSGGDWASFDAFGQQQTPQTTSSANPLESALAQLSF

SEQ ID NO: 130463 - protein, 46 aa, Setaria italica
  Transcript Sequence Number=SeqID_64489
  Homolog annotation: Hit_ID=B6U114; Match level="QueryCoverage=100%, HitCoverage=6%, E-value=1e-11, Identity=76%"; Hit description=GTP -ase activating protein for Arf containing protein
KSALAQLSFSEAPSATNVSAFPASNDPTLKVNDGGHPSIVDQSHNL

SEQ ID NO: 130464 - protein, 77 aa, Setaria italica
  Transcript Sequence Number=SeqID_64490
IAFEALLLDGSSFLSLPFGVDLFGLRSYSPPLQVARIGRRGQLDEWPLLIGVSPAPTARRLGLPPSAVAGVQWHIEA

SEQ ID NO: 130465 - protein, 124 aa, Setaria italica
  Transcript Sequence Number=SeqID_64491
  Gene Ontology: Mol. function=threonine-type endopeptidase activity; Cellular component=proteasome core complex; Biological process =ubiquitin-dependent protein catabolic process
  Homolog annotation: Hit_ID=Q9LSU0; Match level="QueryCoverage=97%, HitCoverage=48%, E-value=5e-64, Identity=97%"; Hit description =Proteasome subunit alpha type-3
  Pfam annotation: Domain name=Proteasome; Domain location=2-123; Score= 74.8; E_value=3.1e-19; Accession=PF00227.18; Description=Proteasome A- type and B-type
GTVVGIKCKDGIVLGVEKLVTSKMMLEGSNQRIHSVHRHSGLSVAGLAADGRQIVSRAKSEAASYEKVYGEPISVKELADRVASYVHLCTLYWWLRPFGCGVILGGYDRDGPQLYMIEPSGSTT

SEQ ID NO: 130466 - protein, 47 aa, Setaria italica
  Transcript Sequence Number=SeqID_64492
  Gene Ontology: Mol. function=threonine-type endopeptidase activity; Cellular component=proteasome core complex; Biological process =ubiquitin-dependent protein catabolic process
  Homolog annotation: Hit_ID=Q9LSU0; Match level="QueryCoverage=76%, HitCoverage=14%, E-value=3e-11, Identity=94%"; Hit description =Proteasome subunit alpha type-3
  Pfam annotation: Domain name=Proteasome_A_N; Domain location=31-47; Score=9.4; E_value=2.5; Accession=PF10584.1; Description=Proteasome subunit A N-terminal signa
  Pfam annotation: Domain name=Proteasome_A_N; Domain location=8-30; Score=42.0; E_value=2.4e-09; Accession=PF10584.1; Description =Proteasome subunit A N-terminal signa
  Pfam module annotation: Pfam domain module=Proteasome_A_N::Proteasome_ A_N; Domain location=31-47::8-30
MSSIGTGYDLSVTTFSPDGRVFQVEYATKAVDLSVTTFSPDGRVFQV

SEQ ID NO: 130467 - protein, 51 aa, Setaria italica
  Transcript Sequence Number=SeqID_64493
  Gene Ontology: Mol. function=protein serine/threonine phosphatase activity; Cellular component=protein serine/threonine phosphatase complex; Biological process=protein amino acid dephosphorylation
  Homolog annotation: Hit_ID=B6UAA5; Match level="QueryCoverage=94%, HitCoverage=8%, E-value=3e-12, Identity=72%"; Hit description =Protein Kinase-associated protein phosphatase
PRKERNTDDGTSVDKVANRILSEARNLRTKDNTSVVFVDFDILRTDPCISK

SEQ ID NO: 130468 - protein, 83 aa, Setaria italica
  Transcript Sequence Number=SeqID_64494
  Gene Ontology: Mol. function=protein serine/threonine phosphatase activity; Cellular component=protein serine/threonine phosphatase complex; Biological process=protein amino acid dephosphorylation
  Homolog annotation: Hit_ID=B6UAA5; Match level="QueryCoverage=84%, HitCoverage=12%, E-value=1e-31, Identity=91%"; Hit description =Protein Kinase-associated protein phosphatase
VLCRGLNRWVIREFFQSLDLEVIAGPSHGISCSRQSSRPSMLPITLGRVPPSDIVLKDSEVSGKHARINWNAKTFKWELVDMG

SEQ ID NO: 130469 - protein, 141 aa, Setaria italica
  Transcript Sequence Number=SeqID_64495
FFLEPDSNLTSHQVPRSSDFLNQVRNIFDQMKNASMENTRINSLACSQQPIITSLRSANDILVHNTVNPLQSEKLEDNIEKAESIRSSICSPSNSQRPLNDLTSYVTGNTNIDTHILAMPVNSKSIYELKGFDKVTDFFHQ

SEQ ID NO: 130470 - protein, 63 aa, Setaria italica
  Transcript Sequence Number=SeqID_64496
  Gene Ontology: Mol. function=glycerol-3-phosphate dehydrogenase activity; Cellular component=glycerol-3-phosphate dehydrogenase complex; Biological process=glycerol-3-phosphate metabolic process
  Homolog annotation: Hit_ID=B9SUD3; Match level="QueryCoverage=87%, HitCoverage=8%, E-value=6e-19, Identity=76%"; Hit description =Glycerol-3-phosphate dehydrogenase, putative
YTTVPLRLITITGGKWTTYRSMAEDAVNAAVRSGNLKPANGCVTDNLHIVGGYGWDPASFTVH

SEQ ID NO: 130471 - protein, 102 aa, Setaria italica
  misc_feature (75)..(75): Xaa can be any naturally occurring amino acid
  Transcript Sequence Number=SeqID_64497
  Gene Ontology: Mol. function=DNA binding; Cellular component=nucleus
  Homolog annotation: Hit_ID=Q7XLC7; Match level="QueryCoverage=66%, HitCoverage=16%, E-value=2e-09, Identity=52%"; Hit description =OSJNBa0070C17.22 protein
  Subcellular localization annotation: CTP_CleavageSite=93; ConfidenceScore=5.17e-01
CKTKYPSVTQIQSYKGRQSVPNSSGDAACQNAPAGAPVLPQQIGQGGTSDNNMPGSALSSLFRHVWSDPCLVFAXFRTLMGDIPVLNDTLAYRSSAYDGNRS

SEQ ID NO: 130472 - protein, 64 aa, Setaria italica
  misc_feature (19)..(19): Xaa can be any naturally occurring amino acid
  Transcript Sequence Number=SeqID_64498
  Gene Ontology: Mol. function=DNA binding; Cellular component=nucleus
  Homolog annotation: Hit_ID=Q7XLC7; Match level="QueryCoverage=98%, HitCoverage=14%, E-value=3e-20, Identity=74%"; Hit description =OSJNBa0070C17.22 protein
SCEGSHSITQSEIVLAKPXAMADGKYEPAGEGLPDGWLKECRPRKNRNGSRIKGDMFYIDPVNG

SEQ ID NO: 130473 - protein, 78 aa, Setaria italica
  Transcript Sequence Number=SeqID_64499
  Subcellular localization annotation: CTP_CleavageSite=43; ConfidenceScore=5.34e-01
AGKRKLLPFLLLLPSAWRWSSGSNSYLAVSSSPSSLLLSAAISAEAELHGRRSQAVAPAESKIIRGGIVIDLVRALIL

SEQ ID NO: 130474 - protein, 29 aa, Setaria italica
  Transcript Sequence Number=SeqID_64500
VLHGTRAHSHGALKHYLEVTAWLKMNESN

SEQ ID NO: 130475 - protein, 67 aa, Setaria italica
  Transcript Sequence Number=SeqID_64501
VYKLQHQFYIQYDSLCSTSWERAQEKHALFFLSSSSDPTIIKSKSLSILYGTVSRGRLSMNTRFLRA

SEQ ID NO: 130476 - protein, 146 aa, Setaria italica
  misc_feature (79)..(79): Xaa can be any naturally occurring amino acid
  Transcript Sequence Number=SeqID_64502
  Gene Ontology: Cellular component=nucleus; Biological process =regulation of transcription, DNA-dependent
  Homolog annotation: Hit_ID=A5HJS4; Match level="QueryCoverage=99%, HitCoverage=25%, E-value=2e-66, Identity=84%"; Hit description =Scarecrow
  Pfam annotation: Domain name=GRAS; Domain location=1-146; Score= -147.3; E_value=0.00011; Accession=PF03514.6; Description=GRAS family transcription factor
LFDCAEAISEYSVEEAQSIITELRQKVAIQGDPSQRIAAYLVEGLAATIQSSGKGIYRALRCKEAPTLYQLSAMQILFXKICPCFRLGFMSANYAILEACKGEEVVHIIDFDINQGSQYINLIQFLRNNSNKPRLLRITGVDDPEF

SEQ ID NO: 130477 - protein, 44 aa, Setaria italica
  misc_feature (34)..(34): Xaa can be any naturally occurring amino acid
  Transcript Sequence Number=SeqID_64503
  Homolog annotation: Hit_ID=A5HJS4; Match level="QueryCoverage=100%, HitCoverage=7%, E-value=6e-15, Identity=77%"; Hit description =Scarecrow
NSNVIDGIKSLLKSYCDKYRFEKVHDGLHFGWGXKTLVVSSAWQ

SEQ ID NO: 130478 - protein, 128 aa, Setaria italica
  misc_feature (81)..(81): Xaa can be any naturally occurring amino acid
  Transcript Sequence Number=SeqID_64504
  Gene Ontology: Mol. function=transporter activity; Cellular component= intracellular; Biological process=transport
  Homolog annotation: Hit_ID=B9SSF9; Match level="QueryCoverage=85%, HitCoverage=38%, E-value=9e-28, Identity=51%"; Hit description=Sec14 cytosolic factor, putative
  Pfam annotation: Domain name=CRAL_TRIO; Domain location=1-112; Score=- 36.2; E_value=0.071; Accession=PF00650.12; Description=CRALTRIO domain
RISKLNFFLKILAREMFVEIQKIDSNYYPETLNQLYIINAGTGFRALWKVLKAFMEARTLAKIQVLGTNYLNTLLEAVDPXGCLLQYKGPWTDPQMVRASKAAFGKGQKSFNELTATIACESFTGCQE

SEQ ID NO: 130479 - protein, 94 aa, Setaria italica
  misc_feature (49)..(49): Xaa can be any naturally occurring amino acid
  Transcript Sequence Number=SeqID_64505
LNTLLEAVDPSNLPDFLGGTCTCPATGGCLLQDKGPWTDPQMVRASKVXAAFGKGQKSFNELTATIACESFTGCQEPSAKQVDSTFFVRKSNFF

SEQ ID NO: 130480 - protein, 79 aa, Setaria italica
  Transcript Sequence Number=SeqID_64506
  Gene Ontology: Mol. function=translation elongation factor activity; Cellular component=mitochondrion; Biological process=translational elongation
  Homolog annotation: Hit_ID=Q851Y8; Match level="QueryCoverage=83%, HitCoverage=14%, E-value=2e-29, Identity=98%"; Hit description =Elongation factor Tu
  Pfam annotation: Domain name=GTP_EFTU_D2; Domain location=14-76; Score=57.7; E_value=4.4e-14; Accession=PF03144.17; Description =Elongation factor Tu domain 2
LMPIEDVFSIQGRGTVVTGRVEQGTIKTGEDVEILGLTQSGPLKTTVTGVEMFKKILDHGEAGDNVGLLLRGLKLCACL

SEQ ID NO: 130481 - protein, 122 aa, Setaria italica
  Transcript Sequence Number=SeqID_64507
IIVFIVLGTCSLFLILLCSCCATCVLTKLTAVLYKHHLNKETKATVQNGGQASQPCLCAHAFQEKWKQVPLLSFSNPVGHISTFIRLLNRYGKQSDQLITLETTPAPTVLPPSLSANLCPGS

SEQ ID NO: 130482 - protein, 27 aa, Setaria italica
  Transcript Sequence Number=SeqID_64508
DRPSTRVRCAPGGPSSLGFLFGEEHEK

SEQ ID NO: 130483 - protein, 76 aa, Setaria italica
  Transcript Sequence Number=SeqID_64509
ANLIIHLLPTENKHLYMQHLLLQLDLGVSIYQKEPLHLYYYVYRSRCSITPATTPEIESQIEYRRINETLITGSTN

SEQ ID NO: 130484 - protein, 71 aa, Setaria italica
  Transcript Sequence Number=SeqID_64510
YPLKLNSTSGLTYTHILNEIVSPLRSLLITKTQVRGLDAFTCWDLRCLSITVAPNISNIMFINIAITTWNI

SEQ ID NO: 130485 - protein, 38 aa, Setaria italica
  Transcript Sequence Number=SeqID_64511
DYVPFVSFMFLSMLYNTTDKRYIVSHSILRNIKETKGT

SEQ ID NO: 130486 - protein, 83 aa, Setaria italica
  Transcript Sequence Number=SeqID_64512
  Homolog annotation: Hit_ID=Q7XGA9; Match level="QueryCoverage=84%, HitCoverage=9%, E-value=9e-27, Identity=78%"; Hit description=(RAP Annotation release2) Protein prenyltransferase domain containing protein
  Pfam annotation: Domain name=PPR; Domain location=28-62; Score=20.1; E_value=0.0089; Accession=PF01535.12; Description=PPR repeat
SLCDGDQVLKAVDVLNEMKGIGICPNEITYSVLFVACERNGEAQLGLDLFEQLKIDGIGINPTIIGSLTGKVISPPFSCYCIG

SEQ ID NO: 130487 - protein, 46 aa, Setaria italica
  Transcript Sequence Number=SeqID_64513
NVLRVCSGKEIKILHLYSNLFTDYYINVVICEKIIQKKEITVHQIL

SEQ ID NO: 130488 - protein, 56 aa, Setaria italica
  Transcript Sequence Number=SeqID_64514
  Homolog annotation: Hit_ID=Q7XGA9; Match level="QueryCoverage=76%, HitCoverage=5%, E-value=4e-13, Identity=79%"; Hit description=(RAP Annotation release2) Protein prenyltransferase domain containing protein
MLFINHVNCNLSGDGDQVLKAVDVLNEMKGIGICPNEITYSVLFVACERNGEAQLG

SEQ ID NO: 130489 - protein, 113 aa, Setaria italica
  misc_feature (51)..(51): Xaa can be any naturally occurring amino acid
  misc_feature (73)..(73): Xaa can be any naturally occurring amino acid
  Transcript Sequence Number=SeqID_64515
  Gene Ontology: Mol. function=oxidoreductase activity, acting on the CH-CH group of donors; Cellular component=glyoxysome; Biological process=metabolic process
  Homolog annotation: Hit_ID=B6TNB5; Match level="QueryCoverage=96%, HitCoverage=24%, E-value=5e-46, Identity=77%"; Hit description =Glutaryl-CoA dehydrogenase
SVFLRDKLTGINSFQDINKVLAMSRIMVAWQPIGISMGVFDICHRYLKERXQFGAPLAAFQLNQRRKLSTEMXLGNIQAMLLIGWRLCKLYESGKMTPGHASLGKAWTSRKAR

SEQ ID NO: 130490 - protein, 80 aa, Setaria italica
  Transcript Sequence Number=SeqID_64516
  Gene Ontology: Mol. function=oxidoreductase activity, acting on the CH-CH group of donors; Cellular component=glyoxysome; Biological process=metabolic process
  Homolog annotation: Hit_ID=B6TNB5; Match level="QueryCoverage=100%, HitCoverage=18%, E-value=4e-37, Identity=85%"; Hit description =Glutaryl-CoA dehydrogenase
FVPEEDRLTGINSFQDINKVLAMSRIMVAWQPIGISMGVFDICHRYLKERKQFGAPLAAFQLNQEKLVRMLGNIQAMLLI

SEQ ID NO: 130491 - protein, 54 aa, Setaria italica
  Transcript Sequence Number=SeqID_64517
  Gene Ontology: Mol. function=oxidoreductase activity, acting on the CH-CH group of donors; Cellular component=glyoxysome; Biological process=metabolic process
  Homolog annotation: Hit_ID=B6TNB5; Match level="QueryCoverage=85%, HitCoverage=10%, E-value=3e-18, Identity=93%"; Hit description =Glutaryl-CoA dehydrogenase
NGFIVKKGAPGLKATKIENKIGLRMVQNGDIVLNKVFVPEEDRLHGKHLVYILK

SEQ ID NO: 130492 - protein, 83 aa, Setaria italica
  Transcript Sequence Number=SeqID_64518
  Gene Ontology: Mol. function=oxidoreductase activity, acting on the CH-CH group of donors; Cellular component=glyoxysome; Biological process=metabolic process
  Homolog annotation: Hit_ID=B6TNB5; Match level="QueryCoverage=100%, HitCoverage=19%, E-value=1e-38, Identity=87%"; Hit description =Glutaryl-CoA dehydrogenase
  Pfam annotation: Domain name=Acyl-CoA_dh_M; Domain location=25-77; Score=85.6; E_value=1.7e-22; Accession=PF02770.11; Description=Acyl -CoA dehydrogenase, middle domain
VALCGSEAQKQKYLPSLAQFKTVGCWALTEPDYGSDASSLRTAATKVPGGWHLDGQKRWIGNSTFADVLIILARNADTNQLNG

SEQ ID NO: 130493 - protein, 40 aa, Setaria italica
  Transcript Sequence Number=SeqID_64519
  Pfam annotation: Domain name=XET_C; Domain location=1-40; Score=37.1; E_value=7e-08; Accession=PF06955.4; Description=Xyloglucan endo -transglycosylase (XET)
CRGLLLHGALGGEALQQRMRWVQRKYMIYNYCTDPKRYAQ

SEQ ID NO: 130494 - protein, 57 aa, Setaria italica
  Transcript Sequence Number=SeqID_64520
  Homolog annotation: Hit_ID=B6UAU8; Match level="QueryCoverage=98%, HitCoverage=11%, E-value=3e-16, Identity=76%"; Hit description=O -succinylhomoserine sulfhydrylase
PPEDRAKAGISPGLVRMSVGYNGTLEQRWAQFERALALMQPVPAPGLWWMVVPASRT

SEQ ID NO: 130495 - protein, 68 aa, Setaria italica
  Transcript Sequence Number=SeqID_64521
  Homolog annotation: Hit_ID=B6UAU8; Match level="QueryCoverage=61%, HitCoverage=8%, E-value=2e-17, Identity=97%"; Hit description=O -succinylhomoserine sulfhydrylase
RLSRTSTSSEMPPEDRAKAGISPGLVRMSVGYNGTLEQRWAQFERALALMQPVTGRPTRQPTKTRTTD

SEQ ID NO: 130496 - protein, 36 aa, Setaria italica
  Transcript Sequence Number=SeqID_64522
LMHHLQNTTQFGLMAVSLGYYETLMSCSGRRTILTN

SEQ ID NO: 130497 - protein, 121 aa, Setaria italica
  misc_feature (121)..(121): Xaa can be any naturally occurring amino acid
  Transcript Sequence Number=SeqID_64523
  Gene Ontology: Mol. function=DNA-directed RNA polymerase activity; Cellular component=alpha DNA polymerase:primase complex; Biological process=DNA replication, synthesis of RNA primer
  Homolog annotation: Hit_ID=B6T4S3; Match level="QueryCoverage=98%, HitCoverage=26%, E-value=2e-63, Identity=96%"; Hit description=DNA primase
EKHPGCDQSYVGRREFSFTLENDIYLRFQSFDSASELESSIKEKCPFKIDIGPVYSVDPAKRHAYAQSGNNVFVPVERELIFDIDISDYDDVRYCCSGADVCLDCWPLMTIAIKILDTSLX

SEQ ID NO: 130498 - protein, 50 aa, Setaria italica
  Transcript Sequence Number=SeqID_64524
SKHMNHLLKAPFCIHPKTGRVCVPKSSQLLGSIGTQTRPVFLYTYPRLDM

SEQ ID NO: 130499 - protein, 69 aa, Setaria italica
  Transcript Sequence Number=SeqID_64525
  Homolog annotation: Hit_ID=B6TID8; Match level="QueryCoverage=100%, HitCoverage=31%, E-value=1e-31, Identity=91%"; Hit description=VAMP protein SEC22
ALSQDCQAGYLILQVKIDGRVRWKVGSWISGHYHLFVTCPAFLVTNGGNGAPGASGFKFQTTTTCHVEV

SEQ ID NO: 130500 - protein, 32 aa, Setaria italica
  Transcript Sequence Number=SeqID_64526
LFGKYLNYRFAYNRPDKNVLKNYPDTRGKAKN

SEQ ID NO: 130501 - protein, 37 aa, Setaria italica
  Transcript Sequence Number=SeqID_64527
HERTEQTRALVILMLLVFALSSHPSNVTIRQYTSLHC

SEQ ID NO: 130502 - protein, 66 aa, Setaria italica
  misc_feature (46)..(46): Xaa can be any naturally occurring amino acid
  Transcript Sequence Number=SeqID_64528
MSGGPDMIASAVIQHVGSMLGDKAWERIELLWNFENDAKEMKDKMXNLQVALNNAEKRSQESEDVL

SEQ ID NO: 130503 - protein, 48 aa, Setaria italica
  Transcript Sequence Number=SeqID_64529
  Gene Ontology: Mol. function=protein serine/threonine kinase activity; Biological process=protein amino acid phosphorylation
  Homolog annotation: Hit_ID=Q84QD9; Match level="QueryCoverage=75%, HitCoverage=8%, E-value=1e-10, Identity=83%"; Hit description =Avr9/Cf-9 induced kinase 1
PLLPKWIHGCTEYSASLPWSARLKISIGAAKGLAFLHEAAKPVIYRDF

SEQ ID NO: 130504 - protein, 70 aa, Setaria italica; identical to SEQ ID NO: 109556
  Transcript Sequence Number=SeqID_64530

SEQ ID NO: 130505 - protein, 66 aa, Setaria italica
  Transcript Sequence Number=SeqID_64531
SYLMKGSALSITFIRYDYYKDQQGEYTDDGSIPFFEYLNSNIQMSIAAGMGPALENASWMIFFAHL

SEQ ID NO: 130506 - protein, 118 aa, Setaria italica
  Transcript Sequence Number=SeqID_64532
FFFFRCSYCLSSFGSFVPIRGGMYMRMHEHLKVLSVPQVYQIMCVMGRMKYKIDWRTLVRTNDLLAGIYNSKKPQYAKKNIQGQKAMEYSEGKLFTDYLRNRVAHRMDAYKLGVSYTA

SEQ ID NO: 130507 - protein, 111 aa, Setaria italica
  misc_feature (53)..(53): Xaa can be any naturally occurring amino acid
  Transcript Sequence Number=SeqID_64533
  Gene Ontology: Mol. function=binding
  Homolog annotation: Hit_ID=B9RQZ0; Match level="QueryCoverage=100%, HitCoverage=47%, E-value=1e-21, Identity=34%"; Hit description =Pentatricopeptide repeat-containing protein, putative
  Pfam annotation: Domain name=PPR; Domain location=74-108; Score=46.5; E_value=1.1e-10; Accession=PF01535.12; Description=PPR repeat
GVTPNEFTFVALVTVASNLASMFHGQQFHAQIIKAGADINPHVSNALIDMYAXKCGFIKEGWLLFESTCGKDVICWNSMISTYSQHGHAEEALRVFQLMREAGVEPNYVTF

SEQ ID NO: 130508 - protein, 46 aa, Setaria italica
  Transcript Sequence Number=SeqID_64534
MPLVIEGWSDPMKDANKLTPLLRNDDLIQVEKAHFSKMISQVWEQT

SEQ ID NO: 130509 - protein, 145 aa, Setaria italica
  misc_feature (34)..(34): Xaa can be any naturally occurring amino acid
  misc_feature (36)..(36): Xaa can be any naturally occurring amino acid
  misc_feature (49)..(49): Xaa can be any naturally occurring amino acid
  Transcript Sequence Number=SeqID_64535
  Homolog annotation: Hit_ID=B9SVY8; Match level="QueryCoverage=61%, HitCoverage=28%, E-value=9e-27, Identity=60%"; Hit description =Catalytic, putative
  Subcellular localization annotation: CTP_CleavageSite=45; ConfidenceScore=5.59e-01
IAIGWASSGAPLACAAVRLFRSVCGARSSPGTVXMXKARLTPFPREQAXTRICMVSSFATELLEIMSKEPSLHVLVIPGNPGIAAFYKDFVEALYENLDGQASITAVGHISHSQKDSEHGRLFSLHEQIDHKVDFIEQRRLTNNY

SEQ ID NO: 130510 - protein, 63 aa, Setaria italica
  Transcript Sequence Number=SeqID_64536
LLFFYYAVSVAEPIGALLLSEGISGQQNSGGSTSSRSDGSEYDIVPKSYSSTPRNFPSRSIHL

SEQ ID NO: 130511 - protein, 82 aa, Setaria italica
  Transcript Sequence Number=SeqID_64537
RCHSYFNSPDVSFQNHHAMLPMLRDSSVDEYMRGMCTKIVSIHSDVPAASVSLIFLRVSVPKIVQNRHLYFPFVFCIDYASI

SEQ ID NO: 130512 - protein, 58 aa, Setaria italica
  Transcript Sequence Number=SeqID_64538
  Homolog annotation: Hit_ID=B6SVJ2; Match level="QueryCoverage=96%, HitCoverage=13%, E-value=2e-22, Identity=92%"; Hit description =Mandelonitrile lyase
LSTRGWEYRINSEGLSYGSHGDSGVAANYGSSLSSNSKEASRSWERNELPQEHRYSTS

SEQ ID NO: 130513 - protein, 57 aa, Setaria italica
  Transcript Sequence Number=SeqID_64539
  Gene Ontology: Mol. function=RNA binding
  Homolog annotation: Hit_ID=B6TJ76; Match level="QueryCoverage=77%, HitCoverage=9%, E-value=6e-14, Identity=88%"; Hit description =Nucleic acid binding protein
  Pfam annotation: Domain name=KH_1; Domain location=12-57; Score=20.2; E_value=0.0045; Accession=PF00013.21; Description=KH domain
GTQASAAPGVCAARLLVPGAQAINLIGKQGATIKSIQESTGATIRVISVGKVFLADV

SEQ ID NO: 130514 - protein, 36 aa, Setaria italica
  Transcript Sequence Number=SeqID_64540
  Homolog annotation: Hit_ID=B6TJ76; Match level="QueryCoverage=97%, HitCoverage=7%, E-value=1e-09, Identity=88%"; Hit description =Nucleic acid binding protein
HALSTLRPSGMHGAGPLLTQMTQTMQIPLTYAEDII

SEQ ID NO: 130515 - protein, 125 aa, Setaria italica
  Transcript Sequence Number=SeqID_64541
  Gene Ontology: Mol. function=sucrose-phosphatase activity; Biological process=metabolic process
  Homolog annotation: Hit_ID=Q6YXW6; Match level="QueryCoverage=93%, HitCoverage=27%, E-value=3e-61, Identity=94%"; Hit description =Sucrose-phosphatase 2
  Pfam annotation: Domain name=S6PP; Domain location=1-112; Score=37.9; E_value=3.1e-12; Accession=PF05116.5; Description=Sucrose-6F -phosphate phosphohydrolase
TLGLSIVVKLIYSGGQDLDILPQGAGKGQALAYLLKKLSSCGKPPNNTLVCGDSGNDAELFSIPDVHGVMVNNAQEELLQWYTENAKDNPKIIHASERCAAGIIQAIGHFKLGPNVSPRDVDFPM

SEQ ID NO: 130516 - protein, 86 aa, Setaria italica
  Transcript Sequence Number=SeqID_64542
  Gene Ontology: Mol. function=sucrose-phosphatase activity; Biological process=metabolic process
  Homolog annotation: Hit_ID=B1PHV4; Match level="QueryCoverage=94%, HitCoverage=52%, E-value=2e-35, Identity=87%"; Hit description =Sucrose phosphatase (Fragment)
  Pfam annotation: Domain name=S6PP_C; Domain location=2-64; Score =32.9; E_value=3.5e-11; Accession=PF08472.2; Description=Sucrose-6 -phosphate phosphohydrolase C-termi
TIPIRIDNSESCYGDKQGKKYRAWVDRLFITQTGSDSWMVRFDLWESEGDVRVCSLSSLALSLKTESPEGLVVTHIHKTWLNGYST

SEQ ID NO: 130517 - protein, 78 aa, Setaria italica
  Transcript Sequence Number=SeqID_64543
  Subcellular localization annotation: CTP_CleavageSite=63; ConfidenceScore=5.34e-01
TATATATATQPRLLLRPGSAALSSSLPPVHAHPALVGVVADGRRREPSSLQVTKMDKLNGSARLMIVSDLDHTMVDHH

SEQ ID NO: 130518 - protein, 59 aa, Setaria italica
  Transcript Sequence Number=SeqID_64544
  Gene Ontology: Mol. function=sucrose-phosphatase activity; Biological process=metabolic process
  Homolog annotation: Hit_ID=B1PHV4; Match level="QueryCoverage=100%, HitCoverage=38%, E-value=4e-26, Identity=94%"; Hit description =Sucrose phosphatase (Fragment)
  Pfam annotation: Domain name=S6PP_C; Domain location=1-59; Score =31.0; E_value=5.2e-11; Accession=PF08472.2; Description=Sucrose-6 -phosphate phosphohydrolase C-termi
CSLHASIDAFGSCYGDKQGKKYRAWVDRLFITQTGSDSWMVRFDLWESEGDVRVCSLSS

SEQ ID NO: 130519 - protein, 86 aa, Setaria italica
  misc_feature (52)..(52): Xaa can be any naturally occurring amino acid
  Transcript Sequence Number=SeqID_64545
  Gene Ontology: Mol. function=nucleic acid binding
  Homolog annotation: Hit_ID=Q7Y001; Match level="QueryCoverage=84%, HitCoverage=6%, E-value=1e-19, Identity=57%"; Hit description =Protein argonaute 12
LVCIGGSIKHWACLTFASRINPNEIGRFCGDLVMMCNSIGMQVNTQPCVQIXKARQDDVEAAIRDIHGHSSQVLAQKRSKLGNILS

SEQ ID NO: 130520 - protein, 127 aa, Setaria italica
  Transcript Sequence Number=SeqID_64546
  Gene Ontology: Mol. function=nucleic acid binding; Cellular component= cytoplasm; Biological process=multicellular organismal development
  Homolog annotation: Hit_ID=Q10F39; Match level="QueryCoverage=100%, HitCoverage=14%, E-value=7e-39, Identity=58%"; Hit description =Protein argonaute 11
DARVLPAPKLNTMTLVKEKGYCNPSVGQWNMINKRMVDGGSIKHWACLTFASRINPNEIGRVFVGDLVMMCNSIGMQVNTQPCVQIKKARQDDVEAAIRDIHGHSSQVLAQKGLTGQHLELLIIILP

SEQ ID NO: 130521 - protein, 82 aa, Setaria italica
  Transcript Sequence Number=SeqID_64547
  Gene Ontology: Mol. function=translation initiation factor activity; Biological process=RNA metabolic process
  Homolog annotation: Hit_ID=Q03387; Match level="QueryCoverage=100%, HitCoverage=10%, E-value=2e-32, Identity=79%"; Hit description =Eukaryotic initiation factor iso-4F subunit p82-34
  Pfam annotation: Domain name=MA3; Domain location=1-82; Score=28.5; E_ value=2.8e-05; Accession=PF02847.9; Description=MA3 domain
LQKKAVSLLEEYFHVCILDEAQQCIEELKSPDYYPEVVKEAINLALDKGANSIDPLVKLLEHLHSKNIFKTVDLETGCLLYG

SEQ ID NO: 130522 - protein, 70 aa, Setaria italica
  misc_feature (33)..(33): Xaa can be any naturally occurring amino acid
  Transcript Sequence Number=SeqID_64548
  Gene Ontology: Mol. function=protein tyrosine/serine/threonine phosphatase activity; Cellular component=intracellular; Biological process=protein amino acid dephosphorylation
  Homolog annotation: Hit_ID=B9RA78; Match level="QueryCoverage=100%, HitCoverage=7%, E-value=4e-14, Identity=52%"; Hit description =Phosphoprotein phosphatase, putative
SMDWQHKRPEMKVCPICSKNVGLSTSSLKLHLXKAHKRLSAGSVDSAMTMEIQKSIESLRISRGGSLSPS

SEQ ID NO: 130523 - protein, 73 aa, Setaria italica
  Transcript Sequence Number=SeqID_64549
  Subcellular localization annotation: CTP_CleavageSite=54; ConfidenceScore=5.33e-01
PLQAGVRMFAYFWIPHRQSNIYITFTSCKTSWAAVVAVPPRVHRATPGMLTQCRCRTSSPVSVFLSLKTTNST

SEQ ID NO: 130524 - protein, 45 aa, Setaria italica
  Transcript Sequence Number=SeqID_64550
ISQDIVLKLRNTETGELVLHLHWVNIPAEGSPRDAGDDGCPAGFT

SEQ ID NO: 130525 - protein, 55 aa, Setaria italica
  Transcript Sequence Number=SeqID_64551
  Homolog annotation: Hit_ID=B6SZL6; Match level="QueryCoverage=76%, HitCoverage=25%, E-value=5e-15, Identity=90%"; Hit description =GTPase activating protein
TLLLLALRLTSQELFDHDTFTKDDSMGDAEFCILDFVEIAKRDLSDVPDGTVMKT

SEQ ID NO: 130526 - protein, 73 aa, Setaria italica
  misc_feature (14)..(14): Xaa can be any naturally occurring amino acid
  Transcript Sequence Number=SeqID_64552
  Homolog annotation: Hit_ID=B6SZL6; Match level="QueryCoverage=100%, HitCoverage=63%, E-value=3e-25, Identity=60%"; Hit description =GTPase activating protein
LKVKVVRGVNLAIXDPLTHSSDPYVVLRLGQQELFDHDTFTKDDSMGDAEFCILDFVEIAKRDLSDVPDGTVM

SEQ ID NO: 130527 - protein, 121 aa, Setaria italica
  misc_feature (106)..(106): Xaa can be any naturally occurring amino acid
  Transcript Sequence Number=SeqID_64553
  Gene Ontology: Mol. function=catalytic activity; Cellular component =nucleus; Biological process=ribosome biogenesis
  Homolog annotation: Hit_ID=Q8H7V4; Match level="QueryCoverage=95%, HitCoverage=7%, E-value=7e-41, Identity=63%"; Hit description =Putative polyprotein from transposon TNT
HGAFVNQELLDLDSMGYPKLPSSMLGDGMILVNTFEETFGDMHGEGVWRKFSKRASNINRNIVALASYDGEKRFFACTGFSIEWNGSTIILTSASLVRNSGDENKXVENLRIEVLLENQCI

SEQ ID NO: 130528 - protein, 127 aa, Setaria italica
  misc_feature (89)..(89): Xaa can be any naturally occurring amino acid
  Transcript Sequence Number=SeqID_64554
  Subcellular localization annotation: CTP_CleavageSite=16; ConfidenceScore=5.34e-01
SNSACQESSPGRLPKRGKTKGKTTPANNSTHNSSTPLLVNFILKLNIRRLKKKVEYTCLVFYGNFLKIPIHLTPVACSINQKQIGIRTXIQFFFVRGSFIIHTIVPAKRKIIPTRNKKDKPVYLSCE

SEQ ID NO: 130529 - protein, 102 aa, Setaria italica
  misc_feature (31)..(31): Xaa can be any naturally occurring amino acid
  misc_feature (54)..(54): Xaa can be any naturally occurring amino acid
  misc_feature (67)..(67): Xaa can be any naturally occurring amino acid
  Transcript Sequence Number=SeqID_64555
  Gene Ontology: Mol. function=RNA-directed DNA polymerase activity; Biological process=RNA-dependent DNA replication
  Homolog annotation: Hit_ID=Q9FW98; Match level="QueryCoverage=97%, HitCoverage=7%, E-value=3e-24, Identity=53%"; Hit description =Putative non-LTR retroelement reverse transcriptase
KRINSWTDRPLSRAGKDVLLKAVVKRFPTYXCFQILTAICERTRKLIAEAWWGXEKIERKRYISVHXEWLSSPKYLGGLGFRDLQLFNQAMLGHQGWRLNQV

SEQ ID NO: 130530 - protein, 66 aa, Setaria italica
  misc_feature (11)..(11): Xaa can be any naturally occurring amino acid
  misc_feature (48)..(48): Xaa can be any naturally occurring amino acid
  Transcript Sequence Number=SeqID_64556
  Gene Ontology: Mol. function=RNA-directed DNA polymerase activity; Biological process=RNA-dependent DNA replication
  Homolog annotation: Hit_ID=Q9FW98; Match level="QueryCoverage=100%, HitCoverage=4%, E-value=5e-12, Identity=53%"; Hit description =Putative non-LTR retroelement reverse transcriptase
LKAVVQAISNXMSCFQILTAICERTRKLIAEAWWGCEKSKEKDTLAFXEWLSSPKYLGGLGFRVFS

SEQ ID NO: 130531 - protein, 70 aa, Setaria italica
  Transcript Sequence Number=SeqID_64557
NKRKKIKKDEVLRITTTEGGSYQQRILVEYLKRYRLEQRKLSKCFKDQQFKSADPLYTYMFLLFDHSLMG

SEQ ID NO: 130532 - protein, 78 aa, Setaria italica
  Transcript Sequence Number=SeqID_64558
IRVKLAACNTYLNHKTNAKVSSLHVKTQSVLLCEHLCMMETWFLHQSCEQAGQQCSLHFQPALHNLSEKAIKRSQLQS

SEQ ID NO: 130533 - protein, 77 aa, Setaria italica
  misc_feature (41)..(41): Xaa can be any naturally occurring amino acid
  misc_feature (64)..(64): Xaa can be any naturally occurring amino acid
  Transcript Sequence Number=SeqID_64559
  Gene Ontology: Cellular component=chloroplast envelope
MLREANHRELDQIVVENVLAFDAGFWVRLAARIDLCKSDDXKKDYEELAENVMNIVDRLVHKTXQKIEQSTDVTRKD

SEQ ID NO: 130534 - protein, 45 aa, Setaria italica
  Transcript Sequence Number=SeqID_64560
NGWGLCLSVSTPPSLGHEALCPSLTPKGTIVDPVHQSKCSPPYPT

SEQ ID NO: 130535 - protein, 69 aa, Setaria italica
  Transcript Sequence Number=SeqID_64561
  Subcellular localization annotation: CTP_CleavageSite=37; ConfidenceScore=5.51e-01
SRSIVLIGLLLLVSNTANSNSGCSSLPADSLTLCGVRCSRATLGLTMVSLPTVDCLVLVSNMLSPCVHL

SEQ ID NO: 130536 - protein, 49 aa, Setaria italica
  Transcript Sequence Number=SeqID_64562
VMKSFSQQAGIQGGLGAAFPSHATFPHYAIPQGLPYHVYGYSTLITTKN

SEQ ID NO: 130537 - protein, 94 aa, Setaria italica
  Transcript Sequence Number=SeqID_64563
  Gene Ontology: Mol. function=aspartyl esterase activity; Cellular component=cell wall; Biological process=cell wall organization and biogenesis
  Pfam annotation: Domain name=Pectinesterase; Domain location=2-94; Score=-152.6; E_value=5e-10; Accession=PF01095.11; Description =Pectinesterase
RTVITGNHCNRTGHDVLQSATLSVNGTGFMARDLTIKNTAGVDAGPAVALMNLADSSICYKCEIDGYQDTLNADCNRQFYHTCNISGTVDFVFG

SEQ ID NO: 130538 - protein, 111 aa, Setaria italica
  misc_feature (26)..(26): Xaa can be any naturally occurring amino acid
  misc_feature (39)..(39): Xaa can be any naturally occurring amino acid
  misc_feature (96)..(96): Xaa can be any naturally occurring amino acid
  Transcript Sequence Number=SeqID_64564
  Gene Ontology: Mol. function=aspartyl esterase activity; Cellular component=cell wall; Biological process=cell wall modification
  Pfam annotation: Domain name=Pectinesterase; Domain location=1-110; Score=-99.5; E_value=4.7e-14; Accession=PF01095.11; Description =Pectinesterase
TVITGNHCNRTGHDVLQSATLSVNGXGFMARDLTIKNTXGVDAGPAVALMNLADSSICYKCEIDGYQDTLNADCNRQFYHTCNISGTVDFVFGYAXAVFQQCNLLVRRPVP

SEQ ID NO: 130539 - protein, 72 aa, Setaria italica
  misc_feature (58)..(58): Xaa can be any naturally occurring amino acid
  misc_feature (62)..(62): Xaa can be any naturally occurring amino acid
  Transcript Sequence Number=SeqID_64565
  Gene Ontology: Mol. function=diacylglycerol kinase activity; Biological process=activation of protein kinase C activity
  Homolog annotation: Hit_ID=B6TDW8; Match level="QueryCoverage=100%, HitCoverage=20%, E-value=2e-26, Identity=81%"; Hit description=D -erythro-sphingosine kinase/ diacylglycerol kinase
DKIWIFFAGVKSKLDIGVMEGPNREPHFFVNVADTHLSAKAGYFASMYKRFGNLCYVXGALXVLLGHNNQDM

SEQ ID NO: 130540 - protein, 120 aa, Setaria italica
  Transcript Sequence Number=SeqID_64566
SFICSGEFGAHFSKLEQGGLFNGSWRSEMDLLLIDVATKACYKAGMYEQSPPWTEDPSISDFQLAAFRALLASFLSTHHERPLYLEEGLELFNRGMLLNYHGSQTRFSQGNIHMENCSPS

SEQ ID NO: 130541 - protein, 39 aa, Setaria italica
  Transcript Sequence Number=SeqID_64567
DASTMCQNCCTGDAGINTEFESTLRWTPSTACNYYLGFT

SEQ ID NO: 130542 - protein, 134 aa, Setaria italica
  misc_feature (38)..(38): Xaa can be any naturally occurring amino acid
  Transcript Sequence Number=SeqID_64568
  Gene Ontology: Mol. function=inorganic diphosphatase activity; Cellular component=cytoplasm; Biological process=phosphate metabolic process
  Homolog annotation: Hit_ID=O48556; Match level="QueryCoverage=78%, HitCoverage=48%, E-value=6e-53, Identity=94%"; Hit description =Soluble inorganic pyrophosphatase
  Pfam annotation: Domain name=Pyrophosphatase; Domain location=4-132; Score=69.5; E_value=1.2e-17; Accession=PF00719.11; Description =Inorganic pyrophosphatase
KTRTDKVDRVLYSSVVYPHNYGFIPRTLCEDNDPMDVXLVLMQEPVIPGSFLRARAIGLMPMIDQGEKDDKIIAVCADDPEYRHYNDISELSPHRLQEIKRFFEDCILYNSSAVLLLHALAYFARSHSQVQASL

SEQ ID NO: 130543 - protein, 95 aa, Setaria italica
  Transcript Sequence Number=SeqID_64569
  Gene Ontology: Mol. function=inorganic diphosphatase activity; Cellular component=cytoplasm; Biological process=phosphate metabolic process
  Homolog annotation: Hit_ID=O48556; Match level="QueryCoverage=95%, HitCoverage=42%, E-value=4e-48, Identity=97%"; Hit description =Soluble inorganic pyrophosphatase
  Pfam annotation: Domain name=Pyrophosphatase; Domain location=2-93; Score=17.6; E_value=2.6e-09; Accession=PF00719.11; Description =Inorganic pyrophosphatase
IGFIPRTLCEDNDPMDVLVLMQEPVIPGSFLRARAIGLMPMIDQGEKDDKIIAVCADDPEYRHYNDISELSPHRLQEIKRFFEDYKKNENKEGCC

SEQ ID NO: 130544 - protein, 42 aa, Setaria italica
  Transcript Sequence Number=SeqID_64570
ATDLLDREERILSLSLGAPAVFNVVVEITKGSKVKYELDKKT

SEQ ID NO: 130545 - protein, 53 aa, Setaria italica
  Transcript Sequence Number=SeqID_64571
  Gene Ontology: Cellular component=integral to membrane
CFLQLRNFNINGSTRKRVMFYTMAEYLAFMAASALQVVYIRRLFSKNVAYNRV

SEQ ID NO: 130546 - protein, 42 aa, Setaria italica
  Transcript Sequence Number=SeqID_64572
  Gene Ontology: Cellular component=integral to membrane
MMLYIDFSPLQMQVTSPGGNTVHTLKGKSGEKFEFKAPRGGM

SEQ ID NO: 130547 - protein, 83 aa, Setaria italica
  Transcript Sequence Number=SeqID_64573
KAAKFMEHNIIRAIITNLTTLSNAKVILLSITTNLQVHNSSTFLSFDSTHLFNLQAIYMQHHQKYKTKRYSKAEHLCNTISEL

SEQ ID NO: 130548 - protein, 33 aa, Setaria italica
  Transcript Sequence Number=SeqID_64574
RAAQDVGAVQVNGENPRDFLAGLATNIGLDKSH

SEQ ID NO: 130549 - protein, 95 aa, Setaria italica
  misc_feature (76)..(76): Xaa can be any naturally occurring amino acid
  misc_feature (85)..(85): Xaa can be any naturally occurring amino acid
  misc_feature (90)..(90): Xaa can be any naturally occurring amino acid
  Transcript Sequence Number=SeqID_64575
SGKYFITVKNVTTVSLLNFVNLLFVPAIIDNRITGRDYRYDDAIQLRQLCKISGIKVSFDTENARNSFYRAAVNFXLDDCSRAAXQDVGXVQVMV

SEQ ID NO: 130550 - protein, 66 aa, Setaria italica
  Transcript Sequence Number=SeqID_64576
RDYRYDDATLVRASVAARTRTCFLQCWALEIQGKRQEALDELLKICGIHNMFPPEDNSFRVQQPPF

SEQ ID NO: 130551 - protein, 83 aa, Setaria italica
  Transcript Sequence Number=SeqID_64577
  Gene Ontology: Mol. function=sequence-specific DNA binding; Cellular component=nucleus; Biological process=regulation of transcription, DNA-dependent
  Homolog annotation: Hit_ID=Q1G158; Match level="QueryCoverage=89%, HitCoverage=42%, E-value=1e-11, Identity=49%"; Hit description=MADS -box transcription factor TaAGL12 (Fragment)
RYWDLANTINDLNIEARDSRVDRNIQEQQSSVGSLPDQLNIVAQRAMEASVDELSMAEIRSLEETVTDALAAIRVILHCTHFF

SEQ ID NO: 130552 - protein, 90 aa, Setaria italica
  Transcript Sequence Number=SeqID_64578
GTKRCTIVTQVKLMHAVVLLEEMCAVQYDPDSCQSVGYCFLQASYLRPCSARPHLLPWPVEQRYSADQVKSQQMTAAPEHPGGDAQKIQK

SEQ ID NO: 130553 - protein, 40 aa, Setaria italica
  Transcript Sequence Number=SeqID_64579
ASVDELSMAEIRSLEETVTDALAAIRNKLRAKVVGLLPQA

SEQ ID NO: 130554 - protein, 62 aa, Setaria italica
  Transcript Sequence Number=SeqID_64580
  Gene Ontology: Mol. function=pseudouridine synthase activity; Biological process=pseudouridine synthesis
  Homolog annotation: Hit_ID=Q10LQ9; Match level="QueryCoverage=91%, HitCoverage=15%, E-value=1e-22, Identity=85%"; Hit description=TRNA pseudouridine synthase family protein, expressed
SPCLLKRVQIQARWLYEPDESDRLNASHFRDIITCSCGELQSSSGIQFVELTICGVSFMLHQ

SEQ ID NO: 130555 - protein, 52 aa, Setaria italica
  Transcript Sequence Number=SeqID_64581
SRELAHEQAQYHISDVEVGRLQTLKVVPTKSLLSAAGPDNRLRFLNGKICAK

SEQ ID NO: 130556 - protein, 92 aa, Setaria italica
  Transcript Sequence Number=SeqID_64582
KKMESQRHAKDVGHSESPPARRRSGSSEKHDPSRKRPSSREMSPHAQNDGYEDFRLEEIPSHLEMVCPFLVLQTYQGIPSHLGMVCPFPVLA

SEQ ID NO: 130557 - protein, 74 aa, Setaria italica
  Transcript Sequence Number=SeqID_64583
  Subcellular localization annotation: CTP_CleavageSite=59; ConfidenceScore=5.41e-01
APRWRIHHAGAFDFSTRMILPFHSVSSHARIAASASSSFSKDKNPKPRESPVRLSRTTRSNLVNDVPKFRQKFT

SEQ ID NO: 130558 - protein, 71 aa, Setaria italica
  misc_feature (22)..(22): Xaa can be any naturally occurring amino acid
  Transcript Sequence Number=SeqID_64584
MHHYHCFQEPLKAGSDVQNDAXEQNVHNSNSKEQATSVDCDVHQNTEVIGAVLPPELPESSGNDASNFQPE

SEQ ID NO: 130559 - protein, 66 aa, Setaria italica
  Transcript Sequence Number=SeqID_64585
VDLLLWLTIHCSLLLQIRLQLETLLAEKARLAHENSVYARENRFLREIVEYHQLTMQDVIYVDEGI

SEQ ID NO: 130560 - protein, 56 aa, Setaria italica
  Transcript Sequence Number=SeqID_64586
SFSKVPSAGFLSEQLSNRASPLPPTIAEEQRGGWWWDDTFYTAIVLVIKYPRLSLV

SEQ ID NO: 130561 - protein, 117 aa, Setaria italica
  misc_feature (10)..(10): Xaa can be any naturally occurring amino acid
  Transcript Sequence Number=SeqID_64587
  Subcellular localization annotation: CTP_CleavageSite=39; ConfidenceScore=5.13e-01
AIRVLMFMCXGILNDHPMHVQYASAFSNQSSDVHVLGLRPSHARSVCLSISAIRVLMFMCFSDMKHEQNVRENLSLRQLRYKRSILDYFVVGQALLLSKEKITGVKKTEVNHPRSSL

SEQ ID NO: 130562 - protein, 54 aa, Setaria italica
  Transcript Sequence Number=SeqID_64588
  Gene Ontology: Mol. function=racemase and epimerase activity, acting on carbohydrates and derivatives; Biological process=cellular metabolic process
  Homolog annotation: Hit_ID=Q6B6L9; Match level="QueryCoverage=66%, HitCoverage=9%, E-value=7e-14, Identity=94%"; Hit description=UDP-D -glucuronate decarboxylase (Fragment)
VAEVVHDVVEPILLEVDQIYHLACPASPVHYKYNPVKTIISFRHEFLTLRSFRS

SEQ ID NO: 130563 - protein, 38 aa, Setaria italica
  misc_feature (37)..(37): Xaa can be any naturally occurring amino acid
  Transcript Sequence Number=SeqID_64589
  Gene Ontology: Mol. function=racemase and epimerase activity, acting on carbohydrates and derivatives; Biological process=carbohydrate metabolic process
  Homolog annotation: Hit_ID=Q6B6L9; Match level="QueryCoverage=89%, HitCoverage=8%, E-value=3e-14, Identity=97%"; Hit description=UDP-D -glucuronate decarboxylase (Fragment)
MGQCDPLQHPQVETYWGNVNPIGVRSCYDEGKRTAEXL

SEQ ID NO: 130564 - protein, 57 aa, Setaria italica
  Transcript Sequence Number=SeqID_64590
  Gene Ontology: Mol. function=racemase and epimerase activity, acting on carbohydrates and derivatives; Biological process=carbohydrate metabolic process
  Homolog annotation: Hit_ID=Q6B6L9; Match level="QueryCoverage=92%, HitCoverage=13%, E-value=7e-24, Identity=96%"; Hit description=UDP-D- glucuronate decarboxylase (Fragment)
EPLTVYGDGKQTRSFQYVSDLVEGLMKLMEGEHIGPFNLGNPGEFTMLELAKVGSGQ

SEQ ID NO: 130565 - protein, 76 aa, Setaria italica
  Transcript Sequence Number=SeqID_64591
FSYYIISGVSCCNKPEMMFFLYDLLSKFFNEACVRLRSFGKSSQGIRLQKLLVIYRFFRPPPPPRSYLDDFPYLLS

SEQ ID NO: 130566 - protein, 52 aa, Setaria italica
  Transcript Sequence Number=SeqID_64592
IWMNREVINHKRQGRTSIQEGKCSLSRINSCRKILEMTALVFPDIYVQKCFI

SEQ ID NO: 130567 - protein, 85 aa, Setaria italica
  Transcript Sequence Number=SeqID_64593
  Gene Ontology: Mol. function=zinc ion binding; Cellular component =intracellular; Biological process=regulation of transcription, DNA -dependent
  Homolog annotation: Hit_ID=Q0ZQJ9; Match level="QueryCoverage=92%, HitCoverage=13%, E-value=2e-25, Identity=70%"; Hit description=EMF2
TYLYNDVPPSSLPHIIRLRVGNVLFKYGDNICKTEVTEDFCCSFCLVKCGSFTGLQCHLLSSHDQFNFGFLISKKEQVVNVSLKH

SEQ ID NO: 130568 - protein, 64 aa, Setaria italica
  misc_feature (32)..(32): Xaa can be any naturally occurring amino acid
  Transcript Sequence Number=SeqID_64594
  Gene Ontology: Mol. function=starch synthase activity; Cellular component=chloroplast; Biological process=glucan biosynthetic process
  Homolog annotation: Hit_ID=B2Z4A6; Match level="QueryCoverage=100%, HitCoverage=7%, E-value=9e-30, Identity=96%"; Hit description=Starch synthase IV
  Pfam annotation: Domain name=Glyco_transf_5; Domain location=1-64; Score=-126.4; E_value=0.024; Accession=PF08323.3; Description=Starch synthase catalytic domain
HIVHIAAEMAPVAKVGGLADVISGLGKALQKXGHLVEIILPKYDCMQHNQINNLKVLDVVVQSY

SEQ ID NO: 130569 - protein, 75 aa, Setaria italica
  Transcript Sequence Number=SeqID_64595
VVVVEQQIQALCEELNRRFDQLAVMVKNYIPAAGTQENSSKEEEDRQQCRQANLEAKLQNKKHAAAHSRPLSDRS

SEQ ID NO: 130570 - protein, 82 aa, Setaria italica
  misc_feature (29)..(29): Xaa can be any naturally occurring amino acid
  misc_feature (42)..(42): Xaa can be any naturally occurring amino acid
  Transcript Sequence Number=SeqID_64596
VVVVEQQIQALCEELNRRFDQLAVMVKNXIPAAGTQENSSKXEEDRQQCRQANLEAKLKQKNMPLHIQGLLVIEVEVEDLHE

SEQ ID NO: 130571 - protein, 74 aa, Setaria italica
  misc_feature (65)..(65): Xaa can be any naturally occurring amino acid
  Transcript Sequence Number=SeqID_64597
YCFVGACTNLAITLYLFQIILSQEKMIQKLNDFIQNLQQQLVQCRENNKTIHSSGTSLTSYISEXIQRHQMMDD

SEQ ID NO: 130572 - protein, 74 aa, Setaria italica
  Transcript Sequence Number=SeqID_64598
LVFLLVILIVTSQFEWKQQLVNELESTTRNHQHISSREELVKDKDRALQIGEDSGLACYSLHLSPFHSMLQPFY

SEQ ID NO: 130573 - protein, 30 aa, Setaria italica
  misc_feature (4)..(4): Xaa can be any naturally occurring amino acid
  Transcript Sequence Number=SeqID_64599
VVSXPHASETVDGANGTGVSRSNLPMASPR

SEQ ID NO: 130574 - protein, 114 aa, Setaria italica
  misc_feature (40)..(40): Xaa can be any naturally occurring amino acid
  Transcript Sequence Number=SeqID_64600
  Gene Ontology: Mol. function=metal ion binding
  Homolog annotation: Hit_ID=B6TV66; Match level="QueryCoverage=96%, HitCoverage=19%, E-value=4e-20, Identity=48%"; Hit description =Protein binding protein
SGLFFAIWFVVGNVWIFGSRSSAHDAPNLYRYVLLVFNSXYLPHIRRLYSSSLFVTIFRICIVFLAFGFIGYALPFILCTMICCCLPCIISILGVHEDLDLNRGATTDTINALV

SEQ ID NO: 130575 - protein, 85 aa, Setaria italica
  Transcript Sequence Number=SeqID_64601
CRNVRMWQQAPVRDEEFGRGGGGKGRNLIIRMKCRGLSQLNCSRCAYKFQLCVYPIFVFYDGKCSLKLCRRCTSTQYYAIRQCCT

SEQ ID NO: 130576 - protein, 73 aa, Setaria italica
  Transcript Sequence Number=SeqID_64602
  Subcellular localization annotation: CTP_CleavageSite=35; ConfidenceScore=5.30e-01
ATISTASLFERTSQTPSVANIINSSFSERRRYDIVASAPSRATAARALVDCAVRSWRLKFPTSKSDDCAVVCL

SEQ ID NO: 130577 - protein, 86 aa, Setaria italica
  Transcript Sequence Number=SeqID_64603
  Gene Ontology: Mol. function=hydrolase activity, acting on ester bonds; Biological process=lipid metabolic process
  Homolog annotation: Hit_ID=Q5VP32; Match level="QueryCoverage=76%, HitCoverage=17%, E-value=3e-20, Identity=71%"; Hit description =Lipase-like
LLVACCGGEGTHGVSPAAACGYGEYKVCDNPDKYGSWDGFHPSEAAYKAIAMGLLRGTYTQPSIASTTSSCPKLTELVSSVEYNVN

SEQ ID NO: 130578 - protein, 51 aa, Setaria italica
  Transcript Sequence Number=SeqID_64604
LIWFCISLFFLQSPLNGTALGGYMQMQYSPAPVNPMPTRQVSRGAPEKKRW

SEQ ID NO: 130579 - protein, 48 aa, Setaria italica
  Transcript Sequence Number=SeqID_64605
FFFFFFFYLEYTHPHSSIYKQFTPFESCFPFVNNIIYTEEKFHLLQSH

SEQ ID NO: 130580 - protein, 84 aa, Setaria italica
  Transcript Sequence Number=SeqID_64606
DYLSVILQPLVICNTNSISCLMLLSIMFTLFGVHDLFMVSLLTSLDFFWNLSFYFHVLVLTVPFVLFQTVAAVCVFLASKTEDT

SEQ ID NO: 130581 - protein, 35 aa, Setaria italica
  Transcript Sequence Number=SeqID_64607
NRTLATAIMFCHRFYLHQSLAKNGWQVRNPVLLWQ

SEQ ID NO: 130582 - protein, 56 aa, Setaria italica
  Transcript Sequence Number=SeqID_64608
  Gene Ontology: Mol. function=protein serine/threonine kinase activity; Biological process=protein amino acid phosphorylation
  Homolog annotation: Hit_ID=B9SJP9; Match level="QueryCoverage=98%, HitCoverage=5%, E-value=2e-20, Identity=74%"; Hit description =Serine/threonine protein kinase, putative
GGYLLNDSLRPQIPAWCDPEWKALMESCWSSDPTERPSFTDISQRLRKMAAAMNVK

SEQ ID NO: 130583 - protein, 53 aa, Setaria italica
  Transcript Sequence Number=SeqID_64609
IFFKCLGSISIYPTLSDSFIKCFMEEKFLSWRFQSMLNVSQQFLGFLYSLYND

SEQ ID NO: 130584 - protein, 85 aa, Setaria italica
  Transcript Sequence Number=SeqID_64610
  Gene Ontology: Mol. function=protein serine/threonine kinase activity; Biological process=protein amino acid phosphorylation
  Homolog annotation: Hit_ID=B9SJP9; Match level="QueryCoverage=96%, HitCoverage=7%, E-value=1e-42, Identity=93%"; Hit description =Serine/threonine protein kinase, putative
ENIVHFDLKCENLLVNMRDPQRPICKIGDLGLSKVKQHTLVSGGVRGTLPWMAPELLSGKSNMVSEKIDVYSFGIVMWELLTWGK

SEQ ID NO: 130585 - protein, 129 aa, Setaria italica
  Transcript Sequence Number=SeqID_64611
  Gene Ontology: Mol. function=ATPase activity, coupled to transmembrane movement of substances; Cellular component=integral to membrane; Biological process=transport
  Homolog annotation: Hit_ID=Q8GU76; Match level="QueryCoverage=100%, HitCoverage=10%, E-value=1e-59, Identity=89%"; Hit description=MDR -like ABC transporter
  Subcellular localization annotation: CTP_CleavageSite=16; ConfidenceScore=5.08e-01
ISMKGFAGDTAKAHAKSSMVAGEGVSNIRTVAAFNAQSKIFSLFSHELRIPEQQILRRSQTSGLLFGLSQLCLYSSEALILWYGSHLVRSHGSTFSKVIKVFVVLVVTANSVAETVSLAPEIVRGGESI

SEQ ID NO: 130586 - protein, 104 aa, Setaria italica
  Transcript Sequence Number=SeqID_64612
  Gene Ontology: Mol. function=ATPase activity, coupled to transmembrane movement of substances; Cellular component=integral to membrane; Biological process=transport
  Homolog annotation: Hit_ID=Q8GU76; Match level="QueryCoverage=89%, HitCoverage=7%, E-value=7e-30, Identity=72%"; Hit description=MDR -like ABC transporter
FVCPYSFLFLLIRNVNMIAVIQQGQVVETGTHDELLAKGSTGAYASLVRFQESARNRDLGGASTRRSRSMHLTSSLSTKSLSLRSGSLRNLSYQYSTGADGRIE

SEQ ID NO: 130587 - protein, 95 aa, Setaria italica
  Transcript Sequence Number=SeqID_64613
  Gene Ontology: Mol. function=protein binding; Cellular component =nucleus; Biological process=nuclear mRNA splicing, via spliceosome
  Homolog annotation: Hit_ID=B4FBI9; Match level="QueryCoverage=95%, HitCoverage=21%, E-value=5e-45, Identity=92%"; Hit description =Cleavage stimulation factor, 50 kDa subunit
  Pfam annotation: Domain name=WD40; Domain location=17-55; Score=21.9; E_value=0.0026; Accession=PF00400.24; Description=WD domain, G-beta repeat
GTDHPVAHLYDVNTFTCYLSANPQDSGSPINQVRYSCTGSLYVTASKDGSLRIWDGVSAECVRPIIGAHGSAEATSAVFTKDERYLLSCGKGITY

SEQ ID NO: 130588 - protein, 89 aa, Setaria italica
  misc_feature (35)..(35): Xaa can be any naturally occurring amino acid
  Transcript Sequence Number=SeqID_64614
  Gene Ontology: Mol. function=cation transmembrane transporter activity; Cellular component=integral to membrane
  Homolog annotation: Hit_ID=Q7XPF8; Match level="QueryCoverage=100%, HitCoverage=15%, E-value=4e-14, Identity=46%"; Hit description =Cation transporter HKT4
QSVNRRHAGETVIDISNLPPAILVLFALFMSVSPXSLPSDGSSLPNSVDDQTLTEKGEDKNSRTLWKNFIISKPTCLATFIILACITER

SEQ ID NO: 130589 - protein, 126 aa, Setaria italica
  Transcript Sequence Number=SeqID_64615
  Gene Ontology: Mol. function=protein serine/threonine kinase activity; Cellular component=nuclear membrane; Biological process =protein amino acid phosphorylation
  Homolog annotation: Hit_ID=A5HNE9; Match level="QueryCoverage=77%, HitCoverage=19%, E-value=6e-51, Identity=96%"; Hit description =Sucrose non-fermenting related protein kinase 1b
YSFYCLLSFVGNFFPILYCIVVIISQPCFKKIKGGIYTLPSHLSALARDLIPRMLVVEPMKRITIREIREHQWFQNRLPRYLAVPPPDTTQQAKMIDEDTLRDVVNMGFNKDHVCESLCSRLQNEA

SEQ ID NO: 130590 - protein, 62 aa, Setaria italica
  Transcript Sequence Number=SeqID_64616
  Gene Ontology: Mol. function=protein serine/threonine kinase activity; Biological process=protein amino acid phosphorylation
  Homolog annotation: Hit_ID=P92958-2; Match level="QueryCoverage=87%, HitCoverage=15%, E-value=2e-27, Identity=100%"; Hit description =Isoform 2 of SNF1-related protein kinase catalytic subunit alpha KIN11
LVYCIGSIFLKTSCGSPNYAAPEVISGKLYAGPEVDVWSCGVILYALLCGTLPFDDENIPNL

SEQ ID NO: 130591 - protein, 80 aa, Setaria italica
  Transcript Sequence Number=SeqID_64617
  Subcellular localization annotation: CTP_CleavageSite=53; ConfidenceScore=5.14e-01
CTTPFSAVPSKTLNITCVCGSFLSYLLFGSDNIFSPSHVSDSWSATDRTYFIQASPRPSLDTMPSALFCPSPRTIAAHED

SEQ ID NO: 130592 - protein, 50 aa, Setaria italica
  Transcript Sequence Number=SeqID_64618
YLGVFLFKQTVPHMVDTDYHSRKIYCMFDLYHGNDSQPIILFGLFYGITS

SEQ ID NO: 130593 - protein, 46 aa, Setaria italica
  Transcript Sequence Number=SeqID_64619
TTLLTLAFSGKVAAVMPPPVAVVVWLMAFATIAGGFVTFFIYKEKK

SEQ ID NO: 130594 - protein, 41 aa, Setaria italica
  Transcript Sequence Number=SeqID_64620
LAFSGKVAAVMPPPVAVVVWLMAFATIAGGFVTFFIYKEKK

SEQ ID NO: 130595 - protein, 91 aa, Setaria italica
  Transcript Sequence Number=SeqID_64621
LRENGDCTSSCYPRPREEDPAAERLIFVPVEQQADYQQDGRQGNNGDGAFPWLTLLGFGFLTFNSVMAILRATKGGTRNRTNKTLRTDLLR

SEQ ID NO: 130596 - protein, 67 aa, Setaria italica
  misc_feature (32)..(32): Xaa can be any naturally occurring amino acid
  Transcript Sequence Number=SeqID_64622
  Gene Ontology: Mol. function=superoxide dismutase activity; Cellular component=cytoplasm; Biological process=superoxide metabolic process
  Homolog annotation: Hit_ID=B6TIS2; Match level="QueryCoverage=74%, HitCoverage=41%, E-value=3e-17, Identity=92%"; Hit description =Superoxide dismutase [Cu-Zn]
  Pfam annotation: Domain name=Sod_Cu; Domain location=1-51; Score= -55.0; E_value=0.0082; Accession=PF00080.12; Description=Copperzinc superoxide dismutase (SODC)
VTDSQIPLTGPNSIIGRAVVVHADPDDRWKGXGHELSKSTGNAGGRIACGDHWTPGLKLKVVAGLEC

SEQ ID NO: 130597 - protein, 92 aa, Setaria italica
  Transcript Sequence Number=SeqID_64623
SLYCVFVFVCSGGHELSKSTGNAGGRIACGMFTVSPAGQPHSFLQTSIIFCIITNTKCSLLYYMDFSLHCIIISRDHWTPGLKLKVVAGLEC

SEQ ID NO: 130598 - protein, 95 aa, Setaria italica
  Transcript Sequence Number=SeqID_64624
  Gene Ontology: Mol. function=superoxide dismutase activity; Cellular component=cytoplasm; Biological process=superoxide metabolic process
  Homolog annotation: Hit_ID=Q0DRV6; Match level="QueryCoverage=91%, HitCoverage=57%, E-value=1e-40, Identity=93%"; Hit description =Superoxide dismutase [Cu-Zn] 1
  Pfam annotation: Domain name=Sod_Cu; Domain location=1-93; Score =114.9; E_value=2.6e-31; Accession=PF00080.12; Description=Copperzinc superoxide dismutase (SODC)
HVHALGDTTNGCMSTGPHYNPAGKEHGAPEDDNRHAGDLGNVTAGADGVANIHVTDSQIPLTGPNSIIGRAVVVHADPDDLGKGGHQRLLLLKLR

SEQ ID NO: 130599 - protein, 35 aa, Setaria italica
  Transcript Sequence Number=SeqID_64625
  Gene Ontology: Mol. function=superoxide dismutase activity; Cellular component=cytoplasm; Biological process=superoxide metabolic process
  Homolog annotation: Hit_ID=Q9SQL5; Match level="QueryCoverage=100%, HitCoverage=23%, E-value=3e-10, Identity=94%"; Hit description =Superoxide dismutase [Cu-Zn]
MVKAVVVLGSSEGVKGTIYFTQEGDGPTTVTGSVS

SEQ ID NO: 130600 - protein, 63 aa, Setaria italica
  Transcript Sequence Number=SeqID_64626
  Gene Ontology: Mol. function=superoxide dismutase activity; Cellular component=cytoplasm; Biological process=superoxide metabolic process
  Homolog annotation: Hit_ID=B4FXM5; Match level="QueryCoverage=98%, HitCoverage=57%, E-value=1e-21, Identity=82%"; Hit description =Superoxide dismutase [Cu-Zn]
  Pfam annotation: Domain name=Sod_Cu; Domain location=1-60; Score= -21.0; E_value=1.3e-05; Accession=PF00080.12; Description=Copperzinc superoxide dismutase (SODC)
DVHALGDTTNGCMSTGPHYNPAGKEHGAPEDDNRHAGDLGNVTAGADGKDLLLLFVPICCIPM

SEQ ID NO: 130601 - protein, 52 aa, Setaria italica
  Transcript Sequence Number=SeqID_64627
  Gene Ontology: Mol. function=superoxide dismutase activity; Cellular component=cytoplasm; Biological process=superoxide metabolic process
  Homolog annotation: Hit_ID=P14830; Match level="QueryCoverage=65%, HitCoverage=22%, E-value=4e-11, Identity=100%"; Hit description =Superoxide dismutase [Cu-Zn] 1
  Pfam annotation: Domain name=Sod_Cu; Domain location=1-52; Score= -59.8; E_value=0.02; Accession=PF00080.12; Description=Copperzinc superoxide dismutase (SODC)
KPKTKRNNKLRTRRLVVVHADPDDLGKGGHELSKSTGNAGGRIACGIIGLQG

SEQ ID NO: 130602 - protein, 58 aa, Setaria italica
  Transcript Sequence Number=SeqID_64628
ANGKHADHRWIGCSYFTCPRMFRLVWWVTRQEATLSALKSSDHFQLSSPLVVPNCIPY

SEQ ID NO: 130603 - protein, 49 aa, Setaria italica
  Transcript Sequence Number=SeqID_64629
PLGEVDGALDTLTATKHNNSLHHCSCDPFLPRRGGRLRSHEQQPSPLFM

SEQ ID NO: 130604 - protein, 65 aa, Setaria italica
  misc_feature (13)..(13): Xaa can be any naturally occurring amino acid
  Transcript Sequence Number=SeqID_64630
  Gene Ontology: Mol. function=zinc ion binding
  Subcellular localization annotation: CTP_CleavageSite=16; ConfidenceScore=5.28e-01
NGNQAAVNFGPDXPLSCNSMASVLKIGGEQSKNANPASTAQPRNGDSLRGPSDAVRRSWARLGFS

SEQ ID NO: 130605 - protein, 43 aa, Setaria italica
  Transcript Sequence Number=SeqID_64631
  Gene Ontology: Mol. function=nucleoside-triphosphatase activity; Biological process=proteolysis
  Homolog annotation: Hit_ID=B9S0Q0; Match level="QueryCoverage=76%, HitCoverage=4%, E-value=5e-10, Identity=93%"; Hit description=Stage III sporulation protein AA, putative
AQRGIQLVATAHGVTIENLIMNPSLEMLVGGIQEDISSKNRQG

SEQ ID NO: 130606 - protein, 75 aa, Setaria italica
  Transcript Sequence Number=SeqID_64632
  Gene Ontology: Mol. function=nucleoside-triphosphatase activity; Biological process=proteolysis
  Homolog annotation: Hit_ID=B9S0Q0; Match level="QueryCoverage=73%, HitCoverage=7%, E-value=7e-20, Identity=87%"; Hit description=Stage III sporulation protein AA, putative
LLIDEIGTKLEAMAASTIAQRGIQLVATAHGVTIENLIMNPSLEMLVGGIQVRTFCISFSVRFPNQNVVFCCSCL

SEQ ID NO: 130607 - protein, 65 aa, Setaria italica
  Transcript Sequence Number=SeqID_64633
  Subcellular localization annotation: CTP_CleavageSite=31; ConfidenceScore=5.26e-01
KQRLCRIYYVQITVHSTSTGSGTMSRSPSIVLALVVVLVSYGVIPPRVSLRLAGAGTNHAFALLN

SEQ ID NO: 130608 - protein, 55 aa, Setaria italica
  Transcript Sequence Number=SeqID_64634
  Homolog annotation: Hit_ID=B9SSP0; Match level="QueryCoverage=69%, HitCoverage=21%, E-value=3e-09, Identity=73%"; Hit description=P53 induced protein, putative
AYYCFEYKWNFFAVSLNKRLEFFESNWAFFAGFGMTTVHDLTTTYLYTFCLFETT

SEQ ID NO: 130609 - protein, 76 aa, Setaria italica
  Transcript Sequence Number=SeqID_64635
MLDRKIQITSTKFCESNLTTLLFQFVLTAAGTQAEQVIDELKPAHEGKLQRVPVFFVAKRLTTQVLQLFPAMQKEE

SEQ ID NO: 130610 - protein, 82 aa, Setaria italica
  Transcript Sequence Number=SeqID_64636
LCDHTAATAIYSFLRWGLVEIFYVFWFYPLYVFSFILSTLWYGFSFYYPQIKRISETKQKGASCYPICDGDHLMSGIMTLPS

SEQ ID NO: 130611 - protein, 46 aa, Setaria italica
  Transcript Sequence Number=SeqID_64637
GDDCLSTLLGRECSCGEESSPSFSTLLGRRMCLSSHLQALAHSSTQ

SEQ ID NO: 130612 - protein, 68 aa, Setaria italica
  Transcript Sequence Number=SeqID_64638
  Pfam annotation: Domain name=Ribosomal_L41; Domain location=46-68; Score=19.6; E_value=0.013; Accession=PF05162.5; Description =Ribosomal protein L41
KCNRTAESRARTRQICLLGSLPHLSALPLKQLVYCAVSLMCFLLVCDIQWKKKRMRRLKRKRRKMRQR

SEQ ID NO: 130613 - protein, 53 aa, Setaria italica
  Transcript Sequence Number=SeqID_64639
RTAQSRARTRQICLLGSLPHLSALPLEPPHPLLLPLGPHRGGGERRKMRQRSK

SEQ ID NO: 130614 - protein, 88 aa, Setaria italica
  Transcript Sequence Number=SeqID_64640
EDEYSKKPSGGHGGGRYEEDDGYKKPSGGGYGYGASSGGGHGGRYEEDDYKRRVHEPGPLLRPRRGQRRLHQHLDLLGRPACRRRPRR

SEQ ID NO: 130615 - protein, 75 aa, Setaria italica
  Transcript Sequence Number=SeqID_64641
RYEEDDGYKKPSGGGYGYGASSGGGHGGRYEEDDYKKKPSGHSGGRYEEEEGYKKTGAHISPTIATTCRLLIVTI

SEQ ID NO: 130616 - protein, 84 aa, Setaria italica
  Transcript Sequence Number=SeqID_64642
  Gene Ontology: Mol. function=adenyl-nucleotide exchange factor activity; Cellular component=chloroplast; Biological process=protein folding
  Homolog annotation: Hit_ID=B4FLR0; Match level="QueryCoverage=90%, HitCoverage=23%, E-value=4e-29, Identity=87%"; Hit description=GrpE protein homolog
FLLHLAFQLHEAIMREESTEYEEGIILQEFRKGFKLGERLLRPAMVKVSAGPGPEKSGDDEDPTEVEDSVAPLKVEDAEDDDGD

SEQ ID NO: 130617 - protein, 33 aa, Setaria italica
  Transcript Sequence Number=SeqID_64643
  Gene Ontology: Mol. function=adenyl-nucleotide exchange factor activity; Biological process=protein folding
  Homolog annotation: Hit_ID=B4FLR0; Match level="QueryCoverage=100%, HitCoverage=10%, E-value=3e-11, Identity=100%"; Hit description=GrpE protein homolog
QFIEILNSLGVEDVETVGKPFDPMLHEAIMREE

SEQ ID NO: 130618 - protein, 102 aa, Setaria italica
  Transcript Sequence Number=SeqID_64644
VPSEPAVPGERAGEEDAHGAEERDAGGWGGDAPTPSGVVDEAHPVLKAGDLAGIKLEVTFFYLGMRCFLVDKRTSHAYAGLERNPNIEEPHMDNFTSEFNPN

SEQ ID NO: 130619 - protein, 78 aa, Setaria italica
  Transcript Sequence Number=SeqID_64645
GVFWFDKRTSHAYAGLERNPNIEEPHMDNFTSNLLELIDFLKDNNEEVRNAYDRGGLNSKMTSPDIQKDFERCCAEEI

SEQ ID NO: 130620 - protein, 89 aa, Setaria italica
  Transcript Sequence Number=SeqID_64646
  Subcellular localization annotation: CTP_CleavageSite=18; ConfidenceScore=5.02e-01
SHKKGKNKSITRRPVHVVAAQAMPHCTCLVSVISFTPSHELVWYFHLLLIRSTSSQQVQQLKFAMRPTLLINVLFPPCSILVSSSEKFK

SEQ ID NO: 130621 - protein, 51 aa, Setaria italica
  misc_feature (15)..(15): Xaa can be any naturally occurring amino acid
  Transcript Sequence Number=SeqID_64647
TIAVTPYIVNYSGAXFRQYPGPWQVMLKQADGSYACVAESAARFTLGQVRP

SEQ ID NO: 130622 - protein, 88 aa, Setaria italica
  Transcript Sequence Number=SeqID_64648
PRLPATSSRLRPRRLAVSPRAEAGTGTGMGDVEALRAGVSVYKPRSYDVLVSDAARSLACAIDDGKTRLEIEFPARRSSFCCVAVPVP

SEQ ID NO: 130623 - protein, 72 aa, Setaria italica
  Transcript Sequence Number=SeqID_64649
LTAPDNYLHIYPLDMFKVSMYSDSFVASQPRESDVVKELFVFLSCLKQARTLRGRRNCTGVVCSDVSYVDDR

SEQ ID NO: 130624 - protein, 63 aa, Setaria italica
  Transcript Sequence Number=SeqID_64650
LFFRSKLSYSFLLIFFSGPCILTMLCLIIAAHQHDLSRFVLSDSLHLITICIYIHSTCLKYTN

SEQ ID NO: 130625 - protein, 116 aa, Setaria italica
  Transcript Sequence Number=SeqID_64651
  Gene Ontology: Cellular component=integral to membrane; Biological process=transport
  Homolog annotation: Hit_ID=B6U439; Match level="QueryCoverage=100%, HitCoverage=52%, E-value=8e-51, Identity=83%"; Hit description =Transmembrane emp24 domain-containing protein 10
  Pfam annotation: Domain name=EMP24_GP25L; Domain location=5-111; Score=15.6; E_value=1.7e-05; Accession=PF01105.16; Description =emp24gp25Lp24 family
GDYLACFWAPDHRPPVTVAFEFDWRSGVSARDWSAVAKKGQVEMMELELRKLEDTIKSIHEEMFYLREREEEMQELNRRTNSRMAWLGFLSLAICLSVAGLQLWHLKNFFERKKLL

SEQ ID NO: 130626 - protein, 39 aa, Setaria italica
  Transcript Sequence Number=SeqID_64652
FIRFVFVYFLVFVKVLYFTLHYLHDRTLIFKLIKYKMIF

SEQ ID NO: 130627 - protein, 58 aa, Setaria italica
  Transcript Sequence Number=SeqID_64653
  Gene Ontology: Cellular component=integral to membrane
  Homolog annotation: Hit_ID=B6U439; Match level="QueryCoverage=74%, HitCoverage=19%, E-value=2e-17, Identity=97%"; Hit description =Transmembrane emp24 domain-containing protein 10
IHEEMFYLREREEEMQELNRRTNSRMAWLGFLSLAICLSVAGLQLWHLKNFFERKKLL

SEQ ID NO: 130628 - protein, 71 aa, Setaria italica
  misc_feature (20)..(20): Xaa can be any naturally occurring amino acid
  Transcript Sequence Number=SeqID_64654
  Homolog annotation: Hit_ID=Q69JJ7; Match level="QueryCoverage=92%, HitCoverage=10%, E-value=1e-22, Identity=75%"; Hit description =Putative pentatricopeptide (PPR) repeat-containing protein
  Pfam annotation: Domain name=PPR; Domain location=31-65; Score=38.6; E_value=2.5e-08; Accession=PF01535.12; Description=PPR repeat
ELGIDNMYSKCGFIEGAVYXFENAGEKMSLDTWNAMLAGFTANGCSARALELFTRMESKGLVPNKINNLTV

SEQ ID NO: 130629 - protein, 78 aa, Setaria italica
  misc_feature (6)..(6): Xaa can be any naturally occurring amino acid
  misc_feature (23)..(23): Xaa can be any naturally occurring amino acid
  misc_feature (55)..(55): Xaa can be any naturally occurring amino acid
  Transcript Sequence Number=SeqID_64655
  Homolog annotation: Hit_ID=Q69JJ7; Match level="QueryCoverage=96%, HitCoverage=12%, E-value=4e-31, Identity=81%"; Hit description =Putative pentatricopeptide (PPR) repeat-containing protein
  Pfam annotation: Domain name=PPR; Domain location=28-62; Score=37.3; E_value=6e-08; Accession=PF01535.12; Description=PPR repeat
LINMYXKCGFIEGAVYVFENAGXKMSLDTWNAMLAGFTANGCSARALELFTRMEXKGLVPNKITFNSVLNACSHGVCE

SEQ ID NO: 130630 - protein, 59 aa, Setaria italica
  Transcript Sequence Number=SeqID_64656
  Gene Ontology: Mol. function=protein serine/threonine kinase activity; Biological process=protein amino acid phosphorylation
  Homolog annotation: Hit_ID=C4P7R8; Match level="QueryCoverage=74%, HitCoverage=10%, E-value=5e-17, Identity=95%"; Hit description=CBL -interacting protein kinase 04
RGTPWSAWRAPRGGGANIADMCRKAHRREYVVPRWVSQPARRLVSRLLDPNPATRLAVA

SEQ ID NO: 130631 - protein, 96 aa, Setaria italica
  Transcript Sequence Number=SeqID_64657
TVTQTDHSNTIRMDRYTSQQKREERPLCAAMDDGSQASHGRRQYIVYKSFFTIRVLGCSGIHRHTSLLLASSYDDRCLDGAAAKQQGLSTPVVMEN

SEQ ID NO: 130632 - protein, 87 aa, Setaria italica
  Transcript Sequence Number=SeqID_64658
  Homolog annotation: Hit_ID=B6UDX2; Match level="QueryCoverage=87%, HitCoverage=28%, E-value=6e-21, Identity=69%"; Hit description =Remorin
  Pfam annotation: Domain name=Remorin_C; Domain location=4-85; Score =50.8; E_value=5.3e-12; Accession=PF03763.5; Description=Remorin, C -terminal region
TTKKESRGSLSQADAFSTWLKKIERKLDEQRAKALEKTQNDIAKARRKAEEKRASAEAKRGLKLAKVLELANFMKAVGRVPTKRSFF

SEQ ID NO: 130633 - protein, 57 aa, Setaria italica
  Transcript Sequence Number=SeqID_64659
IFYTPLSYFSLHHHLTAFLDVFHNAIKTQACCFEQSVRITLELQEDGNSSELLIYNR

SEQ ID NO: 130634 - protein, 83 aa, Setaria italica
  Transcript Sequence Number=SeqID_64660
FVATSPTQIMLDSWCSLRGMYCRIWSCLLYEFCVPHIILFVKCCNFTVPHLSFLMCNSCDSGLHCGGSCFRLTVFGPSNQPVI

SEQ ID NO: 130635 - protein, 103 aa, Setaria italica
  Transcript Sequence Number=SeqID_64661
LQPHIGTLADKNAHIQHKKPAELTNCTQNKRRQPTNLMYIISSPLVFHHLTTQRHSLDQTFISHISFSLLQFSWYRKSILAHKEQVVPTNPTSKDLKDLRIIG

SEQ ID NO: 130636 - protein, 59 aa, Setaria italica
  Transcript Sequence Number=SeqID_64662
  Homolog annotation: Hit_ID=B6U170; Match level="QueryCoverage=83%, HitCoverage=8%, E-value=3e-17, Identity=87%"; Hit description =Calmodulin binding protein
FGAVVASSSCSVITEVMRNTSIEKFFMAIEPLIRRVVKEEIESAFANHTSMMARSVTDT

SEQ ID NO: 130637 - protein, 129 aa, Setaria italica
  misc_feature (118)..(118): Xaa can be any naturally occurring amino acid
  Transcript Sequence Number=SeqID_64663
  Gene Ontology: Mol. function=ATP binding; Cellular component=nucleus; Biological process=apoptosis
  Homolog annotation: Hit_ID=Q9ZTI7; Match level="QueryCoverage=94%, HitCoverage=66%, E-value=8e-23, Identity=51%"; Hit description =Disease resistance gene analog PIC18 (Fragment)
DEKSFLDKWEKFKACLEQGGCQYGTTDTTLFQTGLEQGGVGSAVLTTTRNTEIAQLIGTVGISHERKYLDVGTLGKEFIQEIIETRAFSLHKRDDELVNLVGPIAERCAGSPLAAKAXGSILRKKTTTE

SEQ ID NO: 130638 - protein, 48 aa, Setaria italica
  Transcript Sequence Number=SeqID_64664
  Gene Ontology: Mol. function=DNA binding; Biological process =regulation of transcription
  Homolog annotation: Hit_ID=Q259I5; Match level="QueryCoverage=79%, HitCoverage=8%, E-value=2e-14, Identity=97%"; Hit description =H0101F08.8 protein
AKSVEQERRKGIAWTEDEHRLFLLGLEKYGKGDWRSISPLPYFSSPRR

SEQ ID NO: 130639 - protein, 57 aa, Setaria italica
  Transcript Sequence Number=SeqID_64665
TQCTLQTVVTCSILRTLQIMFLLHANFPCTPAPSVSGWCCHYVSRIRDLAAFRIDTD

SEQ ID NO: 130640 - protein, 76 aa, Setaria italica
  Transcript Sequence Number=SeqID_64666
  Gene Ontology: Mol. function=transporter activity; Cellular component= membrane; Biological process=oligopeptide transport
  Homolog annotation: Hit_ID=Q10PG1; Match level="QueryCoverage=52%, HitCoverage=6%, E-value=2e-14, Identity=87%"; Hit description =Peptide transporter PTR2, putative, expressed
LDTATFFRITDSKHTHDFYICRNLHTVSIDTFSPLNSFLDKAAVILWNERDGYHDPWRLCTVTQVEELKILLRMFP

SEQ ID NO: 130641 - protein, 78 aa, Setaria italica
  Transcript Sequence Number=SeqID_64667
  Homolog annotation: Hit_ID=B9RB35; Match level="QueryCoverage=74%, HitCoverage=8%, E-value=1e-17, Identity=62%"; Hit description =EXECUTER1 protein, chloroplast, putative
EQRYQDASRLTRLAGTSLVGWWVGYAKDTDDSIGRIVRISPGVGRYVAKSYSPRWFLSVHNFYLKVKIRQDIIVQFQL

SEQ ID NO: 130642 - protein, 113 aa, Setaria italica
  misc_feature (98)..(98): Xaa can be any naturally occurring amino acid
  Transcript Sequence Number=SeqID_64668
  Gene Ontology: Mol. function=hydrolase activity, acting on ester bonds; Biological process=DNA catabolic process
  Homolog annotation: Hit_ID=B6U2F0; Match level="QueryCoverage=100%, HitCoverage=37%, E-value=5e-55, Identity=88%"; Hit description =Nuclease PA3
  Pfam annotation: Domain name=S1-P1_nuclease; Domain location=1-112; Score=-20.1; E_value=9.9e-11; Accession=PF02265.8; Description=S1P1 Nuclease
ESLMFLAHFVGDVHQPLHVGYEEDEGGNTIIVHWYRRKTNLHHVWDVSIIDTAIKDFYNRSMDTMVEALKMNLTGGWSDDITHWENCKNKWATCANDXRLRAIHYSCNYAYKD

SEQ ID NO: 130643 - protein, 38 aa, Setaria italica
  Transcript Sequence Number=SeqID_64669
TRYPVVEKRLAQAGIRLALILNRIFDGDKADDRLLQVQ

SEQ ID NO: 130644 - protein, 58 aa, Setaria italica
  Transcript Sequence Number=SeqID_64670
  Gene Ontology: Mol. function=hydrolase activity, acting on ester bonds
  Homolog annotation: Hit_ID=B6U2F0; Match level="QueryCoverage=70%, HitCoverage=13%, E-value=6e-16, Identity=92%"; Hit description =Nuclease PA3
TLQVDVSIIDTAIKDFYNRSMDTMVEALKMNLTGGWSDDITHWENRIVVCAGCPFVLA

SEQ ID NO: 130645 - protein, 119 aa, Setaria italica
  misc_feature (78)..(78): Xaa can be any naturally occurring amino acid
  Transcript Sequence Number=SeqID_64671
  Gene Ontology: Mol. function=electron carrier activity; Cellular component=extracellular region; Biological process=response to oxidative stress
  Homolog annotation: Hit_ID=B6T7B1; Match level="QueryCoverage=94%, HitCoverage=33%, E-value=3e-39, Identity=72%"; Hit description =Peroxidase 54
  Pfam annotation: Domain name=peroxidase; Domain location=1-103; Score= -83.6; E_value=0.0019; Accession=PF00141.15; Description=Peroxidase
RTNNVTGRVDKCQFVTPRLYNFSGTNRPDPTLDRGYRAFLSLRCPRGGDGTALNDLDPTTPDAFDNSYYTNIEARRGXLQSDQELLSTPGAPTAAIVGRFAGSQKAFFKSFARSMINMG

SEQ ID NO: 130646 - protein, 117 aa, Setaria italica
  Transcript Sequence Number=SeqID_64672
  Gene Ontology: Mol. function=electron carrier activity; Cellular component=extracellular region; Biological process=response to oxidative stress
  Homolog annotation: Hit_ID=B4FKV6; Match level="QueryCoverage=100%, HitCoverage=34%, E-value=4e-47, Identity=78%"; Hit description =Peroxidase 54
  Pfam annotation: Domain name=peroxidase; Domain location=1-117; Score= 62.0; E_value=2.3e-15; Accession=PF00141.15; Description=Peroxidase
NSARGYPVVDAVKAALEEACPGVVSCADILAIAAKISVELSGGPRWRVPLGRRDGTTANITAANDLPSPFDNLTALQQKFGAVGLDDTDLVALSGAHTFGRVQCQFVTPRLYNFSGT

SEQ ID NO: 130647 - protein, 132 aa, Setaria italica
  misc_feature (110)..(110): Xaa can be any naturally occurring amino acid
  Transcript Sequence Number=SeqID_64673
  Gene Ontology: Mol. function=electron carrier activity; Cellular component=extracellular region; Biological process=response to oxidative stress
  Homolog annotation: Hit_ID=B4FKV6; Match level="QueryCoverage=58%, HitCoverage=21%, E-value=2e-23, Identity=74%"; Hit description =Peroxidase 54
  Pfam annotation: Domain name=peroxidase; Domain location=1-131; Score= -69.4; E_value=0.00015; Accession=PF00141.15; Description=Peroxidase
RDVRVDGLLDGAVGVVEHEHRVAAGEVPLVDNATTAAAIVLQHAAWSFAEGHFDNLTALQQKFGAVGLDDTDLVALSGAHTFGRVQCQFVTPRLYNFSGTNRPDPTLDRXGYRAVPSPCRCPRGGTGGAQRP

SEQ ID NO: 130648 - protein, 57 aa, Setaria italica
  Transcript Sequence Number=SeqID_64674
IRAQIWLLKCDDIRYTFHFPTLIICFWEARRNCRSRIYAHVVWMNQFEQCFESRKGE

SEQ ID NO: 130649 - protein, 96 aa, Setaria italica
  Transcript Sequence Number=SeqID_64675
  Gene Ontology: Mol. function=electron carrier activity; Biological process=response to oxidative stress
  Homolog annotation: Hit_ID=B4FKV6; Match level="QueryCoverage=50%, HitCoverage=14%, E-value=4e-13, Identity=70%"; Hit description =Peroxidase 54
  Pfam annotation: Domain name=peroxidase; Domain location=1-94; Score=- 102.4; E_value=0.053; Accession=PF00141.15; Description=Peroxidase
  Subcellular localization annotation: CTP_CleavageSite=23; ConfidenceScore=5.04e-01
IHRSIIQLLLAVISNFSLHSNLRAQSGGPKWGVLLGRLDGTTADFNGASNLPAPFENLTVLQGKFKAVGLNDVRTFVRLLLLGLRSPVYLYSSFRF

SEQ ID NO: 130650 - protein, 95 aa, Setaria italica
  Transcript Sequence Number=SeqID_64676
  Gene Ontology: Mol. function=electron carrier activity; Cellular component=extracellular region; Biological process=response to oxidative stress
  Homolog annotation: Hit_ID=B6T7B1; Match level="QueryCoverage=88%, HitCoverage=24%, E-value=7e-31, Identity=79%"; Hit description =Peroxidase 54
  Pfam annotation: Domain name=peroxidase; Domain location=1-95; Score=- 43.6; E_value=1.5e-06; Accession=PF00141.15; Description=Peroxidase
RADILAIAAEISVELSGGPSWGVLLGRLDGRTSDFNGSQDLPAPFENLTTLQSKFQAVGLNDVDLVALSGAHTFGRVQCDKTYDRTKPDRTGLLT

SEQ ID NO: 130651 - protein, 85 aa, Setaria italica
  misc_feature (12)..(12): Xaa can be any naturally occurring amino acid
  misc_feature (28)..(28): Xaa can be any naturally occurring amino acid
  Transcript Sequence Number=SeqID_64677
  Gene Ontology: Mol. function=pyridoxal phosphate binding; Biological process=metabolic process
  Homolog annotation: Hit_ID=B6UAN7; Match level="QueryCoverage=98%, HitCoverage=17%, E-value=2e-26, Identity=72%"; Hit description =Isopenicillin N epimerase
RSPTAFYFHSLXPGLARSRAAVAAAVGXGGTSEVSLVDNATTAAAIVMQHVAWSFAEGAFARGDAVLMLHYTYSSVKKSIHAYVA

SEQ ID NO: 130652 - protein, 54 aa, Setaria italica
  Transcript Sequence Number=SeqID_64678
  Gene Ontology: Mol. function=electron carrier activity; Biological process=response to oxidative stress
  Homolog annotation: Hit_ID=B6T7B1; Match level="QueryCoverage=79%, HitCoverage=12%, E-value=2e-09, Identity=72%"; Hit description =Peroxidase 54
PFIVHRAATGPILLDNMTGMQSEKESPPNNGSARGYEVVDAVKCALEDACPGVV

SEQ ID NO: 130653 - protein, 87 aa, Setaria italica
  Transcript Sequence Number=SeqID_64679
  Gene Ontology: Mol. function=electron carrier activity; Cellular component=extracellular region; Biological process=response to oxidative stress
  Homolog annotation: Hit_ID=B6T7B1; Match level="QueryCoverage=96%, HitCoverage=29%, E-value=1e-30, Identity=69%"; Hit description =Peroxidase 54
  Pfam annotation: Domain name=peroxidase; Domain location=1-87; Score=- 67.1; E_value=0.0001; Accession=PF00141.15; Description=Peroxidase
RRGYEVVDAVKCALEDACPGVVSCADILAIAAEISVELSGGPSWGVLLGRLDGRTSDFNGSQDLPAPFENLTTLQRAHTFGRVQCAN

SEQ ID NO: 130654 - protein, 81 aa, Setaria italica
  Transcript Sequence Number=SeqID_64680
  Gene Ontology: Mol. function=electron carrier activity; Cellular component=extracellular region; Biological process=response to oxidative stress
  Homolog annotation: Hit_ID=B6T7B1; Match level="QueryCoverage=87%, HitCoverage=20%, E-value=2e-26, Identity=81%"; Hit description =Peroxidase 54
  Pfam annotation: Domain name=peroxidase; Domain location=1-81; Score=- 60.6; E_value=3.2e-05; Accession=PF00141.15; Description=Peroxidase
FHDCFVQGCDGSILLDNMTGMQSEKESPPNNGSARGYEVVDAVKCALEDACPGVVSCADILAIAAEISVELVRWFEGSCEV

SEQ ID NO: 130655 - protein, 36 aa, Setaria italica
  Transcript Sequence Number=SeqID_64681
QRERQQRYGTGRQVRPSYVDADGCTTSSGTNRPDPT

SEQ ID NO: 130656 - protein, 63 aa, Setaria italica
  Transcript Sequence Number=SeqID_64682
  Pfam annotation: Domain name=Dev_Cell_Death; Domain location=2-52; Score=-25.0; E_value=6.8e-05; Accession=PF10539.1; Description =Development and cell death domain
MFAMQVKFKIDKDCLPLTESSIKQAIKENYSARSKFDPELTARQVHRLLALFKPANAPQPLLT

SEQ ID NO: 130657 - protein, 64 aa, Setaria italica
  Transcript Sequence Number=SeqID_64683
KTWPGQKCSEWAPSNNILDLGQATHFLPLQSPVQKSISYHNDTVQDAVDGRELRVLSSAIHKYR

SEQ ID NO: 130658 - protein, 61 aa, Setaria italica
  Transcript Sequence Number=SeqID_64684
LATGQLVISTAGAPRLSGPLWRRRGPLVRPLHWRRKATGKWHVKSCLPVGGQAGRESNRNE

SEQ ID NO: 130659 - protein, 123 aa, Setaria italica
  Transcript Sequence Number=SeqID_64685
AINATAHASPRLPPPTPARRASCLLRPLLAHHVDETNLVLPARLMVRFGNIAYDLPRHIVRKTLVNLQGKPCPDPVCTVAEYTARHPVVVPVPSEGVRLVGEKLGRCFSTTSEPGMKLISSLT

SEQ ID NO: 130660 - protein, 85 aa, Setaria italica
  Transcript Sequence Number=SeqID_64686
VVSNVTKSHHQPCRENQIGFVNVMSIHQCGRDDFDPSSPQTPRLGLLSSATKGLGLEAVGASSSPALAGVGGGRRGEACAVALID

SEQ ID NO: 130661 - protein, 110 aa, Setaria italica
  Transcript Sequence Number=SeqID_64687
  Gene Ontology: Mol. function=serine-type endopeptidase activity; Cellular component=chloroplast; Biological process=response to stress
  Homolog annotation: Hit_ID=O22609; Match level="QueryCoverage=85%, HitCoverage=21%, E-value=2e-43, Identity=90%"; Hit description =Protease Do-like 1, chloroplastic
ITYFDNNINKACFQVGGIVDQLIKFGKVTRPILGIKFAPDQSLEQLGLSGVLVLDAPSNGPAGKAGLQSTKRDAYGRLILGDIITSVNGTKVTNGSDLYRILDQCKVGKR

SEQ ID NO: 130662 - protein, 81 aa, Setaria italica
  Transcript Sequence Number=SeqID_64688
  Gene Ontology: Mol. function=transcription repressor activity; Biological process=regulation of nitrogen utilization
  Homolog annotation: Hit_ID=Q2QUH8; Match level="QueryCoverage=97%, HitCoverage=25%, E-value=1e-19, Identity=55%"; Hit description =Isoflavone reductase, putative, expressed
SSFENLILYLFSSFPVKYTSCVEHVKADMDIGGQIAVGHFYHIFYEGCLTNFDIGEDGAEATLLYPEVEYTRMDEYMKRYL

SEQ ID NO: 130663 - protein, 138 aa, Setaria italica
  misc_feature (129)..(129): Xaa can be any naturally occurring amino acid
  misc_feature (136)..(136): Xaa can be any naturally occurring amino acid
  Transcript Sequence Number=SeqID_64689
  Gene Ontology: Mol. function=transcription repressor activity; Biological process=regulation of nitrogen utilization
  Homolog annotation: Hit_ID=B9S1I5; Match level="QueryCoverage=86%, HitCoverage=38%, E-value=2e-46, Identity=68%"; Hit description=NAD dependent epimerase/dehydratase, putative
  Pfam annotation: Domain name=NmrA; Domain location=1-129; Score= -65.5; E_value=0.00016; Accession=PF05368.5; Description=NmrA-like family
ALKDSRAWSLSTSRVIKGFVDEDDVASYTIKSLDDPRTLNKTVYLRPPENILTQNELIAKWEKLSGNVIEKIYIPVDEFLASMKDMDIGGQIAVGHFYHIFYEGCLTNFDIGEDGAEATLLYPEVEYTXMDEYMKXYL

SEQ ID NO: 130664 - protein, 99 aa, Setaria italica
  Transcript Sequence Number=SeqID_64690
  Gene Ontology: Mol. function=transcription repressor activity; Biological process=regulation of nitrogen utilization
  Homolog annotation: Hit_ID=Q2QUH8; Match level="QueryCoverage=100%, HitCoverage=31%, E-value=6e-36, Identity=68%"; Hit description =Isoflavone reductase, putative, expressed
NKTVYLRPPENILTQNELIAKWEKLSGNVIEKIYIPVDEFLASMKDMDIGGQIAVGHFYHIFYEGCLTNFDIGEDGAEATLLYPEVEYTRMDEYMKRYL

SEQ ID NO: 130665 - protein, 50 aa, Setaria italica
  Transcript Sequence Number=SeqID_64691
QISWVQTGYLVLRVFCSNLGCCRKLAEPNIQSAPTKSANSDLIILYLNVR

SEQ ID NO: 130666 - protein, 103 aa, Setaria italica
  Transcript Sequence Number=SeqID_64692
  Homolog annotation: Hit_ID=B5AEI9; Match level="QueryCoverage=94%, HitCoverage=21%, E-value=6e-25, Identity=65%"; Hit description=Myb transcription factor
MPVVTVQVVREPGASNAIEIPPPRPKRKPLHPYPRKCADSSTLANPAVGQPKLAPISSSSGYNVENGSPVSVLSAMQSDTFGSSVSNPSTGCTSPASSDDGNN

SEQ ID NO: 130667 - protein, 79 aa, Setaria italica
  Transcript Sequence Number=SeqID_64693
LDSSGLSIDKRLPLDAVKSPLKDDAVQPKEGMDGYPVKVPISFPTFEIRMQMPVGSFQCVFVYYPTALSPSLMTAHRFK

SEQ ID NO: 130668 - protein, 58 aa, Setaria italica
  Transcript Sequence Number=SeqID_64694
AHTLIILQRTYERGDSEQPALLCYTQSAPAFRSSGTRLPAVFIGGRLAGSTDKVMSLH

SEQ ID NO: 130669 - protein, 77 aa, Setaria italica
  misc_feature (10)..(10): Xaa can be any naturally occurring amino acid
  misc_feature (22)..(22): Xaa can be any naturally occurring amino acid
  Transcript Sequence Number=SeqID_64695
  Gene Ontology: Mol. function=2,4-dienoyl-CoA reductase (NADPH) activity; Cellular component=plasma membrane; Biological process =metabolic process
  Homolog annotation: Hit_ID=B6T9B6; Match level="QueryCoverage=70%, HitCoverage=17%, E-value=9e-18, Identity=83%"; Hit description =Peroxisomal 2,4-dienoyl-CoA reductase
NGIAPGPIKXTPGMRKLAPEEXMSKGRREMTPLFKLGEKWDIAMAALYLGSDAGGLCSSLFSIQIINRFNCTQSFLF

SEQ ID NO: 130670 - protein, 69 aa, Setaria italica
  misc_feature (8)..(8): Xaa can be any naturally occurring amino acid
  Transcript Sequence Number=SeqID_64696
  Gene Ontology: Mol. function=DNA binding; Biological process =regulation of transcription
  Homolog annotation: Hit_ID=Q9LRN5; Match level="QueryCoverage=100%, HitCoverage=22%, E-value=5e-21, Identity=74%"; Hit description =Similarity to transfactor
  Pfam annotation: Domain name=Myb_DNA-binding; Domain location=10-69; Score=16.4; E_value=0.066; Accession=PF00249.23; Description=Myb -like DNA-binding domain
LVLTTDPXPRLRWTVELHERFVDAVTQLGGPDSTWFFSSFDSWPVLAEATPKTIMRVMGVKGLTLYHLK

SEQ ID NO: 130671 - protein, 43 aa, Setaria italica
  Transcript Sequence Number=SeqID_64697
NLNIDALCMAFYARSEEARQSHSVHKLALVSFLEAPYVLASKF

SEQ ID NO: 130672 - protein, 74 aa, Setaria italica
  Transcript Sequence Number=SeqID_64698
MRRGLAGWLAGVVWSVDGSHTELPSQDSPAVEINPVVVDDKETGEVPHEQKTDQTASTVTPVQSSPTTVSPYNP

SEQ ID NO: 130673 - protein, 53 aa, Setaria italica
  Transcript Sequence Number=SeqID_64699
  Homolog annotation: Hit_ID=B6SQJ4; Match level="QueryCoverage=94%, HitCoverage=19%, E-value=9e-18, Identity=92%"; Hit description =Uncharacterized secreted protein
AAESCARTVRQKAYVEALRLDTLFTPQVVVQGRAHCVGTEQDALAQAVRDAPR

SEQ ID NO: 130674 - protein, 91 aa, Setaria italica
  misc_feature (20)..(20): Xaa can be any naturally occurring amino acid
  misc_feature (44)..(44): Xaa can be any naturally occurring amino acid
  Transcript Sequence Number=SeqID_64700
  Gene Ontology: Mol. function=metal ion transmembrane transporter activity; Cellular component=membrane; Biological process=metal ion transport
  Homolog annotation: Hit_ID=B9GVM0; Match level="QueryCoverage=98%, HitCoverage=20%, E-value=1e-34, Identity=83%"; Hit description =Magnesium transporter
KSSDSSQYNIEELEMLLEAXYFVVIDYTLSKLTSLKEYIDDTEXFISIQLDNVRNQLIQFELLLTTATFVVAIFGVVSGVFGMNFEVALFK

SEQ ID NO: 130675 - protein, 92 aa, Setaria italica
  misc_feature (10)..(10): Xaa can be any naturally occurring amino acid
  misc_feature (73)..(73): Xaa can be any naturally occurring amino acid
  Transcript Sequence Number=SeqID_64701
  Gene Ontology: Mol. function=metal ion binding
  Homolog annotation: Hit_ID=Q40221; Match level="QueryCoverage=80%, HitCoverage=13%, E-value=2e-14, Identity=54%"; Hit description =Protein containing C-terminal RING-finger
HAFHPLIIEXNNLRGSAAERFMMLDQLVIHESREDSDPHWDMRLDIDDMSYEELLALEERIGNVNTGLADEKXSSCVMELSCCSSALAQDAK

SEQ ID NO: 130676 - protein, 120 aa, Setaria italica
  misc_feature (113)..(113): Xaa can be any naturally occurring amino acid
  Transcript Sequence Number=SeqID_64702
  Gene Ontology: Mol. function=metal ion binding
VPLVTYCLCLFLIVLVLFLHAGSSSSTYAPHNTHHPPALSYPHRSEDCFIPSSHMDDRRVAQKRRNPIIHPMDGASVGSCYAASSSNPQFPRYMPPNPIPVPEPCPPRTTPNXGSSYWSD

SEQ ID NO: 130677 - protein, 81 aa, Setaria italica
  Transcript Sequence Number=SeqID_64703
  Gene Ontology: Mol. function=metal ion binding
MAGHHHNNTHMPRMDQVNRFQNEPPPFGPKLFMHPRSDAANASSYGGATIRSNELPSSSHIGQPHTQPIEAPGTMLAYLID

SEQ ID NO: 130678 - protein, 92 aa, Setaria italica
  Transcript Sequence Number=SeqID_64704
  Gene Ontology: Mol. function=metal ion binding
  Subcellular localization annotation: CTP_CleavageSite=12; ConfidenceScore=5.17e-01
MAFRERPYYPAPQRTNVNVPPVPTLPGSSDSIPFLHGGYAPRAVPRNTIRSYPAPAFGSSSNSAAVSHEPAIPSYPPAVTSYPPATSAATSA

SEQ ID NO: 130679 - protein, 38 aa, Setaria italica
  Transcript Sequence Number=SeqID_64705
CMTRAMSQTSNVPSSCDSSTAIKLLKTPFDGSIHVGTL

SEQ ID NO: 130680 - protein, 79 aa, Setaria italica
  Transcript Sequence Number=SeqID_64706
  Subcellular localization annotation: CTP_CleavageSite=24; ConfidenceScore=5.12e-01
SLLPGRSHSNNSSALWRGKQGRLRAREKKAREAVRGAAPPPSPSVPPGREAPIRPADRPSAKVKGNLILLFMCYGGTSS

SEQ ID NO: 130681 - protein, 137 aa, Setaria italica
  misc_feature (105)..(105): Xaa can be any naturally occurring amino acid
  Transcript Sequence Number=SeqID_64707
  Homolog annotation: Hit_ID=B9S7E4; Match level="QueryCoverage=89%, HitCoverage=19%, E-value=8e-30, Identity=56%"; Hit description=PLE, putative
SFVPYSKGILNLCVKVRLVAILEEQKLRRAQREEDKRRCRDQKKLQSLLLKEKELIFGSKPSPKKTNSFNRRTSSHHSNGNGTGFMTPVPRRVSAGSATPELLTXPRSYSGRYNNYFKDNRRLTATPLNFSAVSKDD

SEQ ID NO: 130682 - protein, 67 aa, Setaria italica
  Transcript Sequence Number=SeqID_64708
SRTMNVRNYIYKQFHLNFVTICRHSSAMLTATTHWSNLEAIHTPHQEISSLTNLKPIENQDQQSFKR

SEQ ID NO: 130683 - protein, 49 aa, Setaria italica
  Transcript Sequence Number=SeqID_64709
KRTRILVQKIPTMIDNLIAKTFAWEDERNVPFLYDGVSCCINHIYNESG

SEQ ID NO: 130684 - protein, 130 aa, Setaria italica
  misc_feature (23)..(23): Xaa can be any naturally occurring amino acid
  misc_feature (54)..(54): Xaa can be any naturally occurring amino acid
  Transcript Sequence Number=SeqID_64710
  Homolog annotation: Hit_ID=Q9SXF7; Match level="QueryCoverage=100%, HitCoverage=18%, E-value=1e-35, Identity=58%"; Hit description=Amino acid transporter-like protein 1
EIQATMPSTFKHPAHVPMWRGAXKVAYLLIAMCLFPVAVGGYWAYGNMASAPQXALLITAAMTSPCSAPNNDPWNPLYVQMPPGGMLAALYAFHSHDTPQGLLATTCLLVVLNCLSSFQIYSMPVFDSFR

SEQ ID NO: 130685 - protein, 111 aa, Setaria italica
  misc_feature (42)..(42): Xaa can be any naturally occurring amino acid
  misc_feature (95)..(95): Xaa can be any naturally occurring amino acid
  Transcript Sequence Number=SeqID_64711
  Gene Ontology: Mol. function=DNA-directed RNA polymerase activity; Cellular component=DNA-directed RNA polymerase II, core complex; Biological process=transcription
  Homolog annotation: Hit_ID=B9FCT0; Match level="QueryCoverage=100%, HitCoverage=9%, E-value=8e-37, Identity=66%"; Hit description=DNA -directed RNA polymerase
DLEVQDLKLKPRHALLQKMTYSSRMNVEITVQVYTVDKIDKXKTGNAMHVSRRDIMKETKQVSIGMLPVMVKSNLCWLHKLQESECQFDSGGYFXLIKGTEKVFIAEEQRC

SEQ ID NO: 130686 - protein, 46 aa, Setaria italica
  Transcript Sequence Number=SeqID_64712
ENSDLEVQDLKLKPRHALLQKMTYSSRMNVEITVQVYAASTNLTSP

SEQ ID NO: 130687 - protein, 96 aa, Setaria italica
  Transcript Sequence Number=SeqID_64713
VFCNEPVQEVNASKGDSLNQGNNGLVHKQEVAKESSEQDNTNDAYLPGSKDACKNKEHCEEAAVRKEKMFARIKRRMVSLQVEFVKGLKGRKLISI

SEQ ID NO: 130688 - protein, 61 aa, Setaria italica
  Transcript Sequence Number=SeqID_64714
MLISFRPFRPLTNSTCRLTILLFILANIFFPFGQQLLHSAPCFYMRLWSLFRRFFSNLLLV

SEQ ID NO: 130689 - protein, 147 aa, Setaria italica
  misc_feature (20)..(21): Xaa can be any naturally occurring amino acid
  Transcript Sequence Number=SeqID_64715
  Homolog annotation: Hit_ID=B6TCZ0; Match level="QueryCoverage=78%, HitCoverage=26%, E-value=1e-47, Identity=80%"; Hit description=F-box domain containing protein
IFAGSSAGYAHCWDLRTLRXXWEQRVSPNVIYSAHHLPGDTTALAVGGIDGVLRLISQRTGEIIRSIVVDTDRPAEPTSRSRHQIEKKRVREVAPDARVDNISTRLRPQITSLSVGIKKIVTTLLVVKLTILGFFVKFFVSLKKLFF

SEQ ID NO: 130690 - protein, 64 aa, Setaria italica
  misc_feature (32)..(32): Xaa can be any naturally occurring amino acid
  misc_feature (52)..(52): Xaa can be any naturally occurring amino acid
  Transcript Sequence Number=SeqID_64716
  Homolog annotation: Hit_ID=B6TCZ0; Match level="QueryCoverage=89%, HitCoverage=12%, E-value=9e-23, Identity=82%"; Hit description=F-box domain containing protein
FFSLVYRNRIIVTAHLMRDLYYKRNPPARGSXSNISVKSYFEALAMDEHASXFANGPADAYQWV

SEQ ID NO: 130691 - protein, 70 aa, Setaria italica
  Transcript Sequence Number=SeqID_64717
  Homolog annotation: Hit_ID=B6T9L8; Match level="QueryCoverage=67%, HitCoverage=11%, E-value=6e-12, Identity=72%"; Hit description=WD -repeat protein-like
TLFFQRVSYLFHGVGKRVLLILFCPLFNFLQHTSLSPDGKLAVMVGDSPDGLLVDANSGKAVHDLRGHLD

SEQ ID NO: 130692 - protein, 78 aa, Setaria italica
  misc_feature (60)..(60): Xaa can be any naturally occurring amino acid
  Transcript Sequence Number=SeqID_64718
  Homolog annotation: Hit_ID=B6T9L8; Match level="QueryCoverage=78%, HitCoverage=14%, E-value=1e-22, Identity=80%"; Hit description=WD -repeat protein-like
PKRNRISGVRDFDMEKFQICNNFRFAWPVNHTSLSPDGKLAVMVGDSPDGLLVDANSGKXVHDLRGHFGFSPSHHHGT

SEQ ID NO: 130693 - protein, 93 aa, Setaria italica
  Transcript Sequence Number=SeqID_64719
  Gene Ontology: Mol. function=transposase activity; Biological process= transposition, DNA-mediated
  Homolog annotation: Hit_ID=Q8L516; Match level="QueryCoverage=96%, HitCoverage=15%, E-value=2e-18, Identity=48%"; Hit description =Putative transposase
LVGVLKFVGEKLSNAIEKIAAPAPPPPSPPADELPEDLFNVLTSLPGFEEAHISYYYAYLIANPHIAKDFYKLPFNRKLNWVAFFIANKFSRC

SEQ ID NO: 130694 - protein, 70 aa, Setaria italica
  Transcript Sequence Number=SeqID_64720
  Gene Ontology: Mol. function=transposase activity; Biological process= transposition, DNA-mediated
  Homolog annotation: Hit_ID=Q9XHV1; Match level="QueryCoverage=68%, HitCoverage=17%, E-value=7e-11, Identity=62%"; Hit description =10A19I.15
LAPPPPPPPSDELPEDPFNVLTSLPGFEEAHISYYYAYLVANPHIAKAFYKLPFNHKLNYWLRPFFCLYH

SEQ ID NO: 130695 - protein, 70 aa, Setaria italica
  Transcript Sequence Number=SeqID_64721
  Subcellular localization annotation: CTP_CleavageSite=15; ConfidenceScore=5.12e-01
PSRTLLPNQGNQSISSRKIPRYSNLSFFYFYFLFSFVCYYCTPKAHARQPNFLTIYYLHAFPLKLPFTST

SEQ ID NO: 130696 - protein, 99 aa, Setaria italica
  Transcript Sequence Number=SeqID_64722
  Gene Ontology: Mol. function=nicotinate-nucleotide diphosphorylase (carboxylating) activity; Cellular component=chloroplast; Biological process=pyridine nucleotide biosynthetic process
  Homolog annotation: Hit_ID=Q42354; Match level="QueryCoverage=74%, HitCoverage=66%, E-value=7e-26, Identity=75%"; Hit description=NADC homologue (Fragment)
  Pfam annotation: Domain name=QRPTase_N; Domain location=1-63; Score =31.9; E_value=9.5e-08; Accession=PF02749.8; Description=Quinolinate phosphoribosyl transferase, N-terminal domain
YKKGIVAKQDMIFNQVDPSLKVEWFESDGNYVHKGLQFGKVYGCARSIIVAERVVLNFMQRMSGIATLTKAMSDAARPAITPSAFAIPSDVEAEATFIA

SEQ ID NO: 130697 - protein, 130 aa, Setaria italica
  misc_feature (54)..(54): Xaa can be any naturally occurring amino acid
  misc_feature (74)..(74): Xaa can be any naturally occurring amino acid
  misc_feature (78)..(78): Xaa can be any naturally occurring amino acid
  misc_feature (92)..(92): Xaa can be any naturally occurring amino acid
  misc_feature (112)..(112): Xaa can be any naturally occurring amino acid
  misc_feature (118)..(118): Xaa can be any naturally occurring amino acid
  Transcript Sequence Number=SeqID_64723
  Gene Ontology: Mol. function=nicotinate-nucleotide diphosphorylase (carboxylating) activity; Cellular component=chloroplast; Biological process=pyridine nucleotide biosynthetic process
  Homolog annotation: Hit_ID=B9SJ40; Match level="QueryCoverage=99%, HitCoverage=43%, E-value=1e-49, Identity=69%"; Hit description =Nicotinate-nucleotide pyrophosphorylase [carboxylating], putative
  Pfam annotation: Domain name=QRPTase_N; Domain location=1-76; Score =69.7; E_value=1.1e-17; Accession=PF02749.8; Description=Quinolinate phosphoribosyl transferase, N-terminal domain
LVSLEATFIAKADGVIAGISLADMIFNQVDPSLKVEWFESDGNYVHKGLQFGKXYGCARSIIVAERVVLNFMQXMSGXSDAARPASILETRXTAPGLRLVDKWAVLIGGGKXHRLGLXDMVMIKDNHISV

SEQ ID NO: 130698 - protein, 66 aa, Setaria italica
  Transcript Sequence Number=SeqID_64724
  Gene Ontology: Mol. function=double-stranded RNA binding; Cellular component=intracellular
LDFWAPSFICNLPYIALFQYHLNDYIIAIYHRSVAPNFNKRFKPDFPRTMQRVPYGTYSRIEGHVP

SEQ ID NO: 130699 - protein, 124 aa, Setaria italica
  misc_feature (5)..(5): Xaa can be any naturally occurring amino acid
  misc_feature (12)..(12): Xaa can be any naturally occurring amino acid
  misc_feature (20)..(21): Xaa can be any naturally occurring amino acid
  misc_feature (92)..(92): Xaa can be any naturally occurring amino acid
  Transcript Sequence Number=SeqID_64725
  Gene Ontology: Mol. function=double-stranded RNA binding; Cellular component=intracellular
  Homolog annotation: Hit_ID=Q7XUL7; Match level="QueryCoverage=81%, HitCoverage=10%, E-value=2e-17, Identity=47%"; Hit description =OSJNBa0074L08.12 protein
PLQGXPAREEGXEVPESELXXPDTRRRLLILQHGQDTRDATPPLPAIPPVQVPVPPVQPHGNWFPAEDGMNPSNLNIGPAGFTVESDSLLYXKKQPPHPSFFHGGDNPMSSDRFSYQNQRFPFF

SEQ ID NO: 130700 - protein, 116 aa, Setaria italica
  misc_feature (60)..(60): Xaa can be any naturally occurring amino acid
  Transcript Sequence Number=SeqID_64726
  Gene Ontology: Mol. function=double-stranded RNA binding; Cellular component=intracellular
  Homolog annotation: Hit_ID=Q7XUL7; Match level="QueryCoverage=91%, HitCoverage=14%, E-value=4e-22, Identity=44%"; Hit description =OSJNBa0074L08.12 protein
SGRHVPTNQRNNQLESGRHFAQYTGTPAGILEGIALKCGSKVEYRSTLCDTAELQFSIEXKYLSSDPNKMTDLKENGFSSNETFLDTLENNRDDILPVPSTSEESRFMKIGGRITP

SEQ ID NO: 130701 - protein, 85 aa, Setaria italica
  Transcript Sequence Number=SeqID_64727
  Gene Ontology: Mol. function=signal transducer activity; Biological process=response to light stimulus
  Homolog annotation: Hit_ID=Q6H483; Match level="QueryCoverage=47%, HitCoverage=6%, E-value=3e-16, Identity=95%"; Hit description =Putative non-phototropic hypocotyl 3
GHRPQRPRRPLPRHRRLPQGKKKSLSNEHENFDGIGVDQFNGHGGYLQEHPELSKADKKRLCRLIDCRKLSPDVRAQAISNDRMP

SEQ ID NO: 130702 - protein, 58 aa, Setaria italica
  Transcript Sequence Number=SeqID_64728
AVHQQSIICFENDEQLLYSTIICTLVDESSGALEIISFVSTEDTGAAAILPLFGIIAS

SEQ ID NO: 130703 - protein, 114 aa, Setaria italica
  misc_feature (37)..(37): Xaa can be any naturally occurring amino acid
  Transcript Sequence Number=SeqID_64729
  Gene Ontology: Mol. function=unfolded protein binding; Cellular component=microtubule; Biological process=tubulin complex assembly
  Homolog annotation: Hit_ID=B9SDB0; Match level="QueryCoverage=76%, HitCoverage=54%, E-value=1e-10, Identity=47%"; Hit description =Tubulin-specific chaperone A (Tubulin-folding cofactor A) (Cfa), putative
TSPLQENVLAESRMMVPDCHKRLETALADLKATLVLXKYPPPYLEIVWPCPSIATIVLLQAELKEANEQGAEIGEAESTITEVEAVVKPTEVMNSELTVAELLASIRFARVETL

SEQ ID NO: 130704 - protein, 29 aa, Setaria italica
  Transcript Sequence Number=SeqID_64730
DERIVKELRSYEKEVEKEAAKTANMKENG

SEQ ID NO: 130705 - protein, 62 aa, Setaria italica
  Transcript Sequence Number=SeqID_64731
QSAMGEECAAIATHPSEREDVLRSARHLYLSIRQPETPLNASQEKGSPAFQTLLICDGYVEG

SEQ ID NO: 130706 - protein, 77 aa, Setaria italica
  Transcript Sequence Number=SeqID_64732
  Gene Ontology: Mol. function=RNA binding
  Homolog annotation: Hit_ID=B6TVQ3; Match level="QueryCoverage=96%, HitCoverage=25%, E-value=1e-23, Identity=75%"; Hit description =Nucleic acid binding protein
AELPANIIDTRLRQAQEVMEELLKPRRLARDESQDFYKRQQLRELAMLNSTLREDSPHPGSVSPFSNGGMKRAKPSQ

SEQ ID NO: 130707 - protein, 103 aa, Setaria italica
  misc_feature (13)..(13): Xaa can be any naturally occurring amino acid
  Transcript Sequence Number=SeqID_64733
  Gene Ontology: Mol. function=RNA binding; Cellular component =cytoplasm; Biological process=multicellular organismal development
  Homolog annotation: Hit_ID=B6TVQ3; Match level="QueryCoverage=97%, HitCoverage=35%, E-value=6e-41, Identity=80%"; Hit description =Nucleic acid binding protein
GSIKDTEKEEKLXGKPGYEHLNEPLHILIEAELPANIIDTRLRQAQEVMEELLKPVDESQDFYKRQQLRELAMLNSTLREDSPHPGSVSPFSNGGMKRAKPSQ

SEQ ID NO: 130708 - protein, 69 aa, Setaria italica
  Transcript Sequence Number=SeqID_64734
  Gene Ontology: Mol. function=RNA binding
  Homolog annotation: Hit_ID=B6TVQ3; Match level="QueryCoverage=63%, HitCoverage=16%, E-value=6e-14, Identity=82%"; Hit description =Nucleic acid binding protein
MNSASSSANFIATPSSERRLARDESQDFYKRQQLRELAMLNSTLREDSPHPGSVSPFSNGGMKRAKPSQ

SEQ ID NO: 130709 - protein, 41 aa, Setaria italica
  Transcript Sequence Number=SeqID_64735
FVRSFSPGMQQHVMSFEVGGVLEDSKWQAPAYCFNGDNADT

SEQ ID NO: 130710 - protein, 153 aa, Setaria italica
  Transcript Sequence Number=SeqID_64736
  Gene Ontology: Mol. function=heat shock protein binding; Cellular component=endoplasmic reticulum membrane; Biological process=protein folding
  Homolog annotation: Hit_ID=B9SLY2; Match level="QueryCoverage=99%, HitCoverage=42%, E-value=8e-65, Identity=77%"; Hit description =Altered response to gravity (Arg1), plant, putative
LEEAMNGTVTVRPLPVGTSATGKVDKQCAHFFGVTISEEQAHSGIVVRVTSPAQSKFKLLYFEQEVNGGYGLALQFNIIFSFPFDLQEDSQKTGKVTSAGMYFLHFQVYRMDSTVNALAMAKDPEAAFFKRLEGLQPCEVSALKPGTHIICCI

SEQ ID NO: 130711 - protein, 54 aa, Setaria italica
  Transcript Sequence Number=SeqID_64737
HLKLISVLVWTLFLLLLLTCSDYGYINRQCSLLGSSALLGHLRKQRACISITLR

SEQ ID NO: 130712 - protein, 67 aa, Setaria italica
  misc_feature (60)..(60): Xaa can be any naturally occurring amino acid
  Transcript Sequence Number=SeqID_64738
CCLWMNKVQTAEDTEWLSTKKCAPNAADCTVLKKRRTKKGSEKDGNQWKNHCMSYGWSLXSERDPLT

SEQ ID NO: 130713 - protein, 37 aa, Setaria italica
  Transcript Sequence Number=SeqID_64739
DARSLESVGQNDLLIVGPGVLGRIVAEMWKQVTTDCT

SEQ ID NO: 130714 - protein, 127 aa, Setaria italica
  Transcript Sequence Number=SeqID_64740
  Gene Ontology: Mol. function=magnesium ion binding; Cellular component=chloroplast; Biological process=photosynthesis, light harvesting
  Homolog annotation: Hit_ID=P27489; Match level="QueryCoverage=81%, HitCoverage=38%, E-value=3e-53, Identity=94%"; Hit description =Chlorophyll a-b binding protein 13, chloroplastic
  Pfam annotation: Domain name=Chloroa_b-bind; Domain location=47-127; Score=45.3; E_value=2.3e-10; Accession=PF00504.13; Description =Chlorophyll A-B binding protein
CLGSLYLVPFRRTFVRLVRPSRSGFTMSNDLWYGPDRVKYLGPFSAQTPSYLTGEFPGDYGWDTAGLSADPEAFARNRALEVIHGRWAMLGALGCITPEVLEKWVRVDFKEPVWFKAGAQIFSEGGL

SEQ ID NO: 130715 - protein, 63 aa, Setaria italica
  Transcript Sequence Number=SeqID_64741
  Gene Ontology: Mol. function=magnesium ion binding; Cellular component=chloroplast; Biological process=photosynthesis, light harvesting
  Homolog annotation: Hit_ID=Q42016; Match level="QueryCoverage=96%, HitCoverage=58%, E-value=5e-25, Identity=88%"; Hit description =CHLOROPHYLL A-B BINDING PROTEIN (Fragment)
RTSPCCLQSNDLWYGPDRVKYLGPFSAQTPSYLTGEFPGDYGWDTAGLSADPEAFARNRALEV

SEQ ID NO: 130716 - protein, 73 aa, Setaria italica
  Transcript Sequence Number=SeqID_64742
  Gene Ontology: Mol. function=binding
  Homolog annotation: Hit_ID=Q10RT3; Match level="QueryCoverage=72%, HitCoverage=6%, E-value=1e-18, Identity=81%"; Hit description=HEAT repeat family protein, expressed
FLFIWFVLFKFVPYWLLGLQRTAFIEQIHATLPRLILHLHDDDLSVRLACRNTFQLLAPLMEVDGYLSFVPSY

SEQ ID NO: 130717 - protein, 63 aa, Setaria italica
  misc_feature (53)..(53): Xaa can be any naturally occurring amino acid
  Transcript Sequence Number=SeqID_64743
  Gene Ontology: Mol. function=binding
  Homolog annotation: Hit_ID=Q10RT3; Match level="QueryCoverage=79%, HitCoverage=5%, E-value=1e-16, Identity=84%"; Hit description=HEAT repeat family protein, expressed
EKINHQTARGCCTGGGKIGKQAVEKSYPSVLAGLILKLGSLHGLAELGRNELXRSLLMHFSHF

SEQ ID NO: 130718 - protein, 80 aa, Setaria italica
  Transcript Sequence Number=SeqID_64744
  Gene Ontology: Mol. function=sequence-specific DNA binding; Cellular component=nucleus; Biological process=regulation of transcription, DNA-dependent
  Homolog annotation: Hit_ID=Q6VBA4; Match level="QueryCoverage=53%, HitCoverage=12%, E-value=2e-18, Identity=97%"; Hit description=Heat stress transcription factor C-1a
  Pfam annotation: Domain name=HSF_DNA-bind; Domain location=1-77; Score=-54.7; E_value=2.7e-05; Accession=PF00447.9; Description=HSF -type DNA-binding
KHSNFSSFVRQLNTYGFRKVHPDRWEFAHESFLRGQTHLLPRIVRRKKRGEGGGGAASCSSVGEAQYAAASCAIRGEDHQ

SEQ ID NO: 130719 - protein, 78 aa, Setaria italica
  Transcript Sequence Number=SeqID_64745
  Homolog annotation: Hit_ID=Q10GJ5; Match level="QueryCoverage=100%, HitCoverage=8%, E-value=9e-36, Identity=91%"; Hit description =Roothairless 1, putative, expressed
NLRRVLKSSLSGIDRSIGAMYRRLQKTLTSDELFPSLWDKCKKEFLDKYESFVQMVTRIYVNEPIMSVAEMKEVLASF

SEQ ID NO: 130720 - protein, 87 aa, Setaria italica
  misc_feature (56)..(56): Xaa can be any naturally occurring amino acid
  Transcript Sequence Number=SeqID_64746
  Homolog annotation: Hit_ID=Q10GJ4; Match level="QueryCoverage=81%, HitCoverage=8%, E-value=3e-27, Identity=90%"; Hit description =Roothairless 1, putative, expressed
ILSCSLLLSIGTIETFSCLLQTERKVTVTVENDLVSQAKEEEEDMEALLDTYVMGXEADAFSERLKQELVALEAANVYQLLESEPLI

SEQ ID NO: 130721 - protein, 83 aa, Setaria italica
  Transcript Sequence Number=SeqID_64747
  Homolog annotation: Hit_ID=Q10GJ4; Match level="QueryCoverage=100%, HitCoverage=6%, E-value=6e-20, Identity=62%"; Hit description =Roothairless 1, putative, expressed
YSSGAVLEPAKLYKLKHLTKVEVISNDPSGCTFVLVFTLTSSALLLVVHLKKPLVIYYQLFMLGLQGFDNLRSQSVAPPQWTM

SEQ ID NO: 130722 - protein, 42 aa, Setaria italica
  Transcript Sequence Number=SeqID_64748
  Homolog annotation: Hit_ID=Q10GJ5; Match level="QueryCoverage=78%, HitCoverage=3%, E-value=1e-11, Identity=93%"; Hit description =Roothairless 1, putative, expressed
TSPSCPKIPSLWDKCKKEFLDKYESFVQMVTRIYVNEPIISA

SEQ ID NO: 130723 - protein, 107 aa, Setaria italica
  Transcript Sequence Number=SeqID_64749
  Homolog annotation: Hit_ID=Q10GJ4; Match level="QueryCoverage=89%, HitCoverage=11%, E-value=5e-46, Identity=91%"; Hit description =Roothairless 1, putative, expressed
NRLNCTDILDSKSSRNVRQTGILAYIPRFAVLASRMKQYIQGQSRDLIDKAYTKLVSTMFATLEKIAQSDPKTADIVLIENYAAFQNSLYDLANVVPTLAKFYHQAS

SEQ ID NO: 130724 - protein, 89 aa, Setaria italica
  Transcript Sequence Number=SeqID_64750
  Homolog annotation: Hit_ID=Q10GJ5; Match level="QueryCoverage=53%, HitCoverage=5%, E-value=4e-21, Identity=95%"; Hit description =Roothairless 1, putative, expressed
VTLSTSLPSLGFFLNCLIKSKSGGNDADDDLGLMDPDGNDLKPDSTSAELGTLNEALQELLDGIQEDFYAVVDWAYKIDPLRCISMHGI

SEQ ID NO: 130725 - protein, 65 aa, Setaria italica
  misc_feature (14)..(14): Xaa can be any naturally occurring amino acid
  misc_feature (20)..(20): Xaa can be any naturally occurring amino acid
  Transcript Sequence Number=SeqID_64751
  Homolog annotation: Hit_ID=Q10GJ5; Match level="QueryCoverage=84%, HitCoverage=6%, E-value=1e-17, Identity=81%"; Hit description =Roothairless 1, putative, expressed
PCYVNMRAVREKRXELEKLXTTFVRRASEFLRNYFSSLVDFMISRQKTNFTTRTKGNKIKKRTEQ

SEQ ID NO: 130726 - protein, 99 aa, Setaria italica
  Transcript Sequence Number=SeqID_64752
  Gene Ontology: Biological process=protein modification process
  Homolog annotation: Hit_ID=Q336W1; Match level="QueryCoverage=68%, HitCoverage=13%, E-value=4e-17, Identity=66%"; Hit description =Ubiquitin family protein, expressed
CKGLGGTGAANSGGLGLFGSGLPELDQMQQQLAENPNLMREMMNMPLMQNLMNNPDLMRNIIMNNPQMRELIDRNPDLAHVLNDPSILRQYCCKSSSLG

SEQ ID NO: 130727 - protein, 154 aa, Setaria italica
  misc_feature (9)..(9): Xaa can be any naturally occurring amino acid
  misc_feature (126)..(126): Xaa can be any naturally occurring amino acid
  Transcript Sequence Number=SeqID_64753
  Gene Ontology: Mol. function=kinase binding; Cellular component =perinuclear region of cytoplasm; Biological process=protein modification process
  Homolog annotation: Hit_ID=Q336W1; Match level="QueryCoverage=100%, HitCoverage=30%, E-value=4e-63, Identity=79%"; Hit description =Ubiquitin family protein, expressed
PLMQNLMNXPDLMRNIIMNNPQMRELIDRNPDLAHVLNDPSILRQTVEAARNPELMREMMRNTDRAMSNIESSPEGFNMLRRMYETVQEPFLNATTMGGEGDRNPNPFAALLGNQGSNQARDPAVXRLPNLLVFLVPGSQGLQAPNINPLPNPW

SEQ ID NO: 130728 - protein, 75 aa, Setaria italica
  misc_feature (65)..(65): Xaa can be any naturally occurring amino acid
  Transcript Sequence Number=SeqID_64754
  Subcellular localization annotation: CTP_CleavageSite=34; ConfidenceScore=5.64e-01
FLLSVIPLGSTNAGSAQGAARPPPASNTNTRSATAGGLGGLGSADLGSVLGGGSDASFLSQVLQXNPTMMQMMQN

SEQ ID NO: 130729 - protein, 149 aa, Setaria italica
  misc_feature (38)..(38): Xaa can be any naturally occurring amino acid
  misc_feature (56)..(56): Xaa can be any naturally occurring amino acid
  Transcript Sequence Number=SeqID_64755
VAKFCEHAGGTPEKAGEIVHVENGMTIAQWFKFCIGVXGSIANTRWDWPDWACMKXSPEEYMLKSLASRNSGTGKVRLLGGYGKINGLINNPAYSSDLYIEGGGCTNVDKQMNGSVGTNYKKSVDVHEGLTKDSALLQNSTTMNVRDYD

SEQ ID NO: 130730 - protein, 85 aa, Setaria italica
  misc_feature (77)..(77): Xaa can be any naturally occurring amino acid
  Transcript Sequence Number=SeqID_64756
  Gene Ontology: Mol. function=ligase activity; Biological process =response to auxin stimulus
  Homolog annotation: Hit_ID=P0C0M2; Match level="QueryCoverage=100%, HitCoverage=13%, E-value=7e-34, Identity=82%"; Hit description =Probable indole-3-acetic acid-amido synthetase GH3.2
PDPDLAGFVEAVCAAADKENKWEGIITRVWPNTKYLDVIVTGAMAQYIPTLKYYSDGLPMACTMYASSECYFGLNLXRPMCDPSE

SEQ ID NO: 130731 - protein, 88 aa, Setaria italica
  Transcript Sequence Number=SeqID_64757
ESPLHLLDDRTFTLYTFFPDSSDMPINEVRNQGRGLAHWSVVSEKESCTDFSDEQERRRGCQVVILAKPINYSAMKKSGHREPSKRSS

SEQ ID NO: 130732 - protein, 53 aa, Setaria italica
  Transcript Sequence Number=SeqID_64758
ESPLHLLDDRTFTLYTFFPDSSDMPINEVRNQGRGPCSLECSELKKESCTDFS

SEQ ID NO: 130733 - protein, 80 aa, Setaria italica
  Transcript Sequence Number=SeqID_64759
  Gene Ontology: Mol. function=ER retention sequence binding; Cellular component=endoplasmic reticulum; Biological process=protein retention in ER lumen
  Homolog annotation: Hit_ID=A3CB63; Match level="QueryCoverage=100%, HitCoverage=34%, E-value=1e-39, Identity=97%"; Hit description=ER lumen protein retaining receptor
QLVLLQRTRNIDNLTGQYVFFLGAYRVLYIFNWIYRYFTEPHFVHWISWVAGIVQTLLYADFFYYYTMSWKNNVKLELPA

SEQ ID NO: 130734 - protein, 89 aa, Setaria italica
  Transcript Sequence Number=SeqID_64760
  Subcellular localization annotation: CTP_CleavageSite=20; ConfidenceScore=5.09e-01
VVESGSESAAPKKHKTGRPSSAAKKQKTENPSSATKNQETENKPSTIKEAESAPLNMKIEKAVLVAVNSRRSQRVRKPKVLMNEAEKLL

SEQ ID NO: 130735 - protein, 50 aa, Setaria italica
  Transcript Sequence Number=SeqID_64761
LLILRIFQYLADKQNKGAETGGILIDDDCGSTVDGCIRGGLDTITLLNSE

SEQ ID NO: 130736 - protein, 129 aa, Setaria italica
  misc_feature (33)..(33): Xaa can be any naturally occurring amino acid
  misc_feature (49)..(49): Xaa can be any naturally occurring amino acid
  Transcript Sequence Number=SeqID_64762
NRPYEIDYEARSGTPAPVSKVKADGGEPEVDSXFSADANGSGYSKLPRXKKVTAEWRDSVLPILWRCQWLELRVKELSSQVSKYDRELALIKKEKELQLAVSKANVSRLESRQIHKGHGDSIMKRRKRK

SEQ ID NO: 130737 - protein, 47 aa, Setaria italica
  Transcript Sequence Number=SeqID_64763
MDQLLGTDNSIPNGHIGDLCKENTYDILIDNQAANVVYRQFGKAKHL

SEQ ID NO: 130738 - protein, 71 aa, Setaria italica
  Transcript Sequence Number=SeqID_64764
CTPCPMLAPPLVSVAPATAPAAAIDVLRTGAVVAPGRQEPKQHGGGDSRGRLHERWPSEGGGSWPCYRSGR

SEQ ID NO: 130739 - protein, 84 aa, Setaria italica
  Transcript Sequence Number=SeqID_64765
  Gene Ontology: Mol. function=metallopeptidase activity
  Homolog annotation: Hit_ID=B9SD61; Match level="QueryCoverage=52%, HitCoverage=7%, E-value=9e-10, Identity=64%"; Hit description =Leukotriene A-4 hydrolase, putative
  Subcellular localization annotation: CTP_CleavageSite=54; ConfidenceScore=5.73e-01
GGCCRGSTSRSNLSHSYGPNSDSPTLTISSTPANSLTLPPDTTSFRLTFSTSPDASALQWLAPPQTASGQPFVFSQCQSIHARS

SEQ ID NO: 130740 - protein, 53 aa, Setaria italica
  misc_feature (24)..(24): Xaa can be any naturally occurring amino acid
  Transcript Sequence Number=SeqID_64766
  Gene Ontology: Mol. function=metallopeptidase activity; Cellular component=cytoplasm; Biological process=leukotriene biosynthetic process
  Homolog annotation: Hit_ID=Q9FY49; Match level="QueryCoverage=98%, HitCoverage=8%, E-value=2e-19, Identity=86%"; Hit description =Leukotriene-A4 hydrolase-like protein
PKMAGIDPDDVYSEVPYEKGFQFXWRIERQIGRPAFDEFLKKYIATFKFKSID

SEQ ID NO: 130741 - protein, 74 aa, Setaria italica
  Transcript Sequence Number=SeqID_64767
  Gene Ontology: Mol. function=metallopeptidase activity; Biological process=leukotriene biosynthetic process
  Homolog annotation: Hit_ID=B9SD61; Match level="QueryCoverage=97%, HitCoverage=11%, E-value=3e-21, Identity=69%"; Hit description =Leukotriene A-4 hydrolase, putative
YVFFVISLKTNVPGIENQIDLQLWVEGTGIPPDAMEPDSATYKKICDLAAEFKSGKLPSEDEVADWSGQEWELY

SEQ ID NO: 130742 - protein, 78 aa, Setaria italica
  Transcript Sequence Number=SeqID_64768
  Gene Ontology: Mol. function=metal ion binding
  Homolog annotation: Hit_ID=B6T446; Match level="QueryCoverage=100%, HitCoverage=40%, E-value=1e-28, Identity=58%"; Hit description=RING finger and CHY zinc finger domain-containing protein 1
  Pfam annotation: Domain name=Prot_inhib_II; Domain location=8-65; Score=1.3; E_value=0.054; Accession=PF02428.7; Description=Potato type II proteinase inhibitor family
  Pfam annotation: Domain name=zf-CHY; Domain location=1-53; Score =31.4; E_value=7.7e-07; Accession=PF05495.4; Description=CHY zinc finger
  Pfam module annotation: Pfam domain module=Prot_inhib_II::zf-CHY; Domain location=8-65::1-53
CRHCHNDAKNSLEVDPRDRHEIPRHEINKVQQNCSNCGACMGKYFCEICNFFDDDISKGQYHCHGCGICRTGGADNFF

SEQ ID NO: 130743 - protein, 37 aa, Setaria italica
  Transcript Sequence Number=SeqID_64769
DVLKLFYYTGDLHSLFQRTGCKLSNQIVLQVIQEHLL

SEQ ID NO: 130744 - protein, 88 aa, Setaria italica
  misc_feature (1)..(1): Xaa can be any naturally occurring amino acid
  misc_feature (14)..(14): Xaa can be any naturally occurring amino acid
  Transcript Sequence Number=SeqID_64770
  Gene Ontology: Mol. function=GTP binding; Cellular component =intracellular
  Homolog annotation: Hit_ID=B6SV10; Match level="QueryCoverage=98%, HitCoverage=17%, E-value=8e-43, Identity=98%"; Hit description=Small GTP-binding protein domain
  Pfam annotation: Domain name=GTP1_OBG; Domain location=15-87; Score= -101.7; E_value=0.052; Accession=PF01018.14; Description=GTP1OBG family
XKKSKKVSYKRNYXGSVALPTGGHGGDVVVYADEAEETLLRFHEKARYCAKRGGNVGAAGGTLSSRMHSGFAGETLRIPVPVGTVVKR

SEQ ID NO: 130745 - protein, 73 aa, Setaria italica
  Transcript Sequence Number=SeqID_64771
  Gene Ontology: Mol. function=protein serine/threonine kinase activity; Biological process=protein amino acid phosphorylation
  Homolog annotation: Hit_ID=Q4PLL4; Match level="QueryCoverage=63%, HitCoverage=4%, E-value=2e-14, Identity=82%"; Hit description=SHR5 -receptor-like kinase (Fragment)
GIHNRLFPLYKHHLSRCPCFTILYCTHFRFLGNNSLTGSLPDVKSPSLKNLDFSYNQLTGSFPSWATESNLRL

SEQ ID NO: 130746 - protein, 146 aa, Setaria italica
  Transcript Sequence Number=SeqID_64772
  Gene Ontology: Mol. function=protein serine/threonine kinase activity; Biological process=protein amino acid phosphorylation
  Homolog annotation: Hit_ID=Q7F106; Match level="QueryCoverage=98%, HitCoverage=14%, E-value=8e-68, Identity=84%"; Hit description =Putative Receptor-like serine/threonine kinase(RFK1)
  Pfam annotation: Domain name=Pkinase; Domain location=1-146; Score= -52.9; E_value=2.4e-05; Accession=PF00069.17; Description=Protein kinase domain
  Pfam annotation: Domain name=Pkinase_Tyr; Domain location=2-146; Score=-63.5; E_value=1.7e-09; Accession=PF07714.9; Description =Protein tyrosine kinase
  Pfam module annotation: Pfam domain module=Pkinase::Pkinase_Tyr; Domain location=1-146::2-146
DGRVIAVKQLSQSSHQGKRQFVAEVATISAVQHRNLVKLHGCCIDSNTHLLVYEYLENGSLDRALFGDSSMKLDWSTRFEIILGIARGLTYLHEESSIRIVHRDIKASNVLLDTNLSPKVSDFGLAKLYEENKSHVSTTRIARTTI

SEQ ID NO: 130747 - protein, 85 aa, Setaria italica
  Transcript Sequence Number=SeqID_64773
  Gene Ontology: Mol. function=protein serine/threonine kinase activity; Biological process=protein amino acid phosphorylation
  Homolog annotation: Hit_ID=Q4PLL4; Match level="QueryCoverage=76%, HitCoverage=6%, E-value=9e-22, Identity=73%"; Hit description=SHR5 -receptor-like kinase (Fragment)
SVFRILDPRLKEFDAEEALRVIHVALICTQGSPHQRPPMSRVVAMLTGKAEVADEVAKPSYVVTDWQLRGGGSSSCTTTSSYWGV

SEQ ID NO: 130748 - protein, 86 aa, Setaria italica
  Transcript Sequence Number=SeqID_64774
  Gene Ontology: Mol. function=nucleotidyltransferase activity
  Homolog annotation: Hit_ID=B9RDG6; Match level="QueryCoverage=82%, HitCoverage=10%, E-value=4e-30, Identity=81%"; Hit description =Poly(A) polymerase cid, putative
MLARGHCFPHPFDTCFSKERKDWTRRVGNDRHLICIEDPFETSHDLGRVVDKFTIKILREEFERAANILQFDPNPSVTLFEPYVAP

SEQ ID NO: 130749 - protein, 90 aa, Setaria italica
  Transcript Sequence Number=SeqID_64775
  Gene Ontology: Mol. function=nucleotidyltransferase activity
  Homolog annotation: Hit_ID=B9RDG6; Match level="QueryCoverage=78%, HitCoverage=10%, E-value=2e-23, Identity=61%"; Hit description =Poly(A) polymerase cid, putative
MCIHLLQLRRILPCLQLRRILPCLQEMEATYFVTVDESNCAYFDQVDKLNNYGAHSRDTVSRLLWAFFHYWAYEHDYTRDVISIRTGRII

SEQ ID NO: 130750 - protein, 80 aa, Setaria italica
  Transcript Sequence Number=SeqID_64776
FFFVTWIENKKGGCILSHNITKAICHATSPMLDNCQLNLTEAAKYRYPPGNYTAKYLCCTAMHKTQQNNTSEHKASGSTR

SEQ ID NO: 130751 - protein, 98 aa, Setaria italica
  Transcript Sequence Number=SeqID_64777
  Gene Ontology: Mol. function=binding
KERKTKKQPHAAQLCSSEICLQYLDYENCIGQAKEALRMTASSCVDTFFAHLQLCRAYAVQGDLLNSRNEYMNCLKNHTNIEMGWVILKHLESACSLE

SEQ ID NO: 130752 - protein, 46 aa, Setaria italica
  Transcript Sequence Number=SeqID_64778
PDKPSRHFLNLCRNISASSKTVSSMVHLINDTRDRCTSSFLNSTGA

SEQ ID NO: 130753 - protein, 61 aa, Setaria italica
  Transcript Sequence Number=SeqID_64779
KGVTELTLLSTLDRLNNGEDRKLLNEDKAEPVVSNGTLTDHLHKSSSDLRLNMAPITLCAI

SEQ ID NO: 130754 - protein, 59 aa, Setaria italica
  Transcript Sequence Number=SeqID_64780
IWRRYVFTGSKLNRPFLLSCIYLCKPAYSSYWDHVACLMLVKCYHVNLPSCSKVKYREC

SEQ ID NO: 130755 - protein, 80 aa, Setaria italica
  Transcript Sequence Number=SeqID_64781
FFFLYYNCFFIKGKVARGFKQSVYCITIAYQSNASWFSFGVAFDPFTVLPPQLASNKSYGYIYCATDSTAKECTSEFDVN

SEQ ID NO: 130756 - protein, 42 aa, Setaria italica
  Transcript Sequence Number=SeqID_64782
MALSWPSAVRLAVATVLLVAVGVALFTLPVEKILKDFLVWIK

SEQ ID NO: 130757 - protein, 142 aa, Setaria italica
  misc_feature (123)..(123): Xaa can be any naturally occurring amino acid
  Transcript Sequence Number=SeqID_64783
  Gene Ontology: Mol. function=electron carrier activity; Biological process=oxidation reduction
  Homolog annotation: Hit_ID=B6TDZ7; Match level="QueryCoverage=88%, HitCoverage=23%, E-value=3e-51, Identity=79%"; Hit description =Cytochrome P450 CYP709H1
WVRTLSSGLVCLGRSLVRPSSRRGSAETLTADEVIDECKTFFAAGQETTATLLVWAMFLLAVHPQWQDRVREEVLREFRGGDGEAPSADVLGQLKLLHMVLLETSRLYPPIVYIQRRPPWTSXLAGIKVPQGTVISIPIAML

SEQ ID NO: 130758 - protein, 94 aa, Setaria italica
  Transcript Sequence Number=SeqID_64784
  Gene Ontology: Biological process=DNA repair
IFVIMLGPGSSSEANKAEEHNVSGQAADRSNINSGGEPSGSNPWLFNVEDIDPAVVEELPLEIQREIQGWIRPSKEPSTKRRGFLPISSLLPTR

SEQ ID NO: 130759 - protein, 137 aa, Setaria italica
  misc_feature (15)..(15): Xaa can be any naturally occurring amino acid
  Transcript Sequence Number=SeqID_64785
  Homolog annotation: Hit_ID=Q10T35; Match level="QueryCoverage=81%, HitCoverage=32%, E-value=5e-46, Identity=79%"; Hit description=2 -phosphoglycerate kinase, putative, expressed
SYAESHKTSTHDSGXSQEKNPKDESDGHKDLGQPKNNTAKKDKPAAEPIVVPIVLRMSDFDHKALLEEWIATRAFRDNCLPQDHRKLINNLKLIQDYLCSFESQGLTIVDIIQTKLRLPNKTLRKIKGNLKQKQKRK

SEQ ID NO: 130760 - protein, 66 aa, Setaria italica
  Transcript Sequence Number=SeqID_64786
IDKYDISWQVGITIDHSPCNISSHEKQLPFNVNYNLFSAYRLHNNFKEITVCQLHVYQSFHRGVDT

SEQ ID NO: 130761 - protein, 44 aa, Setaria italica
  Transcript Sequence Number=SeqID_64787
NRAALEMLLRIEYKSIEQSIESMSRLQLQYISQQNNLPNNKSKF

SEQ ID NO: 130762 - protein, 61 aa, Setaria italica
  Transcript Sequence Number=SeqID_64788
FKVGCRYYFLTTQQEQEQEQYRMMGGCMMHIYNGDMGYIGRLSNDTSSILGYCTIGRPDLV

SEQ ID NO: 130763 - protein, 82 aa, Setaria italica
  Transcript Sequence Number=SeqID_64789
  Gene Ontology: Mol. function=metal ion binding; Cellular component =nucleus; Biological process=multicellular organismal development
  Homolog annotation: Hit_ID=B6T6E1; Match level="QueryCoverage=86%, HitCoverage=35%, E-value=5e-26, Identity=86%"; Hit description =Protein DROOPING LEAF
  Subcellular localization annotation: CTP_CleavageSite=53; ConfidenceScore=5.06e-01
TCSKLSVHLSTNLLPYLSPRPPMVQPLSPTDHHPLGPFQGPCNDCRRNQPMPLASPTSDASPRMPFVVKPPEKKHRLPSAYN

SEQ ID NO: 130764 - protein, 115 aa, Setaria italica
  Transcript Sequence Number=SeqID_64790
  Gene Ontology: Mol. function=ribonucleoside-diphosphate reductase activity; Cellular component=cytoplasm; Biological process =deoxyribonucleoside diphosphate metabolic process
  Homolog annotation: Hit_ID=A6N1K9; Match level="QueryCoverage=82%, HitCoverage=40%, E-value=2e-48, Identity=96%"; Hit description =Ribonucleoside-diphosphate reductase small chain
  Pfam annotation: Domain name=Ribonuc_red_sm; Domain location=1-115; Score=-44.2; E_value=2.3e-05; Accession=PF00268.13; Description =Ribonucleotide reductase, small chain
TRLDYEEPNNTDERTTEKDRLFRAIDTVPAVRRKADWAMRWIDGGERFAERLVAFACVEGIFFSGSFCAIFWLKKRGLMPGLTFSNELISRDEGLHCDFACLLYDLLRKQARRAP

SEQ ID NO: 130765 - protein, 79 aa, Setaria italica
  misc_feature (74)..(74): Xaa can be any naturally occurring amino acid
  Transcript Sequence Number=SeqID_64791
  Homolog annotation: Hit_ID=B4FGF9; Match level="QueryCoverage=84%, HitCoverage=16%, E-value=9e-31, Identity=94%"; Hit description=Kelch motif family protein
MLSHPLPRDSNVQALEKEWRSEIPIPRGGPHRACVVANDKLFVIGGQEGDFMAKPGSPIFKCVRRSEVVYSNVXMLDDG

SEQ ID NO: 130766 - protein, 121 aa, Setaria italica
  misc_feature (19)..(19): Xaa can be any naturally occurring amino acid
  misc_feature (63)..(63): Xaa can be any naturally occurring amino acid
  misc_feature (74)..(74): Xaa can be any naturally occurring amino acid
  Transcript Sequence Number=SeqID_64792
  Homolog annotation: Hit_ID=B4FGF9; Match level="QueryCoverage=61%, HitCoverage=22%, E-value=3e-27, Identity=69%"; Hit description=Kelch motif family protein
  Subcellular localization annotation: CTP_CleavageSite=75; ConfidenceScore=5.04e-01
MARPAAKARPPKHLVGRLXVVAVLGLVLVADYLWASSSSSAVWSSRLTLPTSPAVQAPPVAKXDLPAPELEWGXMAEAPVARLDGAAIQIKNLLYVFAGYGTINHVHSHVDIYNFSDNTWV

SEQ ID NO: 130767 - protein, 58 aa, Setaria italica
  Transcript Sequence Number=SeqID_64793
  Homolog annotation: Hit_ID=B4FGF9; Match level="QueryCoverage=67%, HitCoverage=9%, E-value=6e-15, Identity=92%"; Hit description=Kelch motif family protein
EDRHEPGLEHWSLAVKDGKALEKEWRSEIPIPRGGPHRSITFPSYVINSFTFIGKQCC

SEQ ID NO: 130768 - protein, 159 aa, Setaria italica
  misc_feature (71)..(71): Xaa can be any naturally occurring amino acid
  Transcript Sequence Number=SeqID_64794
  Gene Ontology: Mol. function=protein serine/threonine kinase activity; Cellular component=plasma membrane; Biological process =protein amino acid phosphorylation
  Homolog annotation: Hit_ID=B9SKG0; Match level="QueryCoverage=61%, HitCoverage=21%, E-value=5e-34, Identity=73%"; Hit description=ATP binding protein, putative
  Subcellular localization annotation: CTP_CleavageSite=45; ConfidenceScore=5.96e-01
CRSPAAASFPSTVSTGARSNLSFSTASSAVGMSLSEDSSAAVRAAASKSSGSASVSSARSIPELYEERGSXSLREFGFRELRAATSDFSRLLKVGEGGFGSVYKGVVRLPGGSAGGTVVAIKKLNPNGHQGHKQWLAEVHFLGVVEHPNLVNLIGYCAS

SEQ ID NO: 130769 - protein, 95 aa, Setaria italica
  misc_feature (31)..(31): Xaa can be any naturally occurring amino acid
  Transcript Sequence Number=SeqID_64795
  Gene Ontology: Mol. function=protein serine/threonine kinase activity; Biological process=protein amino acid phosphorylation
  Homolog annotation: Hit_ID=B9SKG0; Match level="QueryCoverage=50%, HitCoverage=10%, E-value=4e-10, Identity=70%"; Hit description=ATP binding protein, putative
GGSGAATSDFSRLLKVGEGGFGSVYKGVVRXCPGGSAGGTVVAIKKLNPNGHQVPIGGFLAHRITLSWFIMNLFTVYCFVPSVDGHHKNQFSAIG

SEQ ID NO: 130770 - protein, 57 aa, Setaria italica
  Transcript Sequence Number=SeqID_64796
  Gene Ontology: Mol. function=dihydrolipoyl dehydrogenase activity; Cellular component=cytoplasm; Biological process=cell redox homeostasis
  Homolog annotation: Hit_ID=A2ZSP3; Match level="QueryCoverage=96%, HitCoverage=11%, E-value=3e-16, Identity=72%"; Hit description =Dihydrolipoyl dehydrogenase
VLFSPEFTSLNTGQVTFVEALDQLMPGFDPEIAKLAQRVLINPRKIDYHTSVLQARL

SEQ ID NO: 130771 - protein, 82 aa, Setaria italica
  misc_feature (29)..(29): Xaa can be any naturally occurring amino acid
  Transcript Sequence Number=SeqID_64797
  Gene Ontology: Mol. function=dihydrolipoyl dehydrogenase activity; Cellular component=cytoplasm; Biological process=cell redox homeostasis
  Homolog annotation: Hit_ID=Q75M05; Match level="QueryCoverage=98%, HitCoverage=13%, E-value=3e-28, Identity=77%"; Hit description =Dihydrolipoyl dehydrogenase
HAADLIHEASNAIALGTRVQDIKLAVHAXPTLSEVLDELFKAAKLQPREGRDSKLSQPPQPLLKALSFITALLSFPRQDRQQ

SEQ ID NO: 130772 - protein, 102 aa, Setaria italica
  Transcript Sequence Number=SeqID_64798
  Gene Ontology: Mol. function=dihydrolipoyl dehydrogenase activity; Cellular component=cytoplasm; Biological process=cell redox homeostasis
  Homolog annotation: Hit_ID=Q75M05; Match level="QueryCoverage=80%, HitCoverage=13%, E-value=7e-39, Identity=96%"; Hit description =Dihydrolipoyl dehydrogenase
GVPNGRPSSCLRPFVGRVFVKLAIIEGDVVGGTCVNRGCVPSKALLAVSGRMRELHDEHHMKSLGLQVSSTGYDRQAVADHANNLASKIRSNLTNSMKALGR

SEQ ID NO: 130773 - protein, 50 aa, Setaria italica
  Transcript Sequence Number=SeqID_64799
RRSGQQAEPATPTAPEGPQLHHGPAIFPETGSATIVQQGEEVLYYLTSAV

SEQ ID NO: 130774 - protein, 114 aa, Setaria italica
  Transcript Sequence Number=SeqID_64800
  Gene Ontology: Mol. function=nucleic acid binding
  Homolog annotation: Hit_ID=Q1ANZ5; Match level="QueryCoverage=99%, HitCoverage=32%, E-value=1e-46, Identity=80%"; Hit description=DIP1
GTVTNEEGYASNVDPFLVEALDNPRHRLMVLRMELDIQKFMQNPQLQEFEFQNFPTSYLRCAAHRVAQHYGLETTVADSLVDGSVSRIVARKHRKADIHRLLYQKFPANSKNDH

SEQ ID NO: 130775 - protein, 118 aa, Setaria italica
  misc_feature (38)..(38): Xaa can be any naturally occurring amino acid
  misc_feature (69)..(69): Xaa can be any naturally occurring amino acid
  Transcript Sequence Number=SeqID_64801
  Gene Ontology: Mol. function=nucleic acid binding
  Homolog annotation: Hit_ID=B6T781; Match level="QueryCoverage=100%, HitCoverage=33%, E-value=6e-47, Identity=79%"; Hit description =Nucleic acid binding protein
PTSYLRCAAHRVAQHYGLETTVADSLVDGSVSRIVARXTPESRYPPIALSEVSSKQARNDHEAAEKLKXVIYQRPKVFQNGAADAGNKNGAPKTVEERIEEYNKARARIFNGSISADT

SEQ ID NO: 130776 - protein, 114 aa, Setaria italica
  misc_feature (39)..(40): Xaa can be any naturally occurring amino acid
  Transcript Sequence Number=SeqID_64802
  Gene Ontology: Mol. function=nucleic acid binding
  Homolog annotation: Hit_ID=B6T781; Match level="QueryCoverage=91%, HitCoverage=29%, E-value=8e-36, Identity=75%"; Hit description =Nucleic acid binding protein
QARNDHEAAEKLKFVIYQRPKVFQNGAADAGNKNGAPKXXVEERIEEYNKARARIFNGSISADTDAASVLGALSTGRDEPVNVEPPADEIKVSTMNSRSRVDKFYKGITRKKNT

SEQ ID NO: 130777 - protein, 73 aa, Setaria italica
  misc_feature (34)..(34): Xaa can be any naturally occurring amino acid
  Transcript Sequence Number=SeqID_64803
  Gene Ontology: Mol. function=nucleic acid binding
  Homolog annotation: Hit_ID=B6T781; Match level="QueryCoverage=84%, HitCoverage=17%, E-value=2e-15, Identity=70%"; Hit description =Nucleic acid binding protein
VEERIEEYNKARARIFNGSISADTDAASVLGRLXSTGRDEPVNVEPPADENQKYKTTNRNKTVTKGTTSFTKE

SEQ ID NO: 130778 - protein, 113 aa, Setaria italica
  misc_feature (79)..(79): Xaa can be any naturally occurring amino acid
  Transcript Sequence Number=SeqID_64804
  Gene Ontology: Mol. function=nucleic acid binding
  Homolog annotation: Hit_ID=Q1ANZ5; Match level="QueryCoverage=90%, HitCoverage=29%, E-value=1e-29, Identity=66%"; Hit description=DIP1
KTNDKENTNPNTKRQAEKLKFVIYQRPQKYSKNGAADAGNKNGAPKTVEERIEEYNKARARIFNGSISADTDAASVFGXLSTGRDEPVNVEPPADEIKVSTMNSRSRVAVFQG

SEQ ID NO: 130779 - protein, 77 aa, Setaria italica
  misc_feature (49)..(49): Xaa can be any naturally occurring amino acid
  Transcript Sequence Number=SeqID_64805
  Gene Ontology: Mol. function=nucleic acid binding
  Homolog annotation: Hit_ID=B6T781; Match level="QueryCoverage=93%, HitCoverage=20%, E-value=4e-32, Identity=88%"; Hit description =Nucleic acid binding protein
LVTSNLMQYGVGYVQSPGMSTNQPTVYFGQPDLSMGSSSGAAVYPHWPXPAMMYPHCYDNTGPMMSQVPLYQSFNHG

SEQ ID NO: 130780 - protein, 77 aa, Setaria italica
  misc_feature (8)..(8): Xaa can be any naturally occurring amino acid
  Transcript Sequence Number=SeqID_64806
  Gene Ontology: Mol. function=nucleic acid binding
  Homolog annotation: Hit_ID=B6T781; Match level="QueryCoverage=63%, HitCoverage=14%, E-value=2e-15, Identity=85%"; Hit description =Nucleic acid binding protein
VSRIVARXTPESRYPPIALSEVSSKQARNDHEAAEKLKFVIYQRPKVFQNGAADAGNKNGAPGFKLKSGTGLLTYLL

SEQ ID NO: 130781 - protein, 78 aa, Setaria italica
  misc_feature (9)..(9): Xaa can be any naturally occurring amino acid
  misc_feature (11)..(11): Xaa can be any naturally occurring amino acid
  misc_feature (49)..(49): Xaa can be any naturally occurring amino acid
  Transcript Sequence Number=SeqID_64807
  Gene Ontology: Mol. function=nucleic acid binding
  Homolog annotation: Hit_ID=B6T781; Match level="QueryCoverage=97%, HitCoverage=21%, E-value=2e-31, Identity=86%"; Hit description =Nucleic acid binding protein
FVVPQFMQXGXGYVQSPGMSTNQPTVYFGQPDLSMGSSSGAAVYPHWPXPPAMMYPHCYDNTGPMMSQVPLYQSFNHG

SEQ ID NO: 130782 - protein, 89 aa, Setaria italica
  Transcript Sequence Number=SeqID_64808
  Gene Ontology: Mol. function=nucleic acid binding
  Homolog annotation: Hit_ID=Q1ANZ5; Match level="QueryCoverage=52%, HitCoverage=13%, E-value=3e-19, Identity=95%"; Hit description=DIP1
HTHTQRERAPKRRKKNAFHNTRLRDEGARAAEAVVAVDERVASNVDPFLVEALDNPRHRLMVLRMELDIQKFMQNPQLQEFEFQNFPTS

SEQ ID NO: 130783 - protein, 70 aa, Setaria italica
  Transcript Sequence Number=SeqID_64809
  Gene Ontology: Mol. function=nucleic acid binding
  Homolog annotation: Hit_ID=B6T781; Match level="QueryCoverage=95%, HitCoverage=19%, E-value=2e-26, Identity=88%"; Hit description =Nucleic acid binding protein
AAQHYGLETTVADSLVDGSVSRIVARKTPESRYPPIALSEVSSKQARNDHEAAEKLKFVIYQRPKVFQMA

SEQ ID NO: 130784 - protein, 77 aa, Setaria italica
  misc_feature (16)..(16): Xaa can be any naturally occurring amino acid
  misc_feature (69)..(69): Xaa can be any naturally occurring amino acid
  Transcript Sequence Number=SeqID_64810
  Gene Ontology: Mol. function=nucleic acid binding
  Homolog annotation: Hit_ID=Q1ANZ5; Match level="QueryCoverage=100%, HitCoverage=21%, E-value=8e-24, Identity=72%"; Hit description=DIP1
NDHEAAEKLKFVIYQXRPKVFQNGAADAGNKNGAPKTVEERIEEYNKARARIFNGSISADTDAASVFGXLSTGRDEP

SEQ ID NO: 130785 - protein, 61 aa, Setaria italica
  Transcript Sequence Number=SeqID_64811
  Homolog annotation: Hit_ID=B6T781; Match level="QueryCoverage=98%, HitCoverage=17%, E-value=4e-13, Identity=63%"; Hit description =Nucleic acid binding protein
KKTPESRYPPIALSEVSSKQARNDHEAAEKLKFVIYQRPKVFQNGAADAGNKNGAPKLLKR

SEQ ID NO: 130786 - protein, 51 aa, Setaria italica
  misc_feature (2)..(2): Xaa can be any naturally occurring amino acid
  Transcript Sequence Number=SeqID_64812
FXFFFFSRLVHNNSFIELGLLIQTTFDTTRSFVIEMVPFLQILMLQVFWEL

SEQ ID NO: 130787 - protein, 42 aa, Setaria italica
  Transcript Sequence Number=SeqID_64813
DFDLISRRLNIHWLISASGKSSQNTCSDEPVNVEPPADEIKV

SEQ ID NO: 130788 - protein, 94 aa, Setaria italica
  misc_feature (13)..(13): Xaa can be any naturally occurring amino acid
  Transcript Sequence Number=SeqID_64814
IMNTVDELKDDLXSELFHKPSESKPKAYPPRPSKQDGHMTRAALTSSAPLAAYHPAAKHSGYAARISRSGQVAPRGLPSLRYRRHRVYSVVLFY

SEQ ID NO: 130789 - protein, 104 aa, Setaria italica
  Transcript Sequence Number=SeqID_64815
VRYVLLFRFVLVLVSVRSYVRVCHYRPTARPADNAIILQAFVSAYTDPRRASARPRRTLSGASAGGGDGCELGSELRPSFIPRDSLGHGTLRGERAGPHPRTAR

SEQ ID NO: 130790 - protein, 97 aa, Setaria italica
  misc_feature (40)..(40): Xaa can be any naturally occurring amino acid
  misc_feature (78)..(78): Xaa can be any naturally occurring amino acid
  Transcript Sequence Number=SeqID_64816
  Gene Ontology: Mol. function=ferrochelatase activity; Cellular component=chloroplast; Biological process=porphyrin biosynthetic process
  Homolog annotation: Hit_ID=B6TQ47; Match level="QueryCoverage=95%, HitCoverage=19%, E-value=4e-44, Identity=90%"; Hit description =Ferrochelatase
KHCQEDRFFAGLPISIIESWYQRDGYVKSMADLIEKEISXFSNPEEVMIFFSAHGVPLTYVEDAGDPYRDQMEDCIAXLIMGELRSRGILNSHTLRQ

SEQ ID NO: 130791 - protein, 49 aa, Setaria italica
  Transcript Sequence Number=SeqID_64817
  Gene Ontology: Mol. function=transferase activity
  Homolog annotation: Hit_ID=B9T226; Match level="QueryCoverage=87%, HitCoverage=11%, E-value=1e-10, Identity=72%"; Hit description =Geranylgeranyl transferase type I beta subunit, putative
VKEPCHSGSHLASTYSALSILKIVGYDLANIDSKALLSSMKKLQQPDGR

SEQ ID NO: 130792 - protein, 49 aa, Setaria italica
  Transcript Sequence Number=SeqID_64818
  Gene Ontology: Mol. function=protein binding
  Homolog annotation: Hit_ID=Q9AT39; Match level="QueryCoverage=97%, HitCoverage=13%, E-value=3e-15, Identity=79%"; Hit description =SHOOT1 protein
DYKRIRTDPDLENLRKSEQFDPLMKNYDESFINENALNAIKSLFRFGKN

SEQ ID NO: 130793 - protein, 90 aa, Setaria italica
  Transcript Sequence Number=SeqID_64819
  Gene Ontology: Mol. function=protein binding
  Homolog annotation: Hit_ID=B9SBN8; Match level="QueryCoverage=51%, HitCoverage=13%, E-value=2e-10, Identity=71%"; Hit description =Protein binding protein, putative
GDDGGGGGCLDRREGCLVREALVSTCDVQEKVERPYEEYEITIEKPYGLKFAKGRDGAHTSRPSSPGGAAEKTGQFTVGDKVLATSAVSG

SEQ ID NO: 130794 - protein, 74 aa, Setaria italica
  misc_feature (61)..(61): Xaa can be any naturally occurring amino acid
  Transcript Sequence Number=SeqID_64820
  Gene Ontology: Mol. function=protein binding
  Homolog annotation: Hit_ID=Q9AT39; Match level="QueryCoverage=78%, HitCoverage=15%, E-value=1e-17, Identity=75%"; Hit description =SHOOT1 protein
GRRESRAEEVGCCSVWEEDLRTGLRLYKDGKYEEALEKFESVLGSKPESNEASIASYNVAXCCYSKLDRIQAGL

SEQ ID NO: 130795 - protein, 52 aa, Setaria italica
  Transcript Sequence Number=SeqID_64821
HASLVCSVGICVQLIFAYALADLIKTNMLTHRQILVGHRYQRCIRAMVSVSN

SEQ ID NO: 130796 - protein, 79 aa, Setaria italica
  Transcript Sequence Number=SeqID_64822
RRQRPRHLTLTASAVAVSACLIFFSAIRSMLACKREAEFLEKYFDSAREKLPETMASLRLIGREVGDLAADLSDLSQEL

SEQ ID NO: 130797 - protein, 128 aa, Setaria italica
  misc_feature (53)..(53): Xaa can be any naturally occurring amino acid
  misc_feature (100)..(100): Xaa can be any naturally occurring amino acid
  Transcript Sequence Number=SeqID_64823
  Gene Ontology: Mol. function=transferase activity; Cellular component= membrane
  Homolog annotation: Hit_ID=B6UFM1; Match level="QueryCoverage=90%, HitCoverage=34%, E-value=6e-50, Identity=68%"; Hit description =Exostosin-like
VVAPYVHVVASFIDDDAPDPFEARHTLLFFRGRTVRKDEGKIRAKLANILKGXNGVRFENSFATGDGIKISTEGMRSSKFCLHPAGDTPSSCRLFDAILXEALRPDYLLNQLRQIPKKKWMEMWLKLK

SEQ ID NO: 130798 - protein, 61 aa, Setaria italica
  Transcript Sequence Number=SeqID_64824
  Gene Ontology: Mol. function=two-component sensor activity; Cellular component=membrane
  Homolog annotation: Hit_ID=B6SY20; Match level="QueryCoverage=85%, HitCoverage=8%, E-value=5e-18, Identity=80%"; Hit description=ATP binding protein
SGPLSNIQTLAKMLSVHMKRTEIPYDIIEDILIQGDHLKDALQQIQEAVYLTKVVFKVYCC

SEQ ID NO: 130799 - protein, 47 aa, Setaria italica
  misc_feature (10)..(10): Xaa can be any naturally occurring amino acid
  Transcript Sequence Number=SeqID_64825
  Gene Ontology: Mol. function=ATP binding; Cellular component=membrane
  Homolog annotation: Hit_ID=B6SY20; Match level="QueryCoverage=91%, HitCoverage=6%, E-value=2e-12, Identity=90%"; Hit description=ATP binding protein
YAGEAPAGGXLVVIDDDGPDMQYMTQMRSLAPFGSDLLADDMLEVPS

SEQ ID NO: 130800 - protein, 50 aa, Setaria italica
  Transcript Sequence Number=SeqID_64826
PSPPHKRAGVRGAAAATPSWSFPNPRLRAAYAALQAWKRTAIFSDPYLTF

SEQ ID NO: 130801 - protein, 73 aa, Setaria italica
  Transcript Sequence Number=SeqID_64827
RVVLRLLEEKSNTASGKKAESPEKKKPEEAVKEPKAESPEKKKPEQEGAGAEKKPEAESKAEKKVEAKKEGGD

SEQ ID NO: 130802 - protein, 50 aa, Setaria italica
  Transcript Sequence Number=SeqID_64828
  Gene Ontology: Cellular component=ribonucleoprotein complex
  Homolog annotation: Hit_ID=Q2RAU6; Match level="QueryCoverage=98%, HitCoverage=9%, E-value=2e-14, Identity=83%"; Hit description=Mpp10 protein, expressed
MDVEKPSLLPSKAPREHKELDESKSKKGLAELYEDDYAQKAGIAPAPLSI

SEQ ID NO: 130803 - protein, 118 aa, Setaria italica
  Transcript Sequence Number=SeqID_64829
  Gene Ontology: Mol. function=RNA polymerase II transcription factor activity; Cellular component=nucleus; Biological process=regulation of transcription from RNA polymerase II promoter
  Homolog annotation: Hit_ID=B6TCL2; Match level="QueryCoverage=68%, HitCoverage=22%, E-value=4e-42, Identity=95%"; Hit description =Transcription elongation factor A protein 2
  Pfam annotation: Domain name=TFIIS_C; Domain location=78-116; Score =91.4; E_value=3.2e-24; Accession=PF01096.10; Description =Transcription factor S-II (TFIIS)
  Pfam annotation: Domain name=TFIIS_M; Domain location=1-67; Score= -28.9; E_value=0.092; Accession=PF07500.6; Description=Transcription factor S-II (TFIIS), cen
  Pfam module annotation: Pfam domain module=TFIIS_C::TFIIS_M; Domain location=78-116::1-67
QIRKGSAYSLAPCITGHLFGGYVRKPLRPHLTNENSSPDVSPEEMASDARKQENKQIKEKALFDCERGGAPKATTDQFKCGRCGQRKTTYYQLQTRSADEPMTTFVTCVNCNNHWKFC

SEQ ID NO: 130804 - protein, 61 aa, Setaria italica
  Transcript Sequence Number=SeqID_64830
  Gene Ontology: Mol. function=RNA polymerase II transcription factor activity; Cellular component=nucleus; Biological process=regulation of transcription from RNA polymerase II promoter
  Homolog annotation: Hit_ID=B6TCL2; Match level="QueryCoverage=88%, HitCoverage=14%, E-value=4e-27, Identity=96%"; Hit description =Transcription elongation factor A protein 2
  Pfam annotation: Domain name=TFIIS_C; Domain location=21-59; Score =91.4; E_value=3.2e-24; Accession=PF01096.10; Description =Transcription factor S-II (TFIIS)
KVFLFCTCERGGAPKATTDQFKCGRCGQRKTTYYQLQTRSADEPMTTFVTCVNCNNHWKFC

SEQ ID NO: 130805 - protein, 95 aa, Setaria italica
  Transcript Sequence Number=SeqID_64831
  Gene Ontology: Mol. function=RNA polymerase II transcription factor activity; Cellular component=nucleus; Biological process=regulation of transcription from RNA polymerase II promoter
  Homolog annotation: Hit_ID=B6TCL2; Match level="QueryCoverage=88%, HitCoverage=22%, E-value=4e-34, Identity=80%"; Hit description =Transcription elongation factor A protein 2
  Pfam annotation: Domain name=TFIIS_C; Domain location=63-92; Score =31.1; E_value=4.6e-06; Accession=PF01096.10; Description =Transcription factor S-II (TFIIS)
KEKALFILLLPCIIGQVRPERLPDVSPEEMASDARKQENKQIKEKALFDCERGGAPKATTDQFKCGRCGQRKTTYYQLQTRSADEQMSQMLSSVH

SEQ ID NO: 130806 - protein, 65 aa, Setaria italica
  Transcript Sequence Number=SeqID_64832
  Homolog annotation: Hit_ID=B6TCL2; Match level="QueryCoverage=96%, HitCoverage=17%, E-value=5e-11, Identity=58%"; Hit description =Transcription elongation factor A protein 2
LFGYWKKVVLEETGKKNGSSENERSSDSSGKVEKARPIKIERNSSSSSMKVEKRDRDVSFGGPVG

SEQ ID NO: 130807 - protein, 69 aa, Setaria italica
  Transcript Sequence Number=SeqID_64833
  Gene Ontology: Mol. function=DNA binding; Cellular component=nucleus; Biological process=regulation of transcription
  Homolog annotation: Hit_ID=C3PU45; Match level="QueryCoverage=79%, HitCoverage=18%, E-value=3e-18, Identity=76%"; Hit description=NAC -like protein 13
  Pfam annotation: Domain name=NAM; Domain location=6-69; Score=9.8; E _value=2.4e-08; Accession=PF02365.7; Description=No apical meristem (NAM) protein
YPLCALPIPFCVSQAKLSTNEWYFFSFRDRKYATGLRTNRATKSGYWKATGKDRVIRNPKAAGRAVVGM

SEQ ID NO: 130808 - protein, 63 aa, Setaria italica
  Transcript Sequence Number=SeqID_64834
CMAFFQVLLYVVQYLEHHGWTIIFNKDDIDIMWHFIVQFAFYGGTAFGKKARPYCILTHTVFC

SEQ ID NO: 130809 - protein, 128 aa, Setaria italica
  misc_feature (105)..(105): Xaa can be any naturally occurring amino acid
  Transcript Sequence Number=SeqID_64835
  Homolog annotation: Hit_ID=B6U8T6; Match level="QueryCoverage=86%, HitCoverage=25%, E-value=1e-53, Identity=87%"; Hit description =Carboxyl-terminal peptidase
  Pfam annotation: Domain name=DUF239; Domain location=3-96; Score =61.2; E_value=3.8e-15; Accession=PF03080.7; Description=Arabidopsis proteins of unknown function
SESWSYLLISSENCGFLQDPKEGNWWLQFGNNYVLGYWPSFLFSYLADSASMIEWGGEVVNSEPDGSHTSTQMGSGHFPEEGFGKASYFRNIQLVDSSNNLKVPXGLGSFTEQSNCYDVQNGNNGDVG

SEQ ID NO: 130810 - protein, 100 aa, Setaria italica
  Transcript Sequence Number=SeqID_64836
  Homolog annotation: Hit_ID=B6U8T6; Match level="QueryCoverage=71%, HitCoverage=16%, E-value=7e-31, Identity=84%"; Hit description =Carboxyl-terminal peptidase
  Pfam annotation: Domain name=DUF239; Domain location=3-100; Score= -16.5; E_value=1.7e-07; Accession=PF03080.7; Description=Arabidopsis proteins of unknown function
MQHRLAVGSPAAVHCALSRALNTCVALLHQVSPDLYGDNNTRLFTYWTSDAYQATGCYNILCSGFVQINSEIAMGASIFPTSSYSGSQYDISILIWKVSK

SEQ ID NO: 130811 - protein, 99 aa, Setaria italica
  Transcript Sequence Number=SeqID_64837
  Gene Ontology: Mol. function=hydrolase activity, acting on carbon -nitrogen (but not peptide) bonds; Biological process=allantoin catabolic process
  Homolog annotation: Hit_ID=Q259B7; Match level="QueryCoverage=78%, HitCoverage=15%, E-value=1e-33, Identity=84%"; Hit description =H0901F07.3 protein
TLQSSTSGIRSAWTSKGELDPRSYATYLKSRPPAWEESAIRDLQRAMKDTEAGGRSEGAHIHIVHLSDAKTSLELMKDAKRTGASVTVETCPHYPGIFS

SEQ ID NO: 130812 - protein, 72 aa, Setaria italica
  misc_feature (17)..(17): Xaa can be any naturally occurring amino acid
  misc_feature (38)..(38): Xaa can be any naturally occurring amino acid
  Transcript Sequence Number=SeqID_64838
  Homolog annotation: Hit_ID=B6U8T6; Match level="QueryCoverage=97%, HitCoverage=15%, E-value=9e-31, Identity=97%"; Hit description =Carboxyl-terminal peptidase
  Pfam annotation: Domain name=DUF239; Domain location=6-72; Score= -43.1; E_value=2.3e-05; Accession=PF03080.7; Description=Arabidopsis proteins of unknown function
VEGDKYYGAKATINVWXQPKIEQANEFSLSQLWILGGXSFGQDLNSIEAGWQVSPDLYGDNNTRLFTYWTVR

SEQ ID NO: 130813 - protein, 52 aa, Setaria italica
  Transcript Sequence Number=SeqID_64839
  Gene Ontology: Mol. function=methyltransferase activity
  Homolog annotation: Hit_ID=B6UBQ9; Match level="QueryCoverage=100%, HitCoverage=8%, E-value=2e-24, Identity=96%"; Hit description =Ankyrin protein kinase-like
IRNVMDMNTVYGGFAASLIKDPIWVMNVVSSYGPNSLGVVYDRGLIGVNHDW

SEQ ID NO: 130814 - protein, 63 aa, Setaria italica
  Transcript Sequence Number=SeqID_64840
  Homolog annotation: Hit_ID=B6U8T6; Match level="QueryCoverage=87%, HitCoverage=12%, E-value=2e-24, Identity=98%"; Hit description =Carboxyl-terminal peptidase
  Pfam annotation: Domain name=DUF239; Domain location=1-63; Score= -66.2; E_value=0.0016; Accession=PF03080.7; Description=Arabidopsis proteins of unknown function
WLCSPRNLQVSPDLYGDNNTRLFTYWTSDAYQATGCYNLLCSGFIQINNQIAMGASISPISNY

SEQ ID NO: 130815 - protein, 87 aa, Setaria italica
  misc_feature (71)..(71): Xaa can be any naturally occurring amino acid
  Transcript Sequence Number=SeqID_64841
  Gene Ontology: Mol. function=hydrolase activity, acting on carbon -nitrogen (but not peptide) bonds; Biological process=allantoin catabolic process
  Homolog annotation: Hit_ID=Q259B7; Match level="QueryCoverage=91%, HitCoverage=16%, E-value=1e-31, Identity=81%"; Hit description =H0901F07.3 protein
LNQLAAWWSENPAKLAGQKNKGAILPGYHADIVVWKPEAQFELDDSHSVYHKHRNISAYLGKELSGKVLSXFVRGNLYLARIWTPQA

SEQ ID NO: 130816 - protein, 88 aa, Setaria italica
  Transcript Sequence Number=SeqID_64842
  Subcellular localization annotation: CTP_CleavageSite=54; ConfidenceScore=5.01e-01
LLLILFFFSCLLPCFDTKRSSCSSCTFFRLVSIIHKSKHLKQSICYKLSSTNCKLQYYSHCRICNTNCKLNMSGQCLEEKMYSGCFSS

SEQ ID NO: 130817 - protein, 76 aa, Setaria italica
  Transcript Sequence Number=SeqID_64843
  Homolog annotation: Hit_ID=B6UBQ9; Match level="QueryCoverage=80%, HitCoverage=9%, E-value=5e-24, Identity=90%"; Hit description =Ankyrin protein kinase-like
LSPVCLAYLLLRVSGQKSPDATACYDKLTPITTPAKCDDSVDPDAAWYVPMRSCVTAPSAKYKKLGLNATPKWPQR

SEQ ID NO: 130818 - protein, 61 aa, Setaria italica
  Transcript Sequence Number=SeqID_64844
FFLSKSERSLTSPCFFSSETLHGTWEKKKNGKKNTLGSKAHAHVTHYLGGNKMQINAVLHT

SEQ ID NO: 130819 - protein, 44 aa, Setaria italica
  Transcript Sequence Number=SeqID_64845
  Homolog annotation: Hit_ID=B6U8T6; Match level="QueryCoverage=88%, HitCoverage=9%, E-value=6e-15, Identity=87%"; Hit description =Carboxyl-terminal peptidase
FFDTNLQSPDGDIIDCVPISNQPAFDHPFLKNHTIQMRPAYHPE

SEQ ID NO: 130820 - protein, 65 aa, Setaria italica
  Transcript Sequence Number=SeqID_64846
  Gene Ontology: Mol. function=methyltransferase activity
  Homolog annotation: Hit_ID=B6UBQ9; Match level="QueryCoverage=98%, HitCoverage=10%, E-value=1e-29, Identity=90%"; Hit description =Ankyrin protein kinase-like
LLHNLWDMNTVYGGFAASLIKDPIWVMNVVSSYGPNSLGVVYDRGLIGVNHDWCEAFSTYPRTYD

SEQ ID NO: 130821 - protein, 46 aa, Setaria italica
  misc_feature (39)..(39): Xaa can be any naturally occurring amino acid
  Transcript Sequence Number=SeqID_64847
MSKIYLLLDDIANCRCEMKFVLLEMDRILRPTGYAIIRXESTYFLD

SEQ ID NO: 130822 - protein, 50 aa, Setaria italica
  Transcript Sequence Number=SeqID_64848
AGMKLHNRRGCFMKIMRILRWNQCKRTAFEDSSCTLYENPSMESMQEDSL

SEQ ID NO: 130823 - protein, 76 aa, Setaria italica
  misc_feature (46)..(46): Xaa can be any naturally occurring amino acid
  Transcript Sequence Number=SeqID_64849
  Homolog annotation: Hit_ID=B6U8T6; Match level="QueryCoverage=76%, HitCoverage=13%, E-value=8e-21, Identity=81%"; Hit description =Carboxyl-terminal peptidase
RPRTRSHLLPLPIPPRTPMSVNPTMLNEGGHQHAIAYVQGDKYYGXPRSTINVWEPKIEQPNEFSLSQLWILGGII

SEQ ID NO: 130824 - protein, 34 aa, Setaria italica
  Transcript Sequence Number=SeqID_64850
AAAGGITTLVDMPLALLSRLQQLPLYQWEGFSTG

SEQ ID NO: 130825 - protein, 63 aa, Setaria italica
  Transcript Sequence Number=SeqID_64851
  Homolog annotation: Hit_ID=A5HEG1; Match level="QueryCoverage=92%, HitCoverage=15%, E-value=2e-15, Identity=72%"; Hit description =Putative growth-regulating factor 2
  Subcellular localization annotation: CTP_CleavageSite=53; ConfidenceScore=5.14e-01
LTKTILAVNAPVPSSLLLPIRRSINPWSGLGSSSLGWTPFRPGPGDAEPGRCRRTDGKKWRCS

SEQ ID NO: 130826 - protein, 60 aa, Setaria italica
  Transcript Sequence Number=SeqID_64852
  Subcellular localization annotation: CTP_CleavageSite=38; ConfidenceScore=5.06e-01
LSSTATLAISTRHLPGSASPGPGRNGVHPTVKCQSPIRYDNDTNRPKILATFRISYHPSD

SEQ ID NO: 130827 - protein, 46 aa, Setaria italica
  Transcript Sequence Number=SeqID_64853
SNFVNLQASQITFAQEGSIAHRKPTTVAEVARQRELSHTVQSGRGR

SEQ ID NO: 130828 - protein, 94 aa, Setaria italica
  Transcript Sequence Number=SeqID_64854
  Gene Ontology: Mol. function=inorganic anion exchanger activity; Cellular component=integral to membrane; Biological process=anion transport
  Homolog annotation: Hit_ID=B9HIJ0; Match level="QueryCoverage=98%, HitCoverage=14%, E-value=5e-30, Identity=65%"; Hit description=Anion exchanger family protein
VLISKLLSNVLVFVVLTCYGSMQDAYQQMQTPLVYQQQSVRRGLNELKDSTVQLASSMGNIDAPVDETIFDIEKEIDDLLPMEVKEQRLSNLLQ

SEQ ID NO: 130829 - protein, 115 aa, Setaria italica
  misc_feature (9)..(9): Xaa can be any naturally occurring amino acid
  misc_feature (15)..(15): Xaa can be any naturally occurring amino acid
  Transcript Sequence Number=SeqID_64855
  Gene Ontology: Mol. function=inorganic anion exchanger activity; Cellular component=integral to membrane; Biological process=anion transport
  Homolog annotation: Hit_ID=Q8VYR7; Match level="QueryCoverage=97%, HitCoverage=15%, E-value=4e-43, Identity=76%"; Hit description=Boron transporter 1
CVWTAILLXLLAILXACSIINRFTRIAGELFGLLIAMLFMQQAIKGLVDEFRIPERENRKALEFVPSWCFANGMFAIVLSFGLLLTALRSRKARSWRYGAGWLRGFIAELTVVTN

SEQ ID NO: 130830 - protein, 53 aa, Setaria italica
  Transcript Sequence Number=SeqID_64856
  Gene Ontology: Mol. function=inorganic anion exchanger activity; Cellular component=integral to membrane; Biological process=anion transport
  Homolog annotation: Hit_ID=Q9M1P7; Match level="QueryCoverage=94%, HitCoverage=7%, E-value=9e-18, Identity=86%"; Hit description =Putative boron transporter 2
  Subcellular localization annotation: CTP_CleavageSite=26; ConfidenceScore=5.14e-01
GVIPQSPMHTKSLATLKHQLLRNRLVATARKSMSQNASLSQLYGSMQDCFILV

SEQ ID NO: 130831 - protein, 46 aa, Setaria italica
  Transcript Sequence Number=SeqID_64857
  Gene Ontology: Mol. function=inorganic anion exchanger activity; Cellular component=integral to membrane; Biological process=anion transport
  Homolog annotation: Hit_ID=B9HIJ0; Match level="QueryCoverage=97%, HitCoverage=6%, E-value=4e-17, Identity=91%"; Hit description=Anion exchanger family protein
VFLTLLCGLIGIPPSNGVIPQSPMHTKSLATLKHQLLRNRLVATAR

SEQ ID NO: 130832 - protein, 83 aa, Setaria italica
  misc_feature (1)..(11): Xaa can be any naturally occurring amino acid
  Transcript Sequence Number=SeqID_64858
  Subcellular localization annotation: CTP_CleavageSite=72; ConfidenceScore=5.24e-01
XXXXXXXXXXXPVNASARLFQRSGSHGGQNRDFIFHPSVFRTGGFYSYIAPPRVPRIGRSVVLVLLHSCMITLNSLEQPRKPT

SEQ ID NO: 130833 - protein, 37 aa, Setaria italica
  Transcript Sequence Number=SeqID_64859
GTERLWCLLDYNSNRYQQVMTCMFSSFYTVLVLIYQL

SEQ ID NO: 130834 - protein, 41 aa, Setaria italica
  Transcript Sequence Number=SeqID_64860
  Gene Ontology: Mol. function=binding
VQSAAHLLDRLVKDIVTESDQFSIEEFIPLLRERMNVLNPY

SEQ ID NO: 130835 - protein, 93 aa, Setaria italica
  misc_feature (91)..(91): Xaa can be any naturally occurring amino acid
  Transcript Sequence Number=SeqID_64861
  Gene Ontology: Mol. function=binding
  Subcellular localization annotation: CTP_CleavageSite=50; ConfidenceScore=5.09e-01
QLLEPGKHTWLLKTLYGLMMLLPQQSAAFKILRTRLKTVPFSENLKRTSSANPYSQILQVTEDGNRNQDTQNYSAINFPSLLQQFENMQQXHR

SEQ ID NO: 130836 - protein, 65 aa, Setaria italica
  Transcript Sequence Number=SeqID_64862
  Gene Ontology: Mol. function=binding
  Subcellular localization annotation: CTP_CleavageSite=47; ConfidenceScore=5.19e-01
SVIYATWLLKTLYGLMMLLPQQSAAFKILRTRLKTVPFSENLKRTSSANPYSQILQVTEDGNRNQ

SEQ ID NO: 130837 - protein, 36 aa, Setaria italica
  Transcript Sequence Number=SeqID_64863
MIAFLLVQVVLLVLEVHARIAEEPHHFHHLVSYLTR

SEQ ID NO: 130838 - protein, 129 aa, Setaria italica
  Transcript Sequence Number=SeqID_64864
  Gene Ontology: Mol. function=binding
LDSNLRDFDIGAILSIAKRELNSEHEATRIEALHWFSTLLVRYRVEFLAYLNDIFNPLLNALSDPSDAIHYTTFWCRIAVVLLVLEVHARIAEEPHHFHHLVSYLIRTFHNNHVLLEKRGALIVRRLCV

SEQ ID NO: 130839 - protein, 115 aa, Setaria italica
  misc_feature (19)..(19): Xaa can be any naturally occurring amino acid
  Transcript Sequence Number=SeqID_64865
  Gene Ontology: Mol. function=binding; Cellular component=cellular _component; Biological process=interspecies interaction between organisms
  Homolog annotation: Hit_ID=Q5ZIW5; Match level="QueryCoverage=100%, HitCoverage=13%, E-value=6e-20, Identity=46%"; Hit description =Protein VAC14 homolog
  Pfam annotation: Domain name=HEAT; Domain location=27-63; Score=3.4; E_value=19; Accession=PF02985.14; Description=HEAT repeat
  Pfam annotation: Domain name=HEAT; Domain location=68-104; Score =22.8; E_value=0.0014; Accession=PF02985.14; Description=HEAT repeat
  Pfam module annotation: Pfam domain module=HEAT::HEAT; Domain location=27-63::68-104
RSAAHLLDRLVKIIIYQPXDIVTESDQFSIEEFIPLLRERMNVLNPYVRQFLVGWITVLDSVPDIDMLGFLPDFLDGLFNMLSDSSHEIRQQADAALSEFLQEIKNSPNVDYGRM

SEQ ID NO: 130840 - protein, 50 aa, Setaria italica
  Transcript Sequence Number=SeqID_64866
GEGSVAEEHKAHGVSGWSAGLLMALVDYLKVNGTIISCLLSVGTSCPVIP

SEQ ID NO: 130841 - protein, 83 aa, Setaria italica
  Transcript Sequence Number=SeqID_64867
MPSPRRPLASPCRGRIVVAVLLSALLLLSSAAHSAEESTRVLSVGEELVGETMPLRNGRRVYRINGLRPSAWYEVKISYPASV

SEQ ID NO: 130842 - protein, 74 aa, Setaria italica
  misc_feature (31)..(31): Xaa can be any naturally occurring amino acid
  Transcript Sequence Number=SeqID_64868
  Gene Ontology: Biological process=intracellular transport
  Homolog annotation: Hit_ID=B6TRM8; Match level="QueryCoverage=98%, HitCoverage=15%, E-value=2e-33, Identity=93%"; Hit description =RanBP1 domain containing protein
  Pfam annotation: Domain name=Ran_BP1; Domain location=8-74; Score= -57.3; E_value=0.049; Accession=PF00638.10; Description=RanBP1 domain
KFAMAEGPVETGEENEKAVFTADSALYEYLXGGWKERGKGEVKLNVPVSGGERARLVMRTKGNYRLVLNASLYE

SEQ ID NO: 130843 - protein, 66 aa, Setaria italica
  Transcript Sequence Number=SeqID_64869
  Gene Ontology: Biological process=intracellular transport
  Homolog annotation: Hit_ID=B6U2P1; Match level="QueryCoverage=84%, HitCoverage=12%, E-value=6e-18, Identity=78%"; Hit description =RanBP1 domain containing protein
TFACMNSIGESQSSLVTFALKFKDTATREEFKGAVETHKALKAPDVPLKTPETETRNRGKQGTQGI

SEQ ID NO: 130844 - protein, 52 aa, Setaria italica
  Transcript Sequence Number=SeqID_64870
RILHRRTYLINKHLYLYVLHLLTQLIFLLCITLTPVSIFTFRLSESHGSSPW

SEQ ID NO: 130845 - protein, 51 aa, Setaria italica
  Transcript Sequence Number=SeqID_64871
MWRPAKGFSGMRKFIIYIIAPCFTIIPSLIICSIGGAAHVRQLIYISAIIL

SEQ ID NO: 130846 - protein, 126 aa, Setaria italica
  misc_feature (53)..(53): Xaa can be any naturally occurring amino acid
  misc_feature (90)..(90): Xaa can be any naturally occurring amino acid
  Transcript Sequence Number=SeqID_64872
  Gene Ontology: Mol. function=transporter activity; Cellular component= membrane; Biological process=transport
  Homolog annotation: Hit_ID=B9S2W5; Match level="QueryCoverage=78%, HitCoverage=18%, E-value=1e-27, Identity=58%"; Hit description=Metal transporter, putative
TNGQGGAAGASSSGQQHDDDAEGSLLRQKSTWKRFLAHAGPGFLISLAYLDPXANVQTDLQAGSSHRYELLWVLFFGFIFVLIIQSLAAXLGIITGKHLAELCMREYPKYVKYGLWLLVEVGVIAA

SEQ ID NO: 130847 - protein, 39 aa, Setaria italica
  Transcript Sequence Number=SeqID_64873
MFGTVQTDLQAGSSHRYELLWVLFFGFIFVLIIQSLAAK

SEQ ID NO: 130848 - protein, 84 aa, Setaria italica
  Transcript Sequence Number=SeqID_64874
  Gene Ontology: Mol. function=oxidoreductase activity; Cellular component=extracellular region; Biological process=metabolic process
  Homolog annotation: Hit_ID=A7LHM3; Match level="QueryCoverage=79%, HitCoverage=11%, E-value=4e-28, Identity=82%"; Hit description=BADH -like protein
RFWPYIKTMIPKPIQYPVSKHGFEFQELLVQTLYGYSVWDRLRSLVNLVKMITEQNSAPAPSTTMKKGDETIRRCSVALMLFLS

SEQ ID NO: 130849 - protein, 91 aa, Setaria italica
  misc_feature (78)..(78): Xaa can be any naturally occurring amino acid
  misc_feature (80)..(80): Xaa can be any naturally occurring amino acid
  Transcript Sequence Number=SeqID_64875
  Gene Ontology: Mol. function=oxidoreductase activity; Cellular component=extracellular region; Biological process=metabolic process
  Homolog annotation: Hit_ID=A7LHM3; Match level="QueryCoverage=51%, HitCoverage=7%, E-value=2e-12, Identity=78%"; Hit description=BADH -like protein
CSSDKGTLTKYACSETFITAALPENSAASIGLKTLWKGIKVSEHATWSGCFLFFVSYKQLFSAVGAPENLVHIITGFXEXGQALVHIITGF

SEQ ID NO: 130850 - protein, 48 aa, Setaria italica
  misc_feature (6)..(6): Xaa can be any naturally occurring amino acid
  Transcript Sequence Number=SeqID_64876
PNVQTXTLTFMVAWSLMCRSMPLGEYSGCIIGRTVVFAFPERPFLEMN

SEQ ID NO: 130851 - protein, 76 aa, Setaria italica
  misc_feature (61)..(61): Xaa can be any naturally occurring amino acid
  Transcript Sequence Number=SeqID_64877
MSESFLDRMVSQLRSTCKFYTGYPKDLGPSRIIPFTSERQFVQLLHEGRPVVVAFTIKCTXYTQHLDKVKTKKKKK

SEQ ID NO: 130852 - protein, 43 aa, Setaria italica
  Transcript Sequence Number=SeqID_64878
FVSEYLKPCFLKYRNPNITKYSVKVLPFNYDQSVYGFREYLKR

SEQ ID NO: 130853 - protein, 86 aa, Setaria italica
  Transcript Sequence Number=SeqID_64879
MSESFLDRMVSQLRSTCKFYTGYPKDLGPSRIIPFTSERQFVQLLHEGRPVVVAFTIKYTNSAVFCSETPTRMSNHHIYSFHSLQS

SEQ ID NO: 130854 - protein, 74 aa, Setaria italica
  Transcript Sequence Number=SeqID_64880
MSESFLDRMVSQLRSTCKFYTGYPKDLGPSRIIPFTSERQFVQLLHEGRPVVVAFTIKCTYTQHLDKVLEEAAA

SEQ ID NO: 130855 - protein, 90 aa, Setaria italica
  Transcript Sequence Number=SeqID_64881
VVHQADWGIGMAGGRVPGRGWGGEGFMTRCGRRPAASESQLATRRGLWLRRGLWPPEGGRDGGGRPGDGDQQQQRHREGPRDPHPREPLS

SEQ ID NO: 130856 - protein, 53 aa, Setaria italica
  Transcript Sequence Number=SeqID_64882
SFKILFEDLAEAVCSGFQAWNFDYEHLGTFNQVAFIESVETFNQVAFIDLWYA

SEQ ID NO: 130857 - protein, 77 aa, Setaria italica
  Transcript Sequence Number=SeqID_64883
  Gene Ontology: Mol. function=shikimate kinase activity
  Homolog annotation: Hit_ID=B9SK32; Match level="QueryCoverage=81%, HitCoverage=35%, E-value=3e-13, Identity=52%"; Hit description =Adenylate kinase isoenzyme, putative
MAVANGGASRRSRPNVLVTGTPGTGKTTTCSLLSEAAGLRHVNIGDLVREKSLHDGWDDDLECHVINEDLVSLHLRR

SEQ ID NO: 130858 - protein, 86 aa, Setaria italica
  Transcript Sequence Number=SeqID_64884
  Gene Ontology: Mol. function=oxidoreductase activity
  Homolog annotation: Hit_ID=B6TF99; Match level="QueryCoverage=98%, HitCoverage=23%, E-value=4e-22, Identity=63%"; Hit description =Gibberellin 20 oxidase 2
APLGYHESEHTKNVRDWKEVFDLVAHEPPPPAAGTVTDGEVVYENKWPEDLPDFREALEEYMKAMEELAFKLLELLARSLNLRPDR

SEQ ID NO: 130859 - protein, 116 aa, Setaria italica
  Transcript Sequence Number=SeqID_64885
  Gene Ontology: Mol. function=nucleic acid binding
  Homolog annotation: Hit_ID=Q2R2A2; Match level="QueryCoverage=100%, HitCoverage=50%, E-value=2e-35, Identity=64%"; Hit description=Zinc knuckle family protein, expressed
  Pfam annotation: Domain name=zf-CCHC; Domain location=28-45; Score =11.0; E_value=0.01; Accession=PF00098.15; Description=Zinc knuckle
  Pfam annotation: Domain name=zf-CCHC; Domain location=57-74; Score =31.4; E_value=3.1e-06; Accession=PF00098.15; Description=Zinc knuckle
  Pfam module annotation: Pfam domain module=zf-CCHC::zf-CCHC; Domain location=28-45::57-74
MQQIRCYMCNQNGHLCCFDFSDNSPKQISCYNCAKSGHSGLGCAKQRRETSAVITPTQCYKCGEEGHFARGCTKNAKSDRSKGKSSSHSQRKEKWKKDSSARSAPHDARKTSKRKS

SEQ ID NO: 130860 - protein, 134 aa, Setaria italica
  misc_feature (34)..(34): Xaa can be any naturally occurring amino acid
  misc_feature (43)..(43): Xaa can be any naturally occurring amino acid
  misc_feature (123)..(123): Xaa can be any naturally occurring amino acid
  Transcript Sequence Number=SeqID_64886
  Homolog annotation: Hit_ID=Q01IG9; Match level="QueryCoverage=95%, HitCoverage=29%, E-value=7e-10, Identity=31%"; Hit description =H0805A05.7 protein
ICTALIRHARFKITELLGDTTNVQALTLNFHGEXIWIAPEGKXLQNSFKTLRKLFLHGIYVEFDLLWTLVLLESAPSVQIFGIKIWNHICGKDTQRREICSERTIGSWSTTKLGGSTSFLQLXRLEFGGFQQVK

SEQ ID NO: 130861 - protein, 100 aa, Setaria italica
  Transcript Sequence Number=SeqID_64887
MNSNKVCSCGMQIWNHICGKDTQRREICSERTIGSWSTTKLGGSTSFLQLKRLEFGGFQQVKQHLDLIRTVIKRAPNLETLLLEDKKYCQKCAVTNSVCS

SEQ ID NO: 130862 - protein, 79 aa, Setaria italica
  Transcript Sequence Number=SeqID_64888
  Gene Ontology: Mol. function=structural constituent of ribosome; Cellular component=intracellular; Biological process=translation
  Homolog annotation: Hit_ID=B6TG27; Match level="QueryCoverage=77%, HitCoverage=19%, E-value=1e-27, Identity=100%"; Hit description=50S ribosomal protein L4
GGSPTSRRRRERRGGGRRAIITDRQNARRGTASTLTRGEVRGGGRKPYQQKKTGKARRGSQRTPLRPGGGVVFGPKPRD

SEQ ID NO: 130863 - protein, 86 aa, Setaria italica
  misc_feature (44)..(44): Xaa can be any naturally occurring amino acid
  Transcript Sequence Number=SeqID_64889
CFHQYNTNTAWYVSLHLLSSNFKVNSPDNLDNLRRLAEQFQKQXPGASSAEAGASAGAAQDDDDDVPELVPGETFEEAAEEKKESS

SEQ ID NO: 130864 - protein, 62 aa, Setaria italica
  Transcript Sequence Number=SeqID_64890
  Gene Ontology: Mol. function=calcium ion binding
  Homolog annotation: Hit_ID=B9S7L4; Match level="QueryCoverage=91%, HitCoverage=10%, E-value=3e-17, Identity=77%"; Hit description =Calcium ion binding protein, putative
SFPFVQNESYFTLRDLKRCKLSGNIFNILFNLNKFMAFETRDPFLIRQERENPTLTEWDRFA

SEQ ID NO: 130865 - protein, 51 aa, Setaria italica
  Transcript Sequence Number=SeqID_64891
  Homolog annotation: Hit_ID=B6TM85; Match level="QueryCoverage=86%, HitCoverage=28%, E-value=1e-15, Identity=86%"; Hit description =Tankyrase 2
  Pfam annotation: Domain name=Ank; Domain location=21-51; Score=21.0; E_value=0.0049; Accession=PF00023.22; Description=Ankyrin repeat
ACPVVEYLIQNGANVNATNLEKNTPLHWACLNGHIEVIKALISHGCSEHSH

SEQ ID NO: 130866 - protein, 143 aa, Setaria italica
  misc_feature (11)..(11): Xaa can be any naturally occurring amino acid
  misc_feature (21)..(21): Xaa can be any naturally occurring amino acid
  misc_feature (35)..(35): Xaa can be any naturally occurring amino acid
  Transcript Sequence Number=SeqID_64892
  Gene Ontology: Mol. function=hydrolase activity, hydrolyzing O -glycosyl compounds; Biological process=carbohydrate metabolic process
  Homolog annotation: Hit_ID=Q9FXT4; Match level="QueryCoverage=90%, HitCoverage=30%, E-value=4e-60, Identity=86%"; Hit description=Alpha- galactosidase
WQECNERYTKXSNAMKTYGRXIFFSLCEWGRGKSXATWAGSMGNSWRTTDDIVDNWGSMTSRADQNDRWASYAGPGGWNDPDMLEVGNGGMSEAEYRSHFSIWALAKAPLLIGCDVRSMSQQTKDILSNWEVIVGLHFLSLDA

SEQ ID NO: 130867 - protein, 65 aa, Setaria italica
  Transcript Sequence Number=SeqID_64893
  Gene Ontology: Mol. function=hydrolase activity, hydrolyzing O -glycosyl compounds; Biological process=carbohydrate metabolic process
  Homolog annotation: Hit_ID=Q9FXT4; Match level="QueryCoverage=84%, HitCoverage=13%, E-value=3e-20, Identity=89%"; Hit description=Alpha- galactosidase
TILVDSNDFPVAVNQDSLGVQGKKVQSNNGLEVWAGPLSNNRKAVVLWNRQGYQATITAHRFYVV

SEQ ID NO: 130868 - protein, 41 aa, Setaria italica
  Transcript Sequence Number=SeqID_64894
MVQTSYFKFHFLVQHSSFSAQGQLSASVAPHDCKMYVLTPK

SEQ ID NO: 130869 - protein, 42 aa, Setaria italica
  Transcript Sequence Number=SeqID_64895
PLYRGRENPATWAGSMGNSWRTTDDIVDNWGRCCSFRCDLLG

SEQ ID NO: 130870 - protein, 81 aa, Setaria italica
  Transcript Sequence Number=SeqID_64896
  Homolog annotation: Hit_ID=B6SWJ1; Match level="QueryCoverage=55%, HitCoverage=5%, E-value=3e-10, Identity=80%"; Hit description=FHA domain containing protein
HSKANDLALIKVEDMANAQPLQTVKIGPSTSEQKEDSVAHDKGGVLGAKPLEGPSTTGGLLTTANIVTNDANKSSSAERGQ

SEQ ID NO: 130871 - protein, 89 aa, Setaria italica
  misc_feature (72)..(72): Xaa can be any naturally occurring amino acid
  misc_feature (79)..(79): Xaa can be any naturally occurring amino acid
  Transcript Sequence Number=SeqID_64897
  Homolog annotation: Hit_ID=B6SWJ1; Match level="QueryCoverage=68%, HitCoverage=7%, E-value=4e-25, Identity=87%"; Hit description=FHA domain containing protein
LSFLFYFYFLFYFWVKVRVGSKLKLFFVRQAVIKMDEAGSFHIKNIGKCPIFVNSKEIPSCKRINLSSDSLXEVKDMRXFHVNQDAVRQ

SEQ ID NO: 130872 - protein, 52 aa, Setaria italica
  Transcript Sequence Number=SeqID_64898
  Homolog annotation: Hit_ID=B6SWJ1; Match level="QueryCoverage=94%, HitCoverage=5%, E-value=3e-13, Identity=79%"; Hit description=FHA domain containing protein
VFLVAHDKGGVLGAKPLEGPSTTGGLLTTANIVTNDANTCMLALPSFSAAGF

SEQ ID NO: 130873 - protein, 50 aa, Setaria italica
  Transcript Sequence Number=SeqID_64899
  Homolog annotation: Hit_ID=B6SWJ1; Match level="QueryCoverage=80%, HitCoverage=4%, E-value=2e-15, Identity=90%"; Hit description=FHA domain containing protein
LRSHDVLASLVVPCPGVYVECKLNTEDPEIPCNDDVATPPEYPLECCTLG

SEQ ID NO: 130874 - protein, 113 aa, Setaria italica
  Transcript Sequence Number=SeqID_64900
  Homolog annotation: Hit_ID=B6SWJ1; Match level="QueryCoverage=100%, HitCoverage=13%, E-value=4e-38, Identity=69%"; Hit description=FHA domain containing protein
GLEHEADFMDFPFFSNSEEFDILNGENFLNSPSEGNQEDLDDSAFKVVPGVRSTMQSLAHSNEANTSCDQIDPGHVESNVDVSGIMLAPTSLVVPCPGVYVECKFELLVSIPC

SEQ ID NO: 130875 - protein, 85 aa, Setaria italica
  Transcript Sequence Number=SeqID_64901
  Homolog annotation: Hit_ID=B6SWJ1; Match level="QueryCoverage=57%, HitCoverage=6%, E-value=5e-18, Identity=84%"; Hit description=FHA domain containing protein
FRTILAVVKRPPVVEGPSNSLAPRTPPLSCATESSFCPGVYVECKLNTEDPEIPCNDDVATPPEYPLECCTLGQKSENTIYPVSP

SEQ ID NO: 130876 - protein, 53 aa, Setaria italica
  Transcript Sequence Number=SeqID_64902
  Homolog annotation: Hit_ID=B6SWJ1; Match level="QueryCoverage=92%, HitCoverage=6%, E-value=4e-15, Identity=73%"; Hit description=FHA domain containing protein
VGLHRHTGGHTYPGMNGHSFHTKHAESMVRDGDDTNNIAYGYSDVGQMYEHHA

SEQ ID NO: 130877 - protein, 116 aa, Setaria italica
  Transcript Sequence Number=SeqID_64903
VTFASSCGFEQSSETALFGFLGVPLHHGWLVDPQDVELGSSIPRSSYSKLSYNLAMYESILSNTNSGLQKHGGCKDDMFYSALAFSLTESEELESTSCKSRQHKCSIFLAQNCICK

SEQ ID NO: 130878 - protein, 96 aa, Setaria italica
  Transcript Sequence Number=SeqID_64904
MHGNLNIRPIDFFGRSTHVIHQINDGPCALIAVCNVLLLKGSIFFEPHETVVSIEYLLNLVVSFLKESVKMQVHNSCKLDFCCIHGLQPKVVDIFF

SEQ ID NO: 130879 - protein, 65 aa, Setaria italica
  Transcript Sequence Number=SeqID_64905
MCQCYSLVSLQEDLVENVPYILYWNNHYNTIVKINGVLLSLVTDSNYLRTSAVWQMLHEVNGDGV

SEQ ID NO: 130880 - protein, 67 aa, Setaria italica
  Transcript Sequence Number=SeqID_64906
LRGPQLTPYGFSSLHDDLKARQPTVLLWNEKLITISKFEEKIYVLLNDLSLLSTETNAVWERLTQVC

SEQ ID NO: 130881 - protein, 74 aa, Setaria italica
  Transcript Sequence Number=SeqID_64907
  Subcellular localization annotation: CTP_CleavageSite=33; ConfidenceScore=5.27e-01
SQSSRSNLTPHHEKKQSSSSKSNPITLPIFVVSATSKEVPPANIVFNSEKALHHMVMDYIWTAALQDCIQDPMQ

SEQ ID NO: 130882 - protein, 28 aa, Setaria italica
  Transcript Sequence Number=SeqID_64908
VLRSPIQHPNEISKVSALNYPNKDLKSY

SEQ ID NO: 130883 - protein, 83 aa, Setaria italica
  Transcript Sequence Number=SeqID_64909
  Gene Ontology: Mol. function=ARF GTPase activator activity; Cellular component=Golgi apparatus; Biological process=regulation of ARF GTPase activity
  Homolog annotation: Hit_ID=B6TT21; Match level="QueryCoverage=59%, HitCoverage=10%, E-value=5e-19, Identity=91%"; Hit description=DNA binding protein
  Subcellular localization annotation: CTP_CleavageSite=47; ConfidenceScore=5.12e-01
RRMAENESKPDGIPPSQGGKYVGFGSSPAPSANSNGGATQGDVMQVVSQVKRSSLCYCVYHLEYAMNRFTIHQYKDIFSLDLI

SEQ ID NO: 130884 - protein, 78 aa, Setaria italica
  misc_feature (68)..(68): Xaa can be any naturally occurring amino acid
  Transcript Sequence Number=SeqID_64910
CVSVRCLQLLYLVVYFCGQGPFETTTRYNSCRHRTETQTLLHDRFSIRIIPTTGRSYNNSESIALCKXANFSGIHLPS

SEQ ID NO: 130885 - protein, 57 aa, Setaria italica
  Transcript Sequence Number=SeqID_64911
  Gene Ontology: Mol. function=ARF GTPase activator activity; Biological process=regulation of ARF GTPase activity
  Homolog annotation: Hit_ID=B6TT21; Match level="QueryCoverage=78%, HitCoverage=9%, E-value=2e-15, Identity=84%"; Hit description=DNA binding protein
MRGVMALASQKVEEYAKEGGVGGWGDDWQRGEQNNEPYQRFEHETNSNGWSSSQNSS

SEQ ID NO: 130886 - protein, 37 aa, Setaria italica
  Transcript Sequence Number=SeqID_64912
  Gene Ontology: Mol. function=oxidoreductase activity, acting on single donors with incorporation of molecular oxygen, incorporation of two atoms of oxygen; Cellular component=cytoplasm; Biological process=oxidation reduction
  Homolog annotation: Hit_ID=Q8H1L6; Match level="QueryCoverage=94%, HitCoverage=33%, E-value=5e-12, Identity=100%"; Hit description =Carotenoid cleavage dioxygenase 1 (Fragment)
MSLIFFVHDENTGKSEVNVIDAKTMSADPVAVVELPN

SEQ ID NO: 130887 - protein, 91 aa, Setaria italica
  misc_feature (60)..(60): Xaa can be any naturally occurring amino acid
  misc_feature (73)..(73): Xaa can be any naturally occurring amino acid
  Transcript Sequence Number=SeqID_64913
  Gene Ontology: Mol. function=oxidoreductase activity, acting on single donors with incorporation of molecular oxygen, incorporation of two atoms of oxygen; Cellular component=cytoplasm; Biological process=oxidation reduction
  Homolog annotation: Hit_ID=Q45VT7; Match level="QueryCoverage=97%, HitCoverage=16%, E-value=1e-43, Identity=94%"; Hit description=9,10 -9',10' carotenoid cleavage dioxygenase 1
MTKLIRWFELPNCFIFHNANAWEEGDEVVLITCRLENPDLDKVNGHQSDKLENFGNELYXMRFNMKTGAASQXKKLSVSAVDFPRVNESYT

SEQ ID NO: 130888 - protein, 114 aa, Setaria italica
  Transcript Sequence Number=SeqID_64914
  Gene Ontology: Mol. function=oxidoreductase activity, acting on single donors with incorporation of molecular oxygen, incorporation of two atoms of oxygen; Cellular component=cytoplasm; Biological process=oxidation reduction
  Homolog annotation: Hit_ID=Q2QLI9; Match level="QueryCoverage=94%, HitCoverage=18%, E-value=5e-47, Identity=85%"; Hit description=9,10 -9',10' carotenoid cleavage dioxygenase 1, putative, expressed
HRPHTPCSNHTHAEHATFSDVVKVLEDGDLQTLGLLDYDKRLKHSFTAHPKVDPFTDEMFTFGYSHEPPYCTYRVITKDGAMLDPVPITIPESVMMHDFAITENYSISWNLPFS

SEQ ID NO: 130889 - protein, 55 aa, Setaria italica
  Transcript Sequence Number=SeqID_64915
  Gene Ontology: Mol. function=oxidoreductase activity, acting on single donors with incorporation of molecular oxygen, incorporation of two atoms of oxygen
  Homolog annotation: Hit_ID=Q45VT7; Match level="QueryCoverage=54%, HitCoverage=5%, E-value=4e-09, Identity=93%"; Hit description=9,10 -9',10' carotenoid cleavage dioxygenase 1
IFVPKQPGVSGEEDDGYLIFFVHDENTGYSIPWLCILLSPDSASDVENSTYRAYV

SEQ ID NO: 130890 - protein, 61 aa, Setaria italica
  Transcript Sequence Number=SeqID_64916
  Gene Ontology: Mol. function=hydrolase activity
  Homolog annotation: Hit_ID=B9S8W7; Match level="QueryCoverage=73%, HitCoverage=8%, E-value=5e-10, Identity=64%"; Hit description =Adenosine diphosphatase, putative
ADEKQYREKSSSDLLGYCFSSAYIVALLHDSLGVPLDDKRIEYSNQVGILNPLVIHCGSTA

SEQ ID NO: 130891 - protein, 81 aa, Setaria italica; identical to SEQ ID NO: 110447
  Transcript Sequence Number=SeqID_64917
  Pfam annotation: Domain name=Metallothio_2; Domain location=1-80; Score=69.9; E_value=9.3e-18; Accession=PF01439.10; Description =Metallothionein
  Subcellular localization annotation: CTP_CleavageSite=54; ConfidenceScore=5.03e-01

SEQ ID NO: 130892 - protein, 42 aa, Setaria italica
  misc_feature (15)..(15): Xaa can be any naturally occurring amino acid
  Transcript Sequence Number=SeqID_64918
FRSDAPRLSLLRVKXSSDDTSAASGDELIADLKAKWDAVENK

SEQ ID NO: 130893 - protein, 71 aa, Setaria italica
  Transcript Sequence Number=SeqID_64919
  Pfam annotation: Domain name=DUF581; Domain location=19-61; Score =12.8; E_value=0.00051; Accession=PF04570.6; Description=Protein of unknown function (DUF581)
  Subcellular localization annotation: CTP_CleavageSite=20; ConfidenceScore=5.18e-01
SHGRHAHAANIVLKQVVRPRSAAASRHGAVSCSFLKACSLCRRDLSPSKDVYMYRYTNRSATNLQMPTSLD

SEQ ID NO: 130894 - protein, 64 aa, Setaria italica
  Transcript Sequence Number=SeqID_64920
  Gene Ontology: Mol. function=cysteine protease inhibitor activity; Cellular component=extracellular region; Biological process=defense response
  Homolog annotation: Hit_ID=Q7Y0Q9; Match level="QueryCoverage=90%, HitCoverage=54%, E-value=9e-24, Identity=87%"; Hit description =Cystatin (Fragment)
PVSCAQNAMLEFERLVKVRQQVVAGTMHHFTVEVREAGGAKKMYEAKVWEKLWENFKQLQSFEP

SEQ ID NO: 130895 - protein, 136 aa, Setaria italica
  misc_feature (118)..(118): Xaa can be any naturally occurring amino acid
  misc_feature (130)..(130): Xaa can be any naturally occurring amino acid
  Transcript Sequence Number=SeqID_64921
  Gene Ontology: Cellular component=extrinsic to mitochondrial inner membrane; Biological process=intracellular protein transmembrane transport
  Homolog annotation: Hit_ID=Q2UCT6; Match level="QueryCoverage=97%, HitCoverage=26%, E-value=1e-29, Identity=50%"; Hit description =Uncharacterized conserved protein
  Pfam annotation: Domain name=Mmp37; Domain location=1-136; Score =29.0; E_value=4.1e-15; Accession=PF09139.3; Description =Mitochondrial matrix Mmp37
NPAHYSRWMGCLGASAITGLADRIGVGVYFNPFVEWRDKRIKYGVVRMKDLAMDVLTWDRFYLSGRLQKPVHVLVDNWDIRKVNTINLEMATSASLLLLPEEFNEYDLYAQICSLSYXGDLRMLFAEDKXKVKKIV

SEQ ID NO: 130896 - protein, 38 aa, Setaria italica
  Transcript Sequence Number=SeqID_64922
VHVLVDNWDIRKVNTINLEMATSASLLLLPEEFNEYDL

SEQ ID NO: 130897 - protein, 53 aa, Setaria italica
  Transcript Sequence Number=SeqID_64923
IYYILSKLPEDLLPYPPFVTMVLSSSLKPFTLITALTSLLSFRNSVSLYIYNS

SEQ ID NO: 130898 - protein, 118 aa, Setaria italica
  Transcript Sequence Number=SeqID_64924
  Gene Ontology: Mol. function=hydrolase activity; Cellular component =cytosol
  Homolog annotation: Hit_ID=B6TVC1; Match level="QueryCoverage=88%, HitCoverage=28%, E-value=3e-58, Identity=97%"; Hit description=Nudix hydrolase 8
QPKLRTNSTLDFTRHAHNVAFQKSDLFFICMLRPVSSEIKIDETEIQAAKWMPLEEFVKQPFIQEDHMFQKIMDICIQRLRKCYCGLTPHHVVSKFDDRTSTLYYNVAEPEDVNCSAA

SEQ ID NO: 130899 - protein, 65 aa, Setaria italica
  Transcript Sequence Number=SeqID_64925
  Gene Ontology: Mol. function=hydrolase activity
  Homolog annotation: Hit_ID=B6TVC1; Match level="QueryCoverage=73%, HitCoverage=12%, E-value=2e-14, Identity=77%"; Hit description=Nudix hydrolase 8
SLASGENRPSIPKLESQFFLICVARHAHNVAFQKSDLFFICMLRPVSSEIKIDETEIQAAKVRHL

SEQ ID NO: 130900 - protein, 64 aa, Setaria italica
  Transcript Sequence Number=SeqID_64926
  Gene Ontology: Mol. function=hydrolase activity
  Homolog annotation: Hit_ID=B6TVC1; Match level="QueryCoverage=76%, HitCoverage=13%, E-value=3e-24, Identity=100%"; Hit description =Nudix hydrolase 8
YPPRVPCLSPRCVSQQKIMDICIQRLRKCYCGLTPHHVVSKFDDRTSTLYYNVAEPEDVNCSAA

SEQ ID NO: 130901 - protein, 80 aa, Setaria italica
  Transcript Sequence Number=SeqID_64927
  Gene Ontology: Mol. function=binding
  Homolog annotation: Hit_ID=UPI0001A7B028; Match level="QueryCoverage =78%, HitCoverage=5%, E-value=1e-14, Identity=47%"; Hit description =binding
RLGLAQGIGLVAASHLDTVLSESGPPLLDFETYNELQHCFLVIGLAYPEDLCMFLLNKCKSKDEASIVGALSTIKHLLPR

SEQ ID NO: 130902 - protein, 46 aa, Setaria italica
  Transcript Sequence Number=SeqID_64928
  Gene Ontology: Mol. function=binding
  Homolog annotation: Hit_ID=Q10RT3; Match level="QueryCoverage=80%, HitCoverage=4%, E-value=8e-11, Identity=81%"; Hit description=HEAT repeat family protein, expressed
VNLCSGGFGALGSYPTFTMNKQIDQGGTRSLSSLPCMFNDLLRLLL

SEQ ID NO: 130903 - protein, 58 aa, Setaria italica
  misc_feature (24)..(24): Xaa can be any naturally occurring amino acid
  Transcript Sequence Number=SeqID_64929
HNLHIYTICKTTQLIKQKSSMNPXLLLKIFQLHKVNPSIDPEANLKLTSSMVRLEPCL

SEQ ID NO: 130904 - protein, 35 aa, Setaria italica
  Transcript Sequence Number=SeqID_64930
FFFCSYLLKVNFCSFFCFKLLVLINYKLKPKGYEK

SEQ ID NO: 130905 - protein, 118 aa, Setaria italica
  misc_feature (112)..(112): Xaa can be any naturally occurring amino acid
  Transcript Sequence Number=SeqID_64931
  Gene Ontology: Mol. function=metalloendopeptidase activity; Cellular component=extracellular space; Biological process=proteolysis
  Homolog annotation: Hit_ID=Q93YG9; Match level="QueryCoverage=97%, HitCoverage=11%, E-value=6e-43, Identity=70%"; Hit description =Insulin degrading enzyme
LGQRQPAFHQLRSVEQLGYIALLRQRNDSGVRGLQFIIQSTAKDPANLDARVENFLKMFEDILYQMSDAEFKSNVSALIDMKLEKYKNLREESAFFWGEIAEGTLKFDRKKXEVAALR

SEQ ID NO: 130906 - protein, 112 aa, Setaria italica
  misc_feature (63)..(63): Xaa can be any naturally occurring amino acid
  misc_feature (79)..(79): Xaa can be any naturally occurring amino acid
  Transcript Sequence Number=SeqID_64932
  Gene Ontology: Mol. function=metalloendopeptidase activity; Cellular component=extracellular space; Biological process=proteolysis
  Homolog annotation: Hit_ID=Q93YG9; Match level="QueryCoverage=92%, HitCoverage=10%, E-value=9e-34, Identity=68%"; Hit description =Insulin degrading enzyme
QRLSSSVILQTHQDNVKQNVLLQLLALVGKQPAFHQLRSVEQLGYIALLRQRNDSGVRGLQFXIIQSTAKDPANLDARXENFLKMFEDILYQMSDAEFKSNVSALIDMKLEK

SEQ ID NO: 130907 - protein, 70 aa, Setaria italica
  misc_feature (15)..(15): Xaa can be any naturally occurring amino acid
  Transcript Sequence Number=SeqID_64933
  Gene Ontology: Mol. function=metalloendopeptidase activity; Biological process=proteolysis
  Homolog annotation: Hit_ID=Q93YG9; Match level="QueryCoverage=90%, HitCoverage=6%, E-value=1e-20, Identity=73%"; Hit description =Insulin degrading enzyme
RISSSVQTHQDNVKXNVLLQLLALVGKQPAFHQLRSVEQLGYIALLRQRNDSGVRGLQFIIQSTAKDPAN

SEQ ID NO: 130908 - protein, 83 aa, Setaria italica
  Transcript Sequence Number=SeqID_64934
  Gene Ontology: Mol. function=metalloendopeptidase activity; Biological process=proteolysis
  Homolog annotation: Hit_ID=O22941; Match level="QueryCoverage=100%, HitCoverage=8%, E-value=1e-22, Identity=57%"; Hit description =Putative zinc protease
HVEDVLFNAPISVCKPLSPSQHLAKRIVKLEKGLRYYYPAMCSNNQDENSALLHYIQTHQDNVKQNVLLQLLALVGKQPAFHQ

SEQ ID NO: 130909 - protein, 64 aa, Setaria italica
  Transcript Sequence Number=SeqID_64935
  Gene Ontology: Mol. function=metalloendopeptidase activity; Biological process=proteolysis
  Homolog annotation: Hit_ID=O22941; Match level="QueryCoverage=98%, HitCoverage=6%, E-value=2e-13, Identity=50%"; Hit description =Putative zinc protease
LQISILGNIEPNEAKGVIQHVEDVLFNAPISVCKPLSPSQHLAKRIVKLEKGLRYYYPAMCSNN

SEQ ID NO: 130910 - protein, 37 aa, Setaria italica
  Transcript Sequence Number=SeqID_64936
LFPFWFVNLLVSSLSRSIFAQIITPYHKFSTGNWGYS

SEQ ID NO: 130911 - protein, 86 aa, Setaria italica
  Transcript Sequence Number=SeqID_64937
  Gene Ontology: Mol. function=4-coumarate-CoA ligase activity; Biological process=metabolic process
  Homolog annotation: Hit_ID=Q42880; Match level="QueryCoverage=81%, HitCoverage=11%, E-value=2e-15, Identity=60%"; Hit description=4 -coumarate:CoA ligase
ARRRAPRARAAGHLRAGYLNDPEATARTVDVDGWLHTGDIGFVDDDDEVFIVDRVKELIKFKGFQVPPAELEALLLAHPSIADAAV

SEQ ID NO: 130912 - protein, 114 aa, Setaria italica
  misc_feature (27)..(27): Xaa can be any naturally occurring amino acid
  Transcript Sequence Number=SeqID_64938
  Gene Ontology: Mol. function=nucleic acid binding; Cellular component= spliceosome; Biological process=mRNA processing
  Homolog annotation: Hit_ID=Q6Z358; Match level="QueryCoverage=84%, HitCoverage=19%, E-value=6e-46, Identity=93%"; Hit description=Zinc finger CCCH domain-containing protein 49
  Pfam annotation: Domain name=zf-CCCH; Domain location=50-75; Score =16.4; E_value=0.01; Accession=PF00642.16; Description=Zinc finger C -x8-C-x5-C-x3-H type (and similar)
RSDVNREYFAEEHDRRARAGIDYDSSXMEKAQPNDTILKLQRTAPYYKRNRAHVCSFYVRGECTRGAECPYRHEMPETGELSQQNIKDRYYGVTDPSNPVQLLCYRVHQCIVSL

SEQ ID NO: 130913 - protein, 52 aa, Setaria italica
  Transcript Sequence Number=SeqID_64939
  Gene Ontology: Mol. function=nucleic acid binding; Biological process= embryonic development ending in birth or egg hatching
  Homolog annotation: Hit_ID=Q6Z358; Match level="QueryCoverage=73%, HitCoverage=7%, E-value=9e-16, Identity=100%"; Hit description=Zinc finger CCCH domain-containing protein 49
MQDSVPYRLLFYCQLRAEYDKECKICARPFTVFRWRPGRDARYKKTEICQTC

SEQ ID NO: 130914 - protein, 44 aa, Setaria italica
  Transcript Sequence Number=SeqID_64940
QITNTRRCQGWHLTCLTQKFHCNWIINSADSKKRLSETNAECLA

SEQ ID NO: 130915 - protein, 69 aa, Setaria italica
  misc_feature (23)..(23): Xaa can be any naturally occurring amino acid
  misc_feature (61)..(61): Xaa can be any naturally occurring amino acid
  Transcript Sequence Number=SeqID_64941
  Gene Ontology: Mol. function=nucleic acid binding; Cellular component= spliceosome; Biological process=mRNA processing
  Homolog annotation: Hit_ID=Q6Z358; Match level="QueryCoverage=98%, HitCoverage=13%, E-value=1e-32, Identity=95%"; Hit description=Zinc finger CCCH domain-containing protein 49
MECKICARPFTVFRWRPGRDARXKKTEICQTCCKLKNVCQVCLLDLEYGLPVQVRDTALAXNSNDAIPR

SEQ ID NO: 130916 - protein, 58 aa, Setaria italica
  Transcript Sequence Number=SeqID_64942
ACPGCSPGLPSPYYHGQYPPYYAPPPYVGYMPPPRMPYPPLYPPYQPMLAPPAQAHAS

SEQ ID NO: 130917 - protein, 111 aa, Setaria italica
  Transcript Sequence Number=SeqID_64943
  Gene Ontology: Mol. function=nucleic acid binding; Cellular component= spliceosome; Biological process=mRNA processing
  Homolog annotation: Hit_ID=Q6Z358; Match level="QueryCoverage=85%, HitCoverage=19%, E-value=2e-40, Identity=83%"; Hit description=Zinc finger CCCH domain-containing protein 49
  Pfam annotation: Domain name=RRM_1; Domain location=1-62; Score=34.7; E_value=3.7e-07; Accession=PF00076.14; Description=RNA recognition motif. (a.k.a. RRM, RBD, o
GLDSRVTEQDLRDQFYAHGEIESIRMVLQRACAFVTYTTREGAEKAAEELANKLVIKGVRLKLMWGKPQAPKPEEDESGRQGQVSHGGLLPRAVISQQQSGDQPQPPGMLK

SEQ ID NO: 130918 - protein, 112 aa, Setaria italica
  misc_feature (107)..(107): Xaa can be any naturally occurring amino acid
  Transcript Sequence Number=SeqID_64944
  Gene Ontology: Mol. function=nucleic acid binding; Cellular component= spliceosome; Biological process=mRNA processing
  Homolog annotation: Hit_ID=Q6ZK48; Match level="QueryCoverage=99%, HitCoverage=20%, E-value=2e-56, Identity=89%"; Hit description=Pre -mRNA-splicing factor SLU7
LSASEEPLPRELLLGQSEREIEYDRTGRIIKGQDTSVPKSKYEEDVYINNHTSVWGSWWKDHQWGYKCCKQTIKNSYCTGLAGIEAAEASADLMKANMARKEAAEEXPVQHE

SEQ ID NO: 130919 - protein, 80 aa, Setaria italica
  Transcript Sequence Number=SeqID_64945
GERKELTNGRTARRGGYGYDYGYGGRGGYYEEQDEYYDEPEEYGPPPGRGRGRGRRGAAPWRGRGGPGRGPPRGGRGGYY

SEQ ID NO: 130920 - protein, 87 aa, Setaria italica
  Transcript Sequence Number=SeqID_64946
WWRAGPPRRRKRWWRGRARWWRRAGRRGMLSNGPPPPAYGYNEEWEEEGDYYNRGRGRGRSRGRGGRGRGYYGGGRRGGYGYDYGYG

SEQ ID NO: 130921 - protein, 59 aa, Setaria italica
  Transcript Sequence Number=SeqID_64947
CVSQLIYQLISYGCWMGKQHCATECNFTRQPSYKTTSEPQKLAPTSRTGTAHHPLGTAQ

SEQ ID NO: 130922 - protein, 51 aa, Setaria italica
  Transcript Sequence Number=SeqID_64948
DFGFLHRRPCFFRVGSEQSNCIEYKIYHQGAQYGAAQDKIQLTVALVKWLA

SEQ ID NO: 130923 - protein, 50 aa, Setaria italica
  Transcript Sequence Number=SeqID_64949
  Homolog annotation: Hit_ID=Q84KI5; Match level="QueryCoverage=56%, HitCoverage=6%, E-value=3e-09, Identity=96%"; Hit description =Phytochelatin synthetase-like protein 1
CGPFVAPAEAYDSLDPNGNITIKWDIMQWTPDGYVVSSMPTPTAASLSSS

SEQ ID NO: 130924 - protein, 57 aa, Setaria italica
  misc_feature (11)..(11): Xaa can be any naturally occurring amino acid
  Transcript Sequence Number=SeqID_64950
  Gene Ontology: Cellular component=anchored to membrane
  Homolog annotation: Hit_ID=Q9SEC8; Match level="QueryCoverage=96%, HitCoverage=14%, E-value=8e-20, Identity=85%"; Hit description =Phytochelatin synthetase-like protein
  Subcellular localization annotation: CTP_CleavageSite=20; ConfidenceScore=5.23e-01
RAIVGRPTKFXTSDGRRATQALMTWNVTCTYSQFLAQKTPSCCVSLSSFSRAINCRL

SEQ ID NO: 130925 - protein, 83 aa, Setaria italica
  Transcript Sequence Number=SeqID_64951
  Gene Ontology: Mol. function=protein serine/threonine kinase activity; Biological process=protein amino acid phosphorylation
  Homolog annotation: Hit_ID=B6TZ54; Match level="QueryCoverage=85%, HitCoverage=16%, E-value=4e-34, Identity=94%"; Hit description =Nodulation receptor kinase
QVADFGLSKEEVYDGRKSGLKGTYGYMDPDYMSTNKLTKKSDVYSFGIILFELITAINPQQGLMDYINLVSHFNVTESPSELE

SEQ ID NO: 130926 - protein, 62 aa, Setaria italica
  Transcript Sequence Number=SeqID_64952
  Gene Ontology: Mol. function=protein serine/threonine kinase activity; Biological process=protein amino acid phosphorylation
  Homolog annotation: Hit_ID=B6TZ54; Match level="QueryCoverage=90%, HitCoverage=12%, E-value=1e-25, Identity=98%"; Hit description =Nodulation receptor kinase
LHFNYLQVALLSRLHHRNLVNLVGYCVEKGQRILIYEYMSNGSLARLLYGDNKRSLSWQERL

SEQ ID NO: 130927 - protein, 78 aa, Setaria italica
  Transcript Sequence Number=SeqID_64953
  Gene Ontology: Mol. function=racemase and epimerase activity, acting on carbohydrates and derivatives; Biological process=carbohydrate metabolic process
  Homolog annotation: Hit_ID=Q1XG32; Match level="QueryCoverage=66%, HitCoverage=14%, E-value=2e-20, Identity=94%"; Hit description=UDP -galactose epimerase
GELHGQRRPLVPAATCGSASAGQRDKRSVLVTGGAGFIGTHTVLRLLERGYGVTVVDNFHNSVPEALDRVRLIAGPAL

SEQ ID NO: 130928 - protein, 72 aa, Setaria italica
  Transcript Sequence Number=SeqID_64954
  Homolog annotation: Hit_ID=Q5NB85; Match level="QueryCoverage=61%, HitCoverage=6%, E-value=2e-10, Identity=73%"; Hit description=Auxin response factor 1
NSSSKGLPSLSEISQKLFQVTSNDARVPPWPGLSAYQAEEPSSKEPAVRVDISLTPTVIFSLVAAFLVWLIK

SEQ ID NO: 130929 - protein, 34 aa, Setaria italica
  Transcript Sequence Number=SeqID_64955
FLQFSFVHYVYPLINLSVGIGESDGRSSFSPVHR

SEQ ID NO: 130930 - protein, 85 aa, Setaria italica
  Transcript Sequence Number=SeqID_64956
  Gene Ontology: Cellular component=nucleus
APWFCLLDQGRTDQKISKAAREEERCLRLASAPQNPTTAATSDALRVADLPGRGRGLVAARNVREGEVLLSEPALLLYPSTLASL

SEQ ID NO: 130931 - protein, 57 aa, Setaria italica
  Transcript Sequence Number=SeqID_64957
  Gene Ontology: Mol. function=protein serine/threonine kinase activity; Biological process=protein amino acid phosphorylation
  Homolog annotation: Hit_ID=B9RS14; Match level="QueryCoverage=96%, HitCoverage=6%, E-value=4e-14, Identity=58%"; Hit description=Serine- threonine protein kinase, plant-type, putative
EAKLLVYEYMENGSLDRWLHHRDREGAPAPLDWPIRLAIAIDAAKGLSYMHHDCAQS

SEQ ID NO: 130932 - protein, 37 aa, Setaria italica
  Transcript Sequence Number=SeqID_64958
  Gene Ontology: Mol. function=protein tyrosine kinase activity
VTDPLRTPLDWRTRLQVAIDIAAALEYLYYFCDPPVF

SEQ ID NO: 130933 - protein, 37 aa, Setaria italica
  Transcript Sequence Number=SeqID_64959
LLVVLKFYFTRSEITHALPINVLVIESYYGQNFLLSI

SEQ ID NO: 130934 - protein, 108 aa, Setaria italica
  misc_feature (83)..(83): Xaa can be any naturally occurring amino acid
  Transcript Sequence Number=SeqID_64960
  Gene Ontology: Mol. function=protein serine/threonine phosphatase activity; Cellular component=protein serine/threonine phosphatase complex; Biological process=protein amino acid dephosphorylation
  Homolog annotation: Hit_ID=B6TPM6; Match level="QueryCoverage=98%, HitCoverage=28%, E-value=4e-44, Identity=79%"; Hit description =Catalytic/ protein phosphatase type 2C/ protein serine/threonine phosphatase
KESERESEEVPDVHGGWKSEDGSLNCGYSSIRGRRASMEDFYDIRSSRIDDKQINLFGVFDGHGGTRAAEYLKKHLFENLMKXPAFVADTKSAISEVYKKTECRFLGC

SEQ ID NO: 130935 - protein, 86 aa, Setaria italica
  misc_feature (17)..(17): Xaa can be any naturally occurring amino acid
  misc_feature (25)..(25): Xaa can be any naturally occurring amino acid
  Transcript Sequence Number=SeqID_64961
  Gene Ontology: Mol. function=hydrolase activity
  Homolog annotation: Hit_ID=B6SWT6; Match level="QueryCoverage=63%, HitCoverage=10%, E-value=7e-20, Identity=87%"; Hit description =Hydrolase
AAFSFVFSSAYIIALLXHDSLKMPXWDHKRIDVVNQIHGVPVDWALGAFIVQTALNRTEYSDSSVSYLNSYDSSGLDNQTFKLKEN

SEQ ID NO: 130936 - protein, 64 aa, Setaria italica
  Transcript Sequence Number=SeqID_64962
  Gene Ontology: Mol. function=zinc ion binding; Cellular component =intracellular
  Homolog annotation: Hit_ID=A6N0Z8; Match level="QueryCoverage=100%, HitCoverage=28%, E-value=7e-18, Identity=75%"; Hit description =Constans-like b-box zinc finger protein (Fragment)
  Pfam annotation: Domain name=CCT; Domain location=36-64; Score=14.3; E_value=0.0088; Accession=PF06203.6; Description=CCT motif
SNGSSMEENHQGNPNLATPLQAPKRTGFDVVPCPDRDSVISRYKEKRKTRRFDRQVRYESRKVR

SEQ ID NO: 130937 - protein, 56 aa, Setaria italica
  Transcript Sequence Number=SeqID_64963
  Homolog annotation: Hit_ID=Q8VWY8; Match level="QueryCoverage=76%, HitCoverage=13%, E-value=9e-15, Identity=88%"; Hit description=D -protein
LSKNSRSHLIITQLEQKGAGPGARSSHAITLVGDMAYAFGGEFTPRVPVDKTMYAF

SEQ ID NO: 130938 - protein, 64 aa, Setaria italica
  misc_feature (47)..(47): Xaa can be any naturally occurring amino acid
  Transcript Sequence Number=SeqID_64964
  Gene Ontology: Mol. function=6-phosphofructokinase activity; Cellular component=6-phosphofructokinase complex; Biological process=glycolysis
  Homolog annotation: Hit_ID=Q6Z522; Match level="QueryCoverage=100%, HitCoverage=11%, E-value=1e-27, Identity=92%"; Hit description =Putative diphosphate-fructose-6-phosphate 1-phosphotransferase
ARRIDMFFVIGGNGSHAGANAIHEECRKRKLKVSVVAVPKTIDNDIXLFMDKTFGFDTAVEEAQ

SEQ ID NO: 130939 - protein, 108 aa, Setaria italica
  Transcript Sequence Number=SeqID_64965
  Gene Ontology: Mol. function=6-phosphofructokinase activity; Cellular component=6-phosphofructokinase complex; Biological process=glycolysis
  Homolog annotation: Hit_ID=Q6Z522; Match level="QueryCoverage=97%, HitCoverage=20%, E-value=4e-47, Identity=87%"; Hit description =Putative diphosphate-fructose-6-phosphate 1-phosphotransferase
QKSNATDASGNVILSDFGVHMQQKIKKHFKDIGVPADLKYIDPTYMVRACRANASDAILCTVLGQNAVHGAFAGFSGITSGVCNTHYVYLPIPEVIKKRPKDNSRNPK

SEQ ID NO: 130940 - protein, 42 aa, Setaria italica
  Transcript Sequence Number=SeqID_64966
FYKWTHDVLKCIFYGTHSICIHISCVYHRRYISVHHAVCTIE

SEQ ID NO: 130941 - protein, 43 aa, Setaria italica
  Transcript Sequence Number=SeqID_64967
HSICIHISCVYHRRYISVHHASIYRTTIRHLMLWFVPSNETHV

SEQ ID NO: 130942 - protein, 41 aa, Setaria italica
  Transcript Sequence Number=SeqID_64968
VFSVIRIINKAKLCHNNQLGSDIGENNTLIRNWNAYWILSA

SEQ ID NO: 130943 - protein, 90 aa, Setaria italica
  Transcript Sequence Number=SeqID_64969
  Subcellular localization annotation: CTP_CleavageSite=34; ConfidenceScore=5.58e-01
WSPRDHTPSPLFPTRVLPFPRQAATTTIMRRRPRQREASSHLLPPQLRPPTAPRVEGERRRPRPQVETLDPSWLLWHNLALLIILITENT

SEQ ID NO: 130944 - protein, 140 aa, Setaria italica
  misc_feature (120)..(120): Xaa can be any naturally occurring amino acid
  Transcript Sequence Number=SeqID_64970
  Gene Ontology: Mol. function=catalytic activity; Biological process =response to stress
  Homolog annotation: Hit_ID=B4FCR1; Match level="QueryCoverage=74%, HitCoverage=47%, E-value=2e-53, Identity=94%"; Hit description =Phosphopantothenoylcysteine decarboxylase
  Pfam annotation: Domain name=Flavoprotein; Domain location=1-61; Score=-6.6; E_value=0.00026; Accession=PF02441.11; Description =Flavoprotein
YCKFLLLFVVLSVNWVLYYYLVIAPLSANTLAKIASGLCDNLLTCIVRAWDYSKPLFVAPAMNTLMWNNPFTERHLQTINQLGIILIPPVTKRLACGDYGNGAMAETSQIYTSVRLACKXQPHDSSSSVVIPVSNNQPSS

SEQ ID NO: 130945 - protein, 93 aa, Setaria italica
  misc_feature (57)..(57): Xaa can be any naturally occurring amino acid
  misc_feature (65)..(65): Xaa can be any naturally occurring amino acid
  Transcript Sequence Number=SeqID_64971
  Gene Ontology: Mol. function=catalytic activity; Biological process =response to stress
  Homolog annotation: Hit_ID=B4FCR1; Match level="QueryCoverage=98%, HitCoverage=40%, E-value=2e-38, Identity=86%"; Hit description =Phosphopantothenoylcysteine decarboxylase
  Pfam annotation: Domain name=Flavoprotein; Domain location=2-65; Score=20.6; E_value=1.1e-06; Accession=PF02441.11; Description =Flavoprotein
CWTTHNLIGDEVLHIELRKWADILVIAPLSANTLAKIASGLCDNLLTCIVRAWDYSXKPLFVAPXAMNTLMWNNPFTERHLQTINQLGIILTP

SEQ ID NO: 130946 - protein, 61 aa, Setaria italica
  Transcript Sequence Number=SeqID_64972
DPVRNLTWHPTDTLMRAHRWGTIMIENLLRTTACKKRESSNGGRVHGVGVVLTWPTLRHVM

SEQ ID NO: 130947 - protein, 83 aa, Setaria italica
  Transcript Sequence Number=SeqID_64973
  Gene Ontology: Mol. function=metal ion binding
  Homolog annotation: Hit_ID=Q10R93; Match level="QueryCoverage=98%, HitCoverage=15%, E-value=4e-33, Identity=76%"; Hit description =ReMembR-H2 protein JR702, putative, expressed
  Pfam annotation: Domain name=PA; Domain location=2-69; Score=27.7; E _value=4.8e-05; Accession=PF02225.14; Description=PA domain
ASAFALVIRGGCQFDDKVRNAQNAGFKAAIVYDNEDNGVLVSMAGSSSGVHIYAVFISKASGEVLKKYSGQTEAELWIIPTYE

SEQ ID NO: 130948 - protein, 66 aa, Setaria italica
  Transcript Sequence Number=SeqID_64974
  Gene Ontology: Mol. function=transcription coactivator activity; Biological process=regulation of transcription, DNA-dependent
  Homolog annotation: Hit_ID=B6UHG3; Match level="QueryCoverage=83%, HitCoverage=51%, E-value=1e-20, Identity=89%"; Hit description=RNA polymerase II transcriptional coactivator KIWI
  Pfam annotation: Domain name=PC4; Domain location=3-66; Score=-0.9; E_ value=0.0011; Accession=PF02229.8; Description=Transcriptional Coactivator p15 (PC4)
GRKRFGGGGGSEPAAKRQAAGDEGPSESAEDGTVVAEISKNKKVSVRSWKGKVYVDMREFYTKDGK

SEQ ID NO: 130949 - protein, 46 aa, Setaria italica
  Transcript Sequence Number=SeqID_64975
RRLTDQLTVRACVFLSQQLSMKGFAGDTAKAHAKTSMIAGEGVSNI

SEQ ID NO: 130950 - protein, 44 aa, Setaria italica
  Transcript Sequence Number=SeqID_64976
  Gene Ontology: Mol. function=small conjugating protein ligase activity; Cellular component=proteasome complex; Biological process =ubiquitin-dependent protein catabolic process
  Homolog annotation: Hit_ID=Q0JI74; Match level="QueryCoverage=79%, HitCoverage=9%, E-value=1e-12, Identity=91%"; Hit description =Ubiquitin carrier protein
MNENHEQMKQVAFKTKVFHPNINSNGNICLDILKEQWSPALTIS

SEQ ID NO: 130951 - protein, 55 aa, Setaria italica
  Transcript Sequence Number=SeqID_64977
  Gene Ontology: Mol. function=hydrolase activity, hydrolyzing O -glycosyl compounds; Cellular component=cell wall; Biological process= carbohydrate metabolic process
  Homolog annotation: Hit_ID=A6N1U0; Match level="QueryCoverage=96%, HitCoverage=37%, E-value=4e-19, Identity=83%"; Hit description=Non -cyanogenic beta-glucosidase (Fragment)
VSANVKAYFAWSLLDNFEWGNGFTVRFGLNFVDYSDGNKRYPKKSAHWFKEFLRK

SEQ ID NO: 130952 - protein, 88 aa, Setaria italica
  Transcript Sequence Number=SeqID_64978
  Gene Ontology: Mol. function=hydrolase activity, hydrolyzing O -glycosyl compounds; Biological process=carbohydrate metabolic process
  Homolog annotation: Hit_ID=Q01KB4; Match level="QueryCoverage=98%, HitCoverage=16%, E-value=4e-29, Identity=70%"; Hit description =OSIGBa0135C13.5 protein
GPLIRGDYPASMKGLVGNRLPMLTKEQSELVKGSFDFIGLNYYTTNYADHLPPSNGLNTSYSTDSQANTTGVRNGVPIGPRAASSMDY

SEQ ID NO: 130953 - protein, 90 aa, Setaria italica
  Transcript Sequence Number=SeqID_64979
  Gene Ontology: Mol. function=transferase activity; Cellular component= membrane
  Homolog annotation: Hit_ID=B6SUC6; Match level="QueryCoverage=98%, HitCoverage=21%, E-value=4e-41, Identity=89%"; Hit description =Secondary cell wall-related glycosyltransferase family 47
LIPWEEIGVFVAEDDVTKLDTILTSIPMEEILRKQRLLANPSMKQAMLFPQPTEPRDAFHQILNGLARKLPHGKGVFLKPGQKVLNWTEG

SEQ ID NO: 130954 - protein, 145 aa, Setaria italica
  Transcript Sequence Number=SeqID_64980
  Gene Ontology: Mol. function=transferase activity; Cellular component= membrane
  Homolog annotation: Hit_ID=B6TD30; Match level="QueryCoverage=82%, HitCoverage=28%, E-value=5e-64, Identity=96%"; Hit description =Secondary cell wall-related glycosyltransferase family 47
  Pfam annotation: Domain name=Exostosin; Domain location=1-121; Score=- 7.5; E_value=3.4e-06; Accession=PF03016.7; Description=Exostosin family
IFVYFRGLFYDTSNDPEGGYYARGARASVWENFKNNPMFDISTDHPPTYYEDMQRSVFCLCPLGWAPWSPRLVEAVVFGCIPVIIADDIVLPFADAIPWEEIGVFVAEDDVTKLDTILTSNNRIGRKIPYGKTRRTRLRRNPIRI

SEQ ID NO: 130955 - protein, 75 aa, Setaria italica
  Transcript Sequence Number=SeqID_64981
  Gene Ontology: Mol. function=transferase activity; Cellular component= membrane
  Homolog annotation: Hit_ID=B6SUC6; Match level="QueryCoverage=74%, HitCoverage=13%, E-value=3e-21, Identity=85%"; Hit description =Secondary cell wall-related glycosyltransferase family 47
WGTARARALPLALTLLLACSDVAVVAAQVTERIQGSAGDVLEDDPVGRLKVYVYELPPKYNKNILAKDSRCLKQQ

SEQ ID NO: 130956 - protein, 104 aa, Setaria italica
  Transcript Sequence Number=SeqID_64982
  Gene Ontology: Mol. function=transferase activity; Cellular component= membrane
  Homolog annotation: Hit_ID=B6T2U9; Match level="QueryCoverage=79%, HitCoverage=19%, E-value=5e-44, Identity=98%"; Hit description =Secondary cell wall-related glycosyltransferase family 47
VLVGPKVFLSIVLLVLLLFRLAEIFMHRFLLSSAIRTLNPEEADWFYTPVYTTCDLTPWGHPLPFKSPRIMRSAIQFISKRWPYWNRTEGADHFFVVPHDFGAC

SEQ ID NO: 130957 - protein, 63 aa, Setaria italica
  misc_feature (23)..(23): Xaa can be any naturally occurring amino acid
  Transcript Sequence Number=SeqID_64983
  Gene Ontology: Mol. function=transferase activity; Cellular component= membrane
  Homolog annotation: Hit_ID=B6SUC6; Match level="QueryCoverage=80%, HitCoverage=11%, E-value=3e-21, Identity=90%"; Hit description =Secondary cell wall-related glycosyltransferase family 47
TNFTKDVRTLTRNRTEGADHFFXVTPHDFGACFYFQEAKAIERGILPVLRRATLVQTFGQKDH

SEQ ID NO: 130958 - protein, 41 aa, Setaria italica
  Transcript Sequence Number=SeqID_64984
LTHQHLSHSRPPVHNTYNTNTNTLMYSGSSYEFVLVLYVNT

SEQ ID NO: 130959 - protein, 86 aa, Setaria italica
  misc_feature (30)..(30): Xaa can be any naturally occurring amino acid
  Transcript Sequence Number=SeqID_64985
  Gene Ontology: Mol. function=ATPase activity, coupled to transmembrane movement of substances; Cellular component=proton -transporting two-sector ATPase complex; Biological process=ATP metabolic process
  Homolog annotation: Hit_ID=Q9SZY7; Match level="QueryCoverage=65%, HitCoverage=31%, E-value=6e-20, Identity=89%"; Hit description=H+ -transporting ATPase-like protein
  Pfam annotation: Domain name=ATP-synt_C; Domain location=10-75; Score= 35.5; E_value=2.1e-07; Accession=PF00137.13; Description=ATP synthase subunit C
PWCRSRPYTFSAIGIAVSIGVSVLGAAWGXFITGSSLIGAAIKAPRITSKNLISVIFCEAVAIYGVIVAIILPSTKVFVKLLFLIS

SEQ ID NO: 130960 - protein, 58 aa, Setaria italica
  Transcript Sequence Number=SeqID_64986
  Gene Ontology: Mol. function=transferase activity, transferring groups other than amino-acyl groups; Biological process=biosynthetic process
  Homolog annotation: Hit_ID=B6TRM1; Match level="QueryCoverage=100%, HitCoverage=15%, E-value=4e-25, Identity=96%"; Hit description =Chalcone synthase G
NNPGSRVLVTAAETTVLGFRPPSYDRPYDLVGAALFGDGASAVIVGAGPMTPAENSFL

SEQ ID NO: 130961 - protein, 145 aa, Setaria italica
  misc_feature (109)..(109): Xaa can be any naturally occurring amino acid
  Transcript Sequence Number=SeqID_64987
  Gene Ontology: Mol. function=zinc ion binding
MFSRMEIHETDSSSSGVIDLINGNGDGDLPMDWTSTSEDTKPQLNSQDLSVSDYLPDFPMADQTEDLYLGDGSNGGSNMAFTSRQNLLLPSTSGLGSSSFGTLESILPXKIVLRPVITDAVSPSLEASSSTILSLLSNYCFLLGK

SEQ ID NO: 130962 - protein, 140 aa, Setaria italica
  Transcript Sequence Number=SeqID_64988
  Gene Ontology: Mol. function=protein serine/threonine phosphatase activity; Cellular component=protein serine/threonine phosphatase complex; Biological process=protein amino acid dephosphorylation
  Homolog annotation: Hit_ID=Q5Z8P0; Match level="QueryCoverage=91%, HitCoverage=32%, E-value=1e-62, Identity=90%"; Hit description =Probable protein phosphatase 2C 60
YAKFRLREPFSKPILSSEPSISVQPLQPHDQFLIFASDGLWEHLTNQEAVDIVQSSPRNGCARKLIRAALQEAAKKREMRYSDLKKIERGVRRHFHDDITVIVVFLDSSLVSRASTHRGPALSLTKVGRTTKTIDDKTNN

SEQ ID NO: 130963 - protein, 73 aa, Setaria italica
  Transcript Sequence Number=SeqID_64989
  Gene Ontology: Mol. function=protein serine/threonine phosphatase activity; Cellular component=protein serine/threonine phosphatase complex; Biological process=protein amino acid dephosphorylation
  Homolog annotation: Hit_ID=Q5Z8P0; Match level="QueryCoverage=100%, HitCoverage=18%, E-value=2e-33, Identity=95%"; Hit description =Probable protein phosphatase 2C 60
LLTKQWPVKPQIAAVGSCCLVGVICGGMLYVANVGDSRVVLGRHVKATGEVLAVQLSAEHNVSIESVRKELQS

SEQ ID NO: 130964 - protein, 77 aa, Setaria italica
  Transcript Sequence Number=SeqID_64990
  Subcellular localization annotation: CTP_CleavageSite=36; ConfidenceScore=5.60e-01
MAPLHAPRNNHSCCLLPRCAPPLSSSSPVDTTSVTVASVYSPYPPAGCSAASSSFLWLKRWWWWCFSSAMDETGRPC

SEQ ID NO: 130965 - protein, 56 aa, Setaria italica
  Transcript Sequence Number=SeqID_64991
QARGSNKKRKSACICIFTSGMNSLFSKQMPIYMYFNSVYDGKLKMSQNVCVCVSFT

SEQ ID NO: 130966 - protein, 57 aa, Setaria italica
  Transcript Sequence Number=SeqID_64992
  Homolog annotation: Hit_ID=B4F9U2; Match level="QueryCoverage=64%, HitCoverage=7%, E-value=8e-12, Identity=94%"; Hit description=IQD1
EKGGSAGPVKERLSFQGGTAAASPMRRHSGPPKVESAAASPIAATFWVLPKVESAVK

SEQ ID NO: 130967 - protein, 76 aa, Setaria italica
  Transcript Sequence Number=SeqID_64993
YILNKSHNNPSFAGLARSYKEVTAHRKSALGASNISNQSSRTLILQTLVISLQKYLGDNFLWSGLDLLFRAHQLPD

SEQ ID NO: 130968 - protein, 65 aa, Setaria italica
  Transcript Sequence Number=SeqID_64994
MRKPGILTRWASSISSLRVIDISDCDKLQSLSGDLRSLEKLKLSECRSLVSLPDGPQAYSSLRVL

SEQ ID NO: 130969 - protein, 65 aa, Setaria italica
  Transcript Sequence Number=SeqID_64995
YILNKSRSNPSFAGLVGSYKEVTAYRESQRTLILQTLVISLQKYLTDNFLWSGLDILFRAHQLPD

SEQ ID NO: 130970 - protein, 62 aa, Setaria italica
  misc_feature (43)..(43): Xaa can be any naturally occurring amino acid
  Transcript Sequence Number=SeqID_64996
NKLEMTKNQPGNVQSGSWCARNSRSRPDQRKLSPRIVPDLQKXDYCDSCLQILDCKLKNLAH

SEQ ID NO: 130971 - protein, 52 aa, Setaria italica
  Transcript Sequence Number=SeqID_64997
QQSKLAASGIKRDQLTRKNIGLGSRQIGRGQWHKETAGAVRDKVVSRDCRSK

SEQ ID NO: 130972 - protein, 50 aa, Setaria italica
  misc_feature (35)..(35): Xaa can be any naturally occurring amino acid
  Transcript Sequence Number=SeqID_64998
  Gene Ontology: Mol. function=mannosyl-oligosaccharide 1,2-alpha -mannosidase activity; Cellular component=membrane
  Homolog annotation: Hit_ID=B6SH10; Match level="QueryCoverage=94%, HitCoverage=7%, E-value=2e-21, Identity=97%"; Hit description=ER degradation-enhancing alpha-mannosidase-like 1
VVTLYIFQEAYKAAMHYLHHDPWYVEVNMNSGATXWPLFNSLQAFWPGLQ

SEQ ID NO: 130973 - protein, 74 aa, Setaria italica
  Transcript Sequence Number=SeqID_64999
  Subcellular localization annotation: CTP_CleavageSite=45; ConfidenceScore=5.27e-01
PSPFFGPNQISHCYRPSTCQPVFPLSFAVLAHSLFTHPVLLRIQRASSGADPAQWLRLFAYQFLYLIVLFTFSL

SEQ ID NO: 130974 - protein, 155 aa, Setaria italica
  misc_feature (41)..(41): Xaa can be any naturally occurring amino acid
  misc_feature (143)..(143): Xaa can be any naturally occurring amino acid
  Transcript Sequence Number=SeqID_65000
  Gene Ontology: Mol. function=phosphatidylinositol binding; Cellular component=clathrin coat; Biological process=clathrin coat assembly
  Homolog annotation: Hit_ID=B9SP68; Match level="QueryCoverage=96%, HitCoverage=22%, E-value=4e-46, Identity=63%"; Hit description =Clathrin assembly protein, putative
  Pfam annotation: Domain name=ANTH; Domain location=2-153; Score=-0.7; E_value=3.4e-07; Accession=PF07651.8; Description=ANTH domain
GYLKYDIEAERSSKQGQGPEKVWTQHGHLIFLFYYHLLPEXGHSRTRELNSQDLLEQLPALQQLLYRLIGCRPEGAANNNYLVQYALALVLKESFKIYCAINDGIINLVDKFFEMPKHEALKALDIYRRAGQQAGSLSDFYEXCRGLELARIPVS

SEQ ID NO: 130975 - protein, 38 aa, Setaria italica
  Transcript Sequence Number=SeqID_65001
HIIKLLYFQGHSRTRELNSQDLLEQLPALQQLLYRLIG

SEQ ID NO: 130976 - protein, 46 aa, Setaria italica
  Transcript Sequence Number=SeqID_65002
SGKKAGRSVVRIRGVTDDAAAAFVRLLYAGRYTAPPPSLPNLIRCS

SEQ ID NO: 130977 - protein, 69 aa, Setaria italica
  Transcript Sequence Number=SeqID_65003
VNIRRPSGIDGQPVLINRRPKQTHQPHRKTLSCGVTSYAHERDMEVRPCPDVRHSLEQSLTLKKTCSPH

SEQ ID NO: 130978 - protein, 71 aa, Setaria italica
  Transcript Sequence Number=SeqID_65004
  Gene Ontology: Mol. function=histone acetyltransferase activity; Cellular component=nucleus; Biological process=regulation of transcription, DNA-dependent
LLAKEFAAVERTEAWRFLQENDPWQELQLLQRLHEADMVRTIFLFFFFPIRFHWARCELRQCVLTHMLAPN

SEQ ID NO: 130979 - protein, 87 aa, Setaria italica
  Transcript Sequence Number=SeqID_65005
PGAAPAEGQGERQEGRAVRRPDPRRHRRRRGRVRPPPLRRQRRRKWRRKRAEQRVYVELSEAMDCLDHICTEGCTEVGPAGRAPAPS

SEQ ID NO: 130980 - protein, 88 aa, Setaria italica
  Transcript Sequence Number=SeqID_65006
  Gene Ontology: Mol. function=histone acetyltransferase activity; Cellular component=nucleus; Biological process=regulation of transcription, DNA-dependent
PAHSSVLATASPVLGSILERRLRKDRESGKKAGRSVVRIRGVTDDAAAAFVRLLYAGRLVSGGGVAVWVAPGRLEPSPRSPADVRIIA

SEQ ID NO: 130981 - protein, 66 aa, Setaria italica
  misc_feature (51)..(66): Xaa can be any naturally occurring amino acid
  Transcript Sequence Number=SeqID_65007
SWKTFSSMMFRYKKCIGVHLFKAVVSFIHIMWFCINARFNLWLMRCLNFKXXXXXXXXXXXXXXXX

SEQ ID NO: 130982 - protein, 80 aa, Setaria italica
  misc_feature (21)..(21): Xaa can be any naturally occurring amino acid
  Transcript Sequence Number=SeqID_65008
  Subcellular localization annotation: CTP_CleavageSite=40; ConfidenceScore=5.13e-01
LKPPPGWKAGDPITLPLDDIXPGVKVRPKAPVPQAPVSVRPMVPMGPAPIQVAAVQLDFGSSSSDEYSSDVGSSEEDDED

SEQ ID NO: 130983 - protein, 91 aa, Setaria italica
  misc_feature (50)..(50): Xaa can be any naturally occurring amino acid
  Transcript Sequence Number=SeqID_65009
  Gene Ontology: Mol. function=metal ion binding; Cellular component =nucleus; Biological process=cell differentiation
  Homolog annotation: Hit_ID=Q0JBF0; Match level="QueryCoverage=94%, HitCoverage=35%, E-value=2e-20, Identity=63%"; Hit description =Protein YABBY 5
  Pfam annotation: Domain name=YABBY; Domain location=19-89; Score= -51.0; E_value=5.8e-06; Accession=PF04690.5; Description=YABBY protein
MMSSVPEAAFAMDQHLAPPQLQTAAEQEQLCYVHCKCCDTILAVGVPCSXSLFKTVTVRCGHCANLLSVNLRGPSLSCPYGRSVLNLNLVF

SEQ ID NO: 130984 - protein, 96 aa, Setaria italica
  Transcript Sequence Number=SeqID_65010
QKENIMHLYKLQQCSQFTKFLCVQTKERKKQKNKKSGKVFTLSKFKPKIYLIKLHGHTYSTYNPAPSHQPHYPNCINLLNISWLPRRSIRSDDTQL

SEQ ID NO: 130985 - protein, 81 aa, Setaria italica
  Transcript Sequence Number=SeqID_65011
LPHITFSTRLQLHVSLRFYITAVLCNFLPLIREYLPSAAEEIESDIISLAQSEDSEVYDIYTVKEVDDTNMEDTSAASYPR

SEQ ID NO: 130986 - protein, 85 aa, Setaria italica
  Transcript Sequence Number=SeqID_65012
SGRKSSTSGPATREKPIVVRVKRKPSQTRPDAFWLEINERPAKKAMLDFSSLSISEPSSSSAAIQTECNFGAMILAKTILPPCID

SEQ ID NO: 130987 - protein, 135 aa, Setaria italica
  misc_feature (98)..(98): Xaa can be any naturally occurring amino acid
  misc_feature (124)..(124): Xaa can be any naturally occurring amino acid
  Transcript Sequence Number=SeqID_65013
  Homolog annotation: Hit_ID=A2Q4A7; Match level="QueryCoverage=98%, HitCoverage=23%, E-value=1e-24, Identity=40%"; Hit description =Tetratricopeptide-like helical
WNGLAADVVKLFELMKETEVQPNHYTFVAVLAACKNTGLVAEGMGLLKCMKEKYGLEPHIEHISCVVDMLCRTGRLTDAYHLIQNSHSEHAKNPVLWXTLLSGSRSWGNLVIGEVAARHLLSLXSRNRANYKMLA

SEQ ID NO: 130988 - protein, 90 aa, Setaria italica
  misc_feature (30)..(30): Xaa can be any naturally occurring amino acid
  Transcript Sequence Number=SeqID_65014
CKNTGLVAEGMGLLKCMKEKYGLEPHIEHXSCVVDMLCRTGRLTDAYHLIQGQEMPSCYFSNHNPHEREPLSNVPHNTGFCVFRVRILDQ

SEQ ID NO: 130989 - protein, 109 aa, Setaria italica
  Transcript Sequence Number=SeqID_65015
LDPEKRITVSQALSHPFITATRPSTWMKHGTMEEMATCRPCCMHLSFGYVLLLDSARASAVCAFYMRKGQHKKVLGWRSLTHYSLDMVNPLNSGCLPFVLFLKSSPNSW

SEQ ID NO: 130990 - protein, 107 aa, Setaria italica
  misc_feature (92)..(92): Xaa can be any naturally occurring amino acid
  misc_feature (94)..(94): Xaa can be any naturally occurring amino acid
  Transcript Sequence Number=SeqID_65016
  Gene Ontology: Mol. function=protein serine/threonine kinase activity; Biological process=protein amino acid phosphorylation
  Homolog annotation: Hit_ID=Q2QLI7; Match level="QueryCoverage=99%, HitCoverage=11%, E-value=7e-53, Identity=92%"; Hit description =Protein kinase domain containing protein, expressed
YSADMFCDDIFGESPAGIRKSGKDDGLHVERNALHDNWDDADGYYTYRFGELLDGRYEITAAHGKGVFSTVVRAKDLKAGKDDPEEVAIKIXRXNDTMYKAGKQEVS

SEQ ID NO: 130991 - protein, 78 aa, Setaria italica
  Transcript Sequence Number=SeqID_65017
LRNINLFLTSTCVWIYKILICSFIQDSARASAVCAFYMRKGQHKKVLGWRSLTHYSLDMVNPLNSGCLPFCFILKEFT

SEQ ID NO: 130992 - protein, 111 aa, Setaria italica
  Transcript Sequence Number=SeqID_65018
  Gene Ontology: Mol. function=calmodulin binding; Cellular component =integral to membrane; Biological process=cell death
  Homolog annotation: Hit_ID=Q94CH0; Match level="QueryCoverage=82%, HitCoverage=61%, E-value=3e-30, Identity=64%"; Hit description=Seven transmembrane protein Mlo5 (Fragment)
  Pfam annotation: Domain name=Mlo; Domain location=1-110; Score= -366.3; E_value=0.049; Accession=PF03094.7; Description=Mlo family
MTEHNIVYRLPSSFFQMTYGFHSCFMDHVGFLVPRLVLGVVIQLLCSYSTLPLYAIVTQMGSYYKKEIFNEHVQQGVLGWAEKAKKRSGLKEGNSTAESYCLLTSYGSVKF

SEQ ID NO: 130993 - protein, 103 aa, Setaria italica
  misc_feature (49)..(49): Xaa can be any naturally occurring amino acid
  misc_feature (96)..(96): Xaa can be any naturally occurring amino acid
  Transcript Sequence Number=SeqID_65019
  Gene Ontology: Mol. function=calmodulin binding; Cellular component =integral to membrane; Biological process=cell death
  Homolog annotation: Hit_ID=Q94CG7; Match level="QueryCoverage=85%, HitCoverage=17%, E-value=2e-27, Identity=75%"; Hit description=MLO -like protein 1
CFNGQSEVYVLFLQRKVPLLSVEAIHQLHIFIFVLAITHVIFSVTTMLXLGGAQIHQWKQWENGIQKDDPGNGPKKVTDVHRHEFIKKRFKGIGKXSIILSWL

SEQ ID NO: 130994 - protein, 56 aa, Setaria italica
  Transcript Sequence Number=SeqID_65020
  Gene Ontology: Mol. function=calmodulin binding; Cellular component =integral to membrane; Biological process=cell death
  Homolog annotation: Hit_ID=Q94CG7; Match level="QueryCoverage=89%, HitCoverage=10%, E-value=4e-19, Identity=86%"; Hit description=MLO -like protein 1
KHTAIEGEVVVKPSDDHFWFGKPRVILFLIHFILFQNAFEIAFFFWILVSIVVHHS

SEQ ID NO: 130995 - protein, 61 aa, Setaria italica
  Transcript Sequence Number=SeqID_65021
TITDNNALHDSTTKRASWCRTVHALHLFVAIIPGRLLRDELALHWACSDTSCTRGKQATAS

SEQ ID NO: 130996 - protein, 43 aa, Setaria italica
  Transcript Sequence Number=SeqID_65022
VVYCYRSGLPSLSLLLSLVTCSCNALLSVIVYDYCIVALRLYC

SEQ ID NO: 130997 - protein, 93 aa, Setaria italica
  Transcript Sequence Number=SeqID_65023
  Gene Ontology: Mol. function=transferase activity; Cellular component= membrane; Biological process=phospholipid biosynthetic process
  Homolog annotation: Hit_ID=Q6QP44; Match level="QueryCoverage=100%, HitCoverage=13%, E-value=1e-44, Identity=87%"; Hit description =Putative aminoalcoholphosphotransferase
KGSMALALAMILPFIALLAGVSIWCYLSPSSIMRNQPHLLVIGTGFNFGYLVGRMILAHLCDEPKGLKSGMFMSLVFLCFLIANALIAKINDG

SEQ ID NO: 130998 - protein, 106 aa, Setaria italica
  misc_feature (93)..(93): Xaa can be any naturally occurring amino acid
  Transcript Sequence Number=SeqID_65024
  Gene Ontology: Mol. function=nucleotide binding; Biological process =defense response
  Homolog annotation: Hit_ID=Q2R1W2; Match level="QueryCoverage=92%, HitCoverage=10%, E-value=6e-31, Identity=67%"; Hit description=NB -ARC domain containing protein, expressed
GKYLLLCRKRLFDMLEKQFECTAFVPVGRESDIKKVFRNILIALDKHKYMGFDTAALSDWQLINELREHLDKRRYLIVIDDVWETSTWKLIKXVALVDGSCGSRVI

SEQ ID NO: 130999 - protein, 48 aa, Setaria italica
  Transcript Sequence Number=SeqID_65025
YIPRRSLQQIKQRPYSFLMIPSYYNFTLPSYHVSLTLSSPRRSLQQIK

SEQ ID NO: 131000 - protein, 106 aa, Setaria italica
  misc_feature (66)..(66): Xaa can be any naturally occurring amino acid
  Transcript Sequence Number=SeqID_65026
  Gene Ontology: Mol. function=structural constituent of ribosome; Cellular component=intracellular; Biological process=translation
  Homolog annotation: Hit_ID=B6SGX4; Match level="QueryCoverage=85%, HitCoverage=21%, E-value=4e-26, Identity=69%"; Hit description =Structural constituent of ribosome
PKYGSTNLQPDVRVGPEDKVPTKVLGSAFLYLRSGTCSGIKVGRLDMEEEEIVENVMAAVVAAVEXVPKMWANVRALHLKAVDSVALPIYQIVPELGMKIEVPVAR

SEQ ID NO: 131001 - protein, 49 aa, Setaria italica
  Transcript Sequence Number=SeqID_65027
  Subcellular localization annotation: CTP_CleavageSite=11; ConfidenceScore=5.31e-01
TLAHIFGTLSTAATTAAITFSTISFPSSTFSLSLPTKQLPERALLSLPP

SEQ ID NO: 131002 - protein, 65 aa, Setaria italica
  Transcript Sequence Number=SeqID_65028
HKRENTLLPMSSGNFILPLLHQTMRNDKMQHQVFRSDLYTLTLYGKSIRFLQGYFQVGQLFHCSV

SEQ ID NO: 131003 - protein, 70 aa, Setaria italica
  Transcript Sequence Number=SeqID_65029
EDAFYHQCCPSVFSSNDFLLNLADTASCYNPESPDTSYMRQGKFGSIGPSRAGGNLVTNFGVHSQITLHR

SEQ ID NO: 131004 - protein, 67 aa, Setaria italica
  Transcript Sequence Number=SeqID_65030
  Gene Ontology: Mol. function=nucleic acid binding
  Subcellular localization annotation: CTP_CleavageSite=51; ConfidenceScore=5.01e-01
NTLSENAFNSGMSPLGGNHITGLSPGYPPMKPIGKSSNRNILADHIFHASSASTASGFTTLAGTPFL

SEQ ID NO: 131005 - protein, 52 aa, Setaria italica
  Transcript Sequence Number=SeqID_65031
FSPMGFIGGYPGDNPVIWLPPKGKSSNRNILADHIFHGVSNFSQFTFISRTT

SEQ ID NO: 131006 - protein, 59 aa, Setaria italica
  Transcript Sequence Number=SeqID_65032
RYLSDGSDVRNDGNAPERRLLLTSLKYLDLRFNKFDGDLPDSVFGGKLSLDAIFANNNR

SEQ ID NO: 131007 - protein, 59 aa, Setaria italica
  Transcript Sequence Number=SeqID_65033
  Gene Ontology: Mol. function=oxidoreductase activity; Cellular component=extracellular region; Biological process=oxidation reduction
  Homolog annotation: Hit_ID=Q4VDN6; Match level="QueryCoverage=100%, HitCoverage=10%, E-value=6e-24, Identity=86%"; Hit description =Ascorbate oxidase
  Pfam annotation: Domain name=Cu-oxidase_3; Domain location=1-59; Score=23.2; E_value=6e-09; Accession=PF07732.7; Description =Multicopper oxidase
VVRVKNSLLTENVAIHWHGIRQIGTPWADGTEGVTQCPILPGDVFTYTFVVDRPGTYMY

SEQ ID NO: 131008 - protein, 76 aa, Setaria italica
  Transcript Sequence Number=SeqID_65034
  Gene Ontology: Mol. function=protein serine/threonine kinase activity
  Homolog annotation: Hit_ID=Q2R001; Match level="QueryCoverage=63%, HitCoverage=8%, E-value=8e-10, Identity=66%"; Hit description =Protein kinase domain containing protein
ETEEGDECEEEDTTEERDEETEERAKQDNFARYNSYTLVELAVPLIEAGELWKVLDRRPAVKPTPRQLEAAELGGA

SEQ ID NO: 131009 - protein, 142 aa, Setaria italica
  misc_feature (67)..(67): Xaa can be any naturally occurring amino acid
  Transcript Sequence Number=SeqID_65035
  Gene Ontology: Mol. function=zinc ion binding; Cellular component =cytoplasm; Biological process=ubiquitin-dependent protein catabolic process
  Homolog annotation: Hit_ID=B6T4M8; Match level="QueryCoverage=97%, HitCoverage=43%, E-value=3e-54, Identity=73%"; Hit description =Ubiquitin ligase protein FANCL
  Pfam annotation: Domain name=WD-3; Domain location=1-142; Score=31.3; E_value=3.3e-12; Accession=PF09765.1; Description=WD-repeat region
SVALVLQEFWSIMDEIDKVLWVVDPTKSAYAMSHRRLALGDDCYILLHVDPRKPSSLPECRFLGADXKLDQLIMNWRKNRRRWDKKKKFHENLACVLDFALPAPPSVNNVKEDEKADCGICYAKHLPVDDELGAHSGCATNY

SEQ ID NO: 131010 - protein, 136 aa, Setaria italica
  misc_feature (46)..(46): Xaa can be any naturally occurring amino acid
  misc_feature (117)..(117): Xaa can be any naturally occurring amino acid
  Transcript Sequence Number=SeqID_65036
  Gene Ontology: Mol. function=zinc ion binding; Cellular component =nuclear envelope; Biological process=ubiquitin-dependent protein catabolic process
  Homolog annotation: Hit_ID=B6T4M8; Match level="QueryCoverage=92%, HitCoverage=39%, E-value=7e-48, Identity=75%"; Hit description =Ubiquitin ligase protein FANCL
  Pfam annotation: Domain name=WD-3; Domain location=1-136; Score=17.3; E_value=2.6e-11; Accession=PF09765.1; Description=WD-repeat region
CYVPSPFSFRCRFLGADEKLDQLIMNWRKNRRRWDKKKKFHENLAXVLDFALPAPPSVNNVKEDEKADCGICYAKHLPVDDELGAHSGCATNYTCENPSCSRAFHSVCLRDWLRSIXTTTRQSFDVLFGNCPTASD

SEQ ID NO: 131011 - protein, 72 aa, Setaria italica
  Transcript Sequence Number=SeqID_65037
PCISIYVKIVHHSENLSMIFFMNRIVINSGTIKQVSAQKCHLIFRISSNKSTEYARSSSAKWTIPSKRCFFI

SEQ ID NO: 131012 - protein, 58 aa, Setaria italica
  Transcript Sequence Number=SeqID_65038
  Gene Ontology: Mol. function=galactosylgalactosylxylosylprotein 3 -beta-glucuronosyltransferase activity; Cellular component=membrane
  Homolog annotation: Hit_ID=Q50HV9; Match level="QueryCoverage=58%, HitCoverage=7%, E-value=1e-11, Identity=85%"; Hit description =Glycosyltransferase
KELTLRKETKELQNRKGPTTEQTDSRVMVWNFDLEPPQLNYPTGWLLKKHLDVVVPIT

SEQ ID NO: 131013 - protein, 68 aa, Setaria italica
  misc_feature (11)..(11): Xaa can be any naturally occurring amino acid
  Transcript Sequence Number=SeqID_65039
  Gene Ontology: Mol. function=nucleoside-triphosphatase activity; Cellular component=nucleus; Biological process=regulation of transcription, DNA-dependent
  Homolog annotation: Hit_ID=Q43704; Match level="QueryCoverage=98%, HitCoverage=8%, E-value=1e-26, Identity=83%"; Hit description=DNA replication licensing factor MCM3 homolog 1
TERIEAFEAIXGQHVLANHVDQMSINDIEQTVNKESAAPYTRRQVEFILERMQDANRIMIRDGIVRII

SEQ ID NO: 131014 - protein, 64 aa, Setaria italica
  Transcript Sequence Number=SeqID_65040
PNGLMMDSDWKYNDELSHKGGNVMDKAKVWPEFQYSEMCFSDRIIIELSEVGVSIEPVVGCFSL

SEQ ID NO: 131015 - protein, 102 aa, Setaria italica
  misc_feature (54)..(54): Xaa can be any naturally occurring amino acid
  misc_feature (89)..(89): Xaa can be any naturally occurring amino acid
  Transcript Sequence Number=SeqID_65041
  Gene Ontology: Mol. function=structural constituent of ribosome; Cellular component=large ribosomal subunit; Biological process =translation
  Subcellular localization annotation: CTP_CleavageSite=68; ConfidenceScore=5.10e-01
MEHLHYLEKSTVQRKLKSTVQKKLPFLYALYSSLGNGDVPSVNTGASMSLPRIXLLAGAKPTFFAQVRGNEEGKQTFSLSGIQKWATDXDVLWAQREQLDAS

SEQ ID NO: 131016 - protein, 120 aa, Setaria italica
  Transcript Sequence Number=SeqID_65042
  Gene Ontology: Mol. function=transcription factor activity; Cellular component=plastid; Biological process=regulation of transcription, DNA-dependent
  Homolog annotation: Hit_ID=Q9ZPL0; Match level="QueryCoverage=99%, HitCoverage=17%, E-value=3e-45, Identity=75%"; Hit description=Sigma factor SIG6
CQDGCCGLMKTFEKFNPSKGCRFPTYAYWWIRQSIKKSIFKNSRLIRLPVCMIADFCWCKLCLLCGCMNNSLQESVFALLRKVGKARLECIMEGEQPTNENVARRAGITIEKLARLRAKT

SEQ ID NO: 131017 - protein, 56 aa, Setaria italica
  Transcript Sequence Number=SeqID_65043
  Gene Ontology: Mol. function=transcription factor activity; Cellular component=plastid; Biological process=regulation of transcription, DNA-dependent
  Homolog annotation: Hit_ID=Q9ZPL0; Match level="QueryCoverage=98%, HitCoverage=10%, E-value=4e-28, Identity=98%"; Hit description=Sigma factor SIG6
CQDGCCGLMKTFEKFNPSKGCRFPTYAYWWIRQSIKKSIFKNSRLIRLPESVFALL

SEQ ID NO: 131018 - protein, 64 aa, Setaria italica
  Transcript Sequence Number=SeqID_65044
  Gene Ontology: Mol. function=transporter activity; Cellular component= mitochondrial inner membrane; Biological process=mitochondrial transport
  Homolog annotation: Hit_ID=B6TAZ9; Match level="QueryCoverage=54%, HitCoverage=11%, E-value=2e-12, Identity=94%"; Hit description =Mitochondrial uncoupling protein 2
  Pfam annotation: Domain name=Mito_carr; Domain location=11-58; Score=- 8.2; E_value=0.019; Accession=PF00153.19; Description=Mitochondrial carrier protein
FRWLFLFCNDPSLNSTYLQEGIGALWTGLGPNVARNAIINAAELASYDEFKQVHVDSLLSCDGH

SEQ ID NO: 131019 - protein, 61 aa, Setaria italica
  Transcript Sequence Number=SeqID_65045
  Gene Ontology: Mol. function=transporter activity; Cellular component= mitochondrial inner membrane; Biological process=mitochondrial transport
  Homolog annotation: Hit_ID=B6TAZ9; Match level="QueryCoverage=93%, HitCoverage=21%, E-value=5e-13, Identity=63%"; Hit description =Mitochondrial uncoupling protein 2
MLHHIDVLQQNDHQSSIFTTDCSLLQGPGAFYKGFIANFCRIGSWNVIMFLTLEQVRRLFL

SEQ ID NO: 131020 - protein, 42 aa, Setaria italica
  Transcript Sequence Number=SeqID_65046
  Gene Ontology: Mol. function=transporter activity; Cellular component= mitochondrial inner membrane; Biological process=mitochondrial transport
  Homolog annotation: Hit_ID=B6TAZ9; Match level="QueryCoverage=95%, HitCoverage=13%, E-value=7e-12, Identity=80%"; Hit description =Mitochondrial uncoupling protein 2
PALWKGIIPGLHRQFLYGGLRVGLYEPVKAFFGRGTAVGDVL

SEQ ID NO: 131021 - protein, 78 aa, Setaria italica
  Transcript Sequence Number=SeqID_65047
  Gene Ontology: Mol. function=protein serine/threonine kinase activity; Biological process=protein amino acid phosphorylation
  Homolog annotation: Hit_ID=Q00RM8; Match level="QueryCoverage=76%, HitCoverage=6%, E-value=4e-10, Identity=55%"; Hit description =H0814G11.12 protein
EKWGLLSKGAGGRGNGAAEETRIVPKKCYYFLVFVLGFVALFSFFALVLWGASRSQKPQIVMKSIKFENFIIQAGTDA

SEQ ID NO: 131022 - protein, 68 aa, Setaria italica
  Transcript Sequence Number=SeqID_65048
  Gene Ontology: Mol. function=protein tyrosine kinase activity; Biological process=protein amino acid phosphorylation
  Homolog annotation: Hit_ID=Q00RM8; Match level="QueryCoverage=73%, HitCoverage=5%, E-value=8e-17, Identity=78%"; Hit description =H0814G11.12 protein
TKERNEDKTRQRRTTGSPMVLRTTLHSRAYVLGALVKPKFTMAVECRVVMNPSKLNKIISLEKACHYS

SEQ ID NO: 131023 - protein, 52 aa, Setaria italica
  Transcript Sequence Number=SeqID_65049
  Gene Ontology: Mol. function=protein tyrosine kinase activity; Biological process=protein amino acid phosphorylation
  Homolog annotation: Hit_ID=Q00RM8; Match level="QueryCoverage=88%, HitCoverage=4%, E-value=1e-15, Identity=78%"; Hit description =H0814G11.12 protein
LRRVLLGFKGAPPGKGWQEIGVIEEEGLLDDEEHTRIVPKKCYYFLVFVLGF

SEQ ID NO: 131024 - protein, 74 aa, Setaria italica
  Transcript Sequence Number=SeqID_65050
  Homolog annotation: Hit_ID=Q84RQ6; Match level="QueryCoverage=94%, HitCoverage=26%, E-value=5e-14, Identity=60%"; Hit description =Putative integral membrane protein NRAMP
HLLCSQVISWIVTVFLMLINGYLIVSFYITDVRGAVLRSSLCVVLVVYLAFIVYLIVRNTSLYSRLCSSMPKRS

SEQ ID NO: 131025 - protein, 38 aa, Setaria italica
  Transcript Sequence Number=SeqID_65051
QSRKIDTNKKSRVQEAVYYYNIESILALVVTQILIKKD

SEQ ID NO: 131026 - protein, 76 aa, Setaria italica
  Transcript Sequence Number=SeqID_65052
  Gene Ontology: Cellular component=microtubule organizing center
  Homolog annotation: Hit_ID=Q4JF26; Match level="QueryCoverage=85%, HitCoverage=9%, E-value=6e-18, Identity=72%"; Hit description =OSJNBa0029H02.26 protein
  Subcellular localization annotation: CTP_CleavageSite=36; ConfidenceScore=5.02e-01
LLMPSIEVANSENTSKSGKSRSRTNKSQDRDQQLKLASENVVMSESILKFQAAFNSELQSLAPTLKQQVTTIDGRP

SEQ ID NO: 131027 - protein, 47 aa, Setaria italica
  Transcript Sequence Number=SeqID_65053
  Gene Ontology: Cellular component=microtubule organizing center
  Homolog annotation: Hit_ID=B9SV58; Match level="QueryCoverage=95%, HitCoverage=6%, E-value=7e-15, Identity=77%"; Hit description=Gamma -tubulin complex component, putative
MTSSMLKFVNSLLHYLTFEVLEPNWHLMHDRLQTARSIDEVIQIHAV

SEQ ID NO: 131028 - protein, 83 aa, Setaria italica
  misc_feature (9)..(9): Xaa can be any naturally occurring amino acid
  misc_feature (26)..(26): Xaa can be any naturally occurring amino acid
  Transcript Sequence Number=SeqID_65054
  Gene Ontology: Cellular component=microtubule organizing center
  Homolog annotation: Hit_ID=Q4JF26; Match level="QueryCoverage=100%, HitCoverage=13%, E-value=5e-34, Identity=81%"; Hit description =OSJNBa0029H02.26 protein
MVAQLEHQXFRIGRLSVQGLWFFCQXLVEKATSNNTSGSATLNLLQSQAKAMGGDSAVRSLLEKMTEYTSAAYLRMLERWVYE

SEQ ID NO: 131029 - protein, 50 aa, Setaria italica
  misc_feature (26)..(26): Xaa can be any naturally occurring amino acid
  Transcript Sequence Number=SeqID_65055
  Gene Ontology: Mol. function=DNA binding
KLKRTEIMAKTHLQIAKLFAKRLKRXSGKTGGSSSVTAEVDTHTKKGENG

SEQ ID NO: 131030 - protein, 125 aa, Setaria italica
  misc_feature (52)..(52): Xaa can be any naturally occurring amino acid
  misc_feature (78)..(78): Xaa can be any naturally occurring amino acid
  Transcript Sequence Number=SeqID_65056
  Gene Ontology: Mol. function=mismatched DNA binding; Biological process=maintenance of fidelity during DNA-dependent DNA replication
  Homolog annotation: Hit_ID=Q7G278; Match level="QueryCoverage=100%, HitCoverage=17%, E-value=3e-46, Identity=80%"; Hit description=MutS domain V family protein, expressed
DQPVPVDFMIAEETTVLVITGPNTGGKTISLKTVGLASLMAKIDFLIADYSXILYILASEPVKIPWFNAVYADIGDEXQSLTQSLSTFSGHLKQIGAIRAESTSESLVLLDEVGAGTNPLEGAAL

SEQ ID NO: 131031 - protein, 57 aa, Setaria italica
  Transcript Sequence Number=SeqID_65057
  Gene Ontology: Mol. function=mismatched DNA binding; Biological process=mismatch repair
  Homolog annotation: Hit_ID=Q7G278; Match level="QueryCoverage=75%, HitCoverage=6%, E-value=1e-18, Identity=100%"; Hit description=MutS domain V family protein, expressed
ILFAGLYILASEPVKIPWFNAVYADIGDEQSLTQSLSTFSGHLKQIGVCFSITFSNF

SEQ ID NO: 131032 - protein, 67 aa, Setaria italica
  Transcript Sequence Number=SeqID_65058
QDKYDNLLTVWLNQERIDSTKATLRDLRAECEALLAEVSAIGGEFYIPPKLQGKQIEGEETNYLCTV

SEQ ID NO: 131033 - protein, 48 aa, Setaria italica
  misc_feature (6)..(6): Xaa can be any naturally occurring amino acid
  Transcript Sequence Number=SeqID_65059
  Homolog annotation: Hit_ID=B9RR38; Match level="QueryCoverage=83%, HitCoverage=4%, E-value=7e-14, Identity=87%"; Hit description =Phosphoinositide 5-phosphatase, putative
NTGQVXYETMFVWNEFLTRAIRNHLKNTSWTVALVHGFFKQVCSFWDN

SEQ ID NO: 131034 - protein, 60 aa, Setaria italica
  Transcript Sequence Number=SeqID_65060
ERDVGSINRLSFQVNRMAFLQACGVEYAQTKLYKGNIFVKSNVLYKGNIFVKSNVLLAVR

SEQ ID NO: 131035 - protein, 51 aa, Setaria italica
  misc_feature (50)..(50): Xaa can be any naturally occurring amino acid
  Transcript Sequence Number=SeqID_65061
LFFFLLICSLDTGRLFSNKILPSDSAPDISICEPNPCSSMNYGTVPARHXR

SEQ ID NO: 131036 - protein, 58 aa, Setaria italica
  Transcript Sequence Number=SeqID_65062
MGNGNDPFLEANRREAAKQEAAAKRVHPTLHLPAPAQPTTQIAAPAASQPQQSFFHLA

SEQ ID NO: 131037 - protein, 65 aa, Setaria italica
  Transcript Sequence Number=SeqID_65063
  Gene Ontology: Cellular component=mitochondrion
CQPIAALALPYVLCQEALKNVFCAAEACEEFGGTLVTLRMALDDLCGLTGENVGPLPGYIEDAVK

SEQ ID NO: 131038 - protein, 43 aa, Setaria italica
  Transcript Sequence Number=SeqID_65064
DLLAASWNELPVSLVEEAKKAVSKATDDKAGQEKLGMNFQFLL

SEQ ID NO: 131039 - protein, 78 aa, Setaria italica
  Transcript Sequence Number=SeqID_65065
  Gene Ontology: Mol. function=catalytic activity; Biological process =metabolic process
  Homolog annotation: Hit_ID=B6TV22; Match level="QueryCoverage=94%, HitCoverage=31%, E-value=2e-29, Identity=82%"; Hit description =Phosphoglycerate mutase gpmB
  Pfam annotation: Domain name=PGAM; Domain location=1-69; Score=-12.7; E_value=0.036; Accession=PF00300.14; Description=Phosphoglycerate mutase family
KFTKNRLATERPEAYKAFMSHKRNQQIPGGGESLDQLSERCVSCLHNIVEKHKGERVIVVSHGGTIRELYRYASPDEA

SEQ ID NO: 131040 - protein, 60 aa, Setaria italica
  Transcript Sequence Number=SeqID_65066
  Gene Ontology: Cellular component=integral to membrane
LLFLYTTLALRENILRVNGSDIRPCMWILHHYCAMLMALVSLTWEIKGQSQPDCPRKQRG

SEQ ID NO: 131041 - protein, 69 aa, Setaria italica
  Transcript Sequence Number=SeqID_65067
DILNKVMLASFAINAHTTILLLTIQAGGHPLLRQQEVTGVTEASHNRYSTNYARSDIYGAILSILFMAL

SEQ ID NO: 131042 - protein, 75 aa, Setaria italica
  Transcript Sequence Number=SeqID_65068
  Subcellular localization annotation: CTP_CleavageSite=54; ConfidenceScore=5.50e-01
GNKGTLLPASTLFLPPFNSDVPCPSKTLLCDASVTPVTSCCRSRGWPPAWIVSKQMVVWALIAKDASITLFRMSS

SEQ ID NO: 131043 - protein, 117 aa, Setaria italica
  Transcript Sequence Number=SeqID_65069
  Gene Ontology: Mol. function=cycloeucalenol cycloisomerase activity; Cellular component=integral to membrane
  Homolog annotation: Hit_ID=B6TK44; Match level="QueryCoverage=87%, HitCoverage=34%, E-value=4e-50, Identity=96%"; Hit description =Cycloeucalenol cycloisomerase
IIVLLSLVFTFYFLQSHLPQSIRWLFEAAWILALSYFIAYLETLAIANFPYYEFIDRDIMYKVGSLFYAIYFIVSFPMFSRIDEKDEKWNLSRVAVDSLGAAMLVTIILDLWRIFLG

SEQ ID NO: 131044 - protein, 140 aa, Setaria italica
  Transcript Sequence Number=SeqID_65070
  Gene Ontology: Mol. function=protein prenyltransferase activity; Biological process=protein amino acid prenylation
  Homolog annotation: Hit_ID=B6U171; Match level="QueryCoverage=96%, HitCoverage=19%, E-value=3e-53, Identity=75%"; Hit description=Rab geranylgeranyl transferase like protein
  Pfam annotation: Domain name=PPTA; Domain location=43-73; Score=21.7; E_value=0.0031; Accession=PF01239.14; Description=Protein prenyltransferase alpha subunit repeat
  Pfam annotation: Domain name=PPTA; Domain location=88-118; Score =37.0; E_value=7.7e-08; Accession=PF01239.14; Description=Protein prenyltransferase alpha subunit repeat
  Pfam module annotation: Pfam domain module=PPTA::PPTA; Domain location=43-73::88-118
MHGRPRRPAKPEDEKAASAKAAKLRDLQAQVLQNHHSRTYTKEAIGLSFKLLEINPEAYTAWNYRKLAFQHNIKELSDPEAIRSAVDDELRVVEVALRQNPKSYGAWYHRKWLLNQKLAPSGITKDVEITDLLKIKLIKR

SEQ ID NO: 131045 - protein, 87 aa, Setaria italica
  misc_feature (83)..(83): Xaa can be any naturally occurring amino acid
  Transcript Sequence Number=SeqID_65071
  Gene Ontology: Mol. function=protein prenyltransferase activity; Biological process=protein amino acid prenylation
  Homolog annotation: Hit_ID=B6U171; Match level="QueryCoverage=100%, HitCoverage=12%, E-value=2e-32, Identity=76%"; Hit description=Rab geranylgeranyl transferase like protein
QYSVEVSIPSSDGIVSRSGSNYNCPVHFTFTIELISDDAQGIDLFDKPVAWNCSESLESHGNCKAIPFDPLKITSALVEDSNXWHFE

SEQ ID NO: 131046 - protein, 51 aa, Setaria italica
  Transcript Sequence Number=SeqID_65072
NILVYFSLLPSFLDRCLCSLSKSAGRGPGLLEYLVNVFYKHLSGTNTDSQL

SEQ ID NO: 131047 - protein, 68 aa, Setaria italica
  misc_feature (23)..(23): Xaa can be any naturally occurring amino acid
  misc_feature (29)..(29): Xaa can be any naturally occurring amino acid
  Transcript Sequence Number=SeqID_65073
  Gene Ontology: Mol. function=binding
  Homolog annotation: Hit_ID=Q69WR1; Match level="QueryCoverage=97%, HitCoverage=8%, E-value=6e-21, Identity=77%"; Hit description =Putative IDN3 protein isoform A
SWLKIQGLQNLYEYLRDAESQLXACSSYXGKPPVQSAINGGSEVPVAAGAGDTNICGGIIQLYWSFLI

SEQ ID NO: 131048 - protein, 48 aa, Setaria italica
  Transcript Sequence Number=SeqID_65074
NILISWNCGRYPSFFESRLGDGLQMSFIFFETTVSNHKLAANVKSKSN

SEQ ID NO: 131049 - protein, 105 aa, Setaria italica
  Transcript Sequence Number=SeqID_65075
  Gene Ontology: Mol. function=hydrolase activity, acting on carbon -nitrogen (but not peptide) bonds; Cellular component=chloroplast; Biological process=nitrogen compound metabolic process
  Homolog annotation: Hit_ID=Q69NN3; Match level="QueryCoverage=71%, HitCoverage=31%, E-value=2e-35, Identity=92%"; Hit description =Putative Nit protein 2
PGDIRLKESDTFTGGQEPTVVDTDVGRIGIGICHDIRFPELAMLYRSRGAHLICYPSAFNMSTGELLWDLMQKSRFHYLFSFFQPLLFSSALCATMPSEIVNCHC

SEQ ID NO: 131050 - protein, 151 aa, Setaria italica
  Transcript Sequence Number=SeqID_65076
  Gene Ontology: Mol. function=protein binding; Cellular component =vacuole; Biological process=embryonic development ending in birth or egg hatching
  Homolog annotation: Hit_ID=B4F9F2; Match level="QueryCoverage=95%, HitCoverage=23%, E-value=6e-65, Identity=84%"; Hit description =Protein binding protein
  Pfam annotation: Domain name=LRR_1; Domain location=114-134; Score =10.1; E_value=3.6; Accession=PF00560.25; Description=Leucine Rich Repeat
  Pfam annotation: Domain name=LRR_1; Domain location=47-66; Score=4.8; E_value=36; Accession=PF00560.25; Description=Leucine Rich Repeat
  Pfam annotation: Domain name=LRR_1; Domain location=69-89; Score =12.1; E_value=1.5; Accession=PF00560.25; Description=Leucine Rich Repeat
  Pfam annotation: Domain name=LRR_1; Domain location=91-112; Score =16.1; E_value=0.15; Accession=PF00560.25; Description=Leucine Rich Repeat
  Pfam module annotation: Pfam domain module=LRR_1::LRR_1::LRR_1::LRR _1; Domain location=114-134::47-66::69-89::91-112
  Subcellular localization annotation: CTP_CleavageSite=49; ConfidenceScore=5.06e-01
TASERRAADEAANQASSIVHTLNVFSSVAHISGMGLKAVPAIAAFSTLRAVNLSGNLIVQVAPGSLPKGLHSLDLSRNKIATIEGLRELTKLRVLNLSYNRISRIGHGLSGCTAIRELYLAGNKISDVEGLHRLLKLAVLDVGFNRITTAK

SEQ ID NO: 131051 - protein, 109 aa, Setaria italica
  Transcript Sequence Number=SeqID_65077
  Gene Ontology: Mol. function=protein binding; Cellular component =vacuole
  Homolog annotation: Hit_ID=B4F9F2; Match level="QueryCoverage=98%, HitCoverage=17%, E-value=7e-44, Identity=82%"; Hit description =Protein binding protein
  Pfam annotation: Domain name=LRR_1; Domain location=42-61; Score=4.8; E_value=36; Accession=PF00560.25; Description=Leucine Rich Repeat
  Pfam annotation: Domain name=LRR_1; Domain location=64-84; Score =12.1; E_value=1.5; Accession=PF00560.25; Description=Leucine Rich Repeat
  Pfam annotation: Domain name=LRR_1; Domain location=86-107; Score =16.1; E_value=0.15; Accession=PF00560.25; Description=Leucine Rich Repeat
  Pfam module annotation: Pfam domain module=LRR_1::LRR_1::LRR_1; Domain location=42-61::64-84::86-107
  Subcellular localization annotation: CTP_CleavageSite=44; ConfidenceScore=5.24e-01
DAADEAANQASSIVHTLNVFSSVAHISGMGLKAVPAIAAFSTLRAVNLSGNLIVQVAPGSLPKGLHSLDLSRNKIATIEGLRELTKLRVLNLSYNRISRIGHGLSGCTA

SEQ ID NO: 131052 - protein, 77 aa, Setaria italica
  misc_feature (68)..(68): Xaa can be any naturally occurring amino acid
  Transcript Sequence Number=SeqID_65078
  Gene Ontology: Mol. function=protein binding
  Homolog annotation: Hit_ID=Q7XQW8; Match level="QueryCoverage=79%, HitCoverage=10%, E-value=2e-20, Identity=83%"; Hit description =OSJNBa0014K14.7 protein
  Pfam annotation: Domain name=LRR_1; Domain location=22-45; Score=5.6; E_value=26; Accession=PF00560.25; Description=Leucine Rich Repeat
  Pfam annotation: Domain name=LRR_1; Domain location=47-69; Score =13.6; E_value=0.76; Accession=PF00560.25; Description=Leucine Rich Repeat
  Pfam module annotation: Pfam domain module=LRR_1::LRR_1; Domain location=22-45::47-69
SLFFFIWFGFFCLFYFVKVLKKLEKLNMRYCNCITDSDMKYLSDLTNLRELQLSSCKISDFGVSYLRXLHKLAHLNL

SEQ ID NO: 131053 - protein, 83 aa, Setaria italica
  misc_feature (1)..(38): Xaa can be any naturally occurring amino acid
  Transcript Sequence Number=SeqID_65079
XXXXXXXXXXXXXXXXXXXXXXXXXXXXXXXXXXXXXXVMPIYMASPNDILMIPVQHIYMELGVQTLRYTCHSMSTQAALQGW

SEQ ID NO: 131054 - protein, 143 aa, Setaria italica
  misc_feature (9)..(9): Xaa can be any naturally occurring amino acid
  misc_feature (49)..(49): Xaa can be any naturally occurring amino acid
  Transcript Sequence Number=SeqID_65080
  Gene Ontology: Mol. function=flavin-containing monooxygenase activity; Cellular component=intrinsic to endoplasmic reticulum membrane
  Homolog annotation: Hit_ID=B6U2L7; Match level="QueryCoverage=81%, HitCoverage=33%, E-value=1e-40, Identity=68%"; Hit description =Monooxygenase/ oxidoreductase
WLVHKSSIXGVDLSYFYLNRISQLLLHKPGEGFLRYMLATALSPLVSKXYFQMKTHSDNKLQNPDYSFSFAMSSCSIAMLPEGFYDRVDDGSIILKKSKAFNFSNDGIILQDKKESIKSDIVILATGFRGDQKLRDIFTANWC

SEQ ID NO: 131055 - protein, 165 aa, Setaria italica
  misc_feature (95)..(95): Xaa can be any naturally occurring amino acid
  misc_feature (145)..(145): Xaa can be any naturally occurring amino acid
  Transcript Sequence Number=SeqID_65081
  Gene Ontology: Mol. function=protein serine/threonine kinase activity; Cellular component=integral to membrane; Biological process=protein amino acid phosphorylation
  Homolog annotation: Hit_ID=Q6ZAB5; Match level="QueryCoverage=99%, HitCoverage=27%, E-value=2e-49, Identity=44%"; Hit description =Putative receptor-like protein kinase
  Pfam annotation: Domain name=LRR_1; Domain location=115-137; Score =12.0; E_value=1.5; Accession=PF00560.25; Description=Leucine Rich Repeat
  Pfam annotation: Domain name=LRR_1; Domain location=20-42; Score=5.3; E_value=30; Accession=PF00560.25; Description=Leucine Rich Repeat
  Pfam annotation: Domain name=LRR_1; Domain location=43-65; Score =10.4; E_value=3.1; Accession=PF00560.25; Description=Leucine Rich Repeat
  Pfam annotation: Domain name=LRR_1; Domain location=67-89; Score =10.7; E_value=2.7; Accession=PF00560.25; Description=Leucine Rich Repeat
  Pfam annotation: Domain name=LRR_1; Domain location=91-113; Score =6.5; E_value=17; Accession=PF00560.25; Description=Leucine Rich Repeat
  Pfam module annotation: Pfam domain module=LRR_1::LRR_1::LRR_1::LRR _1::LRR_1; Domain location=115-137::20-42::43-65::67-89::91-113
YLFDNRLSGSLPETLSKIKGLRIFDATTNSFTGEITFSFENCKLEIFLLSFNNIKGEIPSWLGSCRSLTQLGLVNNSLSGKIQTSLGLLSNLTHXLLSQNSLSGPIPPEIGNCHLLEWLELDANQLEGTVPKELAHLRKLSKLFXYENRLIGDFPENIWSIPTLE

SEQ ID NO: 131056 - protein, 107 aa, Setaria italica
  misc_feature (69)..(69): Xaa can be any naturally occurring amino acid
  Transcript Sequence Number=SeqID_65082
  Gene Ontology: Mol. function=protein serine/threonine kinase activity; Biological process=protein amino acid phosphorylation
  Homolog annotation: Hit_ID=Q6ZAB5; Match level="QueryCoverage=100%, HitCoverage=10%, E-value=1e-27, Identity=56%"; Hit description =Putative receptor-like protein kinase
  Pfam annotation: Domain name=LRR_1; Domain location=26-48; Score =10.4; E_value=3.1; Accession=PF00560.25; Description=Leucine Rich Repeat
  Pfam annotation: Domain name=LRR_1; Domain location=3-25; Score=5.4; E_value=29; Accession=PF00560.25; Description=Leucine Rich Repeat
  Pfam annotation: Domain name=LRR_1; Domain location=50-71; Score =11.8; E_value=1.7; Accession=PF00560.25; Description=Leucine Rich Repeat
  Pfam annotation: Domain name=LRR_1; Domain location=74-96; Score =17.4; E_value=0.06; Accession=PF00560.25; Description=Leucine Rich Repeat
  Pfam module annotation: Pfam domain module=LRR_1::LRR_1::LRR_1::LRR _1; Domain location=26-48::3-25::50-71::74-96
IEDLRIFDATTNSFTGEITFSFENCKLEIFLLSFNNIKGEIPSWLGSCRSLTQLGLVNNSLSGKIQNFXGLLSNLTHLLLSQNSLSGPIPPEIGNCHLLEWLELDAN

SEQ ID NO: 131057 - protein, 59 aa, Setaria italica
  Transcript Sequence Number=SeqID_65083
GSQGEHSLPESYPICSDHEECIARPERIKIQKGFVAKESVKGHMASSISSLGNLSVQKD

SEQ ID NO: 131058 - protein, 64 aa, Setaria italica
  Transcript Sequence Number=SeqID_65084
  Gene Ontology: Mol. function=oxidoreductase activity
  Homolog annotation: Hit_ID=B6ST02; Match level="QueryCoverage=81%, HitCoverage=15%, E-value=4e-23, Identity=96%"; Hit description =Oxidoreductase, 2OG-Fe oxygenase family protein
CHNCPFFSLSTGHIEPIPLVLQAVIDHLVLWRLIPESRKPNSVIINFFDEDEHSQPYFKPPHLD

SEQ ID NO: 131059 - protein, 68 aa, Setaria italica
  Transcript Sequence Number=SeqID_65085
  Gene Ontology: Mol. function=oxidoreductase activity
  Homolog annotation: Hit_ID=B6ST02; Match level="QueryCoverage=92%, HitCoverage=18%, E-value=2e-21, Identity=80%"; Hit description =Oxidoreductase, 2OG-Fe oxygenase family protein
LLTNKDKNTKETKREIIQLGVPLFQPTTEEANCHIEPIPLVLQAVIDHLVLWRLIPESRKPTVSSYNF

SEQ ID NO: 131060 - protein, 71 aa, Setaria italica
  Transcript Sequence Number=SeqID_65086
  Gene Ontology: Mol. function=DNA-directed RNA polymerase activity; Cellular component=nucleus
  Homolog annotation: Hit_ID=Q7X881; Match level="QueryCoverage=88%, HitCoverage=4%, E-value=3e-18, Identity=76%"; Hit description=DNA -directed RNA polymerase
MFLLSTSAMLPKVIVKGIPTVERVVIDERKKEGKLEKYNLLVEGTNLLAVMGTPGVDARNTKSNHIMEMNE

SEQ ID NO: 131061 - protein, 46 aa, Setaria italica
  Transcript Sequence Number=SeqID_65087
RFCDGKSRNLILHFCSLGWILTIGQYFHGKFLRPQVIRSVNVGNAA

SEQ ID NO: 131062 - protein, 61 aa, Setaria italica
  Transcript Sequence Number=SeqID_65088
ACCFGGCARVQCTRRHIQSRMRERLEALTEVIHDARLRGNDDKRKSQGILHCIAFLSCCCC

SEQ ID NO: 131063 - protein, 52 aa, Setaria italica
  Transcript Sequence Number=SeqID_65089
HIINSIVYAAGMCYSVSNPRVQALLKDQSTLIMFLYIIIYSFTYGSLVLVPF

SEQ ID NO: 131064 - protein, 73 aa, Setaria italica
  Transcript Sequence Number=SeqID_65090
  Gene Ontology: Mol. function=nucleotide binding
  Homolog annotation: Hit_ID=B6SXX1; Match level="QueryCoverage=98%, HitCoverage=13%, E-value=2e-29, Identity=81%"; Hit description=Auxin- independent growth promoter
PKGLYPLFLNRGNMSWDAFSSKVHMVQKGFMGEPKELRPGRGEFHENPSTCICERTDGKVKPRNDQVLDSSSD

SEQ ID NO: 131065 - protein, 41 aa, Setaria italica
  Transcript Sequence Number=SeqID_65091
MVLSVNVSVRKPLKPAPGKPEDIAPDHKVTPKTLETSLSVK

SEQ ID NO: 131066 - protein, 44 aa, Setaria italica
  Transcript Sequence Number=SeqID_65092
VREEYEKMIETIAEWETEKKVKARRQKDQKEVFLLIYSLKNTAL

SEQ ID NO: 131067 - protein, 107 aa, Setaria italica
  misc_feature (41)..(41): Xaa can be any naturally occurring amino acid
  misc_feature (48)..(48): Xaa can be any naturally occurring amino acid
  Transcript Sequence Number=SeqID_65093
PNVPSEGAVVGPAHSQLTEFSKAGKLGDSINDRAHRRGDSXRNSHHGXSKDRLANKLASHGRGESSTADSLPVADQVKLAYHQVRSQVAAVKHSQLVGHCLVNCLFP

SEQ ID NO: 131068 - protein, 61 aa, Setaria italica
  Transcript Sequence Number=SeqID_65094
QPVIKKNTALIEKIESLNNKARNVDARNVPEPASSKEFKKQQKALIFHLLLSLLELALLTG

SEQ ID NO: 131069 - protein, 70 aa, Setaria italica
  Transcript Sequence Number=SeqID_65095
RGESSTADSLPVADLRNNIQHGQPAESASQLQPVILPDDMPASLDYESQRDKNRKEVRTRQRKRKKTKKK

SEQ ID NO: 131070 - protein, 149 aa, Setaria italica
  misc_feature (4)..(4): Xaa can be any naturally occurring amino acid
  misc_feature (7)..(7): Xaa can be any naturally occurring amino acid
  misc_feature (10)..(10): Xaa can be any naturally occurring amino acid
  misc_feature (13)..(13): Xaa can be any naturally occurring amino acid
  misc_feature (20)..(20): Xaa can be any naturally occurring amino acid
  misc_feature (47)..(47): Xaa can be any naturally occurring amino acid
  misc_feature (64)..(64): Xaa can be any naturally occurring amino acid
  misc_feature (80)..(80): Xaa can be any naturally occurring amino acid
  Transcript Sequence Number=SeqID_65096
LGYXKRXCVXREXNLARSQXVSISTGEIARKMLRFPVDTATAVAPHXDPPAQNKKGARHFENKXKKVDDAPVTSKHPPTXFNEQNTMKVPSEPKTHTGGVIISSSIVPTEGTIVTVGSITVGGISLASLKSSNSLFKYLVIWLLTLINY

SEQ ID NO: 131071 - protein, 31 aa, Setaria italica
  Transcript Sequence Number=SeqID_65097
YYCGCLDRYELSGPLKLFTSTLAHRCHHSFL

SEQ ID NO: 131072 - protein, 88 aa, Setaria italica
  misc_feature (72)..(72): Xaa can be any naturally occurring amino acid
  Transcript Sequence Number=SeqID_65098
  Gene Ontology: Mol. function=nutrient reservoir activity; Cellular component=extracellular region
  Homolog annotation: Hit_ID=B4FUT3; Match level="QueryCoverage=88%, HitCoverage=32%, E-value=1e-24, Identity=76%"; Hit description =Germin-like protein subfamily 1 member 17
KRLYCCFVVFPKVVLYSYFPSIVTLDHEKPAAALSSLSSQNPGVITIASAVFGSKPPISDDVLAKAFQVGEXKLIDWLQNQFWENNNY

SEQ ID NO: 131073 - protein, 58 aa, Setaria italica
  Transcript Sequence Number=SeqID_65099
HVLDMVSKLCSLTIQTSRCHRLVDLHMDLMLVHYCPNQLYAATRSDNPSPHQLHIHLY

SEQ ID NO: 131074 - protein, 32 aa, Setaria italica
  Transcript Sequence Number=SeqID_65100
RRFRQGAHTEYIISYDYDDLHPGSTSYVGKLR

SEQ ID NO: 131075 - protein, 62 aa, Setaria italica
  Transcript Sequence Number=SeqID_65101
CLPNQKQAIDWPPFTNYTFPLLKCCSYIITLTVTKQKSPFSSFRFLLVEGHYALYLTGEDSI

SEQ ID NO: 131076 - protein, 55 aa, Setaria italica
  Transcript Sequence Number=SeqID_65102
  Homolog annotation: Hit_ID=B4FA49; Match level="QueryCoverage=80%, HitCoverage=7%, E-value=3e-10, Identity=72%"; Hit description =Carbohydrate transporter/ sugar porter/ transporter
MGAGLQDLFIPWVLSICFRPSIRITLPISSLFPFLYFMIRDLNVAKRTEDIGFYA

SEQ ID NO: 131077 - protein, 68 aa, Setaria italica
  misc_feature (56)..(56): Xaa can be any naturally occurring amino acid
  Transcript Sequence Number=SeqID_65103
  Gene Ontology: Mol. function=transporter activity; Cellular component= integral to membrane; Biological process=response to antibiotic
  Homolog annotation: Hit_ID=B4FA49; Match level="QueryCoverage=54%, HitCoverage=7%, E-value=7e-12, Identity=97%"; Hit description =Carbohydrate transporter/ sugar porter/ transporter
MSLLQQFFATVSLTHCRNFTKISCCEAAALPISSLFPFLYFMIRDLNVAKRTEDIXGFYAGFVGAFIL

SEQ ID NO: 131078 - protein, 57 aa, Setaria italica
  Transcript Sequence Number=SeqID_65104
MQIYHNKLNNKALAAILDNCPHLESLDLQWRFNIFVDGAMRAKYAGIKRWCSLILTR

SEQ ID NO: 131079 - protein, 83 aa, Setaria italica
  misc_feature (2)..(2): Xaa can be any naturally occurring amino acid
  Transcript Sequence Number=SeqID_65105
  Homolog annotation: Hit_ID=B6TSE1; Match level="QueryCoverage=87%, HitCoverage=18%, E-value=3e-32, Identity=93%"; Hit description=PRP38 pre-mRNA processing factor 38 domain containing B
TXIKDDEEFSPGSNGKMTTMGVYVRDLLLGQYYFDSLLPRVPLPILRQVTSHLEKLKLPTKQSGMTGDSNRHESQFCMFELIR

SEQ ID NO: 131080 - protein, 54 aa, Setaria italica
  Transcript Sequence Number=SeqID_65106
YHLEVGPEICILVGLGPTILGSDQHTPCNPRNVHLNKKKLDQFQHQNKLHQFQS

SEQ ID NO: 131081 - protein, 52 aa, Setaria italica
  Transcript Sequence Number=SeqID_65107
IIRSLLISQDVLLVLGRNRLPELVIIPGRFYYQFGKPIPTKDKQDSLLISQD

SEQ ID NO: 131082 - protein, 63 aa, Setaria italica
  Transcript Sequence Number=SeqID_65108
VQFYYKSTTITVAILATDSFVRTNQKYLELNLRTNQRLDFTTGQKKLSRNCVHFVVELYSAHA

SEQ ID NO: 131083 - protein, 61 aa, Setaria italica
  Transcript Sequence Number=SeqID_65109
PQISATFLSIHITKNSQFICSIFKRCCVTGCILLFQPEPSGSFCLIVIEFWHYEVSLHSRS

SEQ ID NO: 131084 - protein, 55 aa, Setaria italica
  Transcript Sequence Number=SeqID_65110
  Gene Ontology: Mol. function=protein serine/threonine kinase activity; Biological process=protein amino acid phosphorylation
  Homolog annotation: Hit_ID=B6TP94; Match level="QueryCoverage=83%, HitCoverage=8%, E-value=1e-18, Identity=93%"; Hit description =Serine/threonine-protein kinase RIO1
IHPYLCYPCFRVRAADIRCPKPLLLRLHVLVMEFIGKGGWAAPRLKDAALSDDKL

SEQ ID NO: 131085 - protein, 52 aa, Setaria italica
  Transcript Sequence Number=SeqID_65111
KRGVPVMPVIDLFNFVVDQTLLMKMLMLTWRRYLACLSTRHYLSILHCYHYL

SEQ ID NO: 131086 - protein, 47 aa, Setaria italica
  Transcript Sequence Number=SeqID_65112
LGPEERKAARKANKKKVKEEKREARKTKKPKAEKKKRKKMAKAKCKR

SEQ ID NO: 131087 - protein, 88 aa, Setaria italica
  Transcript Sequence Number=SeqID_65113
  Gene Ontology: Mol. function=protein serine/threonine kinase activity; Biological process=protein amino acid phosphorylation
  Homolog annotation: Hit_ID=B6TP94; Match level="QueryCoverage=84%, HitCoverage=13%, E-value=7e-34, Identity=90%"; Hit description =Serine/threonine-protein kinase RIO1
  Pfam annotation: Domain name=RIO1; Domain location=1-88; Score=-13.1; E_value=8.5e-07; Accession=PF01163.14; Description=RIO1 family
RNESKNEDKTRIIRCPKPLLLRLHVLVMEFIGKGGWAAPRLKDAALSDDKLRESYFEIITIMRTLYQKCKLVHGDLIEYNVLYFVGPT

SEQ ID NO: 131088 - protein, 48 aa, Setaria italica
  Transcript Sequence Number=SeqID_65114
LGNPKERKAARKANKKKVKEEKREARKTKKPKAEKKKRKKMAKAKCKR

SEQ ID NO: 131089 - protein, 64 aa, Setaria italica
  Transcript Sequence Number=SeqID_65115
NNLLEHIGLDPCKSNNTVSSHAYFFRKKKEACKYLNNKEHNYIISISAESFNKYPKLEQITIEI

SEQ ID NO: 131090 - protein, 90 aa, Setaria italica
  Transcript Sequence Number=SeqID_65116
  Gene Ontology: Mol. function=DNA binding; Cellular component=nucleus; Biological process=regulation of transcription
  Homolog annotation: Hit_ID=Q6H7S0; Match level="QueryCoverage=50%, HitCoverage=15%, E-value=6e-19, Identity=93%"; Hit description =Putative P-type R2R3 Myb protein
NSLSVSWDHRRRSVLLPTGKHGCDRWFSLVLHDLSSHLTACVCAHAGLNRCGKSCRLRWTNYLRPDIKRGPFSPEEQKSIVQLHAIVGNK

SEQ ID NO: 131091 - protein, 49 aa, Setaria italica
  misc_feature (9)..(9): Xaa can be any naturally occurring amino acid
  Transcript Sequence Number=SeqID_65117
AAAAAAVTXKTRVHPASAALSEHQIVVRNTKFTQSNDKMQQVTPDEELK

SEQ ID NO: 131092 - protein, 59 aa, Setaria italica
  misc_feature (54)..(54): Xaa can be any naturally occurring amino acid
  Transcript Sequence Number=SeqID_65118
  Gene Ontology: Mol. function=oxidoreductase activity; Biological process=metabolic process
  Homolog annotation: Hit_ID=B6TQ98; Match level="QueryCoverage=100%, HitCoverage=47%, E-value=2e-16, Identity=76%"; Hit description =Peroxisomal multifunctional enzyme type 2
KLSVDKEIFVGDLKKGEVTKGLYQGKPDATISFSDNDFLVIASGKTNPQICVLXGGAIK

SEQ ID NO: 131093 - protein, 40 aa, Setaria italica
  Transcript Sequence Number=SeqID_65119
  Homolog annotation: Hit_ID=B6T9C1; Match level="QueryCoverage=90%, HitCoverage=18%, E-value=9e-10, Identity=83%"; Hit description =Pterin-4-alpha-carbinolamine dehydratase
KIDVWTHSVRGLTDNDFILAAKINHLNLEGILSKRANVQK

SEQ ID NO: 131094 - protein, 99 aa, Setaria italica
  Transcript Sequence Number=SeqID_65120
WSSLLLVGVVTITFFSKVKGLLFVISISSRWNLLTYKLEKVVSAMSRLDYEKAMYLLRSSDHDLYEIHSLVYQASQELEATLVCFKDPPFPWVSVSMSG

SEQ ID NO: 131095 - protein, 122 aa, Setaria italica
  misc_feature (71)..(71): Xaa can be any naturally occurring amino acid
  misc_feature (115)..(115): Xaa can be any naturally occurring amino acid
  Transcript Sequence Number=SeqID_65121
  Gene Ontology: Mol. function=metal ion binding
  Homolog annotation: Hit_ID=B9SCL9; Match level="QueryCoverage=90%, HitCoverage=10%, E-value=8e-29, Identity=52%"; Hit description =Protein binding protein, putative
  Pfam annotation: Domain name=PHD; Domain location=60-119; Score=5.5; E_value=0.0066; Accession=PF00628.21; Description=PHD-finger
CKGNFGCLSDYCENRQQRESCLAYNNNAIAAGRIEGADPLAEIFTRSIRVATSLATGFGGCALCKLHDFSXKKKFSTRTVLLCDQCGREYHVGCLKEHNMADLTALPEGAWYCSXDCVSILI

SEQ ID NO: 131096 - protein, 154 aa, Setaria italica
  misc_feature (37)..(37): Xaa can be any naturally occurring amino acid
  misc_feature (66)..(66): Xaa can be any naturally occurring amino acid
  Transcript Sequence Number=SeqID_65122
  Gene Ontology: Mol. function=metal ion binding
  Homolog annotation: Hit_ID=Q5VMF2; Match level="QueryCoverage=98%, HitCoverage=15%, E-value=1e-39, Identity=50%"; Hit description=PHD zinc finger protein-like
MADLTALPEGAWYCSTDCVRINQKLQDLLNRGGEPVXTMDLDVIKKKREEKGLDEDADLDVRWRVXLKDKSSEDSKLVLSKAVAIFHETFDPIIQIATGRDLIPAMVYGRSARDQDYTGMYCAVLTVRNTVVSAGLFRIMGSEIAELVLFGSSY

SEQ ID NO: 131097 - protein, 64 aa, Setaria italica
  Transcript Sequence Number=SeqID_65123
  Subcellular localization annotation: CTP_CleavageSite=28; ConfidenceScore=5.36e-01
AASTTSSSTAPSRDVPCSSPPRRYSICKAALQAPRIMSLNNNPYFSGPYQNIMLVASRNITWLI

SEQ ID NO: 131098 - protein, 56 aa, Setaria italica
  Transcript Sequence Number=SeqID_65124
LVSLCSLICMNLIELILFGYYTSQDPYYLDIVELEAHTYTLNLHCCSALFMFFSSI

SEQ ID NO: 131099 - protein, 34 aa, Setaria italica
  Transcript Sequence Number=SeqID_65125
VLSLCSICFFGSSPLYTTPNAMLLICIILLLVEN

SEQ ID NO: 131100 - protein, 57 aa, Setaria italica
  misc_feature (21)..(21): Xaa can be any naturally occurring amino acid
  Transcript Sequence Number=SeqID_65126
FSRYLTQVAEHHSLVSAFLLXGFHIHLLKPLLLQIEPPPGFWKMQLMLLTSLFFLIF

SEQ ID NO: 131101 - protein, 76 aa, Setaria italica
  Transcript Sequence Number=SeqID_65127
  Gene Ontology: Mol. function=transferase activity, transferring glycosyl groups; Cellular component=integral to membrane; Biological process=cell wall organization and biogenesis
  Homolog annotation: Hit_ID=B9SY23; Match level="QueryCoverage=50%, HitCoverage=8%, E-value=3e-15, Identity=97%"; Hit description =Transferase, transferring glycosyl groups, putative
AVNADECLMTRMQEISLDYHFTVEQEVGSSTYAFFGFNGKLHRVPLFLCFLLRGTFSVFPFLVHMILHGPSTFSFS

SEQ ID NO: 131102 - protein, 65 aa, Setaria italica
  Transcript Sequence Number=SeqID_65128
  Gene Ontology: Cellular component=membrane
YCLPCEIINQLVISDFVYICISTPFSVAGGLFIIAGLYLVTWARYNEAQRVLTASYLRPLLVEDP

SEQ ID NO: 131103 - protein, 50 aa, Setaria italica
  Transcript Sequence Number=SeqID_65129
TELGNAEGPAYVQDMISFSILQVFLRMELNSNALNGNNMLLKAWYLEEDD

SEQ ID NO: 131104 - protein, 110 aa, Setaria italica
  Transcript Sequence Number=SeqID_65130
NEEEVQSVHDRLSYPPRCRFVVIDESEEEHIKQQDKLIPGERLCPEGLTKTQRRRFNACVTRSITRSGASSNQTNANSVQKTIERYRAYTKDNVSSKTVQQDIEQVKADA

SEQ ID NO: 131105 - protein, 74 aa, Setaria italica
  Transcript Sequence Number=SeqID_65131
YLIARISRPCSLLLLRGQSSPWKTITRSRNERTTNGRGDGAVHRIAWHGSPPKQGCGSQVSVAMRKQPMQACRE

SEQ ID NO: 131106 - protein, 70 aa, Setaria italica
  misc_feature (21)..(21): Xaa can be any naturally occurring amino acid
  Transcript Sequence Number=SeqID_65132
  Gene Ontology: Mol. function=sequence-specific DNA binding; Cellular component=nucleus; Biological process=regulation of transcription, DNA-dependent
  Homolog annotation: Hit_ID=Q9XJ60; Match level="QueryCoverage=92%, HitCoverage=28%, E-value=5e-11, Identity=52%"; Hit description=MADS -box transcription factor 50
ELTLRKNNEDLREKCKNQPPXPTPPARAVITVEDDHPEQNDDAMDVETELYIGLPGMDHRRNKAAAVRSA

SEQ ID NO: 131107 - protein, 75 aa, Setaria italica
  Transcript Sequence Number=SeqID_65133
  Gene Ontology: Mol. function=sequence-specific DNA binding; Cellular component=nucleus; Biological process=regulation of transcription, DNA-dependent
ETNKRKQNKKEFNVEKVDKEIQPPLQPTPPARAVITVEDDHPEQNDDAMDVETELYIGLPGMDHRRNKAAAVRSA

SEQ ID NO: 131108 - protein, 77 aa, Setaria italica
  Transcript Sequence Number=SeqID_65134
  Gene Ontology: Mol. function=sequence-specific DNA binding; Cellular component=nucleus; Biological process=regulation of transcription, DNA-dependent
  Homolog annotation: Hit_ID=Q9XJ60; Match level="QueryCoverage=75%, HitCoverage=23%, E-value=2e-11, Identity=63%"; Hit description=MADS -box transcription factor 50
ASGRKTQLLEEQVNKLKEKELTLRKNNEDLREKCKNQPPLQPTPPARAVITVEDDHPEQNERRHGTWKNGRLVTIRN

SEQ ID NO: 131109 - protein, 106 aa, Setaria italica
  Transcript Sequence Number=SeqID_65135
  Gene Ontology: Mol. function=DNA photolyase activity; Cellular component=nucleus; Biological process=DNA repair
  Homolog annotation: Hit_ID=Q70YK6; Match level="QueryCoverage=100%, HitCoverage=22%, E-value=4e-40, Identity=59%"; Hit description =Cryptochrome 2
KNELSALGISVQSFNGDLLYEPWEVYDENGQAFTTFNMYWEKCMNLPLDISQPLAPVRLVPVPENTLQEFVSYGLLEYSKHGMKVGGTTTSLLSPYLHFGELSVRK

SEQ ID NO: 131110 - protein, 69 aa, Setaria italica
  Transcript Sequence Number=SeqID_65136
  Gene Ontology: Mol. function=DNA photolyase activity; Cellular component=nucleus; Biological process=DNA repair
  Homolog annotation: Hit_ID=A9Q6J0; Match level="QueryCoverage=89%, HitCoverage=9%, E-value=2e-28, Identity=95%"; Hit description =Cryptochrome 2
NRIRVIVSSFAVKFLQIPWIWGMKYFWDVLLDADLESDILGWQYISGSLPDGHELSRLDNPEKSIYTED

SEQ ID NO: 131111 - protein, 109 aa, Setaria italica
  Transcript Sequence Number=SeqID_65137
  Homolog annotation: Hit_ID=A9Q6J0; Match level="QueryCoverage=93%, HitCoverage=17%, E-value=2e-25, Identity=60%"; Hit description =Cryptochrome 2
ELHMARECLDDAISTMWQLDTAAKLAELDGEVVEDNMNNIRSFDIPKVVLKKDYLQALLATTRWHPLIDGRRKVQPMEVTNASNMEDTGSTAKSQVSRKRSSDYLSKKQ

SEQ ID NO: 131112 - protein, 62 aa, Setaria italica
  Transcript Sequence Number=SeqID_65138
  Gene Ontology: Mol. function=transcription regulator activity; Cellular component=nucleus; Biological process=regulation of transcription
  Homolog annotation: Hit_ID=B9R996; Match level="QueryCoverage=100%, HitCoverage=15%, E-value=2e-11, Identity=56%"; Hit description =Activating signal cointegrator, putative
TYAGLSDVGLPLSEAEAAAEAYAKRLVDYDRNAAARTKVYDDQSDYFEMEGNSWLSSKVKYI

SEQ ID NO: 131113 - protein, 53 aa, Setaria italica
  Transcript Sequence Number=SeqID_65139
RKFLRRSNNKLKLLGQLDELVSSHQLWCRKFQSDQLWFSCLVLELPVKTNVLC

SEQ ID NO: 131114 - protein, 41 aa, Setaria italica
  Transcript Sequence Number=SeqID_65140
  Gene Ontology: Mol. function=small conjugating protein ligase activity; Cellular component=mitochondrion; Biological process =ubiquitin-dependent protein catabolic process
  Homolog annotation: Hit_ID=Q337R4; Match level="QueryCoverage=100%, HitCoverage=22%, E-value=1e-16, Identity=97%"; Hit description =Ubiquitin carrier protein
TESIYQGGVWKVRVELPDAYPYKSPSIGFINKIYHPNVDEM

SEQ ID NO: 131115 - protein, 67 aa, Setaria italica
  Transcript Sequence Number=SeqID_65141
QGQTRQCSLQKLQLTKLETKTTGCHVNKCTLYVILCCFFSQPVEFAVALTLSRLSRKGFVSGNKLWL

SEQ ID NO: 131116 - protein, 49 aa, Setaria italica
  Transcript Sequence Number=SeqID_65142
  Gene Ontology: Mol. function=small conjugating protein ligase activity; Biological process=ubiquitin-dependent protein catabolic process
  Homolog annotation: Hit_ID=Q337R4; Match level="QueryCoverage=83%, HitCoverage=22%, E-value=1e-15, Identity=100%"; Hit description =Ubiquitin carrier protein
VNVFEVFLPQLLLYPNPSDPLNGEAAALMMRDRPAYEQKVKGNVIQQNP

SEQ ID NO: 131117 - protein, 68 aa, Setaria italica
  Transcript Sequence Number=SeqID_65143
  Gene Ontology: Mol. function=nucleic acid binding; Cellular component= ribonucleoprotein complex
  Homolog annotation: Hit_ID=B9SAT1; Match level="QueryCoverage=60%, HitCoverage=16%, E-value=4e-13, Identity=82%"; Hit description=Small nuclear ribonucleoprotein U1a,U2b, putative
  Pfam annotation: Domain name=RRM_1; Domain location=1-64; Score=10.2; E_value=0.022; Accession=PF00076.14; Description=RNA recognition motif. (a.k.a. RRM, RBD, o
NLNEKIKLEELKKSLNAVFSQFGKILDVLAFKTLKHKGQAWVVFEDVASATEAIKRMLFGTIISGIMT

SEQ ID NO: 131118 - protein, 60 aa, Setaria italica
  Transcript Sequence Number=SeqID_65144
  Gene Ontology: Mol. function=DNA binding
MEFPTKSDAEKERRRTYEAKRRKLRASMPDSRVVRGQEADYNASEDVENDDDSYVNEAFL

SEQ ID NO: 131119 - protein, 115 aa, Setaria italica
  Transcript Sequence Number=SeqID_65145
  Homolog annotation: Hit_ID=Q5JK20; Match level="QueryCoverage=100%, HitCoverage=13%, E-value=8e-34, Identity=65%"; Hit description=Auxin response factor 4
  Subcellular localization annotation: CTP_CleavageSite=64; ConfidenceScore=5.29e-01
RNNMNESTDSDATVQKPMMWSPSPNGKTHTSFQQRPSMDNWMPLGRRETDFKDNRSAFKDARTSSQSFGDTQGFFMQTFDDNQHRLSFNNQFQDQGSAHRFADPYFFMPQQPSLT

SEQ ID NO: 131120 - protein, 97 aa, Setaria italica
  Transcript Sequence Number=SeqID_65146
  Homolog annotation: Hit_ID=Q5JK20; Match level="QueryCoverage=93%, HitCoverage=11%, E-value=4e-26, Identity=63%"; Hit description=Auxin response factor 4
  Subcellular localization annotation: CTP_CleavageSite=89; ConfidenceScore=5.30e-01
FNNQFQDQGSAHRFADPYFFMPQQPSLTVESSTRTQTANNELRFWSDQNTVYGNTTDQQGFRYGQNPSNWLNQPFPLVEQPRVVRPHASVAAFSCLL

SEQ ID NO: 131121 - protein, 87 aa, Setaria italica
  Transcript Sequence Number=SeqID_65147
  Homolog annotation: Hit_ID=Q5JK20; Match level="QueryCoverage=37%, HitCoverage=4%, E-value=3e-10, Identity=93%"; Hit description=Auxin response factor 4
  Subcellular localization annotation: CTP_CleavageSite=46; ConfidenceScore=5.12e-01
PRLLLPAGTHRAGTFSSYNRFPCFRWTWFPLFLALILCCLGSFQVEASMNQVAGNQMRLYDLPSKLLCRVLNVELKVPPLPAVRPPP

SEQ ID NO: 131122 - protein, 84 aa, Setaria italica
  Transcript Sequence Number=SeqID_65148
INIYIQKGERGKSAIKITIRTSALQLSAKSKPRRSKLTGLHFPTKPRRMGWDGMGCNRQAKDLRCYLAGTRHNASSFFYCLFVS

SEQ ID NO: 131123 - protein, 131 aa, Setaria italica
  misc_feature (9)..(9): Xaa can be any naturally occurring amino acid
  misc_feature (11)..(11): Xaa can be any naturally occurring amino acid
  Transcript Sequence Number=SeqID_65149
  Gene Ontology: Mol. function=protein dimerization activity; Cellular component=nucleus; Biological process=regulation of transcription, DNA-dependent
  Homolog annotation: Hit_ID=Q5JK20; Match level="QueryCoverage=87%, HitCoverage=14%, E-value=2e-49, Identity=82%"; Hit description=Auxin response factor 4
  Pfam annotation: Domain name=Auxin_resp; Domain location=48-121; Score=146.2; E_value=1e-40; Accession=PF06507.5; Description=Auxin response factor
AGDAFISPXRXENGELRVGVRRAMRQLSNIPSSVISSQSMHLGVLATAWHAINTKSMFTVYYKPRTSPSEFIIPYDQYMESLKNNYSIGMRFRMRFEGEEAPEQRFTGTIVGCENLVPYLLVLVFLSLVVL

SEQ ID NO: 131124 - protein, 55 aa, Setaria italica
  misc_feature (8)..(8): Xaa can be any naturally occurring amino acid
  Transcript Sequence Number=SeqID_65150
  Gene Ontology: Mol. function=protein dimerization activity; Cellular component=nucleus; Biological process=regulation of transcription, DNA-dependent
  Homolog annotation: Hit_ID=Q5JK20; Match level="QueryCoverage=76%, HitCoverage=5%, E-value=3e-14, Identity=90%"; Hit description=Auxin response factor 4
DMMLVGDXPWEEFCSIVRKIYIYTKEEVQKMNSKSSAPRKEEPPAAGEVCAATNE

SEQ ID NO: 131125 - protein, 72 aa, Setaria italica
  Transcript Sequence Number=SeqID_65151
  Homolog annotation: Hit_ID=Q5JK20; Match level="QueryCoverage=69%, HitCoverage=6%, E-value=2e-14, Identity=82%"; Hit description=Auxin response factor 4
PVQTECLPEGSVSTAGTSTENEKSIQQATQSSKDIQSKSQGASTRSCTKVPLFYLFMDITCLYLCYPVCANE

SEQ ID NO: 131126 - protein, 54 aa, Setaria italica
  Transcript Sequence Number=SeqID_65152
LTQCIILLSREFCSIVRKIYIYTKEEVQKMNSKSSAPRKEEPPAAGEVCAATNE

SEQ ID NO: 131127 - protein, 82 aa, Setaria italica
  Transcript Sequence Number=SeqID_65153
IIYIQKGERGKSAIKITIRTSALQLSAKSKPRRSKLTGLHFPTKPRRMGWDGMGCNRQAKRFEVLLGWDPAQCKFLFMHRQL

SEQ ID NO: 131128 - protein, 67 aa, Setaria italica
  Transcript Sequence Number=SeqID_65154
  Gene Ontology: Mol. function=protein dimerization activity; Cellular component=nucleus; Biological process=regulation of transcription, DNA-dependent
  Homolog annotation: Hit_ID=Q5JK20; Match level="QueryCoverage=82%, HitCoverage=6%, E-value=1e-23, Identity=94%"; Hit description=Auxin response factor 4
NKNWQIVYTDNEGDMMLVGDDPWEEFCSIVRKIYIYTKEEVQKMNSKSSAPRKEEPPAAGEVCAATT

SEQ ID NO: 131129 - protein, 40 aa, Setaria italica
  misc_feature (21)..(21): Xaa can be any naturally occurring amino acid
  Transcript Sequence Number=SeqID_65155
LRKIYIYTKEEVQKMNSKSSXPPRKEEPPAAGEVCAATNE

SEQ ID NO: 131130 - protein, 53 aa, Setaria italica
  misc_feature (3)..(3): Xaa can be any naturally occurring amino acid
  misc_feature (6)..(6): Xaa can be any naturally occurring amino acid
  misc_feature (9)..(9): Xaa can be any naturally occurring amino acid
  misc_feature (13)..(13): Xaa can be any naturally occurring amino acid
  misc_feature (17)..(17): Xaa can be any naturally occurring amino acid
  Transcript Sequence Number=SeqID_65156
FFXFFXFFXFFFXFFFXFFFLTFSYYNTFSEKIRHTYTSVCHLSHATELAYRD

SEQ ID NO: 131131 - protein, 56 aa, Setaria italica
  Transcript Sequence Number=SeqID_65157
YIQREDQTYIYQCLSFISRYRASLQGLKAANSWLIQRYCYCLLLLDWVDKYLHPKG

SEQ ID NO: 131132 - protein, 41 aa, Setaria italica
  Transcript Sequence Number=SeqID_65158
FASLTLLDVNIYLPSPVVASSSSTFVLTSYSRLFNPCKLAL

SEQ ID NO: 131133 - protein, 103 aa, Setaria italica
  misc_feature (63)..(63): Xaa can be any naturally occurring amino acid
  Transcript Sequence Number=SeqID_65159
  Homolog annotation: Hit_ID=C4P7S5; Match level="QueryCoverage=92%, HitCoverage=14%, E-value=2e-21, Identity=62%"; Hit description=CBL -interacting protein kinase 17
  Pfam annotation: Domain name=NAF; Domain location=1-38; Score=-1.1; E_ value=0.0073; Accession=PF03822.6; Description=NAF domain
KCKDASERKIRFASNHSPAYLFEKIGSIVRKMGFQVHKSNGKVSDLLMCLWTSGSMCSESARXESYYHVLQLKVIQDCKGSANSRGKESLLISAEVFILHNRF

SEQ ID NO: 131134 - protein, 33 aa, Setaria italica
  Transcript Sequence Number=SeqID_65160
WLFFQKDGLLHTTCGSPNYIAPEVRPKHYLFRV

SEQ ID NO: 131135 - protein, 110 aa, Setaria italica
  Transcript Sequence Number=SeqID_65161
CRTDAIRNSMKLSFHPYKERPKRTPYAIQASFFLCVLLLDSEVGSNLDLQLGLDVHGSSPPPCLFSSASQSSPWLLIIKRIYRNELTLPLARIVISKCVMSSSSPICLGL

SEQ ID NO: 131136 - protein, 102 aa, Setaria italica
  misc_feature (89)..(89): Xaa can be any naturally occurring amino acid
  Transcript Sequence Number=SeqID_65162
  Gene Ontology: Mol. function=binding
  Homolog annotation: Hit_ID=Q9ZW93; Match level="QueryCoverage=78%, HitCoverage=3%, E-value=5e-14, Identity=47%"; Hit description=F5A8.5 protein
VFYLIRFYFLFFFNLIEANDFQAGAAQCLGEIYRLFGRKITAGLIETSSIVAKLMKYHEDFVRQDALLLLENALEGSGGGGGAAAYQDXFRIIMRGGVSDRS

SEQ ID NO: 131137 - protein, 56 aa, Setaria italica
  Transcript Sequence Number=SeqID_65163
HTSSLLASQFSSICNNHSRSTEVRKNEHPHRKNQPSCTFPMVLILQNDADDKVREP

SEQ ID NO: 131138 - protein, 85 aa, Setaria italica
  Transcript Sequence Number=SeqID_65164
  Gene Ontology: Mol. function=transporter activity; Cellular component= mitochondrial membrane; Biological process=transport
  Homolog annotation: Hit_ID=Q3E9A0; Match level="QueryCoverage=67%, HitCoverage=11%, E-value=2e-22, Identity=84%"; Hit description =Probable anion transporter 6, mitochondrial
IPGAVGEDHGARGEKELEGEAAGALELRWPPWEGLAERYKLIGATSLAFVICNMDKVNLSVAIIPMSHQYGWNSSTAGLVQSSFF

SEQ ID NO: 131139 - protein, 47 aa, Setaria italica
  Transcript Sequence Number=SeqID_65165
FINLYCDQLSSLTSWSLKQTIMGPPIQDLKCAYIPMSSSMLLYLSMM

SEQ ID NO: 131140 - protein, 37 aa, Setaria italica
  Transcript Sequence Number=SeqID_65166
IIWTILIVAYNFDLDNTPGHPSGEEKLLLILLKMRPY

SEQ ID NO: 131141 - protein, 56 aa, Setaria italica
  Transcript Sequence Number=SeqID_65167
  Homolog annotation: Hit_ID=Q7XS46; Match level="QueryCoverage=94%, HitCoverage=15%, E-value=4e-11, Identity=55%"; Hit description =OSJNBa0035M09.18 protein
HLSGLTRISLSPLQKVATVAPCMWNGTKRPCYLFARKFYPETLNNLLKLFSSYTSA

SEQ ID NO: 131142 - protein, 123 aa, Setaria italica
  Transcript Sequence Number=SeqID_65168
  Gene Ontology: Mol. function=metal ion binding
  Homolog annotation: Hit_ID=B9RMQ0; Match level="QueryCoverage=84%, HitCoverage=41%, E-value=2e-28, Identity=58%"; Hit description =Protein binding protein, putative
GDEAGELGGSSRWRGPLKALETDIHHANAMADAIQRNYGGACVQMRLSFSSLAPFFLYLIQWLDCGCCYALPSYLGLFHILICKVYADGDSSVSTYERRASLREFYGNPWPMWAYCDLHTKVL

SEQ ID NO: 131143 - protein, 85 aa, Setaria italica
  Transcript Sequence Number=SeqID_65169
QPNRTTKDLASIGYYLTLLTRLPYDGTGILVADRCADLRSSNGGHGAGIYVLAVALIFFLSLGLDRGRRDPDVQMRTDVTEKTKP

SEQ ID NO: 131144 - protein, 53 aa, Setaria italica
  Transcript Sequence Number=SeqID_65170
HGCRKQKDSSFVAGGDERLVWWCFCPEVKDTDYFLAVLVLEPCLASRVITARK

SEQ ID NO: 131145 - protein, 43 aa, Setaria italica
  Transcript Sequence Number=SeqID_65171
  Gene Ontology: Mol. function=helicase activity
RIEVSKVVSIIRNLTKGGTVSEADIGVITPYRQQVVKLVMLYS

SEQ ID NO: 131146 - protein, 41 aa, Setaria italica
  Transcript Sequence Number=SeqID_65172
SILLDLQFVVKTRKLFLTRGQSGADTSPGAIIQTRNTVRWI

SEQ ID NO: 131147 - protein, 78 aa, Setaria italica
  Transcript Sequence Number=SeqID_65173
EYVLQVPAIGDICVLVLSLGHCIWLFFADVHVGVALQFESGYFVETLVEGDKLGVTPHTIRVSPVEGGELLAVDSAHS

SEQ ID NO: 131148 - protein, 146 aa, Setaria italica
  misc_feature (72)..(72): Xaa can be any naturally occurring amino acid
  misc_feature (82)..(82): Xaa can be any naturally occurring amino acid
  Transcript Sequence Number=SeqID_65174
  Gene Ontology: Mol. function=nucleic acid binding
  Homolog annotation: Hit_ID=B9RHF9; Match level="QueryCoverage=47%, HitCoverage=16%, E-value=5e-14, Identity=47%"; Hit description=Poly -A binding protein, putative
  Pfam annotation: Domain name=RRM_1; Domain location=45-100; Score =28.9; E_value=2.1e-05; Accession=PF00076.14; Description=RNA recognition motif. (a.k.a. RRM, RBD, o
KTTSKMEQDVLKLRNKQAQINNGKQAALSLGPHANSEDDADSRTIFVTNVHFAATKEALSMHFMKCGTVLKXAYVTFADREXIEKAVSFSGTSFLARVLTVMRKADAPPGFLASVQQTGRPLQPWKSPRSSSVDPKQTSGYHLQWK

SEQ ID NO: 131149 - protein, 110 aa, Setaria italica
  misc_feature (54)..(54): Xaa can be any naturally occurring amino acid
  Transcript Sequence Number=SeqID_65175
  Gene Ontology: Mol. function=nucleic acid binding; Cellular component= nucleoplasm; Biological process=mRNA polyadenylation
  Homolog annotation: Hit_ID=B9RHF9; Match level="QueryCoverage=70%, HitCoverage=14%, E-value=5e-17, Identity=54%"; Hit description=Poly -A binding protein, putative
  Pfam annotation: Domain name=RRM_1; Domain location=1-70; Score=60.1; E_value=8.2e-15; Accession=PF00076.14; Description=RNA recognition motif. (a.k.a. RRM, RBD, o
IFVTNVHFAATKEALSMHFMKCGTVLKVNILTDAITGHPKGAAYVTFADRECIXKAVSFSGTSFLARVLTVMRKADAPPGFLASVQQTGRPLQPWKFYLPFLSTSSFRYP

SEQ ID NO: 131150 - protein, 55 aa, Setaria italica
  Transcript Sequence Number=SeqID_65176
  Gene Ontology: Biological process=cell redox homeostasis
  Homolog annotation: Hit_ID=B9T1I6; Match level="QueryCoverage=76%, HitCoverage=14%, E-value=3e-10, Identity=73%"; Hit description =Protein sco1, putative
FQSLQICNYFAEEKAKLDIVPVFITVDPERDTVEQVRDYVKEFHPDLIRYLTGYL

SEQ ID NO: 131151 - protein, 66 aa, Setaria italica
  Transcript Sequence Number=SeqID_65177
AAAAPATGGDGGSDGQSGKSEQGDAGKIHCQGIPHLTRMAFLQPVSWLSFLLLLVTGGGIIVYYDQ

SEQ ID NO: 131152 - protein, 42 aa, Setaria italica
  Transcript Sequence Number=SeqID_65178
GRKGTKHHYVHCKAGRGRSTTIVLCFLIKYRNMTHDPKLFQE

SEQ ID NO: 131153 - protein, 82 aa, Setaria italica
  Transcript Sequence Number=SeqID_65179
  Homolog annotation: Hit_ID=B6TPP1; Match level="QueryCoverage=85%, HitCoverage=17%, E-value=2e-30, Identity=84%"; Hit description =Lysine ketoglutarate reductase trans-splicing related 1
  Pfam annotation: Domain name=DUF707; Domain location=1-68; Score= -179.8; E_value=0.023; Accession=PF05212.4; Description=Protein of unknown function (DUF707)
RKIVVGRPDYNEKIGVVDAQWIVHQAVPSLGNQGKSDNGRAPWEGVRARCRKEWGIFQTRLADAEKAYYLERGITPPNSTAV

SEQ ID NO: 131154 - protein, 76 aa, Setaria italica
  misc_feature (13)..(13): Xaa can be any naturally occurring amino acid
  misc_feature (75)..(75): Xaa can be any naturally occurring amino acid
  Transcript Sequence Number=SeqID_65180
  Homolog annotation: Hit_ID=B6TPP1; Match level="QueryCoverage=100%, HitCoverage=20%, E-value=2e-30, Identity=84%"; Hit description =Lysine ketoglutarate reductase trans-splicing related 1
FGISFPTVNITKXISYIEDRNSGITTQTLLNHAWTSAASHKNNSVSNPDEIPKIYVPTNPKGAERLPPGIVASEXD

SEQ ID NO: 131155 - protein, 50 aa, Setaria italica
  Transcript Sequence Number=SeqID_65181
  Gene Ontology: Mol. function=RNA-directed DNA polymerase activity; Biological process=RNA-dependent DNA replication
  Homolog annotation: Hit_ID=Q10IF0; Match level="QueryCoverage=100%, HitCoverage=4%, E-value=8e-10, Identity=57%"; Hit description =Retrotransposon protein, putative, unclassified
QRLGGCLSDMLLFNDLIQHLDLIDIPFEGRQFTWSSMQDDALLEKLDWVF

SEQ ID NO: 131156 - protein, 53 aa, Setaria italica
  Transcript Sequence Number=SeqID_65182
RKLVGKGMHRPQLSHRPQGWGNQYYTIPFLFVRGDGVILVSPAFVRIAEGMHR

SEQ ID NO: 131157 - protein, 71 aa, Setaria italica
  misc_feature (45)..(45): Xaa can be any naturally occurring amino acid
  Transcript Sequence Number=SeqID_65183
MGIIPAVDEIVLLMQVGIYERNRSKKRQKTKKNGKGKDWLLKKKXQMRRRGHDVPADTKYTGRKRKTSSNF

SEQ ID NO: 131158 - protein, 67 aa, Setaria italica
  misc_feature (31)..(31): Xaa can be any naturally occurring amino acid
  Transcript Sequence Number=SeqID_65184
PKEDAAIYNYIQERLQKSLPYKMIMELSAMXMEAPEISFEELLAKEKEDTAFWQPNGKMRSISSNPK

SEQ ID NO: 131159 - protein, 99 aa, Setaria italica
  Transcript Sequence Number=SeqID_65185
  Gene Ontology: Mol. function=binding
  Homolog annotation: Hit_ID=Q2R9P0; Match level="QueryCoverage=92%, HitCoverage=4%, E-value=9e-36, Identity=80%"; Hit description =Armadillo/beta-catenin-like repeat family protein, expressed
CGGTTSLLLYLGELCQAPRSPVPLADILGALAYSLMVFDGTDGKSFDPVEIENTLVVLLKSHDSKLDRILEALASLYGNDCLSGRLDLPYSNTITTQAS

SEQ ID NO: 131160 - protein, 68 aa, Setaria italica
  misc_feature (55)..(55): Xaa can be any naturally occurring amino acid
  Transcript Sequence Number=SeqID_65186
  Gene Ontology: Mol. function=binding
  Homolog annotation: Hit_ID=Q2R9P0; Match level="QueryCoverage=98%, HitCoverage=3%, E-value=1e-21, Identity=76%"; Hit description =Armadillo/beta-catenin-like repeat family protein, expressed
KSFDPVEIENTLVVLLKSHDSKLDRILEALASLYGNDCLSGRLDLSNSKKVLVGXITMAPADVQETIT

SEQ ID NO: 131161 - protein, 103 aa, Setaria italica
  misc_feature (30)..(30): Xaa can be any naturally occurring amino acid
  Transcript Sequence Number=SeqID_65187
  Gene Ontology: Mol. function=metal ion binding
  Homolog annotation: Hit_ID=B9SEI4; Match level="QueryCoverage=85%, HitCoverage=19%, E-value=2e-25, Identity=61%"; Hit description =Protein binding protein, putative
MRLEGTPPSARYIPIFAVFSPLFILQGAGXFFSLARLAEKVVLLLRNGPVSPNYLTASSKVRDCFAFLHHGSRLLGWWSIDEGSKEEQVPYLFLLSCNSYLGY

SEQ ID NO: 131162 - protein, 55 aa, Setaria italica
  Transcript Sequence Number=SeqID_65188
LILLVLKCHYGSFCPLFLMCFYLIQGLGFCKCCFIHNINMNRLLYLDLQLLLSTK

SEQ ID NO: 131163 - protein, 87 aa, Setaria italica
  Transcript Sequence Number=SeqID_65189
MMYGYGSSLAACGRKEAFAGWIHQACCRNSNFLPFLFFWDTFLFRPGGNGFGRGTAGSSNSLPGWKRGGFAQRGGGQVRSGVLLQRR

SEQ ID NO: 131164 - protein, 74 aa, Setaria italica
  Transcript Sequence Number=SeqID_65190
  Subcellular localization annotation: CTP_CleavageSite=35; ConfidenceScore=5.58e-01
IITNFSLSSSPCTRNNTNPGWKRGGFAQRGGGQVRGVRGRGRSSFGRGRGRGYVRKGNVEKSADQLDKELDNYH

SEQ ID NO: 131165 - protein, 109 aa, Setaria italica
  Transcript Sequence Number=SeqID_65191
  Homolog annotation: Hit_ID=B9RMD8; Match level="QueryCoverage=83%, HitCoverage=15%, E-value=7e-40, Identity=75%"; Hit description=Yth domain-containing protein, putative
  Pfam annotation: Domain name=YTH; Domain location=7-85; Score=113.6; E_value=6.4e-31; Accession=PF04146.7; Description=YT521-B-like family
KDVPNNLLPVINTSVDFDRSVDYWQQDKWSGQFPVKWHIIKDVPNNLLRHIILENNDNKPVTNSRDTQEVKLEQGLQMLTIFKNHEAETTILEDFDFYEQREKALACLT

SEQ ID NO: 131166 - protein, 57 aa, Setaria italica
  Transcript Sequence Number=SeqID_65192
LASPFLRSQRIPRLKGLQMLTIFKNHEAETTILEDFDFYEQREKALQENRRQQQPGF

SEQ ID NO: 131167 - protein, 58 aa, Setaria italica
  Transcript Sequence Number=SeqID_65193
RLPELVPLSLVKSVSAALPYHVFAALFWYQQLRSFFGDLLRQKLNRKILFKRCAILVL

SEQ ID NO: 131168 - protein, 104 aa, Setaria italica
  misc_feature (51)..(51): Xaa can be any naturally occurring amino acid
  Transcript Sequence Number=SeqID_65194
RRRRLGAAAAGRGPFFGGGGRRMGKGTGRVVGNLAFAAVLTYLAVTGQLRXLTILLPILALGAFFFFAGQDILQGDVSLPINLAFSDSLILMIDLYLPVEKVSV

SEQ ID NO: 131169 - protein, 46 aa, Setaria italica
  Transcript Sequence Number=SeqID_65195
YCTQPFSVQGNKFVRESARFSSGRGATATNGQVFNELFNRGMRGPK

SEQ ID NO: 131170 - protein, 57 aa, Setaria italica
  Transcript Sequence Number=SeqID_65196
PDRTAIVTIKCQAIKTKMRFILQMNLKFTYYSMSISTEEHYRSVSSIHIIMDNICQV

SEQ ID NO: 131171 - protein, 59 aa, Setaria italica
  Transcript Sequence Number=SeqID_65197
IGYVPEYKTTRIVNMFHPFYSNLCCFIFGYISESMDMNWFPFFFILQAMGMNIDLSFML

SEQ ID NO: 131172 - protein, 46 aa, Setaria italica
  misc_feature (20)..(20): Xaa can be any naturally occurring amino acid
  Transcript Sequence Number=SeqID_65198
SRGICNFLQLDRIYLGTPSXKIAIIDHEKKRTFVVRKGGLPDAGRN

SEQ ID NO: 131173 - protein, 69 aa, Setaria italica
  Transcript Sequence Number=SeqID_65199
  Gene Ontology: Mol. function=carbohydrate binding; Biological process= carbohydrate metabolic process
  Homolog annotation: Hit_ID=A2Q396; Match level="QueryCoverage=85%, HitCoverage=18%, E-value=3e-25, Identity=89%"; Hit description =Galactose mutarotase-like
MVIITCILYCSFEYRLRVALSPGGDLMLTSRIRNTNADGKSFSFTFAYHTYFKISDISEVRVEGLETLD

SEQ ID NO: 131174 - protein, 95 aa, Setaria italica
  misc_feature (13)..(13): Xaa can be any naturally occurring amino acid
  Transcript Sequence Number=SeqID_65200
PTKPRKKGRKIKXISNGNQKVHIKVKAKFQPESKNGATTFELDNGRASKVQPIDSTGDQSLCYFLCKYCYEFGVLFFIPYAFLFAEFSQGTFDLY

SEQ ID NO: 131175 - protein, 75 aa, Setaria italica
  misc_feature (19)..(19): Xaa can be any naturally occurring amino acid
  misc_feature (41)..(41): Xaa can be any naturally occurring amino acid
  misc_feature (65)..(65): Xaa can be any naturally occurring amino acid
  Transcript Sequence Number=SeqID_65201
LKLQPIDSTDAPVPLATKXMYHSQGNYRLRLELGQLYRESXMEHLSSHTTLNLSHGNGLMASQFXPCDNSSLPAS

SEQ ID NO: 131176 - protein, 80 aa, Setaria italica
  misc_feature (35)..(35): Xaa can be any naturally occurring amino acid
  Transcript Sequence Number=SeqID_65202
ENDMHIFGSKPMADPLDLVTLMNLPVCFPFFDNGXSTGSKTLLLKVCCSTCKKPVKASQYAVHTEQCSSGKVNTNDSMGV

SEQ ID NO: 131177 - protein, 52 aa, Setaria italica
  Transcript Sequence Number=SeqID_65203
DSPCENIRTEIGWPQGVPFVHPHDLPNKAKLGFLEAYEPGWTASQQEQTPWS

SEQ ID NO: 131178 - protein, 66 aa, Setaria italica
  Transcript Sequence Number=SeqID_65204
ICKLVYFATKWFVVMFHWLCCQPGKITTNHLQVSLFCYQMVRSYVPLALLPARENVEIFRSPLNLV

SEQ ID NO: 131179 - protein, 125 aa, Setaria italica
  Transcript Sequence Number=SeqID_65205
  Gene Ontology: Mol. function=transferase activity; Cellular component= membrane
  Homolog annotation: Hit_ID=B6U2C1; Match level="QueryCoverage=86%, HitCoverage=25%, E-value=9e-59, Identity=99%"; Hit description =Secondary cell wall-related glycosyltransferase family 47
  Pfam annotation: Domain name=Exostosin; Domain location=1-124; Score=- 19.3; E_value=2.1e-05; Accession=PF03016.7; Description=Exostosin family
NNKPRTTTDDYQYLRTNFRGLFYDMGNDPEGGYYARGARASVWENFKDNPLFDISTEHPSTYYEDMQRAIFCLCPLGWAPWSPRLVEAVVFGCIPVIIADDIVLPFADAIPWEEISVFVAERDVP

SEQ ID NO: 131180 - protein, 26 aa, Setaria italica
  Transcript Sequence Number=SeqID_65206
PRSIFVYFRGLFYDMGNDPEGGYYAR

SEQ ID NO: 131181 - protein, 102 aa, Setaria italica
  misc_feature (76)..(76): Xaa can be any naturally occurring amino acid
  Transcript Sequence Number=SeqID_65207
  Subcellular localization annotation: CTP_CleavageSite=45; ConfidenceScore=5.52e-01
VSPTSTLVSPPRSPPSESPPMSPDAAGALRRGSWPGVGSPVNDVLASLRQLRLGGGGSPRSAPSGGSFLAGYPFGXPKSPAALYSLPSTPTRPSTVTVNPTP

SEQ ID NO: 131182 - protein, 97 aa, Setaria italica
  Transcript Sequence Number=SeqID_65208
  Gene Ontology: Mol. function=catalytic activity; Biological process =cellular metabolic process
  Homolog annotation: Hit_ID=B6TY10; Match level="QueryCoverage=98%, HitCoverage=30%, E-value=2e-32, Identity=66%"; Hit description =Dihydroflavonol-4-reductase
RNIVDVRDVADALFMAYEKPEASGRYICNSPPIKVSDMINILKNLYPTYRYPKNFEEVEESSVYSFEKLQKLGWTFRPVEETLRDSVESYKAFGFLN

SEQ ID NO: 131183 - protein, 62 aa, Setaria italica
  Transcript Sequence Number=SeqID_65209
  Gene Ontology: Mol. function=kinase activity; Cellular component =intracellular; Biological process=intracellular protein transport
GYQEIPDESFVPARTVPAVQINEAFEVARNSVELLSTVLSSSQKEVLQDDLTTTLVQHEQVP

SEQ ID NO: 131184 - protein, 108 aa, Setaria italica
  misc_feature (26)..(26): Xaa can be any naturally occurring amino acid
  misc_feature (103)..(103): Xaa can be any naturally occurring amino acid
  misc_feature (106)..(106): Xaa can be any naturally occurring amino acid
  Transcript Sequence Number=SeqID_65210
  Homolog annotation: Hit_ID=Q7X7S8; Match level="QueryCoverage=90%, HitCoverage=19%, E-value=4e-29, Identity=67%"; Hit description =OSJNBa0083N12.15 protein
PNSSSRSKLTNCYLLLRNSGVRRERXWLVAALFLLVFLYGFWRMGIHFPMPSPEKGFFTMPQLVSRIGVIGVSVMAVSVMAVLSGFGAVNLPYSYLSLFIREXDEXDI

SEQ ID NO: 131185 - protein, 54 aa, Setaria italica
  misc_feature (12)..(12): Xaa can be any naturally occurring amino acid
  misc_feature (36)..(36): Xaa can be any naturally occurring amino acid
  Transcript Sequence Number=SeqID_65211
CGRTNAPGKDVXTLLNCNTGNLACSSRNSSGAYHLXHTSCLLHWSILCQYVDCL

SEQ ID NO: 131186 - protein, 76 aa, Setaria italica
  Transcript Sequence Number=SeqID_65212
HHALPIIFCSKQPIAVIYNPYCFRQKIPSCQNIFTMQVKIRRRIKKSTALYPNLLRFSLVYLTKIGPTTGSYQIDL

SEQ ID NO: 131187 - protein, 71 aa, Setaria italica
  Transcript Sequence Number=SeqID_65213
HTPEVIAPHIASCSTYNFCSKQPIAVIYNPYCFRQKIPSCQNIFTMQVKIRRRIKKSTALYPNFTSRFSLV

SEQ ID NO: 131188 - protein, 62 aa, Setaria italica
  Transcript Sequence Number=SeqID_65214
TSEHNLPIHDRQLPTISSPQTDAVRSTLNRMFSINQIQLQISLILADERLAVPEGEGGRDED

SEQ ID NO: 131189 - protein, 112 aa, Setaria italica
  misc_feature (36)..(36): Xaa can be any naturally occurring amino acid
  misc_feature (80)..(80): Xaa can be any naturally occurring amino acid
  misc_feature (95)..(95): Xaa can be any naturally occurring amino acid
  Transcript Sequence Number=SeqID_65215
  Gene Ontology: Mol. function=mannosyl-oligosaccharide 1,2-alpha -mannosidase activity; Cellular component=membrane; Biological process=metabolic process
  Homolog annotation: Hit_ID=Q9SEH8; Match level="QueryCoverage=96%, HitCoverage=18%, E-value=2e-43, Identity=77%"; Hit description =Mannosyl-oligosaccharide 1,2-alpha-mannosidase
ENLLPSNYYYICEKNGGSLSDKMDELACFAPGMLAXLGASGYESPEKSEEIMNLAKELARTCYNFYQTTPTKLAGENYFXHSGQDMSVGTSWNIXLRPETVESLMYLWRLTG

SEQ ID NO: 131190 - protein, 57 aa, Setaria italica
  Transcript Sequence Number=SeqID_65216
  Gene Ontology: Mol. function=mannosyl-oligosaccharide 1,2-alpha -mannosidase activity; Cellular component=membrane; Biological process=metabolic process
  Homolog annotation: Hit_ID=Q9SEH8; Match level="QueryCoverage=100%, HitCoverage=9%, E-value=2e-25, Identity=94%"; Hit description =Mannosyl-oligosaccharide 1,2-alpha-mannosidase
LARTCYNFYQTTPTKLAGENYFFHSGQDMSVGTSWNILRPETVESLMYLWRLTGNKT

SEQ ID NO: 131191 - protein, 54 aa, Setaria italica
  Transcript Sequence Number=SeqID_65217
  Gene Ontology: Mol. function=mannosyl-oligosaccharide 1,2-alpha -mannosidase activity; Cellular component=membrane; Biological process=metabolic process
  Homolog annotation: Hit_ID=B9SQ97; Match level="QueryCoverage=74%, HitCoverage=7%, E-value=3e-12, Identity=77%"; Hit description =Mannosyl-oligosaccharide alpha-1,2-mannosidase, putative
ESPEKSEEIMNLAKELARTCYNFYQTTPTKLAGENYFFHSGQVYGEPYFSLSIK

SEQ ID NO: 131192 - protein, 78 aa, Setaria italica
  Transcript Sequence Number=SeqID_65218
LLFFLSVASRARVSRRSASSQGDWGPPPPHQHADDTSLAEPAPGRAMRIPSVGLGTWQIEHEAVCSAIYAAVKAGYRL

SEQ ID NO: 131193 - protein, 65 aa, Setaria italica
  Transcript Sequence Number=SeqID_65219
LEILCHSLNMQLTSFENKPPTADNPSMTSGFTFLTCTTDKVPNKIFCIILMLFIHELKSISLSQI

SEQ ID NO: 131194 - protein, 86 aa, Setaria italica
  Transcript Sequence Number=SeqID_65220
  Gene Ontology: Mol. function=oxidoreductase activity, acting on the CH-OH group of donors, NAD or NADP as acceptor; Cellular component =chloroplast; Biological process=malate metabolic process
  Homolog annotation: Hit_ID=Q7F190; Match level="QueryCoverage=96%, HitCoverage=13%, E-value=8e-26, Identity=71%"; Hit description=Malic enzyme
QNVLASYMEEEEVLQGIIYPPISRIRDITKEVAAAVVREAVAEDLAEGYRDMDARELARLSEEETVEYVKTNMWSPVYPTIIYKTD

SEQ ID NO: 131195 - protein, 68 aa, Setaria italica
  Transcript Sequence Number=SeqID_65221
  Homolog annotation: Hit_ID=Q7F190; Match level="QueryCoverage=70%, HitCoverage=7%, E-value=3e-10, Identity=64%"; Hit description=Malic enzyme
MRHFANGYVSDGPSLTYFCSRFRKTYRMFNDDVQGTAGVAIAGLLGAVRAQGRPMIDFPKQRIVVAGA

SEQ ID NO: 131196 - protein, 52 aa, Setaria italica
  Transcript Sequence Number=SeqID_65222
  Gene Ontology: Mol. function=dihydrolipoyllysine-residue acetyltransferase activity; Cellular component=pyruvate dehydrogenase complex; Biological process=pyruvate metabolic process
  Homolog annotation: Hit_ID=Q9SWR9; Match level="QueryCoverage=71%, HitCoverage=6%, E-value=2e-13, Identity=100%"; Hit description =Dihydrolipoamide S-acetyltransferase
  Pfam annotation: Domain name=E3_binding; Domain location=1-36; Score =65.7; E_value=1.7e-16; Accession=PF02817.9; Description=e3 binding domain
FASPLARKLAEDNNVPLSSVKGTGPDGRILKADIEDYLGELLFLLLQPLNLF

SEQ ID NO: 131197 - protein, 39 aa, Setaria italica
  Transcript Sequence Number=SeqID_65223
KVTANRLLASKQTIPHYYLTVDARVDKLVKYVSNLIIVI

SEQ ID NO: 131198 - protein, 80 aa, Setaria italica
  misc_feature (53)..(53): Xaa can be any naturally occurring amino acid
  Transcript Sequence Number=SeqID_65224
  Gene Ontology: Mol. function=nucleoside-triphosphatase activity; Biological process=DNA metabolic process
KKYNIRCNVIHALELEKALPSDLLFFCFSNTCAEDYKQGICGSTFHCREFSSXKAKKESKSSGTDSGEENMSKKDLALHQ

SEQ ID NO: 131199 - protein, 111 aa, Setaria italica
  Transcript Sequence Number=SeqID_65225
  Gene Ontology: Mol. function=transferase activity, transferring glycosyl groups
  Homolog annotation: Hit_ID=Q01J51; Match level="QueryCoverage=81%, HitCoverage=24%, E-value=6e-41, Identity=84%"; Hit description =OSIGBa0145M07.6 protein
FCGNLKHSERMNSGVMVVEPSETLFNDMINQVGSLPSYTGGDQGFLNSYYSDFANSRVFEPDSPLTPEPKTQRLSTLYNADVGLYMLANKVTLLICDCVLVRPSILAILHN

SEQ ID NO: 131200 - protein, 54 aa, Setaria italica
  Transcript Sequence Number=SeqID_65226
INKNGVMDYYGLLRKELCEKKRNMQNGKRCAQTSSVRRQTTHLVDHIVEKSFRG

SEQ ID NO: 131201 - protein, 92 aa, Setaria italica
  Transcript Sequence Number=SeqID_65227
  Gene Ontology: Mol. function=two-component response regulator activity; Cellular component=nucleus; Biological process=two -component signal transduction system (phosphorelay)
  Homolog annotation: Hit_ID=B6TSM4; Match level="QueryCoverage=97%, HitCoverage=66%, E-value=5e-33, Identity=78%"; Hit description=Two -component response regulator ARR3
  Pfam annotation: Domain name=Response_reg; Domain location=1-87; Score=10.5; E_value=0.00015; Accession=PF00072.16; Description =Response regulator receiver domain
SHETGKRALELLGKEPDVSMIITDYWMPEMTGYELLKKVKESSKLKQIPVVIMSSENVQTRISRCLEEGAEDFLVKPVRASDVSRVFSRVLR

SEQ ID NO: 131202 - protein, 109 aa, Setaria italica
  Transcript Sequence Number=SeqID_65228
  Gene Ontology: Mol. function=protein transporter activity; Cellular component=mitochondrial inner membrane; Biological process=protein transport
  Homolog annotation: Hit_ID=B9RZN4; Match level="QueryCoverage=97%, HitCoverage=61%, E-value=3e-26, Identity=58%"; Hit description =Protein translocase, putative
MSGSMETQARAFADEVRGGLEGKSWMLDLGHPLLNRIAESFVKAAGIGAVQAVARESYFMAIEGEGGSVSGATGSRKRSFPELNGTNSGSKSAEAMVKNVSKESLQWGL

SEQ ID NO: 131203 - protein, 69 aa, Setaria italica
  Transcript Sequence Number=SeqID_65229
  Gene Ontology: Mol. function=hydroxymethylbilane synthase activity; Cellular component=chloroplast; Biological process=tetrapyrrole biosynthetic process
  Homolog annotation: Hit_ID=Q6H6D2; Match level="QueryCoverage=86%, HitCoverage=16%, E-value=5e-22, Identity=88%"; Hit description =Porphobilinogen deaminase, chloroplastic
  Pfam annotation: Domain name=Porphobil_deam; Domain location=1-69; Score=-100.0; E_value=3e-05; Accession=PF01379.12; Description =Porphobilinogen deaminase, dipyromethane cofactor binding domain
KEYGPLLVVSYTVVNFRGNVQTRLKKLKGGDVHATLLALAGLKRLNMTENATSLLSVDEMLPAVAQGAI

SEQ ID NO: 131204 - protein, 80 aa, Setaria italica
  Transcript Sequence Number=SeqID_65230
  Gene Ontology: Mol. function=signal transducer activity; Cellular component=plasma membrane; Biological process=response to light stimulus
  Homolog annotation: Hit_ID=Q10G69; Match level="QueryCoverage=95%, HitCoverage=12%, E-value=1e-35, Identity=92%"; Hit description =Transposon protein, putative, Mutator sub-class, expressed
SSAPKPDAFKRQGQAWFCTTGLPSDVTVEVGDMSFHLHKFPLLSKSAFLARSIEENSDQEECVIKLNDIPGGAKSFELVA

SEQ ID NO: 131205 - protein, 60 aa, Setaria italica
  Transcript Sequence Number=SeqID_65231
CDPSKHRHIKIIGAISWKKIDDFDIQTCPTKPKVEYAPCLALPLEGVRLGAELHGRHPGR

SEQ ID NO: 131206 - protein, 116 aa, Setaria italica
  Transcript Sequence Number=SeqID_65232
  Gene Ontology: Mol. function=signal transducer activity; Biological process=response to light stimulus
  Homolog annotation: Hit_ID=Q10G69; Match level="QueryCoverage=93%, HitCoverage=16%, E-value=1e-38, Identity=76%"; Hit description =Transposon protein, putative, Mutator sub-class, expressed
ATSGEAGGWATAVRENQVLKVGMDNMRMRLAELEKECSSMRQEIEKLGGRSSKGGGGGWASRVVPRRLGLKVRSQMCSAQEGSVSEQQRSMSAKLDKLQAKVTKQKKQLGPSVLSL

SEQ ID NO: 131207 - protein, 49 aa, Setaria italica
  Transcript Sequence Number=SeqID_65233
RLDSKHHLKALPLVPQFLAANFFESAVQDKERINMRVQFSKIQSKIPSY

SEQ ID NO: 131208 - protein, 130 aa, Setaria italica
  misc_feature (6)..(6): Xaa can be any naturally occurring amino acid
  Transcript Sequence Number=SeqID_65234
  Homolog annotation: Hit_ID=B6TBF4; Match level="QueryCoverage=80%, HitCoverage=20%, E-value=9e-41, Identity=79%"; Hit description=IWS1 C-terminus family protein
  Pfam annotation: Domain name=IWS1_C; Domain location=1-126; Score= -93.7; E_value=0.0003; Accession=PF05909.6; Description=IWS1 C -terminus
WSRPIXNKSTRFEDMRRYDDERAPYRRPQMKKPSSSSSGMESRDDDLDADFSQRKSGQSSSRQHASRPEASPLDFVIRPQSKIDPEQIRARAKQAVQDQRRLKVFLASSKLFSFVCLLSAGLGSAMLVNL

SEQ ID NO: 131209 - protein, 58 aa, Setaria italica
  Transcript Sequence Number=SeqID_65235
HDKTFIQYKGNSLLEKCYIHARSTYTPDRIQLTYKHDKTFIQYKGNSLLEKCYIHARS

SEQ ID NO: 131210 - protein, 84 aa, Setaria italica
  misc_feature (65)..(65): Xaa can be any naturally occurring amino acid
  Transcript Sequence Number=SeqID_65236
KMLKLVTSINVKEKECDFFRLYVYLVLMDNLLFSSGAFRDKTMIVDTWRNYLRNCSTQIACTNWXFYAPKVRNKASYLLTKVDK

SEQ ID NO: 131211 - protein, 53 aa, Setaria italica
  Transcript Sequence Number=SeqID_65237
LSYSNYKLTVIQLPDSSCVGPPHNIIAWLRVVSACCKIRYNLFNTVDIVIKYF

SEQ ID NO: 131212 - protein, 74 aa, Setaria italica
  Transcript Sequence Number=SeqID_65238
LVSSCRYCVEPGLLSCATASSYQSTPRSICWNRYLNNLYSLSSRSSAGDLHFSWMLLRKTCIAYFNSFMQLLTT

SEQ ID NO: 131213 - protein, 73 aa, Setaria italica
  misc_feature (27)..(27): Xaa can be any naturally occurring amino acid
  misc_feature (35)..(35): Xaa can be any naturally occurring amino acid
  Transcript Sequence Number=SeqID_65239
  Gene Ontology: Mol. function=nucleotide binding; Cellular component =Golgi apparatus; Biological process=small GTPase mediated signal transduction
  Homolog annotation: Hit_ID=A9SJV7; Match level="QueryCoverage=98%, HitCoverage=36%, E-value=7e-26, Identity=73%"; Hit description=Rab21- family small GTPase
  Pfam annotation: Domain name=Ras; Domain location=1-73; Score=-49.8; E_value=1.4e-05; Accession=PF00071.14; Description=Ras family
GKTSLVLRYVNNIFSDKQEATVQASYXTKRLVVEXDTAGQEKFHALGPIYYRDADAALLVYDITDSDTFVRVT

SEQ ID NO: 131214 - protein, 74 aa, Setaria italica
  Transcript Sequence Number=SeqID_65240
  Gene Ontology: Mol. function=nucleotide binding; Cellular component =Golgi apparatus; Biological process=small GTPase mediated signal transduction
  Homolog annotation: Hit_ID=A9SJV7; Match level="QueryCoverage=78%, HitCoverage=26%, E-value=6e-21, Identity=79%"; Hit description=Rab21- family small GTPase
  Pfam annotation: Domain name=Ras; Domain location=1-74; Score=-55.1; E_value=3.6e-05; Accession=PF00071.14; Description=Ras family
LLRFVCSFILRSSSYYWDTAGQEKFHALGPIYYRDADAALLVYDITDSDTFVRVTKWVKELKQMASKDIVMAIA

SEQ ID NO: 131215 - protein, 77 aa, Setaria italica
  Transcript Sequence Number=SeqID_65241
  Homolog annotation: Hit_ID=B9T165; Match level="QueryCoverage=93%, HitCoverage=12%, E-value=1e-16, Identity=54%"; Hit description=RNA binding protein, putative
LLSWLMTPYQGQGLPAAKVEFNKRHMAATKVVQTALATLKGRWRVIQGELWRPDKHRLPRIIFVCCLITNIIYSYYW

SEQ ID NO: 131216 - protein, 85 aa, Setaria italica
  Transcript Sequence Number=SeqID_65242
RSHRLVALAMMEQELDGALSPIGSLADGYHIKDHIGPIDRLHRTSRELSPPCQLNGQTDWHARAHHARRFEFCTGVKQISQVLMW

SEQ ID NO: 131217 - protein, 76 aa, Setaria italica
  Transcript Sequence Number=SeqID_65243
  Gene Ontology: Mol. function=DNA binding; Cellular component=nucleus; Biological process=regulation of transcription, DNA-dependent
  Homolog annotation: Hit_ID=Q6K7P2; Match level="QueryCoverage=78%, HitCoverage=25%, E-value=2e-24, Identity=90%"; Hit description =Transcription factor PCF3-like
  Pfam annotation: Domain name=TCP; Domain location=4-76; Score=84.9; E_ value=2.8e-22; Accession=PF03634.5; Description=TCP family transcription factor
GNALAVRKAPSKDRHSKVDGRGRRIRMPIICAARVFQLTRELGHKSDGQTIEWLLECDPSEPDSCDSGCNGGLMTT

SEQ ID NO: 131218 - protein, 69 aa, Setaria italica
  misc_feature (16)..(16): Xaa can be any naturally occurring amino acid
  Transcript Sequence Number=SeqID_65244
  Gene Ontology: Mol. function=nucleic acid binding
  Homolog annotation: Hit_ID=B9RNJ8; Match level="QueryCoverage=84%, HitCoverage=19%, E-value=2e-20, Identity=79%"; Hit description=RNA -binding region-containing protein, putative
  Pfam annotation: Domain name=RRM_1; Domain location=14-69; Score =16.9; E_value=0.0054; Accession=PF00076.14; Description=RNA recognition motif. (a.k.a. RRM, RBD, o
GGAGQFGDTTFTKVFXGGLAWETHKEGMRAYFEQFGDILEAVVITDKNTGRSKGYGFVSSKPFPLESYI

SEQ ID NO: 131219 - protein, 73 aa, Setaria italica
  Transcript Sequence Number=SeqID_65245
ESLLVFHVQRYSTNPVIPQDGIFHEPCVGPQKFVEMHTKGLLKQWSIICAIVILYTPLHVLTKMRVLLINIRH

SEQ ID NO: 131220 - protein, 75 aa, Setaria italica
  Transcript Sequence Number=SeqID_65246
  Gene Ontology: Mol. function=electron carrier activity
  Homolog annotation: Hit_ID=Q6QHT5; Match level="QueryCoverage=62%, HitCoverage=9%, E-value=5e-18, Identity=89%"; Hit description =Hydroperoxide lyase
  Subcellular localization annotation: CTP_CleavageSite=52; ConfidenceScore=5.21e-01
MLPTLSPAASASAATPPPRPIPGSYGPPVIGALRDRLDYFWFQSQDEFFRRRAAANRSTVFRTNIPPTFPFFVGI

SEQ ID NO: 131221 - protein, 145 aa, Setaria italica
  Transcript Sequence Number=SeqID_65247
  Gene Ontology: Mol. function=protein binding
  Homolog annotation: Hit_ID=Q6YSF3; Match level="QueryCoverage=40%, HitCoverage=11%, E-value=1e-11, Identity=67%"; Hit description =Acidic leucine-rich nuclear phosphoprotein 32-related protein 1
MTMMAKGRGMGDGDGDGDGDEDEDDEEDEDDPGSGEVANGGVSHSRGGVASHPVEVNGVIDVDEEESDADEVVPNGGVEHHHGANGFRVAVAGEAPEEEDEDVEDDDEDDDEGEEAEPQSSGRVAMMTGEDGGEEIDGHEHGEGA

SEQ ID NO: 131222 - protein, 62 aa, Setaria italica
  Transcript Sequence Number=SeqID_65248
DEDDARDDKEDDKKKVNFRKHPRESKGAYVEEPDEEVEGQFIYLPGHVTVPVSLFVLRKYLN

SEQ ID NO: 131223 - protein, 96 aa, Setaria italica
  misc_feature (47)..(47): Xaa can be any naturally occurring amino acid
  Transcript Sequence Number=SeqID_65249
ITLEESKEADTTTGKATHRISRGIGSKGHSLTRNLKSDGHVNTLQTXLHNLNEDELATFEESWRRNARDNLPGWDPRMNMLGNGNAHPDFRDANQM

SEQ ID NO: 131224 - protein, 66 aa, Setaria italica
  Transcript Sequence Number=SeqID_65250
  Gene Ontology: Mol. function=histone-lysine N-methyltransferase activity; Cellular component=nucleus; Biological process=chromatin modification
  Homolog annotation: Hit_ID=B6TF98; Match level="QueryCoverage=100%, HitCoverage=14%, E-value=2e-27, Identity=86%"; Hit description=MYND finger family protein
PNARAFKRDEDKDGHAVILALKPISKGEEITISYIDEDLSYEERQAQLADYGFTCACSKCQEERPI

SEQ ID NO: 131225 - protein, 79 aa, Setaria italica
  Transcript Sequence Number=SeqID_65251
  Gene Ontology: Mol. function=inositol or phosphatidylinositol phosphatase activity
  Homolog annotation: Hit_ID=Q9FF76; Match level="QueryCoverage=49%, HitCoverage=10%, E-value=2e-13, Identity=76%"; Hit description =Similarity to inositol polyphosphate 5'-phosphatase
MCHFILFFIPTTSPICYLFNQLFHEEHYTSYGYLLFHVFRCDRILWHGDGISQLSYFRGESKFSDHRPVCGTFILEVEM

SEQ ID NO: 131226 - protein, 67 aa, Setaria italica
  Transcript Sequence Number=SeqID_65252
YPLCALPISCCVSQYLWLQKIPLRNRHLDVLVKVPRCRVHGSYKKLALIGDFRFQPLCCAYLSVTAL

SEQ ID NO: 131227 - protein, 88 aa, Setaria italica
  Transcript Sequence Number=SeqID_65253
VGSICLPVGGLMDRRVTSLYRYRYYLDKRIRLQPQPNIGFVTFNNQIKLHLSQPNTTLDHDCTCPKSPANNYPRETKQKNSVIRACHP

SEQ ID NO: 131228 - protein, 100 aa, Setaria italica
  misc_feature (47)..(47): Xaa can be any naturally occurring amino acid
  Transcript Sequence Number=SeqID_65254
  Gene Ontology: Cellular component=exocyst; Biological process =exocytosis
  Homolog annotation: Hit_ID=B6U0J9; Match level="QueryCoverage=86%, HitCoverage=12%, E-value=1e-34, Identity=74%"; Hit description =Protein binding protein
LASIFLMNNGKYIIHKVNDSELGILLGDEWMKQMMSRVRRWSMEYQXGAWAKVMSVLQTGGSGVGSITAKAMLQKMQMFNSYLEEICCGCLVRYLGCIRS

SEQ ID NO: 131229 - protein, 45 aa, Setaria italica
  Transcript Sequence Number=SeqID_65255
  Gene Ontology: Mol. function=aminoacyl-tRNA ligase activity; Cellular component=cytoplasm; Biological process=tRNA aminoacylation for protein translation
MLSQVEYTAYRDNEGRLVSADSDSSLIDCYQEKVPADKVTKVGDL

SEQ ID NO: 131230 - protein, 48 aa, Setaria italica
  Transcript Sequence Number=SeqID_65256
SFTPCRSILAGVKELRLEKKSFQLDTKAALTCLFGNGLRNSTSTLISD

SEQ ID NO: 131231 - protein, 90 aa, Setaria italica
  Transcript Sequence Number=SeqID_65257
  Subcellular localization annotation: CTP_CleavageSite=29; ConfidenceScore=5.69e-01
SRPQKHALALPLSPFPSLPPTPSNSDAVLCRHGAAAPRHHGPRLVRPLSRRAQARALSLASRGTPFLAMRPPLISLFPRFVLAGVPGRTG

SEQ ID NO: 131232 - protein, 33 aa, Setaria italica
  Transcript Sequence Number=SeqID_65258
MCVDGAGGNEYGQCGEEPERKEDGTRALRRDIP

SEQ ID NO: 131233 - protein, 34 aa, Setaria italica
  Transcript Sequence Number=SeqID_65259
SVFPSRMLFFVTRLSSYSKSSFFFLTAYSKSYDP

SEQ ID NO: 131234 - protein, 56 aa, Setaria italica
  misc_feature (22)..(22): Xaa can be any naturally occurring amino acid
  Transcript Sequence Number=SeqID_65260
  Homolog annotation: Hit_ID=Q8LEY9; Match level="QueryCoverage=98%, HitCoverage=12%, E-value=6e-15, Identity=74%"; Hit description=UVB -resistance protein-like
VPLKVELLAGEDIVQGSFHVCXVSCGGTHSVALTRDGRMFSYGRGDHGRLGYGRKS

SEQ ID NO: 131235 - protein, 61 aa, Setaria italica
  Transcript Sequence Number=SeqID_65261
  Gene Ontology: Mol. function=transporter activity; Cellular component= integral to membrane; Biological process=transport
  Homolog annotation: Hit_ID=B6SVW2; Match level="QueryCoverage=95%, HitCoverage=10%, E-value=9e-24, Identity=87%"; Hit description =Carbohydrate transporter/ sugar porter
FREASWRNMYLWTSVPSLCYSVLLYFLAQESPRWLLVRGRKQDAMDTLQQIATLNAETRNG

SEQ ID NO: 131236 - protein, 39 aa, Setaria italica
  Transcript Sequence Number=SeqID_65262
  Homolog annotation: Hit_ID=B6SVW2; Match level="QueryCoverage=100%, HitCoverage=7%, E-value=4e-09, Identity=76%"; Hit description =Carbohydrate transporter/ sugar porter
PWALRRLAAIMTTSFGVGMVYYGMPLNDGSSAIALYVTL

SEQ ID NO: 131237 - protein, 72 aa, Setaria italica
  Transcript Sequence Number=SeqID_65263
  Gene Ontology: Mol. function=structural constituent of ribosome; Cellular component=ribonucleoprotein complex; Biological process =translation
  Homolog annotation: Hit_ID=P92813; Match level="QueryCoverage=81%, HitCoverage=63%, E-value=3e-14, Identity=64%"; Hit description =Ribosomal protein S19
  Pfam annotation: Domain name=Ribosomal_S19; Domain location=10-69; Score=29.6; E_value=1.7e-07; Accession=PF00203.13; Description =Ribosomal protein S19
GAAARAFSSRALWKGAFVDAFLARIKKNRENMNGKKIWSRRSSILPEFVGSSVLIYNWKKLLLFRLSKYSTC

SEQ ID NO: 131238 - protein, 111 aa, Setaria italica
  Transcript Sequence Number=SeqID_65264
  Gene Ontology: Mol. function=transferase activity
  Homolog annotation: Hit_ID=B9T610; Match level="QueryCoverage=78%, HitCoverage=30%, E-value=1e-13, Identity=57%"; Hit description =Geranylgeranyl transferase type II beta subunit, putative
VQNLSRSGEEEAGARAERHGHGGKAELAVDQHVRYIVTVEKKKDSFESLVMEHIRLNGAYWGLTTLDHGGRRARPWDQHVRYIVTVEKKKDSFESLVMEHIRLNGAYWGLT

SEQ ID NO: 131239 - protein, 60 aa, Setaria italica
  Transcript Sequence Number=SeqID_65265
MCLHVFLNCIRLLSANESTLLFSFQKINDAVGPLNRIKDILVAGNHPSPGIHGHARASGM

SEQ ID NO: 131240 - protein, 57 aa, Setaria italica
  Transcript Sequence Number=SeqID_65266
QCFLNCIRLLSANESTLLFSFQKINDAVGPLNRIKDILVAGNHPSPGIHGHARASGM

SEQ ID NO: 131241 - protein, 72 aa, Setaria italica
  Transcript Sequence Number=SeqID_65267
  Gene Ontology: Mol. function=endonuclease activity
  Homolog annotation: Hit_ID=B6SJQ2; Match level="QueryCoverage=84%, HitCoverage=9%, E-value=4e-25, Identity=88%"; Hit description=CCR4 -NOT transcription complex subunit 6
KYEVEFNKAAQSLTDAIIPAAQKRVALSRLIKDNIALIAVLEAKFGNHGAENPGKRQLLCVVRELVFFFWCV

SEQ ID NO: 131242 - protein, 130 aa, Setaria italica
  misc_feature (2)..(2): Xaa can be any naturally occurring amino acid
  misc_feature (90)..(90): Xaa can be any naturally occurring amino acid
  Transcript Sequence Number=SeqID_65268
  Gene Ontology: Mol. function=endonuclease activity; Cellular component=cytoplasmic mRNA processing body; Biological process =nuclear-transcribed mRNA catabolic process, deadenylation-dependent decay
  Homolog annotation: Hit_ID=B6SJQ2; Match level="QueryCoverage=100%, HitCoverage=22%, E-value=2e-62, Identity=82%"; Hit description=CCR4 -NOT transcription complex subunit 6
SXVDPSTTPTPRRLIPVNAADAMGHFDLDNRTTSFGTFTVLSYNILADTYATSDTYSYCPTWALSWAYRRQNLLREIIGYHADIICLQEXLDKHGYQALYKKRTTEVYAGSPQAIDGCATFFRRDRFSTI

SEQ ID NO: 131243 - protein, 70 aa, Setaria italica
  Transcript Sequence Number=SeqID_65269
YLHIQKGFWNLHSHQTSSSLLETFCSRFALMLFIWGPMSRAIWMDPDVDDGFTRLITFRLLGHAHGYRDL

SEQ ID NO: 131244 - protein, 49 aa, Setaria italica
  misc_feature (41)..(41): Xaa can be any naturally occurring amino acid
  Transcript Sequence Number=SeqID_65270
  Homolog annotation: Hit_ID=B6SJQ2; Match level="QueryCoverage=65%, HitCoverage=5%, E-value=7e-10, Identity=96%"; Hit description=CCR4 -NOT transcription complex subunit 6
MPCGSHLFLELFGYAKQANTHINIHHDLKDVKLWQIHTLLXKGLEKIAV

SEQ ID NO: 131245 - protein, 54 aa, Setaria italica
  Transcript Sequence Number=SeqID_65271
QLMHSTELHNQHTTCKNIGYVPSYYLQDRIFLTQRKKIRQNKIKGNNGSAAGST

SEQ ID NO: 131246 - protein, 78 aa, Setaria italica
  Transcript Sequence Number=SeqID_65272
  Subcellular localization annotation: CTP_CleavageSite=29; ConfidenceScore=5.13e-01
NVISLVNPSSTSGSIHIARDMGPKMKSMRANLEQNCLPRSKHPRSRLLLWKVPRRFWNVLETAGRGLEMIVRVLGFAL

SEQ ID NO: 131247 - protein, 60 aa, Setaria italica
  misc_feature (25)..(25): Xaa can be any naturally occurring amino acid
  Transcript Sequence Number=SeqID_65273
  Gene Ontology: Mol. function=endonuclease activity
  Homolog annotation: Hit_ID=B6SJQ2; Match level="QueryCoverage=91%, HitCoverage=8%, E-value=1e-23, Identity=87%"; Hit description=CCR4 -NOT transcription complex subunit 6
KLILLLKNFLSPELDKHGYQALYKXRTTEVYAGSPQAIDGCATFFRRDRFSHVKKYEVEF

SEQ ID NO: 131248 - protein, 108 aa, Setaria italica
  Transcript Sequence Number=SeqID_65274
  Subcellular localization annotation: CTP_CleavageSite=33; ConfidenceScore=5.82e-01
MQRRTPSRSPERTHIRKSVSPSPPVEKRRSITRTSSRSPLRSVSRSPVRFSRSPHRPARRSPMRSPRRNIRRSLSRSPVRIPRRSVSRSPVRGGRSRRNTKTRKYPST

SEQ ID NO: 131249 - protein, 62 aa, Setaria italica
  Transcript Sequence Number=SeqID_65275
  Gene Ontology: Mol. function=metal ion binding; Cellular component =cytoplasm; Biological process=ubiquitin-dependent protein catabolic process
  Homolog annotation: Hit_ID=Q84JU6; Match level="QueryCoverage=74%, HitCoverage=4%, E-value=1e-10, Identity=60%"; Hit description=E3 ubiquitin-protein ligase HOS1
HYITDVCLDDNAVSSDPLLAFLLDEVVIKDWCKRAVNALISEIGMICIQQCLIVLDSVTYFF

SEQ ID NO: 131250 - protein, 105 aa, Setaria italica
  Transcript Sequence Number=SeqID_65276
GMEDLARTASEGRRRPAGAGVAEERRAAVLEQAAAAENVEAAQQSTAQEAHVKSRHSENFLANTAQKETKRNRAVYVLGDELIRQLNSTTLFADARMRKPLVGST

SEQ ID NO: 131251 - protein, 104 aa, Setaria italica
  misc_feature (53)..(53): Xaa can be any naturally occurring amino acid
  Transcript Sequence Number=SeqID_65277
  Subcellular localization annotation: CTP_CleavageSite=78; ConfidenceScore=5.14e-01
ITVVLAADTRKRPEDMRRRMGPRGYSDHEGRRPSRRGRSRSRSYSRSRSPRPXRGRARSRSYSPAPRRRDDYSASPARAKEEHRRTSKQPKEHDGDKKRRSYTP

SEQ ID NO: 131252 - protein, 34 aa, Setaria italica
  Transcript Sequence Number=SeqID_65278
  Homolog annotation: Hit_ID=B6TB81; Match level="QueryCoverage=100%, HitCoverage=12%, E-value=2e-09, Identity=88%"; Hit description=SR repressor protein
LRCRPEELRVPFERFGPVRDVYLPRDYHTGIVFG

SEQ ID NO: 131253 - protein, 30 aa, Setaria italica
  Transcript Sequence Number=SeqID_65279
DAYDASEAQYHMNRQMFSGREITVVLAADT

SEQ ID NO: 131254 - protein, 58 aa, Setaria italica
  Transcript Sequence Number=SeqID_65280
AKVLLAHANLNEDVDGLEFILPSGLHEMPSWTTAATTNVFTDNTHEIEGKMQNITQGT

SEQ ID NO: 131255 - protein, 78 aa, Setaria italica
  Transcript Sequence Number=SeqID_65281
  Gene Ontology: Mol. function=nucleoside-triphosphatase activity
  Homolog annotation: Hit_ID=O81047; Match level="QueryCoverage=75%, HitCoverage=9%, E-value=2e-19, Identity=76%"; Hit description =Putative helicase
FGTHDVVALKPNKADAGSASLGQGVVYRLKDSSITVAFDDIPEDGLNSPLRLEKLANEVLPFVFCFSMIYVNHSIFSS

SEQ ID NO: 131256 - protein, 95 aa, Setaria italica
  misc_feature (57)..(57): Xaa can be any naturally occurring amino acid
  Transcript Sequence Number=SeqID_65282
RFHQEGKIQNTSAMSWLNLLNRNADSLKHEHVTKLVHELSNFVSSRSSSDNISLYQXIQSSCTAFLSGATVVEKAPSGQQMACWSLLPISINSTY

SEQ ID NO: 131257 - protein, 83 aa, Setaria italica
  Transcript Sequence Number=SeqID_65283
  Gene Ontology: Cellular component=microtubule; Biological process =microtubule cytoskeleton organization and biogenesis
  Homolog annotation: Hit_ID=B4FTU1; Match level="QueryCoverage=74%, HitCoverage=11%, E-value=5e-23, Identity=85%"; Hit description=ABI3 -interacting protein 2
MLSAGDNLVLDGKKDGDLLGVRRTCLMLMESLGQLQTDDITRFSLEGHMLTTDIKERAKKIAFEWKSKLDSLDIDASNGNCLE

SEQ ID NO: 131258 - protein, 92 aa, Setaria italica
  misc_feature (20)..(20): Xaa can be any naturally occurring amino acid
  Transcript Sequence Number=SeqID_65284
  Gene Ontology: Cellular component=microtubule; Biological process =microtubule cytoskeleton organization and biogenesis
  Homolog annotation: Hit_ID=B4FTU1; Match level="QueryCoverage=86%, HitCoverage=14%, E-value=1e-19, Identity=66%"; Hit description=ABI3 -interacting protein 2
KFISDNRKNLAIIREEIPSXALQKASHPYGLVLDSLEDFYAGDNLVLDGKKDGDLLGVRRTCLMLMESLGQLQTDDITRFYFRKGTTIDLTN

SEQ ID NO: 131259 - protein, 98 aa, Setaria italica
  Transcript Sequence Number=SeqID_65285
  Gene Ontology: Cellular component=microtubule; Biological process =microtubule cytoskeleton organization and biogenesis
  Homolog annotation: Hit_ID=B4FTU1; Match level="QueryCoverage=84%, HitCoverage=15%, E-value=6e-31, Identity=82%"; Hit description=ABI3 -interacting protein 2
MDKALDNLGVKWPKLASEESVRLQVDCAAVKPRSELVSLCEEMNVKGLHKFISDNRKNLAIIREEIPSALQKASHPLLVLGCLVFPLVSTFLFVLWLV

SEQ ID NO: 131260 - protein, 125 aa, Setaria italica
  misc_feature (85)..(85): Xaa can be any naturally occurring amino acid
  misc_feature (97)..(97): Xaa can be any naturally occurring amino acid
  Transcript Sequence Number=SeqID_65286
  Gene Ontology: Mol. function=structural constituent of ribosome; Cellular component=ribonucleoprotein complex; Biological process =translation
  Homolog annotation: Hit_ID=B6UE59; Match level="QueryCoverage=68%, HitCoverage=50%, E-value=5e-23, Identity=72%"; Hit description=40S ribosomal protein S14
  Pfam annotation: Domain name=Ribosomal_S11; Domain location=11-97; Score=56.9; E_value=7.5e-14; Accession=PF00411.11; Description =Ribosomal protein S11
YCKVLRSCIRCIVILFYLYVLSYCLAAQDVAQRCKELGITALHIKLRATGGNKTKTPGPGAQSALRALARSGMKIGRIEDFTPVXPTDSTRRKGGRXGKEAVGVFSRLFAISWRRPSRNWSSVGR

SEQ ID NO: 131261 - protein, 97 aa, Setaria italica
  misc_feature (22)..(22): Xaa can be any naturally occurring amino acid
  Transcript Sequence Number=SeqID_65287
  Gene Ontology: Mol. function=structural constituent of ribosome; Cellular component=cytosolic small ribosomal subunit; Biological process=translation
  Homolog annotation: Hit_ID=Q9SIH0; Match level="QueryCoverage=84%, HitCoverage=54%, E-value=5e-27, Identity=76%"; Hit description=40S ribosomal protein S14-1
  Pfam annotation: Domain name=Ribosomal_S11; Domain location=1-89; Score=111.6; E_value=2.6e-30; Accession=PF00411.11; Description =Ribosomal protein S11
MKVKADRDESSPYAAMLAATKXVAQRCKELGITALHIKLRATGGNKTKTPGPGAQSALRALARSGMKIGRIEDFTPVPTDSTRRKGGRRGRRLVGVF

SEQ ID NO: 131262 - protein, 62 aa, Setaria italica
  misc_feature (7)..(7): Xaa can be any naturally occurring amino acid
  Transcript Sequence Number=SeqID_65288
  Subcellular localization annotation: CTP_CleavageSite=23; ConfidenceScore=5.08e-01
MANSREXRLQPPSPPTTLSASAVSGHRGNILNAPDFHARTSKSPESRLSLRHATGIGKAHRG

SEQ ID NO: 131263 - protein, 70 aa, Setaria italica
  misc_feature (15)..(15): Xaa can be any naturally occurring amino acid
  misc_feature (56)..(56): Xaa can be any naturally occurring amino acid
  Transcript Sequence Number=SeqID_65289
  Gene Ontology: Mol. function=structural constituent of ribosome; Cellular component=ribonucleoprotein complex; Biological process =translation
  Homolog annotation: Hit_ID=Q9SIH0; Match level="QueryCoverage=100%, HitCoverage=45%, E-value=2e-19, Identity=74%"; Hit description=40S ribosomal protein S14-1
  Pfam annotation: Domain name=Ribosomal_S11; Domain location=1-70; Score=22.1; E_value=8.4e-07; Accession=PF00411.11; Description =Ribosomal protein S11
LVRITGGMKVKADRXDCNSSPYAAMLAAQDVAQRCKELGITALHIKLRATGGNKTXTPGPGAQSALRALA

SEQ ID NO: 131264 - protein, 67 aa, Setaria italica
  Transcript Sequence Number=SeqID_65290
  Gene Ontology: Mol. function=structural constituent of ribosome; Cellular component=cytosolic small ribosomal subunit; Biological process=translation
  Homolog annotation: Hit_ID=P13471; Match level="QueryCoverage=73%, HitCoverage=32%, E-value=4e-11, Identity=75%"; Hit description=40S ribosomal protein S14
  Pfam annotation: Domain name=Ribosomal_S11; Domain location=14-67; Score=-11.9; E_value=0.00032; Accession=PF00411.11; Description =Ribosomal protein S11
KVLRSCIRCICNSIHLTLAMLAAQDVAQRCKELGITALHIKLRATGGNKTKTPGPGAQSALRALARS

SEQ ID NO: 131265 - protein, 70 aa, Setaria italica
  misc_feature (12)..(12): Xaa can be any naturally occurring amino acid
  misc_feature (22)..(22): Xaa can be any naturally occurring amino acid
  Transcript Sequence Number=SeqID_65291
  Gene Ontology: Mol. function=structural constituent of ribosome; Cellular component=cytosolic small ribosomal subunit; Biological process=translation
  Homolog annotation: Hit_ID=P13471; Match level="QueryCoverage=100%, HitCoverage=45%, E-value=5e-21, Identity=80%"; Hit description=40S ribosomal protein S14
  Pfam annotation: Domain name=Ribosomal_S11; Domain location=1-70; Score=39.6; E_value=1.2e-08; Accession=PF00411.11; Description =Ribosomal protein S11
MKVKADRDESSXPYAAMLAAQXVAQRCKELGITALHIKLRATGGNKTKTPGPGAQSALRALARSGMKIGR

SEQ ID NO: 131266 - protein, 61 aa, Setaria italica
  Transcript Sequence Number=SeqID_65292
LSPVCLAFPLLRVSADSGAKGDILLLGLPGLPLRHGCVERRVTGAERAWCGRSRARRRCLR

SEQ ID NO: 131267 - protein, 111 aa, Setaria italica
  Transcript Sequence Number=SeqID_65293
LQNVEINELQEKVLRLEQQLSIKADIPPEQETNYTQQETIDLKSKLQSKVLLLILALSVFFQLNFFPCILVTVFCNFFHFVFCTLAQYTYLYNLLWYSLQYRIAMIRFTDL

SEQ ID NO: 131268 - protein, 60 aa, Setaria italica
  Transcript Sequence Number=SeqID_65294
  Gene Ontology: Mol. function=microtubule motor activity; Cellular component=microtubule associated complex; Biological process =microtubule-based movement
  Homolog annotation: Hit_ID=B8Q899; Match level="QueryCoverage=68%, HitCoverage=8%, E-value=1e-13, Identity=85%"; Hit description=SKIP interacting protein 13
QMDLLIEQIKMLAGEVAFGTSSLKRSIEQSIDDPEGTKDQVFPSLSFFSFLPFHQYQSSD

SEQ ID NO: 131269 - protein, 67 aa, Setaria italica
  Transcript Sequence Number=SeqID_65295
  Gene Ontology: Mol. function=microtubule motor activity; Cellular component=microtubule associated complex; Biological process =microtubule-based movement
  Homolog annotation: Hit_ID=B8Q899; Match level="QueryCoverage=94%, HitCoverage=13%, E-value=9e-24, Identity=85%"; Hit description=SKIP interacting protein 13
MWVLVAKLKRGALGISDLNVDDRSVNLADITNGTKENKVDKNFALVEKQISDDTVKLTTEEHRSTGV

SEQ ID NO: 131270 - protein, 44 aa, Setaria italica
  Transcript Sequence Number=SeqID_65296
EFDHCITIPSVKIFSVLSSVDLNIFLFKGHWQAQRREGYTYTLS

SEQ ID NO: 131271 - protein, 87 aa, Setaria italica
  misc_feature (65)..(65): Xaa can be any naturally occurring amino acid
  Transcript Sequence Number=SeqID_65297
  Gene Ontology: Mol. function=microtubule motor activity; Cellular component=microtubule associated complex; Biological process =microtubule-based movement
  Homolog annotation: Hit_ID=Q7XCW8; Match level="QueryCoverage=54%, HitCoverage=4%, E-value=2e-17, Identity=87%"; Hit description =Kinesin heavy chain, putative, expressed
TWLGRRRSAAGRRARRGEGWGGGGAGGGGEIGSERAGREWWCPDGDRLVRCEYNPATAYAYDRVXFGPSTTTEAVYDVAARPVVKGA

SEQ ID NO: 131272 - protein, 30 aa, Setaria italica
  Transcript Sequence Number=SeqID_65298
YLSRTIEVGADRFKVPDILFNPSLSQTIPG

SEQ ID NO: 131273 - protein, 51 aa, Setaria italica
  Transcript Sequence Number=SeqID_65299
  Gene Ontology: Mol. function=structural molecule activity; Cellular component=cytoskeleton
  Homolog annotation: Hit_ID=Q6ZJW9; Match level="QueryCoverage=94%, HitCoverage=10%, E-value=4e-20, Identity=95%"; Hit description=Actin- related protein 4
YYLSFDEVAYANVPTTSYELPDGQTIEVGADRFKVPDILFNPSLSQTIPGV

SEQ ID NO: 131274 - protein, 42 aa, Setaria italica
  Transcript Sequence Number=SeqID_65300
ARVKVMASGNSVERRFSVWIGGSILASLRVRYQDKIVGYYQK

SEQ ID NO: 131275 - protein, 66 aa, Setaria italica
  Transcript Sequence Number=SeqID_65301
  Gene Ontology: Mol. function=hydrolase activity
  Homolog annotation: Hit_ID=B9RGQ2; Match level="QueryCoverage=60%, HitCoverage=6%, E-value=6e-10, Identity=70%"; Hit description=Nudix hydrolase, putative
IRFILHSAHGVLYNFLVVSSLVFTIPKATFEAFVGIRDDTATSQVKLFGDQLQDLERNLPMDNIFK

SEQ ID NO: 131276 - protein, 97 aa, Setaria italica
  misc_feature (33)..(33): Xaa can be any naturally occurring amino acid
  Transcript Sequence Number=SeqID_65302
  Gene Ontology: Mol. function=hydrolase activity; Cellular component =cytosol
  Homolog annotation: Hit_ID=B9RGQ2; Match level="QueryCoverage=49%, HitCoverage=7%, E-value=8e-11, Identity=70%"; Hit description=Nudix hydrolase, putative
LEKAAELLEKASVCSDSPSLKNLLRTKANAFLXNDYYESDIAWMELVSIVIFFPFLCSYPYNNAPLVLILLLHGKLCWLLLCLLSSITAIMVWNCRQ

SEQ ID NO: 131277 - protein, 106 aa, Setaria italica
  misc_feature (15)..(15): Xaa can be any naturally occurring amino acid
  Transcript Sequence Number=SeqID_65303
  Gene Ontology: Mol. function=hydrolase activity; Cellular component =cytosol
  Homolog annotation: Hit_ID=B9RGQ2; Match level="QueryCoverage=86%, HitCoverage=14%, E-value=7e-39, Identity=76%"; Hit description=Nudix hydrolase, putative
QALLVQDVKGPQTIXAFNLPNDERIVNERGTAMVMLKNVSEAKFKHILKPIADACIREEQKEYVDFEPYYTHIVCHECCHGIGPHSITLRSGKKSTVRLVCTKTTI

SEQ ID NO: 131278 - protein, 57 aa, Setaria italica
  misc_feature (31)..(31): Xaa can be any naturally occurring amino acid
  Transcript Sequence Number=SeqID_65304
  Gene Ontology: Mol. function=hydrolase activity; Cellular component =cytosol
  Homolog annotation: Hit_ID=B9RGQ2; Match level="QueryCoverage=87%, HitCoverage=8%, E-value=6e-17, Identity=80%"; Hit description=Nudix hydrolase, putative
MQDSNLDVTIGPYETYEDALFSYKATFEAFXGIRDDTATSQVKLFGDQLQVISLSFL

SEQ ID NO: 131279 - protein, 55 aa, Setaria italica
  misc_feature (26)..(26): Xaa can be any naturally occurring amino acid
  misc_feature (28)..(28): Xaa can be any naturally occurring amino acid
  Transcript Sequence Number=SeqID_65305
  Gene Ontology: Mol. function=protein serine/threonine kinase activity; Biological process=protein amino acid phosphorylation
  Homolog annotation: Hit_ID=Q656X4; Match level="QueryCoverage=81%, HitCoverage=7%, E-value=4e-14, Identity=80%"; Hit description =Putative receptor serine/threonine kinase PR5K
PEWLTSQITEKADIYSFGVVVMEMIXGXNLDTSQSEESIHLITLLSNAEEEGGDG

SEQ ID NO: 131280 - protein, 66 aa, Setaria italica
  Transcript Sequence Number=SeqID_65306
PNSIRGPFRAPHPSPPSSSALLSSDHLPLGHEVKLESKLLPSTYSLHGSCSYPESRQLEPAQAHTH

SEQ ID NO: 131281 - protein, 76 aa, Setaria italica
  Transcript Sequence Number=SeqID_65307
WLGLFVLWSCPFLSCLLPPGRLLLREDRRRIQDDSKWDNLMEGPEPNWAVAFLCFVIVSFRYELPAMRLLVVLCRC

SEQ ID NO: 131282 - protein, 108 aa, Setaria italica
  Transcript Sequence Number=SeqID_65308
  Gene Ontology: Mol. function=ubiquitin-protein ligase activity; Cellular component=ubiquitin ligase complex; Biological process =ubiquitin-dependent protein catabolic process
  Homolog annotation: Hit_ID=Q0IMG9; Match level="QueryCoverage=89%, HitCoverage=13%, E-value=1e-34, Identity=68%"; Hit description =Protein spotted leaf 11
  Pfam annotation: Domain name=U-box; Domain location=1-70; Score=69.7; E_value=1.1e-17; Accession=PF04564.7; Description=U-box domain
FRCPISLDLMKDPVIVATGQTYERGCIERWLEAGHDTCPKTQQKLPNKSLTPNYVLRSLITQWCEANGIEPPKRSAQLSNAPKPCTAAEHNNVVELLQGFGMRVSEER

SEQ ID NO: 131283 - protein, 66 aa, Setaria italica
  Transcript Sequence Number=SeqID_65309
VKSIQLLERMNRFLKQQSQAQAQAEAMAQVHAQAQAQALALVEAQAQADMQAERSLLPTSSSHIPD

SEQ ID NO: 131284 - protein, 102 aa, Setaria italica
  misc_feature (74)..(74): Xaa can be any naturally occurring amino acid
  Transcript Sequence Number=SeqID_65310
  Gene Ontology: Mol. function=oxidoreductase activity; Biological process=oxidation reduction
  Homolog annotation: Hit_ID=B6SUN2; Match level="QueryCoverage=69%, HitCoverage=18%, E-value=2e-26, Identity=77%"; Hit description=1 -aminocyclopropane-1-carboxylate oxidase
MVTRCSTLGYLSLDIICKRSPTLMTSAPGTGLTMNTHKEPRVSIAVFFSPGKRGDSNLYGPLPGLVSSENPPKXKNFTMEKFYGTFFSRDLASKALIDHFKM

SEQ ID NO: 131285 - protein, 138 aa, Setaria italica
  misc_feature (35)..(35): Xaa can be any naturally occurring amino acid
  misc_feature (56)..(56): Xaa can be any naturally occurring amino acid
  Transcript Sequence Number=SeqID_65311
  Gene Ontology: Mol. function=tRNA-intron endonuclease activity; Cellular component=tRNA-intron endonuclease complex; Biological process=tRNA processing
  Homolog annotation: Hit_ID=Q5Z6B1; Match level="QueryCoverage=89%, HitCoverage=42%, E-value=9e-46, Identity=70%"; Hit description =Probable tRNA-splicing endonuclease subunit Sen2
  Pfam annotation: Domain name=tRNA_int_endo; Domain location=69-127; Score=44.1; E_value=5.6e-10; Accession=PF01974.9; Description=tRNA intron endonuclease, catalytic C-terminal domain
  Pfam annotation: Domain name=tRNA_int_endo_N; Domain location=2-59; Score=-5.5; E_value=0.059; Accession=PF02778.6; Description=tRNA intron endonuclease, N-terminal domain
  Pfam module annotation: Pfam domain module=tRNA_int_endo::tRNA_int _endo_N; Domain location=69-127::2-59
PHQAALLNRAAFGQAVGNAGEERQWFQLGPEEVFXLCHALRCIAVDTENKKQMGEXDLWDLLNSISEPFPEMYKAYEHLRFKNWVVRSGKQYGADFVAYRHHPALVHSEFAVTVVPEARSLESRLDHTCKGPHLVPNA

SEQ ID NO: 131286 - protein, 56 aa, Setaria italica
  Transcript Sequence Number=SeqID_65312
LLLIHIIRWIVSRGKATSKRHTVLAKASAQTSNTEQELGTRHRTNHRRHSTDQGKP

SEQ ID NO: 131287 - protein, 86 aa, Setaria italica
  Transcript Sequence Number=SeqID_65313
TISCSVHQQPVVVLLCNDDGSNVNFLDLFLRFHFFYTWWVVQNAKVICVQCTFLYACSKKRGVLHFYCKSVEVSVRVLLYDLPLTD

SEQ ID NO: 131288 - protein, 121 aa, Setaria italica
  misc_feature (94)..(94): Xaa can be any naturally occurring amino acid
  misc_feature (113)..(113): Xaa can be any naturally occurring amino acid
  misc_feature (117)..(117): Xaa can be any naturally occurring amino acid
  Transcript Sequence Number=SeqID_65314
  Gene Ontology: Mol. function=ATP-dependent helicase activity; Cellular component=nucleus; Biological process=nuclear-transcribed mRNA catabolic process, nonsense-mediated decay
  Homolog annotation: Hit_ID=Q5QMN3; Match level="QueryCoverage=86%, HitCoverage=21%, E-value=3e-50, Identity=91%"; Hit description=DEAD -box ATP-dependent RNA helicase 20
LPSKSSLGRILGTNTRRKHFNWSATWPKEVEQLARNFLFDPYKVTIGSEELKANHAIVQHVEILSESQKYNKLVNLLEDIMDGSRILIFMDTKXKGCDQITRQLRMDGWPALXIHGXKSQA

SEQ ID NO: 131289 - protein, 64 aa, Setaria italica
  Transcript Sequence Number=SeqID_65315
  Gene Ontology: Mol. function=ATP-dependent helicase activity; Cellular component=nucleus; Biological process=nuclear-transcribed mRNA catabolic process, nonsense-mediated decay
  Homolog annotation: Hit_ID=Q5QMN3; Match level="QueryCoverage=93%, HitCoverage=12%, E-value=6e-26, Identity=95%"; Hit description=DEAD -box ATP-dependent RNA helicase 20
CLRVHFSEYVLQEITKAGFVEPTPIQSQGWPMALRGRDLIGIAETGSGKTLAYLLPAIVHVNCF

SEQ ID NO: 131290 - protein, 65 aa, Setaria italica
  Transcript Sequence Number=SeqID_65316
  Homolog annotation: Hit_ID=Q1SKW8; Match level="QueryCoverage=64%, HitCoverage=6%, E-value=4e-13, Identity=80%"; Hit description =Membrane attack complex component/perforin/complement C9
MPSLLHLLNGISNLLQVDAGKRPVTGLRLFLEGRKSNKLAIHLQHLCSLPQIIQLEDDPYNHQTT

SEQ ID NO: 131291 - protein, 44 aa, Setaria italica
  Transcript Sequence Number=SeqID_65317
  Homolog annotation: Hit_ID=Q1SKW8; Match level="QueryCoverage=86%, HitCoverage=6%, E-value=7e-14, Identity=92%"; Hit description =Membrane attack complex component/perforin/complement C9
DNIGLCLNRVPGSGFLNHAINLYLRHKPPIEELHQFLEFQLPRQ

SEQ ID NO: 131292 - protein, 37 aa, Setaria italica
  Transcript Sequence Number=SeqID_65318
DYNTSSTNGEVQDIVLPGGVTVAGVTKSIKCDKGGAD

SEQ ID NO: 131293 - protein, 89 aa, Setaria italica
  Transcript Sequence Number=SeqID_65319
IEIECHSVEREKKEACAVALVLGFMIASIEMFYTYAGCYVRTLKIFNMIRSKHQHLQVRQLYLWVVPRVMSIAWKILMESLWTLMCIVF

SEQ ID NO: 131294 - protein, 51 aa, Setaria italica
  Transcript Sequence Number=SeqID_65320
  Subcellular localization annotation: CTP_CleavageSite=35; ConfidenceScore=5.08e-01
SFIAFQSVASATIFSFYSTYYAASLLGCTLNILTNGSTTSRFLFSGQPYQT

SEQ ID NO: 131295 - protein, 67 aa, Setaria italica
  Transcript Sequence Number=SeqID_65321
  Gene Ontology: Mol. function=nucleotide binding; Biological process =defense response
  Homolog annotation: Hit_ID=Q9ZNV6; Match level="QueryCoverage=95%, HitCoverage=4%, E-value=1e-15, Identity=64%"; Hit description=Pib
ISDKMRLLRVLDLEGIDDYQKYYIQSHQLDHIWKLLHLKYLSLRGCFRIYLLPDSLGNLRQLQVLDV

SEQ ID NO: 131296 - protein, 110 aa, Setaria italica
  Transcript Sequence Number=SeqID_65322
FFSCTASIAAAVKTTSTMVPHLGLLNSHSKMSIVEVPSPKDSEIVESLLLDLLDPENKAYALSMLPKVILFLLCIFYFFSPLLFTWHNISKVIGIELFQAQIAYDGMIWS

SEQ ID NO: 131297 - protein, 92 aa, Setaria italica
  misc_feature (22)..(22): Xaa can be any naturally occurring amino acid
  misc_feature (76)..(76): Xaa can be any naturally occurring amino acid
  Transcript Sequence Number=SeqID_65323
  Gene Ontology: Mol. function=binding; Cellular component=nucleus
  Homolog annotation: Hit_ID=C5KN60; Match level="QueryCoverage=97%, HitCoverage=27%, E-value=2e-28, Identity=70%"; Hit description=Cell differentiation protein rcd1, putative
  Pfam annotation: Domain name=Rcd1; Domain location=2-92; Score=-76.7; E_value=0.044; Accession=PF04078.5; Description=Cell differentiation family, Rcd1-like
  Subcellular localization annotation: CTP_CleavageSite=27; ConfidenceScore=5.23e-01
DNSFGTMVVLLQEIMSVYPTLXSPPTLSASVSNRACNVLALLQSVASHPETRDPFLKAEITEYLYPLLNTTIDTRXFEYLRLTTLGVFGALV

SEQ ID NO: 131298 - protein, 47 aa, Setaria italica
  Transcript Sequence Number=SeqID_65324
RLLTFSSENSTILNAAPWLMWFSQLTWRLPLPESRHIDDVTRPLRTA

SEQ ID NO: 131299 - protein, 34 aa, Setaria italica
  Transcript Sequence Number=SeqID_65325
CRCYLGRWTGRLFGLDARFVAGNMLQQPGGGLFS

SEQ ID NO: 131300 - protein, 88 aa, Setaria italica
  misc_feature (82)..(82): Xaa can be any naturally occurring amino acid
  Transcript Sequence Number=SeqID_65326
  Gene Ontology: Mol. function=nucleotide binding; Cellular component =plasma membrane; Biological process=small GTPase mediated signal transduction
  Homolog annotation: Hit_ID=P40392; Match level="QueryCoverage=100%, HitCoverage=43%, E-value=3e-32, Identity=76%"; Hit description=Ras -related protein RIC1
  Pfam annotation: Domain name=Ras; Domain location=2-88; Score=4.0; E _value=1.2e-09; Accession=PF00071.14; Description=Ras family
VSSLIWFLFYFLFVVIDVTDQESFNNVKQWLNEIDRYASDNVNKLLVGNKCDLTANKVVSYEAGKALADEMGIPFMETSAKXATNVEQ

SEQ ID NO: 131301 - protein, 80 aa, Setaria italica
  Transcript Sequence Number=SeqID_65327
  Gene Ontology: Mol. function=serine-type carboxypeptidase activity; Cellular component=extracellular region; Biological process =proteolysis
  Homolog annotation: Hit_ID=B9SJJ0; Match level="QueryCoverage=95%, HitCoverage=11%, E-value=3e-16, Identity=57%"; Hit description =Serine carboxypeptidase, putative
NNNAASDMHIFLLKWYEKFPEYKSRDLFLTGESYAGTSTYFTHYVLCEWFLTNNMACRHYIPQLTNVLISHNKESKGFKF

SEQ ID NO: 131302 - protein, 130 aa, Setaria italica
  Transcript Sequence Number=SeqID_65328
PIEFQSNFIIHTKLVFGPNHLSQPITPNIVHNFTDVQAKITEGTQQIVCTSLIDKSMTYTSHQTSPFPCTELLALPGMNNRNNLTSKSELQLSFARFVGMLQVGKARSRPWLDIITNTFKAPFFDVVEQG

SEQ ID NO: 131303 - protein, 121 aa, Setaria italica
  misc_feature (80)..(80): Xaa can be any naturally occurring amino acid
  Transcript Sequence Number=SeqID_65329
  Gene Ontology: Cellular component=chloroplast
  Homolog annotation: Hit_ID=B9T3S4; Match level="QueryCoverage=80%, HitCoverage=14%, E-value=4e-10, Identity=32%"; Hit description =Pentatricopeptide repeat-containing protein, putative
  Pfam annotation: Domain name=PPR; Domain location=30-64; Score=24.7; E_value=0.00038; Accession=PF01535.12; Description=PPR repeat
  Pfam annotation: Domain name=PPR; Domain location=65-98; Score=21.0; E_value=0.0048; Accession=PF01535.12; Description=PPR repeat
  Pfam module annotation: Pfam domain module=PPR::PPR; Domain location =30-64::65-98
RQVRYEGSVVAGVEVALEEITKRHLKPNVGTYNLRMALLCARGRSFEAQELLDAMGAKGVPPNRAIFNTVIKGLCNEGEXGAAMALFREMREVPRQNGRGVSPNFETYIMLLEALVNKSVF

SEQ ID NO: 131304 - protein, 42 aa, Setaria italica
  Transcript Sequence Number=SeqID_65330
MAVGPGGGLSIERNLFCQSRVKESTRQDKYCRADPVCQTVHT

SEQ ID NO: 131305 - protein, 78 aa, Setaria italica
  Transcript Sequence Number=SeqID_65331
  Gene Ontology: Mol. function=transferase activity, transferring acyl groups, acyl groups converted into alkyl on transfer; Cellular component=mitochondrial matrix; Biological process=cellular carbohydrate metabolic process
  Homolog annotation: Hit_ID=Q2R339; Match level="QueryCoverage=79%, HitCoverage=13%, E-value=2e-27, Identity=96%"; Hit description =Citrate synthase
KVGNVSAHTGHLVGSALSDPYLSFAAALNGLAGPLHGLANQEVLLWIKSVIEETGSDVTTDQLQRTNSTKERNKLKRK

SEQ ID NO: 131306 - protein, 60 aa, Setaria italica
  misc_feature (18)..(18): Xaa can be any naturally occurring amino acid
  Transcript Sequence Number=SeqID_65332
  Gene Ontology: Mol. function=transferase activity, transferring acyl groups, acyl groups converted into alkyl on transfer; Cellular component=mitochondrial matrix; Biological process=cellular carbohydrate metabolic process
  Homolog annotation: Hit_ID=Q946X8; Match level="QueryCoverage=88%, HitCoverage=11%, E-value=2e-15, Identity=77%"; Hit description =Citrate synthase
PGFGHGVLRKTDPRYSCXQREFALKHLPEDPLFQLVSKLCNTVLQIIQSGSAKLHCVHQH

SEQ ID NO: 131307 - protein, 79 aa, Setaria italica
  Transcript Sequence Number=SeqID_65333
  Gene Ontology: Mol. function=protein transporter activity; Cellular component=nuclear pore; Biological process=protein import into nucleus, docking
  Homolog annotation: Hit_ID=Q01KY9; Match level="QueryCoverage=100%, HitCoverage=7%, E-value=7e-38, Identity=93%"; Hit description =OSIGBa0137O04.8 protein
AAWVAGQYAHIKFSDQNNFRKAMHCVIAGMRDAELPVRVDSVFALRSFVEACTDLDEIRPILPQLLDEFFKLMSEVENE

SEQ ID NO: 131308 - protein, 96 aa, Setaria italica
  Transcript Sequence Number=SeqID_65334
  Gene Ontology: Mol. function=binding; Cellular component=nuclear pore; Biological process=protein import into nucleus, docking
  Homolog annotation: Hit_ID=Q7XTA4; Match level="QueryCoverage=83%, HitCoverage=9%, E-value=1e-36, Identity=90%"; Hit description =OSJNBa0008A08.6 protein
ATNSSQSTILESISSLPHLYMQIEPTLLPILRKMLTSDGQDVYEEVLEIVSYMTFYSPSISLDMWSLWPLIMEALNDWAIDFFENILVPLDNYVSR

SEQ ID NO: 131309 - protein, 89 aa, Setaria italica
  Transcript Sequence Number=SeqID_65335
  Gene Ontology: Mol. function=protein transporter activity; Cellular component=nuclear pore; Biological process=protein import into nucleus, docking
  Homolog annotation: Hit_ID=Q01KY9; Match level="QueryCoverage=97%, HitCoverage=9%, E-value=1e-36, Identity=77%"; Hit description =OSIGBa0137O04.8 protein
TCKDPNYQHSLWKALSSIMTDQNMEDSDIVPAPKLIEVFFQNCKGQVDHWVEPYLRLTIDRLRRTEKPYLKSLLLQVVRNTTLAFLHLF

SEQ ID NO: 131310 - protein, 46 aa, Setaria italica
  Transcript Sequence Number=SeqID_65336
MKLRSDSSGGGDDHWTTAAAAAATGGGGSGEPSKKQRTEEPPSSSR

SEQ ID NO: 131311 - protein, 69 aa, Setaria italica
  misc_feature (57)..(57): Xaa can be any naturally occurring amino acid
  misc_feature (60)..(60): Xaa can be any naturally occurring amino acid
  Transcript Sequence Number=SeqID_65337
  Gene Ontology: Mol. function=DNA binding; Cellular component=nucleus; Biological process=regulation of transcription
  Homolog annotation: Hit_ID=Q4U0D4; Match level="QueryCoverage=95%, HitCoverage=18%, E-value=3e-28, Identity=89%"; Hit description=NAC domain transcription factor
  Pfam annotation: Domain name=NAM; Domain location=2-69; Score=56.8; E_ value=8.1e-14; Accession=PF02365.7; Description=No apical meristem (NAM) protein
LVTFFSPRDRKYPNGARPNRAAGSGYWKATGTDKAILSTPTSENIGVKKALVFYGGXPPXGTKTDWIMH

SEQ ID NO: 131312 - protein, 59 aa, Setaria italica
  Transcript Sequence Number=SeqID_65338
  Gene Ontology: Mol. function=protein serine/threonine kinase activity; Cellular component=cyclin-dependent protein kinase holoenzyme complex; Biological process=protein amino acid phosphorylation
  Homolog annotation: Hit_ID=Q84YE5; Match level="QueryCoverage=62%, HitCoverage=12%, E-value=6e-12, Identity=83%"; Hit description =Cyclin-dependent kinase-like protein
FSFYFCFVTLWYRAPEVLLGATHYSTGVDMWSVGCIFGTPILLLSIELLIPQFLIVPKI

SEQ ID NO: 131313 - protein, 68 aa, Setaria italica
  Transcript Sequence Number=SeqID_65339
VSIDHLQVATSWIFLLQAHLWVKSGQAAYSPICYKSNCKWFSAVLLYQPLTMRMRSTERMAEAVNRQR

SEQ ID NO: 131314 - protein, 70 aa, Setaria italica
  Transcript Sequence Number=SeqID_65340
LKDALDELERTCLSSTTALPFRLRGRLLEEYFDQNQVSTISSCYEEALRRDPTCSYSMERLIKMHRKGVG

SEQ ID NO: 131315 - protein, 124 aa, Setaria italica
  Transcript Sequence Number=SeqID_65341
NTKNLQSEPYPNPVRRLSHRFQTRICCKDPTFPHKASDFCKGDQQKRSALDEETSRPFAPWLRSEFPSDLWPFNLVKARAFEAPGDKTSPNRRGTGADSQIRSGAGKREGRVGGREVGENQRRR

SEQ ID NO: 131316 - protein, 128 aa, Setaria italica
  misc_feature (15)..(15): Xaa can be any naturally occurring amino acid
  misc_feature (37)..(37): Xaa can be any naturally occurring amino acid
  Transcript Sequence Number=SeqID_65342
  Gene Ontology: Cellular component=plasma membrane; Biological process= ubiquitin-dependent protein catabolic process
  Homolog annotation: Hit_ID=Q69U54; Match level="QueryCoverage=96%, HitCoverage=27%, E-value=4e-48, Identity=75%"; Hit description=Tubby- like F-box protein 12
  Pfam annotation: Domain name=Tub; Domain location=1-125; Score=13.6; E_value=6.6e-11; Accession=PF01167.10; Description=Tub family
AKRNRRTTYTEYIIXMDPKNISRSSNGYVGKMRSNFXGTKFVVYDTQPPYNAGSLVSCGRSSRRISSRRVSPKVPTASYPIAQVNYELNVLGTRGPRRMNCTMHSIPASAMEPEGMVPCQPKQATYLP

SEQ ID NO: 131317 - protein, 74 aa, Setaria italica
  misc_feature (52)..(52): Xaa can be any naturally occurring amino acid
  Transcript Sequence Number=SeqID_65343
  Gene Ontology: Cellular component=plasma membrane
  Homolog annotation: Hit_ID=UPI000182DAC3; Match level="QueryCoverage =100%, HitCoverage=27%, E-value=3e-23, Identity=77%"; Hit description= tub family member
HEQLQCWCLNFRGRVTVASVKNFQLIAAPQLDAVPSESSQQAQSFRSFYSFXASDHDKVILQFGKVAKDMFTMD

SEQ ID NO: 131318 - protein, 156 aa, Setaria italica
  Transcript Sequence Number=SeqID_65344
  Gene Ontology: Mol. function=oxidoreductase activity; Biological process=metabolic process
  Homolog annotation: Hit_ID=Q6YU31; Match level="QueryCoverage=89%, HitCoverage=34%, E-value=2e-44, Identity=58%"; Hit description =Putative monooxygenase 1
LRYHNVWQKQNKTTLNPTRKELRCLKRKDLVEALAKNLPVGTIRFGCHISKNFEDSDCHCTVLSTVDGSTIKARVLIGCDGANSMAAQYLGLGSPSHLPRLVHLGFTSYLHGHPFGTRFLRFAAQDFAVGRMPVNENLVHFFVTRSSPSTPVPCFT

SEQ ID NO: 131319 - protein, 49 aa, Setaria italica
  Transcript Sequence Number=SeqID_65345
TTVAHVKNKGTTPPQILDVTPLIFPECNQVKHHSMLAIYFSVRSCIAPS

SEQ ID NO: 131320 - protein, 96 aa, Setaria italica
  Transcript Sequence Number=SeqID_65346
  Gene Ontology: Mol. function=electron carrier activity; Cellular component=chromoplast; Biological process=oxidation reduction
  Homolog annotation: Hit_ID=B7XC75; Match level="QueryCoverage=50%, HitCoverage=11%, E-value=7e-23, Identity=100%"; Hit description =Phytoene desaturase (Fragment)
CEPCRPLQRSPIEGFYLAGDYTKQKYLASMEGAVLSGKLCAQSIVQDYSRLSLRSQKSLQSEEVPVRLFFSLLVCRSSLLWGLFLYFLFIFLFTFL

SEQ ID NO: 131321 - protein, 44 aa, Setaria italica
  Transcript Sequence Number=SeqID_65347
VSCLSFQVKIQKESEVRLKIIGTRVDATEIVSSLLSTFFTIKAP

SEQ ID NO: 131322 - protein, 99 aa, Setaria italica
  Transcript Sequence Number=SeqID_65348
LHNQRSAWNSCVHEHVPLQGGFRAACLPLHRRSLQRDVLMNTRVPCQAFTINDQHGLRFCSRSHRLVTREFIGLTGNAILWKLRCITTTLLSVPWSVCI

SEQ ID NO: 131323 - protein, 54 aa, Setaria italica
  Transcript Sequence Number=SeqID_65349
VLMNTRVPCQAFTINDQHGLRFCSRSHRLVTREFIGLTGSKVVVMQRSFHKIAL

SEQ ID NO: 131324 - protein, 39 aa, Setaria italica
  Transcript Sequence Number=SeqID_65350
SGTVVDDTTGMKLRGLGKLAPTIEKMKRGFGMHIPEETS

SEQ ID NO: 131325 - protein, 67 aa, Setaria italica
  Transcript Sequence Number=SeqID_65351
QQKDDSNTLEVESITKRYEQENIKGDSGKLLHSDNINGDTPAKNNSLVNECTNSSSRVSSEAEVDEE

SEQ ID NO: 131326 - protein, 100 aa, Setaria italica
  Transcript Sequence Number=SeqID_65352
RRSTKKDHSRSRRRRHRSSDDDSDSEGKVRSRHRKRLRSSDEDAPSDSNNHKHHKSRSLEESSDERAADESEKMRNGKRSHKNSHHHHCHHRHHHHERSS

SEQ ID NO: 131327 - protein, 73 aa, Setaria italica
  misc_feature (47)..(47): Xaa can be any naturally occurring amino acid
  Transcript Sequence Number=SeqID_65353
QAMNEKFNKDEVWGHLGKKSQSRDKDGEIGGDVFDEDLEVEETENPXELAVKPVYVKDDFFELPYYQDGNNFR

SEQ ID NO: 131328 - protein, 44 aa, Setaria italica
  Transcript Sequence Number=SeqID_65354
  Gene Ontology: Mol. function=protein binding; Cellular component =nuclear chromosome; Biological process=chromatin remodeling
  Homolog annotation: Hit_ID=B6T3Y4; Match level="QueryCoverage=86%, HitCoverage=14%, E-value=8e-16, Identity=100%"; Hit description =SWI/SNF-related, matrix-associated, actin-dependent regulator of chromatin subfamily B member 1
TNTVIRDQFLWDIGNLDSDPEEFARTLCDDLNITDPEVGVCLKY

SEQ ID NO: 131329 - protein, 46 aa, Setaria italica
  Transcript Sequence Number=SeqID_65355
  Gene Ontology: Mol. function=protein binding; Cellular component =nuclear chromosome; Biological process=chromatin remodeling
  Homolog annotation: Hit_ID=B6T3Y4; Match level="QueryCoverage=95%, HitCoverage=17%, E-value=4e-18, Identity=97%"; Hit description =SWI/SNF-related, matrix-associated, actin-dependent regulator of chromatin subfamily B member 1
TSVPIRVDIEVDGQRYRDAFTWNPRDPDSEIISFAKRTAKDLKLPA

SEQ ID NO: 131330 - protein, 47 aa, Setaria italica
  Transcript Sequence Number=SeqID_65356
  Homolog annotation: Hit_ID=B6T3Y4; Match level="QueryCoverage=100%, HitCoverage=18%, E-value=2e-16, Identity=89%"; Hit description =SWI/SNF-related, matrix-associated, actin-dependent regulator of chromatin subfamily B member 1
RKRKEWYLYEPVVDVVANEEDGKEEPNNSSRPKKRAEEEKVASLQSL

SEQ ID NO: 131331 - protein, 74 aa, Setaria italica
  Transcript Sequence Number=SeqID_65357
KKRRAEIQRRHNRCSLWWLATFFVWSCGGNLKSLSCFVSLATAVANVPFLGYYLLLFYCLELLCQVVTFSLENS

SEQ ID NO: 131332 - protein, 37 aa, Setaria italica
  Transcript Sequence Number=SeqID_65358
QCCKFTHHFARWITTYEVMGELAPLTFLAPNFVFVCL

SEQ ID NO: 131333 - protein, 75 aa, Setaria italica
  Transcript Sequence Number=SeqID_65359
  Subcellular localization annotation: CTP_CleavageSite=43; ConfidenceScore=5.39e-01
VYFVSLSLSISTSTWTLLCLLLYILLAANLFSALVRPFFSLPLATSSGSTPSSVALGVCFLHAQAQLLLVRRSIC

SEQ ID NO: 131334 - protein, 54 aa, Setaria italica
  Transcript Sequence Number=SeqID_65360
RQRSWCPFHISYAFKSPKSLWWGRPVPFPRLGPGPGLTVWGPGPLTVFPLPPDP

SEQ ID NO: 131335 - protein, 114 aa, Setaria italica
  misc_feature (80)..(80): Xaa can be any naturally occurring amino acid
  misc_feature (88)..(88): Xaa can be any naturally occurring amino acid
  misc_feature (99)..(99): Xaa can be any naturally occurring amino acid
  misc_feature (102)..(102): Xaa can be any naturally occurring amino acid
  Transcript Sequence Number=SeqID_65361
  Gene Ontology: Mol. function=protein binding; Cellular component =clathrin adaptor complex; Biological process=intracellular protein transport
  Homolog annotation: Hit_ID=Q0DJA0; Match level="QueryCoverage=91%, HitCoverage=19%, E-value=4e-43, Identity=83%"; Hit description =Coatomer subunit delta-1
VICKVFTWSAFPKLVGTGKQHTYVETENVRYVYQPIEGLYLLLITNKQSNILEDLDTLRLLSKLVPEYSPSLNEEGICKXAFELIFAXFDEAISLGNKXNVXVQQVKQYCEMGP

SEQ ID NO: 131336 - protein, 114 aa, Setaria italica
  misc_feature (53)..(53): Xaa can be any naturally occurring amino acid
  Transcript Sequence Number=SeqID_65362
  Gene Ontology: Mol. function=protein binding; Cellular component =clathrin adaptor complex; Biological process=intracellular protein transport
  Homolog annotation: Hit_ID=Q0DJA0; Match level="QueryCoverage=68%, HitCoverage=14%, E-value=6e-21, Identity=66%"; Hit description =Coatomer subunit delta-1
VYSDLSDSVLGKQDYISSQNARDNTGLAYDLYLILTASVVSTGRPSTAATAPXKSLGIKLGKTQKTNQFLESLKAEGQVILEDVQPSAVPSRSSALPPSDWRSSMLLKEMDVSI

SEQ ID NO: 131337 - protein, 55 aa, Setaria italica
  Transcript Sequence Number=SeqID_65363
  Gene Ontology: Mol. function=protein binding; Cellular component =clathrin adaptor complex; Biological process=intracellular protein transport
  Homolog annotation: Hit_ID=Q0DJA0; Match level="QueryCoverage=98%, HitCoverage=10%, E-value=1e-20, Identity=92%"; Hit description =Coatomer subunit delta-1
DSFASKPKGGRPSTTATAPGKGLGMKLGKTQKTNQILESLKAEGEVILEDVQTSY

SEQ ID NO: 131338 - protein, 57 aa, Setaria italica
  Transcript Sequence Number=SeqID_65364
FVGLVLIIPVINKAIEDGTLIGFLVSANKLIYYCRNHQIAEMLMFKIWEKVTQLPSP

SEQ ID NO: 131339 - protein, 99 aa, Setaria italica
  misc_feature (63)..(63): Xaa can be any naturally occurring amino acid
  Transcript Sequence Number=SeqID_65365
  Gene Ontology: Mol. function=protein binding; Cellular component =clathrin adaptor complex; Biological process=intracellular protein transport
  Homolog annotation: Hit_ID=Q0DJA0; Match level="QueryCoverage=92%, HitCoverage=17%, E-value=4e-45, Identity=92%"; Hit description =Coatomer subunit delta-1
  Pfam annotation: Domain name=Adap_comp_sub; Domain location=2-99; Score=5.2; E_value=9.6e-06; Accession=PF00928.13; Description =Adaptor complexes medium subunit family
KIGRNTKGMDESSLPLSVNCWPSVSGNETYVNIEYEASEMFDLHNVVISIPLPALREAPSVKXIDGEWKFDSRNSVLEWSILLIDQSNRSGSMEFVFPS

SEQ ID NO: 131340 - protein, 69 aa, Setaria italica
  misc_feature (51)..(51): Xaa can be any naturally occurring amino acid
  Transcript Sequence Number=SeqID_65366
  Gene Ontology: Mol. function=protein binding; Cellular component =clathrin adaptor complex; Biological process=intracellular protein transport
  Homolog annotation: Hit_ID=Q0DJA0; Match level="QueryCoverage=84%, HitCoverage=11%, E-value=4e-24, Identity=89%"; Hit description =Coatomer subunit delta-1
LTDGEWKFDSRNSVLEWSILLIDQSNRSGSMEFVVPPADPSSFFPISVGFXASSTFSDFEGCWNPLRAP

SEQ ID NO: 131341 - protein, 57 aa, Setaria italica
  Transcript Sequence Number=SeqID_65367
  Gene Ontology: Mol. function=protein binding; Cellular component =clathrin adaptor complex; Biological process=intracellular protein transport
  Homolog annotation: Hit_ID=Q0DJA0; Match level="QueryCoverage=85%, HitCoverage=9%, E-value=8e-16, Identity=81%"; Hit description =Coatomer subunit delta-1
SIRRIDHSNTEFPISVGFSASSTFSDLKVAGILPLKEGNPPKFSQRARLLTANYQVV

SEQ ID NO: 131342 - protein, 38 aa, Setaria italica
  Transcript Sequence Number=SeqID_65368
PVDAARLGALLPACAAGNSFAATTVEAAILFADACRGA

SEQ ID NO: 131343 - protein, 35 aa, Setaria italica
  Transcript Sequence Number=SeqID_65369
VVSDLKVTGIHPLKEGNAPKFSQRACLLTANYQVV

SEQ ID NO: 131344 - protein, 66 aa, Setaria italica
  Transcript Sequence Number=SeqID_65370
  Subcellular localization annotation: CTP_CleavageSite=52; ConfidenceScore=5.27e-01
MALLITGIIKTKPTNYAPRQASAKRMAASTVAPPLAASPPAPTDACCVAFLRAVYPSGGSGAGCGA

SEQ ID NO: 131345 - protein, 48 aa, Setaria italica
  Transcript Sequence Number=SeqID_65371
MCCPCFPEYRITNAASLKNCSNSIQTDSRRRIRDIQLNSCAQQLEQYK

SEQ ID NO: 131346 - protein, 83 aa, Setaria italica
  misc_feature (19)..(19): Xaa can be any naturally occurring amino acid
  misc_feature (63)..(63): Xaa can be any naturally occurring amino acid
  misc_feature (75)..(75): Xaa can be any naturally occurring amino acid
  Transcript Sequence Number=SeqID_65372
  Gene Ontology: Mol. function=protein binding; Cellular component =clathrin adaptor complex; Biological process=intracellular protein transport
  Homolog annotation: Hit_ID=Q0DJA0; Match level="QueryCoverage=89%, HitCoverage=14%, E-value=9e-16, Identity=64%"; Hit description =Coatomer subunit delta-1
QRRITTIQIILGPRVIEKXFNDMSISGSRFGSGSGLGGLSADMDSFASKPKGHPSTAATANPXGLGMKLGKTQKXNQFLESLK

SEQ ID NO: 131347 - protein, 75 aa, Setaria italica
  Transcript Sequence Number=SeqID_65373
  Subcellular localization annotation: CTP_CleavageSite=55; ConfidenceScore=5.07e-01
TGATWIGWMTLLSVPAGKADTELANSVIYSSHKQRHDSSAHKTQSSKTQASCLTRSNIRTSNNNPGQGTVTVLSA

SEQ ID NO: 131348 - protein, 43 aa, Setaria italica
  Transcript Sequence Number=SeqID_65374
KYNKQKEFRVGRGLLRNKAACMMHVSRTLCFSNHTAWKGYAKS

SEQ ID NO: 131349 - protein, 56 aa, Setaria italica
  Transcript Sequence Number=SeqID_65375
  Gene Ontology: Mol. function=structural molecule activity; Cellular component=Golgi-associated vesicle; Biological process=intracellular protein transport
  Homolog annotation: Hit_ID=Q8H852; Match level="QueryCoverage=92%, HitCoverage=5%, E-value=1e-14, Identity=75%"; Hit description =Coatomer subunit gamma-1
MRESSTNTQNGDRLFFDFLESSLRHKSDMVMLEAARKITEMDVTSRELAQQLPCSF

SEQ ID NO: 131350 - protein, 55 aa, Setaria italica
  Transcript Sequence Number=SeqID_65376
PSLIAVCARNSGNISMPTDSSSLREYREYYQIAYDVIGSFFAVQITSHMVVCYTV

SEQ ID NO: 131351 - protein, 56 aa, Setaria italica
  Transcript Sequence Number=SeqID_65377
  Gene Ontology: Mol. function=structural molecule activity; Cellular component=Golgi-associated vesicle; Biological process=intracellular protein transport
  Homolog annotation: Hit_ID=Q5YJL1; Match level="QueryCoverage=67%, HitCoverage=13%, E-value=3e-10, Identity=76%"; Hit description =Coatomer protein gamma subunit (Fragment)
NPSEADGGQKTEYAVNVVKHIYDSYVVLQYNCTNTIEEQLLENVSSFKYFLSSCKC

SEQ ID NO: 131352 - protein, 72 aa, Setaria italica
  Transcript Sequence Number=SeqID_65378
  Gene Ontology: Mol. function=hydrogen ion transporting ATP synthase activity, rotational mechanism; Cellular component=proton -transporting two-sector ATPase complex; Biological process=ATP synthesis coupled proton transport
  Homolog annotation: Hit_ID=B4F9I5; Match level="QueryCoverage=87%, HitCoverage=31%, E-value=8e-27, Identity=96%"; Hit description=ATP synthase delta chain
SSWVLSISFHANSIADIVAVEAVPVDQIDPALVQKGLSEFTAKLGSASTDLEKAEAQIGVDVHSALNAALTG

SEQ ID NO: 131353 - protein, 72 aa, Setaria italica
  Transcript Sequence Number=SeqID_65379
  Gene Ontology: Mol. function=hydrogen ion transporting ATP synthase activity, rotational mechanism; Cellular component=proton -transporting two-sector ATPase complex; Biological process=ATP synthesis coupled proton transport
  Homolog annotation: Hit_ID=B4F9I5; Match level="QueryCoverage=52%, HitCoverage=18%, E-value=1e-12, Identity=97%"; Hit description=ATP synthase delta chain
GRARLHQGHGRRGGLDVGSDLLPRLHERGVLGGRRGPTPATIPTKLTVNFVLPYKSEIANKEVDMVIVPATT

SEQ ID NO: 131354 - protein, 51 aa, Setaria italica
  Transcript Sequence Number=SeqID_65380
  Gene Ontology: Mol. function=hydrogen ion transporting ATP synthase activity, rotational mechanism; Cellular component=proton -transporting two-sector ATPase complex; Biological process=ATP synthesis coupled proton transport
  Homolog annotation: Hit_ID=B4F9I5; Match level="QueryCoverage=100%, HitCoverage=34%, E-value=8e-17, Identity=67%"; Hit description=ATP synthase delta chain
MLRHAARRLVSRAAEDSTFVEAWKKVAPNIEPPSTPMSLMQPRPPTPATIP

SEQ ID NO: 131355 - protein, 120 aa, Setaria italica
  Transcript Sequence Number=SeqID_65381
  Gene Ontology: Cellular component=endoplasmic reticulum; Biological process=ER to Golgi vesicle-mediated transport
  Homolog annotation: Hit_ID=A8J304; Match level="QueryCoverage=89%, HitCoverage=57%, E-value=3e-37, Identity=67%"; Hit description =Component of TRAPP complex
  Pfam annotation: Domain name=TRAPP; Domain location=1-117; Score =95.0; E_value=2.7e-25; Accession=PF04051.8; Description=Transport protein particle (TRAPP) component
VNKQLDQMGYNIGTRLVDEFLAKSNVSRCVDFKETADVIAKLGFKMFLGVTATVTNWDAEGTSCSFVLEDNPLVDFVELPDTCQGLQYCNVLSGVIRGALEMVSSSVIAISFRFYPFYSS

SEQ ID NO: 131356 - protein, 144 aa, Setaria italica
  misc_feature (120)..(120): Xaa can be any naturally occurring amino acid
  Transcript Sequence Number=SeqID_65382
  Gene Ontology: Cellular component=endoplasmic reticulum; Biological process=ER to Golgi vesicle-mediated transport
  Homolog annotation: Hit_ID=A8J304; Match level="QueryCoverage=92%, HitCoverage=71%, E-value=2e-47, Identity=66%"; Hit description =Component of TRAPP complex
  Pfam annotation: Domain name=TRAPP; Domain location=1-131; Score =155.2; E_value=1.9e-43; Accession=PF04051.8; Description=Transport protein particle (TRAPP) component
EEVNKQLDQMGYNIGTRLVDEFLAKSNVSRCVDFKETADVIAKLGFKMFLGVTATVTNWDAEGTSCSFVLEDNPLVDFVELPDTCQGLQYCNVLSGVIRGALEMVSMKTEVTWVRDMLRXDDAYEMRVKLIKQVIVLVGVFLRD

SEQ ID NO: 131357 - protein, 43 aa, Setaria italica
  Transcript Sequence Number=SeqID_65383
LPCLGALKICSISTIHTASANAINGLLMCIVEMLHIFHASGHG

SEQ ID NO: 131358 - protein, 79 aa, Setaria italica
  Transcript Sequence Number=SeqID_65384
QLLAGGAESYGVSVDYKRALALPGICRLTAPRCPSPSRPPPGCSRPPPELVISSSFLPHIWFVHYYVIRTYGTNNCFHA

SEQ ID NO: 131359 - protein, 92 aa, Setaria italica
  Transcript Sequence Number=SeqID_65385
  Gene Ontology: Mol. function=zinc ion binding; Cellular component =nucleus; Biological process=transcription initiation
  Homolog annotation: Hit_ID=B9RHP0; Match level="QueryCoverage=79%, HitCoverage=18%, E-value=1e-11, Identity=47%"; Hit description =Protein binding protein, putative
NISELSDEDFVEDECNDLISLVKKGLLERATIAEFEEKVATVHRDIVNHWIERELVILERYIDRAHMKGWHVEMEELLMPATRPSMNAFGEF

SEQ ID NO: 131360 - protein, 126 aa, Setaria italica
  misc_feature (81)..(81): Xaa can be any naturally occurring amino acid
  Transcript Sequence Number=SeqID_65386
  Homolog annotation: Hit_ID=B6TIS5; Match level="QueryCoverage=99%, HitCoverage=30%, E-value=1e-28, Identity=61%"; Hit description =Somatic embryogenesis related protein
EESAKVSDRDQKRNRDAEQRDDPPNAESKSVIDAKNDPSTRRERSPRGTKRFSESREAWRPRPFFQWEYFYDACIQMNCLXTMLDYLHLYVQHNERGSAGQGGRRYDRQASGYGRQRDQKEHDRDK

SEQ ID NO: 131361 - protein, 82 aa, Setaria italica
  Transcript Sequence Number=SeqID_65387
  Gene Ontology: Mol. function=prenyltransferase activity; Cellular component=integral to membrane
  Homolog annotation: Hit_ID=B6UA12; Match level="QueryCoverage=95%, HitCoverage=21%, E-value=4e-28, Identity=74%"; Hit description=1,4 -dihydroxy-2-naphthoate octaprenyltransferase
ICKQVRVGTEAGSRIVAVAIAMLYILLAAFAISKALPSACTVLCGLTLPVGKLVVDYVLKNHEDNAKIFMAKYYCVRLHALF

SEQ ID NO: 131362 - protein, 69 aa, Setaria italica
  Transcript Sequence Number=SeqID_65388
PQKIAHITKKMNLASRLLQRPKIAPQSRVKEKHLQHFVSQLDCISRFYTITSCFTSKTNHAGHLIYSVI

SEQ ID NO: 131363 - protein, 66 aa, Setaria italica
  Transcript Sequence Number=SeqID_65389
  Gene Ontology: Mol. function=phosphoric diester hydrolase activity; Cellular component=nucleus; Biological process=DNA repair
IDRVKKGACGIQLCRNLLSLPEKTWQRLRSTGIFHDAIPQPYARIGHPMHVKVKMLVRNGAVMAFL

SEQ ID NO: 131364 - protein, 59 aa, Setaria italica
  Transcript Sequence Number=SeqID_65390
TCLLSHQPLVLTTTSPQRTESARLHKEPNSNFTNPFLGSEKNLPAPRDTQQGIGKAHRG

SEQ ID NO: 131365 - protein, 79 aa, Setaria italica
  Transcript Sequence Number=SeqID_65391
  Subcellular localization annotation: CTP_CleavageSite=39; ConfidenceScore=5.34e-01
CWSRTTTKRSLLAVHHRRSWHGVSSTLRCCSSMHHPSFRYMHAPPSTANYGSLLLSSSLRLRIPTIINEELRRTKEQRT

SEQ ID NO: 131366 - protein, 80 aa, Setaria italica
  Transcript Sequence Number=SeqID_65392
  Homolog annotation: Hit_ID=Q2R0H3; Match level="QueryCoverage=71%, HitCoverage=33%, E-value=9e-16, Identity=70%"; Hit description =Dirigent-like protein, expressed
GGYNGSTVAVMGRDDIAADVRELAVVGGTGRFRMATGYVLWKTNSMNGPDATVELDVLRSTYGSVGRSLPYFVTSFVRSP

SEQ ID NO: 131367 - protein, 66 aa, Setaria italica
  Transcript Sequence Number=SeqID_65393
  Gene Ontology: Mol. function=transporter activity; Cellular component= intracellular; Biological process=transport
  Homolog annotation: Hit_ID=Q9SI13; Match level="QueryCoverage=89%, HitCoverage=10%, E-value=3e-20, Identity=74%"; Hit description =Putative phosphatidylinositol/phophatidylcholine transfer protein
  Pfam annotation: Domain name=CRAL_TRIO_N; Domain location=5-66; Score= 24.4; E_value=0.00021; Accession=PF03765.7; Description=CRALTRIO, N -terminus
MITMGIVLQAVSSFREVLFARGLLPVKHDDYHMMLRFLKARKFDLEKAAQMWADMLHWRKEFGTDT

SEQ ID NO: 131368 - protein, 93 aa, Setaria italica
  Transcript Sequence Number=SeqID_65394
  Gene Ontology: Mol. function=protein binding
  Homolog annotation: Hit_ID=B6TAC3; Match level="QueryCoverage=87%, HitCoverage=22%, E-value=7e-39, Identity=96%"; Hit description=F -box/LRR-repeat protein 2
SCMKSKRRRWDAVKDGLANLNISQCTALTPPAVQAVCDSFPALHTCPERHSLIISGCLSLTSVHCACALHPHRAGRALMLNHAGRALMLNHAY

SEQ ID NO: 131369 - protein, 61 aa, Setaria italica
  Transcript Sequence Number=SeqID_65395
VQLVLGGIGVHATLHNPHSKIISHSPTIAVSYYTKFQSLCTEKTSSRRGARNHHQANTGCS

SEQ ID NO: 131370 - protein, 120 aa, Setaria italica
  misc_feature (64)..(64): Xaa can be any naturally occurring amino acid
  Transcript Sequence Number=SeqID_65396
VLNAVSLPVLASSLQVAMSRRLGIEEPQLMKIVRAAIHTHTEWFKLQMCKDRFEHFLKIDSLKXVDPPVGSCSMPKDHTDECGNGSSQITTCSSGKVPDEGSSPQVSSEVACDENAILKV

SEQ ID NO: 131371 - protein, 95 aa, Setaria italica
  Transcript Sequence Number=SeqID_65397
NNQNGDCSTSDITRDDSWSRRLRRVRSSTSGQRRRKRWRGRVDDLDYACEALLDVNKHAAYFLDNFGSHSFSCEVLHLQDNFIFLIFHVLVSDVL

SEQ ID NO: 131372 - protein, 41 aa, Setaria italica
  Transcript Sequence Number=SeqID_65398
TTFNYAPVYAILVTLLDKLVHEYCIYRGIVEGGSHVLPGTA

SEQ ID NO: 131373 - protein, 82 aa, Setaria italica
  Transcript Sequence Number=SeqID_65399
  Gene Ontology: Mol. function=phosphoprotein phosphatase activity; Cellular component=cytoplasm; Biological process=negative regulation of tyrosine phosphorylation of Stat3 protein
  Homolog annotation: Hit_ID=O04951; Match level="QueryCoverage=89%, HitCoverage=23%, E-value=3e-35, Identity=91%"; Hit description =Serine/threonine-protein phosphatase PP2A-5 catalytic subunit
VPHEGPMCDLLWSDPDDRCGWGISPRGAGYTFGQDIAQQFNHTNGLSLISRAHQLVMEGFNWCQDKNVVRYLALNCQGTQGI

SEQ ID NO: 131374 - protein, 59 aa, Setaria italica
  misc_feature (44)..(44): Xaa can be any naturally occurring amino acid
  Transcript Sequence Number=SeqID_65400
  Gene Ontology: Mol. function=phosphoprotein phosphatase activity; Cellular component=cytoplasm; Biological process=negative regulation of tyrosine phosphorylation of Stat3 protein
  Homolog annotation: Hit_ID=Q8S7U0; Match level="QueryCoverage=94%, HitCoverage=16%, E-value=1e-26, Identity=87%"; Hit description =Serine/threonine protein phosphatase
MCDLLWSDPDDRCGWGISPRGAGYTFGQDIAQQFNHTNGLSLIXRAHQLVMEGSNWRKF

SEQ ID NO: 131375 - protein, 72 aa, Setaria italica
  Transcript Sequence Number=SeqID_65401
  Gene Ontology: Mol. function=Rab GTPase activator activity; Cellular component=intracellular; Biological process=regulation of Rab GTPase activity
SVLVPVRLHFHDVNVLNEVRERIREQGRVWWALEANKGANWYLQPKISSNEGMISVTSLKLSVLTNTITLRR

SEQ ID NO: 131376 - protein, 130 aa, Setaria italica
  misc_feature (73)..(73): Xaa can be any naturally occurring amino acid
  Transcript Sequence Number=SeqID_65402
  Gene Ontology: Mol. function=sequence-specific DNA binding; Cellular component=intracellular; Biological process=DNA metabolic process
  Homolog annotation: Hit_ID=Q8GT06; Match level="QueryCoverage=100%, HitCoverage=18%, E-value=3e-46, Identity=76%"; Hit description =Endonuclease-like
  Pfam annotation: Domain name=ERCC4; Domain location=7-110; Score =86.9; E_value=6.9e-23; Accession=PF02732.7; Description=ERCC4 domain
LEAYEVVLILDDRENFGSRSRKVDFKKVADNISSQFNISVEVKRLPVGDGIWIARHRKLLTEYVLDFIVERKXNVADLASSIRDNRYKDQKSRLQNCGLRKLIYLVEGDPNTSNGSVASIKTACFTTEIF

SEQ ID NO: 131377 - protein, 87 aa, Setaria italica
  Transcript Sequence Number=SeqID_65403
  Gene Ontology: Mol. function=metal ion binding
  Homolog annotation: Hit_ID=B6SY32; Match level="QueryCoverage=71%, HitCoverage=12%, E-value=2e-26, Identity=91%"; Hit description=C -terminal zinc-finger
VDNMTYEELVALEEQIGDVNTGLTESYIQENLRSTFYVPGAAGVSDQFSELSLENDACIICQVNILPCSHVNDNMLTFLIINQLPGT

SEQ ID NO: 131378 - protein, 118 aa, Setaria italica
  Transcript Sequence Number=SeqID_65404
  Gene Ontology: Mol. function=metal ion binding
  Homolog annotation: Hit_ID=B6SY32; Match level="QueryCoverage=74%, HitCoverage=17%, E-value=5e-42, Identity=92%"; Hit description=C -terminal zinc-finger
NATVMDRSRIHEAGHVIDEHRDMRLDVDNMTYEELVALEEQIGDVNTGLTESYIQENLRSTFYVPGAAGVSDQFSELSLENDACIICQVNILSFTCEHGKMLTWHIMQASFSKESSEN

SEQ ID NO: 131379 - protein, 61 aa, Setaria italica
  Transcript Sequence Number=SeqID_65405
  Homolog annotation: Hit_ID=B6SY32; Match level="QueryCoverage=98%, HitCoverage=12%, E-value=6e-20, Identity=76%"; Hit description=C -terminal zinc-finger
VVHGLNPSAAGLPLDPRMLALPFNSEHTFGHPMHPPLANQVNNGVLRILPYQVASYSKFYP

SEQ ID NO: 131380 - protein, 73 aa, Setaria italica
  Transcript Sequence Number=SeqID_65406
KSYFVFCLLRFLCRFHFEVAYMARSGGGGEGIYIGYKIVTFVLVFIYKLINISGYVSDFVGKSFVVECNCRKC

SEQ ID NO: 131381 - protein, 140 aa, Setaria italica
  misc_feature (137)..(137): Xaa can be any naturally occurring amino acid
  Transcript Sequence Number=SeqID_65407
  Gene Ontology: Mol. function=ARF GTPase activator activity; Biological process=regulation of ARF GTPase activity
  Homolog annotation: Hit_ID=B6TII3; Match level="QueryCoverage=85%, HitCoverage=29%, E-value=5e-32, Identity=64%"; Hit description=ADP -ribosylation factor GTPase-activating protein 3
LNFRLVRKVKPWKLSTWLVLWGRGKLTSKPNESLYEQKPEEPAPVLPSVTESTTTRSKSYTSRFEYVENAPASRTGSSSGDNQMSGHVAPPKSSNFFAEFGMDSGYNKKSSSSSKVQVEESSEAREKFSNAKSISSXQFF

SEQ ID NO: 131382 - protein, 89 aa, Setaria italica
  Transcript Sequence Number=SeqID_65408
  Gene Ontology: Mol. function=metal ion binding; Biological process =metal ion transport
  Pfam annotation: Domain name=Btz; Domain location=1-60; Score=-12.0; E_value=0.025; Accession=PF09405.2; Description=CASC3Barentsz eIF4AIII binding
VGSNRRSGRLGRNCFGGRKLWDAKDDQAWVHDRFEEMNLQDDRYEDQRMSRGRFRGRGGRGKARGGGRGFPRGGKNRSYQEDGNTQKPE

SEQ ID NO: 131383 - protein, 49 aa, Setaria italica
  Transcript Sequence Number=SeqID_65409
LLMFVQSNHQAIITHAVAVLILFRWHAIRICRVGATFPDQISELCIGHP

SEQ ID NO: 131384 - protein, 67 aa, Setaria italica
  Transcript Sequence Number=SeqID_65410
EVRPSAESICSEDPTSAFGEMMKWISTQMQSHAPVLHPKSGQVPNQSAARIPPQPLNHRTNRLMLVV

SEQ ID NO: 131385 - protein, 61 aa, Setaria italica
  Transcript Sequence Number=SeqID_65411
PTSSEAANKYDISICITTEQHLKFHDAISRIVVETEITISSDLGRKMLTTVQVTNDTPALL

SEQ ID NO: 131386 - protein, 57 aa, Setaria italica
  Transcript Sequence Number=SeqID_65412
  Gene Ontology: Mol. function=mannosyl-oligosaccharide 1,2-alpha -mannosidase activity; Cellular component=membrane; Biological process=metabolic process
  Homolog annotation: Hit_ID=B9S090; Match level="QueryCoverage=94%, HitCoverage=9%, E-value=1e-19, Identity=83%"; Hit description =Mannosyl-oligosaccharide alpha-1,2-mannosidase, putative
FIFRVVGGLLSAYDLSADKIFLEKARDITDRLLPAWDTSSGIPYNRINLAQGKASNP

SEQ ID NO: 131387 - protein, 58 aa, Setaria italica
  Transcript Sequence Number=SeqID_65413
  Gene Ontology: Mol. function=mannosyl-oligosaccharide 1,2-alpha -mannosidase activity; Cellular component=membrane; Biological process=metabolic process
  Homolog annotation: Hit_ID=B9S090; Match level="QueryCoverage=93%, HitCoverage=9%, E-value=2e-20, Identity=83%"; Hit description =Mannosyl-oligosaccharide alpha-1,2-mannosidase, putative
VNTGTKDDMMQSFFLAETLKYLYLLFSPPSLISFDEWVFNTEAHPLKIVTRHDNEGGS

SEQ ID NO: 131388 - protein, 52 aa, Setaria italica
  Transcript Sequence Number=SeqID_65414
  Gene Ontology: Mol. function=voltage-gated chloride channel activity; Cellular component=integral to membrane
  Homolog annotation: Hit_ID=B9N720; Match level="QueryCoverage=78%, HitCoverage=5%, E-value=3e-09, Identity=73%"; Hit description=Cl -channel clc-7
VVGILTRHDFMPEHILGLHPVLLGSRWKRLRWQKGAVAKYFRSLLVWIANSS

SEQ ID NO: 131389 - protein, 112 aa, Setaria italica
  Transcript Sequence Number=SeqID_65415
  Gene Ontology: Mol. function=hydrolase activity, acting on carbon -nitrogen (but not peptide) bonds
  Homolog annotation: Hit_ID=B6TJL6; Match level="QueryCoverage=88%, HitCoverage=21%, E-value=2e-49, Identity=95%"; Hit description =Amidohydrolase family protein
GVCVSLGTDGAPSNNRMSIVDEMYLASLINKGREAYISGTTNPTALPAETVLEMATINGAKAVLWDNEIGSLEVGKKADLVVVNPFIWSMVPLHDSITSSSLRLMILSFIIH

SEQ ID NO: 131390 - protein, 127 aa, Setaria italica
  misc_feature (54)..(54): Xaa can be any naturally occurring amino acid
  misc_feature (85)..(85): Xaa can be any naturally occurring amino acid
  misc_feature (109)..(109): Xaa can be any naturally occurring amino acid
  Transcript Sequence Number=SeqID_65416
  Gene Ontology: Mol. function=electron carrier activity; Cellular component=chloroplast; Biological process=protein amino acid phosphorylation
  Homolog annotation: Hit_ID=B6SS49; Match level="QueryCoverage=97%, HitCoverage=24%, E-value=4e-54, Identity=85%"; Hit description =Protein kinase
TYRLMVPRVIPGMVCREVLVMEFVKGTPIMNLGNEMAKRGVDPGSKIAAMAKQXSPFILKEKILSDLTLAYGQMILKDGFFHADXHTPGNILICKDTEVALLDYGQVKXMPDDLRLAYANLVVAMAD

SEQ ID NO: 131391 - protein, 56 aa, Setaria italica
  Transcript Sequence Number=SeqID_65417
  Gene Ontology: Mol. function=electron carrier activity; Cellular component=chloroplast; Biological process=protein amino acid phosphorylation
  Homolog annotation: Hit_ID=B6SS49; Match level="QueryCoverage=76%, HitCoverage=8%, E-value=2e-14, Identity=88%"; Hit description =Protein kinase
MMLGIDQVQHPGAEHLMKVDIRNMQAMALFLQKYDINFDLFSATKEMEKLGFLFPN

SEQ ID NO: 131392 - protein, 46 aa, Setaria italica
  misc_feature (14)..(14): Xaa can be any naturally occurring amino acid
  Transcript Sequence Number=SeqID_65418
NDEMRDHLFQLLGXGFFPRWKEKHQVVFAQNSGMKYVPPRTDVAPL

SEQ ID NO: 131393 - protein, 54 aa, Setaria italica
  Transcript Sequence Number=SeqID_65419
MIKNLDISFYSLILFASFMSTERSSKHFFHRKLKNTFFSRLHSWKYKKNIIIQE

SEQ ID NO: 131394 - protein, 83 aa, Setaria italica
  Transcript Sequence Number=SeqID_65420
SLHNFLRNKGIPTLWNFYSSIKEGRRTRDNSFSFHKLCIYVLCQKQRKGINDQKSRYFILFSDSFLHLLCLLKGHRNYFFHRK

SEQ ID NO: 131395 - protein, 53 aa, Setaria italica
  Transcript Sequence Number=SeqID_65421
PCLRDELQSAGAVGAIFVNDAERSVATTYLDFPVTEVTSAAAAAIHKYIASAR

SEQ ID NO: 131396 - protein, 128 aa, Setaria italica
  misc_feature (16)..(16): Xaa can be any naturally occurring amino acid
  misc_feature (45)..(45): Xaa can be any naturally occurring amino acid
  misc_feature (95)..(95): Xaa can be any naturally occurring amino acid
  misc_feature (102)..(102): Xaa can be any naturally occurring amino acid
  Transcript Sequence Number=SeqID_65422
  Gene Ontology: Mol. function=DNA topoisomerase (ATP-hydrolyzing) activity; Cellular component=chromosome; Biological process=DNA topological change
  Homolog annotation: Hit_ID=B9RI75; Match level="QueryCoverage=99%, HitCoverage=19%, E-value=2e-54, Identity=79%"; Hit description=Type II DNA topoisomerase VI subunit B, putative
  Pfam annotation: Domain name=Topo-VIb_trans; Domain location=42-128; Score=-6.6; E_value=1.5e-10; Accession=PF09239.3; Description =Topoisomerase VI B subunit, transduce
HAERLIGEMGPDFSPXMTVKSLTPQQLVRIHQLFRQAKFDDPSGXCEYNLRLGIIKELHPDMVATHASSPQVFEGHPFIVEAGISIGGKDVKQGXNIFRFAXNRIPSFEQGADVITRTALKKGSNWSK

SEQ ID NO: 131397 - protein, 59 aa, Setaria italica
  Transcript Sequence Number=SeqID_65423
ASGQEKELEQVISTSSSEFCVYLRWRSRFCYGTTHSVILCLMLILVDIYYHYWDSCSQC

SEQ ID NO: 131398 - protein, 40 aa, Setaria italica
  Transcript Sequence Number=SeqID_65424
GFQKCHWKRPPFYVFPFLQHLPNYGATYLEYRQIHVYFYL

SEQ ID NO: 131399 - protein, 106 aa, Setaria italica
  misc_feature (14)..(14): Xaa can be any naturally occurring amino acid
  Transcript Sequence Number=SeqID_65425
MRIHPAAAPTGGRXDLRRLPHVYSKVLELPLPADTDVEVFEGPDAFHFVAAGARGTGMVQVRTVRIHPGVTKVVVRAGGTGGGDEPGADDIGSLRTRLVGSRSCPV

SEQ ID NO: 131400 - protein, 85 aa, Setaria italica
  Transcript Sequence Number=SeqID_65426
  Gene Ontology: Mol. function=structural constituent of ribosome; Cellular component=ribonucleoprotein complex; Biological process =translation
  Homolog annotation: Hit_ID=Q9LX88; Match level="QueryCoverage=90%, HitCoverage=59%, E-value=1e-35, Identity=93%"; Hit description=40S ribosomal protein S15a-4
  Pfam annotation: Domain name=Ribosomal_S8; Domain location=7-83; Score=39.0; E_value=2.5e-10; Accession=PF00410.11; Description =Ribosomal protein S8
AKMVRVSVLNDALKSMYNAEKRGKRQVMIRPSSKVIIKFLIVMQRHGYIGEFEYVDDHRAGKIVVELNGRLNKCGVIRPYELNET

SEQ ID NO: 131401 - protein, 78 aa, Setaria italica
  Transcript Sequence Number=SeqID_65427
SRVLAPPLRRRAHRPIPSLSPEGGGETQGERPIPLPPRRDRSMGSLCARAVVAEARLGRQGETVWFGSFLAPPGEITP

SEQ ID NO: 131402 - protein, 77 aa, Setaria italica
  Transcript Sequence Number=SeqID_65428
  Gene Ontology: Mol. function=structural constituent of ribosome; Cellular component=ribonucleoprotein complex; Biological process =translation
  Homolog annotation: Hit_ID=Q9LX88; Match level="QueryCoverage=68%, HitCoverage=40%, E-value=4e-22, Identity=94%"; Hit description=40S ribosomal protein S15a-4
  Pfam annotation: Domain name=Ribosomal_S8; Domain location=26-77; Score=-31.2; E_value=0.00054; Accession=PF00410.11; Description =Ribosomal protein S8
AEAGRGGASRFLSFGCQLIGLGWGVSVLNDALKSMYNAEKRGKRQVMIRPSSKVIIKFLIVMQRHGYIGEFEYVDDH

SEQ ID NO: 131403 - protein, 55 aa, Setaria italica
  Transcript Sequence Number=SeqID_65429
  Gene Ontology: Mol. function=phosphatidylinositol phosphate kinase activity; Biological process=phosphatidylinositol metabolic process
  Homolog annotation: Hit_ID=Q652R9; Match level="QueryCoverage=96%, HitCoverage=3%, E-value=7e-12, Identity=58%"; Hit description=Finger- containing phosphoinositide kinase-like
IKAQNVTMKSGLYKHVADLKELVKVEWKKYDVLSGFSNIDNLQTFGPTLDVLEAY

SEQ ID NO: 131404 - protein, 81 aa, Setaria italica
  Transcript Sequence Number=SeqID_65430
  Gene Ontology: Mol. function=phosphatidylinositol phosphate kinase activity; Biological process=phosphatidylinositol metabolic process
  Homolog annotation: Hit_ID=Q652R9; Match level="QueryCoverage=55%, HitCoverage=2%, E-value=2e-09, Identity=68%"; Hit description=Finger- containing phosphoinositide kinase-like
NNNQGKNKVLLDLNLLETLHTKPIFLGSKAKRRLERAVWNDTSFLAVSKLTFFCCEIVDEGNIYDTPRVQQPIIGPLTSVG

SEQ ID NO: 131405 - protein, 99 aa, Setaria italica
  misc_feature (31)..(31): Xaa can be any naturally occurring amino acid
  Transcript Sequence Number=SeqID_65431
  Gene Ontology: Mol. function=phosphatidylinositol phosphate kinase activity; Biological process=phosphatidylinositol metabolic process
  Homolog annotation: Hit_ID=Q652R9; Match level="QueryCoverage=79%, HitCoverage=4%, E-value=8e-37, Identity=91%"; Hit description=Finger- containing phosphoinositide kinase-like
VMDYSLLVGIDEERKELVMGIIDYLRQYTWXDKQLETWVKASAFLGGSKDGLPTIISPDQYKKRFRKAMSKYFLTLPDQLVHRCIVLLVICSYFLRFVI

SEQ ID NO: 131406 - protein, 58 aa, Setaria italica
  Transcript Sequence Number=SeqID_65432
  Gene Ontology: Mol. function=phosphatidylinositol phosphate kinase activity; Biological process=phosphatidylinositol metabolic process
  Homolog annotation: Hit_ID=Q652R9; Match level="QueryCoverage=84%, HitCoverage=2%, E-value=2e-15, Identity=79%"; Hit description=Finger- containing phosphoinositide kinase-like
MVDGEGRLLLSQNDSDVVVPIYDDEPSSMIAHAMTVPEYHSFLLPLMDENNESSVLNY

SEQ ID NO: 131407 - protein, 71 aa, Setaria italica
  Transcript Sequence Number=SeqID_65433
  Gene Ontology: Mol. function=phosphatidylinositol phosphate kinase activity; Biological process=phosphatidylinositol metabolic process
  Homolog annotation: Hit_ID=Q652R9; Match level="QueryCoverage=85%, HitCoverage=3%, E-value=8e-17, Identity=72%"; Hit description=Finger- containing phosphoinositide kinase-like
MSASYLCWKIPTKAIEKTGRARSPTFMSNLSLSGVVDGEGRLLLSQNDSDVVVPIYDDEPSSMIAHAMTVP

SEQ ID NO: 131408 - protein, 107 aa, Setaria italica
  misc_feature (95)..(95): Xaa can be any naturally occurring amino acid
  Transcript Sequence Number=SeqID_65434
  Gene Ontology: Mol. function=aminoacyl-tRNA hydrolase activity; Cellular component=mitochondrion; Biological process=translation
  Homolog annotation: Hit_ID=B4FLC5; Match level="QueryCoverage=82%, HitCoverage=35%, E-value=6e-43, Identity=93%"; Hit description =Peptidyl-tRNA hydrolase
  Pfam annotation: Domain name=Pept_tRNA_hydro; Domain location=3-107; Score=11.4; E_value=2.7e-09; Accession=PF01195.11; Description =Peptidyl-tRNA hydrolase
VPKYRLNFLIVTSKSVVVLVGQLVSYFKIPLNQVVVMYDDLDLPFAKLRLLPKGGHGGHNGMRSIINHLKQSRDFPRLRIGIGRPPGKMDPANFXLRPFTKREQEEL

SEQ ID NO: 131409 - protein, 107 aa, Setaria italica
  misc_feature (94)..(94): Xaa can be any naturally occurring amino acid
  Transcript Sequence Number=SeqID_65435
  Gene Ontology: Mol. function=drug transporter activity; Cellular component=membrane; Biological process=multidrug transport
  Homolog annotation: Hit_ID=B9RHB8; Match level="QueryCoverage=99%, HitCoverage=19%, E-value=5e-30, Identity=62%"; Hit description=DNA -damage-inducible protein f, putative
LKSLVIIGAITGAVLGTVGTLVPWLFPSLFTNDRMVVQQMHIILAPYFSALLVTPSVHSLEGTLLAGRDLRYLSQSMSVCFCIGTLLLMVLRNXFGSLPGCWWILVL

SEQ ID NO: 131410 - protein, 88 aa, Setaria italica
  Transcript Sequence Number=SeqID_65436
LGLGRLPVSLVGQAAGAYGGAFSYCFPTKPSTLGYLTLGGGANAAAPGVRDDAAAARDSTVIRPCCSAILYGSQFFRCFRSHKGPFCS

SEQ ID NO: 131411 - protein, 47 aa, Setaria italica
  Transcript Sequence Number=SeqID_65437
ILFLFLVELWYSEPDASGVIRDLLFLNLKGNGATGLAISLLGVMVMP

SEQ ID NO: 131412 - protein, 164 aa, Setaria italica
  misc_feature (68)..(68): Xaa can be any naturally occurring amino acid
  Transcript Sequence Number=SeqID_65438
  Gene Ontology: Mol. function=protein binding
  Homolog annotation: Hit_ID=B3VTC5; Match level="QueryCoverage=97%, HitCoverage=16%, E-value=3e-35, Identity=50%"; Hit description =Cf2/Cf5-like disease resistance protein
  Pfam annotation: Domain name=LRR_1; Domain location=110-131; Score =11.2; E_value=2.1; Accession=PF00560.25; Description=Leucine Rich Repeat
  Pfam annotation: Domain name=LRR_1; Domain location=38-60; Score =10.3; E_value=3.2; Accession=PF00560.25; Description=Leucine Rich Repeat
  Pfam annotation: Domain name=LRR_1; Domain location=62-84; Score=6.3; E_value=19; Accession=PF00560.25; Description=Leucine Rich Repeat
  Pfam annotation: Domain name=LRR_1; Domain location=86-108; Score =18.8; E_value=0.022; Accession=PF00560.25; Description=Leucine Rich Repeat
  Pfam module annotation: Pfam domain module=LRR_1::LRR_1::LRR_1::LRR _1; Domain location=110-131::38-60::62-84::86-108
EESAIGIKFYSTRILFTETTSVLTKGQQLELSKGIMEYMVIIDLSCNNLTGQIPQGISALVALKSLNXSWNHLSGRIPNNIGDLKALESLDLSHNELSGEIPSSISALTSLTSFNLSYNNLSGTIPTGNQLQTLATDDPASMYVGNIGYVASTHKGCPGNGTRV

SEQ ID NO: 131413 - protein, 140 aa, Setaria italica
  Transcript Sequence Number=SeqID_65439
  Gene Ontology: Mol. function=protein binding
  Homolog annotation: Hit_ID=Q5ZBC5; Match level="QueryCoverage=80%, HitCoverage=24%, E-value=2e-31, Identity=60%"; Hit description =HcrVf1 protein-like
  Pfam annotation: Domain name=LRR_1; Domain location=115-136; Score =10.3; E_value=3.2; Accession=PF00560.25; Description=Leucine Rich Repeat
  Pfam annotation: Domain name=LRR_1; Domain location=43-65; Score =10.6; E_value=2.8; Accession=PF00560.25; Description=Leucine Rich Repeat
  Pfam annotation: Domain name=LRR_1; Domain location=67-89; Score =14.5; E_value=0.46; Accession=PF00560.25; Description=Leucine Rich Repeat
  Pfam annotation: Domain name=LRR_1; Domain location=91-113; Score =18.6; E_value=0.027; Accession=PF00560.25; Description=Leucine Rich Repeat
  Pfam module annotation: Pfam domain module=LRR_1::LRR_1::LRR_1::LRR _1; Domain location=115-136::43-65::67-89::91-113
MGQTYDNYMMGSYDTYSAMIFFTETTSVLTKGQQLEFSKGIQYMVNIDLSCNNLTGQIPQGISALVALKSLNVSWNHLSGRIPNNIGDLKALESLDLSHNELSGEIPSNISALTSLTSFNLSYNNLSGRIPTGNQLQTLA

SEQ ID NO: 131414 - protein, 65 aa, Setaria italica
  misc_feature (11)..(11): Xaa can be any naturally occurring amino acid
  Transcript Sequence Number=SeqID_65440
  Gene Ontology: Mol. function=ATPase activity, coupled to transmembrane movement of substances; Cellular component=integral to membrane; Biological process=transport
  Homolog annotation: Hit_ID=Q6Z894; Match level="QueryCoverage=78%, HitCoverage=7%, E-value=6e-19, Identity=92%"; Hit description =Putative MDR-like ABC transporter
MKNRTTVMVAXRLSTIKNADVISVLQDGKIIEQGGHQQLIENRNGAYHKLVSLQQQHQQQSQQSS

SEQ ID NO: 131415 - protein, 59 aa, Setaria italica
  misc_feature (6)..(6): Xaa can be any naturally occurring amino acid
  Transcript Sequence Number=SeqID_65441
  Gene Ontology: Mol. function=ATPase activity, coupled to transmembrane movement of substances; Cellular component=integral to membrane; Biological process=transport
  Homolog annotation: Hit_ID=Q6Z894; Match level="QueryCoverage=79%, HitCoverage=7%, E-value=8e-16, Identity=93%"; Hit description =Putative MDR-like ABC transporter
MVAHRXLSTIKNADVISVLQDGKIIEQGGHQQLIENRNGAYHKLVSLQQQQQQQSQQSS

SEQ ID NO: 131416 - protein, 55 aa, Setaria italica
  misc_feature (6)..(6): Xaa can be any naturally occurring amino acid
  Transcript Sequence Number=SeqID_65442
RNGGLXQACQLAAAAAATESAELMRHLNKIVRFYILVWLCLSWSSVKDMCWQSFI

SEQ ID NO: 131417 - protein, 94 aa, Setaria italica
  Transcript Sequence Number=SeqID_65443
  Gene Ontology: Mol. function=ATPase activity, coupled to transmembrane movement of substances; Cellular component=integral to membrane; Biological process=transport
  Homolog annotation: Hit_ID=Q6Z894; Match level="QueryCoverage=92%, HitCoverage=13%, E-value=1e-25, Identity=70%"; Hit description =Putative MDR-like ABC transporter
  Pfam annotation: Domain name=ABC_tran; Domain location=7-94; Score= -45.0; E_value=0.011; Accession=PF00005.19; Description=ABC transporter
NRKDRTKKTMALVGMSGSGKSTVLSLILRFYDPIAGRILIDGKDIKKLKLKSLRKHIGLVQQEPALFATTIYENILYGKDGATEAEVIEAAKLA

SEQ ID NO: 131418 - protein, 81 aa, Setaria italica
  Transcript Sequence Number=SeqID_65444
GCSIHGERLSLHRRIIKGTGSGRVHPAEIQSIHYSIQVVVGSCAMPSDLCHCIVTDSRFSRDCFDSSSKELCLCKLMLGLH

SEQ ID NO: 131419 - protein, 49 aa, Setaria italica
  Transcript Sequence Number=SeqID_65445
VPLVQFVVGSCAMPSDLCHCIVTDSRFSRDCFDSSSKELCLCKLMLGLH

SEQ ID NO: 131420 - protein, 43 aa, Setaria italica
  misc_feature (10)..(10): Xaa can be any naturally occurring amino acid
  Transcript Sequence Number=SeqID_65446
  Homolog annotation: Hit_ID=B6TZP2; Match level="QueryCoverage=100%, HitCoverage=7%, E-value=2e-13, Identity=88%"; Hit description =Calmodulin binding protein
AKLRAQVSPXLDSDSSAEKNGFTRRHSLPSSTNSRAVKAEWKR

SEQ ID NO: 131421 - protein, 121 aa, Setaria italica
  Transcript Sequence Number=SeqID_65447
KRIIISPSPDAPQAPTSSSPYEEDPGIWSITTHATLLNCTCISSVALFRCSVSHQELLLLCSVAISTAQPISHASKLLNKHHHQASSNLLISRDKYMICINRRRRVQRSAQRRAGSRARCP

SEQ ID NO: 131422 - protein, 32 aa, Setaria italica
  Transcript Sequence Number=SeqID_65448
  Homolog annotation: Hit_ID=B6U664; Match level="QueryCoverage=100%, HitCoverage=23%, E-value=1e-10, Identity=96%"; Hit description=Rapid alkalinization factor 1
  Pfam annotation: Domain name=RALF; Domain location=1-32; Score=18.3; E_value=0.00028; Accession=PF05498.3; Description=Rapid ALkalinization Factor (RALF)
CSQRGASYYNCQPGAEANPYSRGCNAITQCRG

SEQ ID NO: 131423 - protein, 77 aa, Setaria italica
  Transcript Sequence Number=SeqID_65449
  Gene Ontology: Mol. function=hydrolase activity
  Homolog annotation: Hit_ID=Q5CAG8; Match level="QueryCoverage=92%, HitCoverage=9%, E-value=1e-25, Identity=76%"; Hit description =OSJNBa0065H10.15 protein
RFLPCYQVVESMRRGMEPQDAARDAISRIARKYPDFVGAVFAVNRKGVHAGACHGWTFQYSVMNSSMHDVEVITVYP

SEQ ID NO: 131424 - protein, 109 aa, Setaria italica
  misc_feature (37)..(37): Xaa can be any naturally occurring amino acid
  Transcript Sequence Number=SeqID_65450
  Gene Ontology: Mol. function=hydrolase activity; Cellular component =lysosome
  Homolog annotation: Hit_ID=Q5CAG8; Match level="QueryCoverage=98%, HitCoverage=10%, E-value=2e-29, Identity=63%"; Hit description =OSJNBa0065H10.15 protein
VLLIDKMGHIAVGTSTNGATFKIPGRATEHSNSSSWXDTEQRNRATEEIQVQLRRVAWVGDGPIPGSSSYGDDEVGACGASGDGDIMMRFLPCYQVVESMRRGMEPQDA

SEQ ID NO: 131425 - protein, 62 aa, Setaria italica
  Transcript Sequence Number=SeqID_65451
GGAGSRKKHRASKGKLLRLARWGKGGKEGEMFKGLDEEGIMKHFQAIKSRRMNLPSRCSYRA

SEQ ID NO: 131426 - protein, 47 aa, Setaria italica
  Transcript Sequence Number=SeqID_65452
IHSPTFDGLKVLHNSLLIKSFKHLPSFPPFPIWLASVACPWRHGASS

SEQ ID NO: 131427 - protein, 130 aa, Setaria italica
  misc_feature (6)..(6): Xaa can be any naturally occurring amino acid
  misc_feature (64)..(64): Xaa can be any naturally occurring amino acid
  misc_feature (82)..(82): Xaa can be any naturally occurring amino acid
  Transcript Sequence Number=SeqID_65453
  Gene Ontology: Biological process=autophagy
  Homolog annotation: Hit_ID=Q4A192; Match level="QueryCoverage=99%, HitCoverage=26%, E-value=8e-70, Identity=96%"; Hit description =Beclin 1 protein (Fragment)
  Pfam annotation: Domain name=APG6; Domain location=1-130; Score= -202.8; E_value=0.089; Accession=PF04111.4; Description=Autophagy protein Apg6
FEELEXRYWHEFNSFQFQLKSHQEERDAVFAKIEVSQVHLELLKRTNVLNDAFYISHDGVIGTXNNFRLGRLSNVEVEWDEXNAAWGQAALLLHTMAQYFTPKFQYRIKIHPMGSYPRVTDIHNNTYELV

SEQ ID NO: 131428 - protein, 113 aa, Setaria italica
  misc_feature (95)..(95): Xaa can be any naturally occurring amino acid
  Transcript Sequence Number=SeqID_65454
  Gene Ontology: Mol. function=structural constituent of ribosome; Cellular component=ribonucleoprotein complex; Biological process =translation
  Homolog annotation: Hit_ID=Q0JCF8; Match level="QueryCoverage=91%, HitCoverage=44%, E-value=7e-41, Identity=79%"; Hit description=60S ribosomal protein L6 (Fragment)
  Pfam annotation: Domain name=Ribosomal_L6e; Domain location=11-113; Score=141.0; E_value=3.7e-39; Accession=PF01159.11; Description =Ribosomal protein L6e
FVSVLFCLTFSLPLRFLFCLTFLLKVDISGVNVEKFDDAYFARDKKQKAKKTEGELFETEKEATKDLPQFKKDDQKTVDAELIKAIEAVPDLKTXLGARFSLRDGDKPHEMVF

SEQ ID NO: 131429 - protein, 89 aa, Setaria italica
  misc_feature (70)..(70): Xaa can be any naturally occurring amino acid
  misc_feature (83)..(83): Xaa can be any naturally occurring amino acid
  Transcript Sequence Number=SeqID_65455
  Gene Ontology: Mol. function=structural constituent of ribosome; Cellular component=ribonucleoprotein complex; Biological process =translation
  Homolog annotation: Hit_ID=Q0JCF8; Match level="QueryCoverage=98%, HitCoverage=36%, E-value=3e-36, Identity=87%"; Hit description=60S ribosomal protein L6 (Fragment)
  Pfam annotation: Domain name=Ribosomal_L6e; Domain location=4-89; Score=102.8; E_value=1.2e-27; Accession=PF01159.11; Description =Ribosomal protein L6e
NNTTGVNVEKFDDAYFARDKKQKAKKTEGELFETEKEATKDLPQFKKDDQKTVDAELIKAIEAVPDLKTXLGARFSLRDGDKXPHEMVF

SEQ ID NO: 131430 - protein, 49 aa, Setaria italica
  Transcript Sequence Number=SeqID_65456
PWPRKFKVNKEPPPPPPPLRRPSCFERKLNASNLPAVGRKPKASTPHWH

SEQ ID NO: 131431 - protein, 98 aa, Setaria italica
  misc_feature (39)..(39): Xaa can be any naturally occurring amino acid
  misc_feature (75)..(75): Xaa can be any naturally occurring amino acid
  Transcript Sequence Number=SeqID_65457
  Gene Ontology: Cellular component=chloroplast
EHIEKLLILAASIHRKLIDAPRLAQAIFADYFNYYLPKXMGSTLESICYEKEFTTKEKVGMHERDAVSNLFPPPXTANQSWRKVLSMGNLLKWTNETK

SEQ ID NO: 131432 - protein, 69 aa, Setaria italica
  misc_feature (1)..(14): Xaa can be any naturally occurring amino acid
  Transcript Sequence Number=SeqID_65458
XXXXXXXXXXXXXXLMQRKSCSTSHHTTQDDRCDLQVLHSKQCPRLKWSLCSSSSLQKAKSKNSLSSRH

SEQ ID NO: 131433 - protein, 71 aa, Setaria italica
  Transcript Sequence Number=SeqID_65459
  Subcellular localization annotation: CTP_CleavageSite=17; ConfidenceScore=5.01e-01
TVSVNGSTTPTESPTARTAAVLKPMGVVSTLHLFVTGWLHQLLHQAGCGSETPGPASSSAASMDLRLHQES

SEQ ID NO: 131434 - protein, 56 aa, Setaria italica
  Transcript Sequence Number=SeqID_65460
TDWRISVRSLRRWSALTRLHHDVGRFHSFEVLTGDDVPCSQGQFQTRGNRIVLSTY

SEQ ID NO: 131435 - protein, 84 aa, Setaria italica
  misc_feature (75)..(75): Xaa can be any naturally occurring amino acid
  Transcript Sequence Number=SeqID_65461
  Gene Ontology: Mol. function=catalytic activity; Biological process =cellular metabolic process
  Homolog annotation: Hit_ID=B6T8C4; Match level="QueryCoverage=88%, HitCoverage=20%, E-value=3e-19, Identity=68%"; Hit description =Dihydroflavonol-4-reductase
LKQYLRTILAVRIRDDAQPNISLDETIWSSVPLCEKMQLWYGLAKVFAEKAAWEFAKENGIDLVTVLPSFVIGPXSLSHELCVY

SEQ ID NO: 131436 - protein, 51 aa, Setaria italica
  Transcript Sequence Number=SeqID_65462
  Gene Ontology: Mol. function=nucleotide binding; Cellular component =intracellular
  Homolog annotation: Hit_ID=A9YT54; Match level="QueryCoverage=82%, HitCoverage=6%, E-value=2e-13, Identity=78%"; Hit description =Tyrosine phosphorylated protein A
MLCVPYFAVVLDEPLSYSLDDCIEFIQEDELVEVTPASIRMCKNPKISKRK

SEQ ID NO: 131437 - protein, 73 aa, Setaria italica
  misc_feature (42)..(42): Xaa can be any naturally occurring amino acid
  Transcript Sequence Number=SeqID_65463
  Gene Ontology: Mol. function=nucleotide binding; Cellular component =intracellular
  Homolog annotation: Hit_ID=B9SUF2; Match level="QueryCoverage=91%, HitCoverage=9%, E-value=8e-21, Identity=73%"; Hit description=GTP -binding protein typa/bipa, putative
KGKTKQVRMSFSINTSPFVGKEGKYVTSRNLRDRLYRELERXLAMKVEDGETADTFLVSGRGTLHLTILIENM

SEQ ID NO: 131438 - protein, 62 aa, Setaria italica
  Transcript Sequence Number=SeqID_65464
  Gene Ontology: Mol. function=nucleotide binding; Cellular component =intracellular
  Homolog annotation: Hit_ID=B9SUF2; Match level="QueryCoverage=100%, HitCoverage=8%, E-value=1e-21, Identity=75%"; Hit description=GTP -binding protein typa/bipa, putative
LFVYQNFSRVPVESVGAGDICAVCGMNDIMIGETIADKVTGTPLPTIKVEEPTVRMSFSINT

SEQ ID NO: 131439 - protein, 79 aa, Setaria italica
  Transcript Sequence Number=SeqID_65465
  Subcellular localization annotation: CTP_CleavageSite=57; ConfidenceScore=5.69e-01
QDSYQRPHWTSAMLSPPPAAPRRRRPAPPTSGPLPACCGSPARSDDGGPAPSGPPPRSSRRSRKSPPPRLPPQGRVLKQ

SEQ ID NO: 131440 - protein, 50 aa, Setaria italica
  Transcript Sequence Number=SeqID_65466
  Gene Ontology: Mol. function=nucleotide binding; Cellular component =intracellular
  Homolog annotation: Hit_ID=Q6SYB1; Match level="QueryCoverage=84%, HitCoverage=6%, E-value=3e-17, Identity=95%"; Hit description=GTP -binding protein TypA
YNIIDTPGHSDFGGEVERVLNMVEGVLLVVDSVEGPMPQTRFVHQLHLTQ

SEQ ID NO: 131441 - protein, 82 aa, Setaria italica
  Transcript Sequence Number=SeqID_65467
  Gene Ontology: Mol. function=nucleotide binding; Cellular component =intracellular
  Homolog annotation: Hit_ID=Q9FNA8; Match level="QueryCoverage=80%, HitCoverage=10%, E-value=3e-29, Identity=87%"; Hit description=GTP -binding protein typA (Tyrosine phosphorylated protein A)
SKVFLVILVHAVVVVVNKIDRPAARPEFVVNSTFELFIELNATDEQCDFQTVYASGIKGKAGLDPENLADDLGPLFEAILRC

SEQ ID NO: 131442 - protein, 73 aa, Setaria italica
  misc_feature (32)..(32): Xaa can be any naturally occurring amino acid
  Transcript Sequence Number=SeqID_65468
LVLGWLFMVDDTPIRVYENTSSRHVHGHHRHXPFPGPQPMAVYSSIWNADDWATQGGRVRPVRLHAPALRRPV

SEQ ID NO: 131443 - protein, 56 aa, Setaria italica
  Transcript Sequence Number=SeqID_65469
KETSSSMTPSMIIDRHPSEEDDMIHQISLRSAFRSSTSGRSWYGVKFGFGLFRTSS

SEQ ID NO: 131444 - protein, 56 aa, Setaria italica
  Transcript Sequence Number=SeqID_65470
RGRVLHRPRDSPGHTRAPPDPSSPTASHIHHWLLMCTNKCSIMHVLAVGSVAKMLA

SEQ ID NO: 131445 - protein, 73 aa, Setaria italica
  Transcript Sequence Number=SeqID_65471
  Gene Ontology: Mol. function=histone acetyltransferase activity; Cellular component=nucleus; Biological process=regulation of transcription, DNA-dependent
  Homolog annotation: Hit_ID=B6SMS2; Match level="QueryCoverage=89%, HitCoverage=18%, E-value=1e-13, Identity=73%"; Hit description =Protein binding protein
SCLALAHAYRVGWLKRAAEAVVSARLTPDRAVDMLKLAGLCDAPRLRAACARVADRDLAAVEASDGWRFARRH

SEQ ID NO: 131446 - protein, 45 aa, Setaria italica
  Transcript Sequence Number=SeqID_65472
RCGSSGPRAPSSSRLERSGDLSSKPEYALCGFRDVSEMCLPPVLL

SEQ ID NO: 131447 - protein, 48 aa, Setaria italica
  Transcript Sequence Number=SeqID_65473
  Homolog annotation: Hit_ID=B6U9B2; Match level="QueryCoverage=85%, HitCoverage=33%, E-value=6e-12, Identity=73%"; Hit description=Lipid binding protein
VLQIAHSSCICDYLGSPDARENLSLEKVFYVTKQCGVTIPAGCGSKRF

SEQ ID NO: 131448 - protein, 91 aa, Setaria italica
  Transcript Sequence Number=SeqID_65474
  Pfam annotation: Domain name=DUF231; Domain location=1-69; Score= -70.7; E_value=0.093; Accession=PF03005.7; Description=Arabidopsis proteins of unknown function
SLNGDWNTGGRCDNTNPLAKGSGIHLNHSEDTDAEGAVRGTRINLLDVTALSRLRDEGHISRYSIKATLGCKDLIPRIGYTRKAPVQTILN

SEQ ID NO: 131449 - protein, 91 aa, Setaria italica
  Transcript Sequence Number=SeqID_65475
LKKKRRPSYPQPQQGSRPSKIANRGIGWSSFLLGFLCPLIWYFAATLYCCKYYNKDPRERPGLAASAVAALIFTVLAIITLAVTLIICAYK

SEQ ID NO: 131450 - protein, 95 aa, Setaria italica
  misc_feature (61)..(61): Xaa can be any naturally occurring amino acid
  Transcript Sequence Number=SeqID_65476
NKWEKGCVGKYTLLRDEENPRLAIFERRLPCCGCGIGWSSFLLGFLCPLIWYFAATLYCCXYYNKDPRERPGLAASAVAALIFTVLAIITLAVTL

SEQ ID NO: 131451 - protein, 77 aa, Setaria italica
  Transcript Sequence Number=SeqID_65477
  Gene Ontology: Mol. function=nucleic acid binding
  Homolog annotation: Hit_ID=Q8LEE4; Match level="QueryCoverage=77%, HitCoverage=15%, E-value=2e-21, Identity=75%"; Hit description=Zinc finger protein
SSSRSQNTAPIAEKGKLRSWVGPNGQYYRELPCPSCRGRGYTPCKQCGVDRSSLDCPMCYGKGIRMCLQCGGDCVIW

SEQ ID NO: 131452 - protein, 51 aa, Setaria italica
  Transcript Sequence Number=SeqID_65478
FFLMNITVCCIEVLQTCCACSSQPHVTMIALDFNRIFCIIHISFHKVFLLL

SEQ ID NO: 131453 - protein, 93 aa, Setaria italica
  Transcript Sequence Number=SeqID_65479
  Gene Ontology: Mol. function=metal ion binding
  Homolog annotation: Hit_ID=B6SU00; Match level="QueryCoverage=95%, HitCoverage=92%, E-value=6e-45, Identity=78%"; Hit description =Pollen-specific protein SF3
  Pfam annotation: Domain name=LIM; Domain location=17-73; Score=68.7; E_value=2.2e-17; Accession=PF00412.14; Description=LIM domain
FLPSKAARMFSGTQDKCATCGKTAYPLEKVTVEEKAYHKSCFKCSHGGCAITPSNYAALEGTLYCKHHFSQLFKEKGSYNHLIKCASVKRAEA

SEQ ID NO: 131454 - protein, 59 aa, Setaria italica
  Transcript Sequence Number=SeqID_65480
  Gene Ontology: Mol. function=metal ion binding
  Homolog annotation: Hit_ID=B6SU00; Match level="QueryCoverage=94%, HitCoverage=28%, E-value=2e-19, Identity=82%"; Hit description =Pollen-specific protein SF3
  Pfam annotation: Domain name=LIM; Domain location=20-59; Score=8.9; E_ value=0.00062; Accession=PF00412.14; Description=LIM domain
CFRSRTPCSTTSVSGTQDKCATCGKTAYPLEKVTVEEKAYHKSCFKCSHGGCAITPSNY

SEQ ID NO: 131455 - protein, 45 aa, Setaria italica
  Transcript Sequence Number=SeqID_65481
DGTKDADSAIHFHRAKVRNFSTRSIFQQAFSSSWVYYMHVEYLTG

SEQ ID NO: 131456 - protein, 49 aa, Setaria italica
  Transcript Sequence Number=SeqID_65482
  Gene Ontology: Mol. function=signal transducer activity; Biological process=response to light stimulus
  Homolog annotation: Hit_ID=Q8W0R6; Match level="QueryCoverage=87%, HitCoverage=6%, E-value=2e-18, Identity=100%"; Hit description =Putative photoreceptor-interacting protein
RSCSDPDLFGWPVAQYGGPMQSPGGSLLWNGISTGARPRNSSPCIPWLR

SEQ ID NO: 131457 - protein, 65 aa, Setaria italica
  Transcript Sequence Number=SeqID_65483
  Gene Ontology: Cellular component=integral to membrane
  Homolog annotation: Hit_ID=B6TTZ1; Match level="QueryCoverage=100%, HitCoverage=23%, E-value=9e-34, Identity=95%"; Hit description =Tetraspanin family protein
QNVPATGVPVPTLDQRASRNDAWSQRMREKYGLDTSQFTYNPSDPSRYQQNGAPQAEERSRCTIL

SEQ ID NO: 131458 - protein, 63 aa, Setaria italica
  Transcript Sequence Number=SeqID_65484
QDARPSGDDFPAPKLHKKKVVYRPHSSGQLKGEPELLRRDVPHSSGMAQKPPKRSLKSERPAT

SEQ ID NO: 131459 - protein, 76 aa, Setaria italica
  Transcript Sequence Number=SeqID_65485
MQVADDTPPVRSAGDAARMVWAETKLLWGIGLPIGVSMLSMYAISSITQMFIGLLPLLRLQAAHLHGLLPLLPQLQ

SEQ ID NO: 131460 - protein, 60 aa, Setaria italica
  Transcript Sequence Number=SeqID_65486
QFADTSKSEEFHQLHTYIQASPGMKTPSCFLYQLVVPSHYTLPRLIFNKHEHSLVGKSCM

SEQ ID NO: 131461 - protein, 49 aa, Setaria italica
  Transcript Sequence Number=SeqID_65487
HEEAPAATPALAPASPAQPVATNWKISSPGKAPTLSISCWLLICILDFC

SEQ ID NO: 131462 - protein, 60 aa, Setaria italica
  Transcript Sequence Number=SeqID_65488
LITPVSDVLYFVSHFRYKKMESCITPPREAAQLKKFPERLSAIPPRILEGHAPGVTEEGY

SEQ ID NO: 131463 - protein, 123 aa, Setaria italica
  Transcript Sequence Number=SeqID_65489
  Gene Ontology: Mol. function=nucleotide binding; Cellular component =nucleus; Biological process=regulation of transcription, DNA -dependent
  Homolog annotation: Hit_ID=Q852D5; Match level="QueryCoverage=97%, HitCoverage=9%, E-value=1e-14, Identity=45%"; Hit description =Powdery mildew resistance protein PM3b, putative, expressed
EVGAAEGTPGEEVTFPLLENLSIDDCPRLTDLPEAPKLSKLSITNGGINCQQQISLEAAFIPSLSRLNLAVSPDDTETTLLHVKNKLNGTLALPAMWLWRCDLFFSSRSSALALWTCFAQLVD

SEQ ID NO: 131464 - protein, 80 aa, Setaria italica
  Transcript Sequence Number=SeqID_65490
  Gene Ontology: Mol. function=nucleotide binding; Cellular component =nucleus; Biological process=regulation of transcription, DNA -dependent
  Homolog annotation: Hit_ID=Q852D5; Match level="QueryCoverage=95%, HitCoverage=5%, E-value=4e-20, Identity=63%"; Hit description =Powdery mildew resistance protein PM3b, putative, expressed
KCKSLTALPKAAPVITELSGRVDTKCRSAFPALRKMKLCDLTVFERWEAGEGISGEEVTFPQLEELSIRSCGSLSALTKR

SEQ ID NO: 131465 - protein, 82 aa, Setaria italica
  misc_feature (36)..(36): Xaa can be any naturally occurring amino acid
  misc_feature (63)..(63): Xaa can be any naturally occurring amino acid
  Transcript Sequence Number=SeqID_65491
  Gene Ontology: Mol. function=histone-lysine N-methyltransferase activity; Cellular component=nucleus; Biological process=chromatin modification
  Homolog annotation: Hit_ID=Q8LPU2; Match level="QueryCoverage=96%, HitCoverage=11%, E-value=2e-33, Identity=86%"; Hit description=SET domain protein 105
FLGKERTKSGINCFKYKLLREPGQRDGAAIWKVTQXWITNPTTRGNVLLADLSSKAEMLPVCXLVNEVDHEKGPGHFTYTNQ

SEQ ID NO: 131466 - protein, 49 aa, Setaria italica
  Transcript Sequence Number=SeqID_65492
CAKEESNYFHVLCCCQFPSVLIFISVPSKSNRVDDRVYWWLLLPYLDLY

SEQ ID NO: 131467 - protein, 70 aa, Setaria italica
  Transcript Sequence Number=SeqID_65493
FFLSLFGLVCYLLVIGGSFILEVMPRQVVQKQQKKKLNMKPIKQVNSTQHVESDDTSGNHHEHTTEEQNQ

SEQ ID NO: 131468 - protein, 117 aa, Setaria italica
  Transcript Sequence Number=SeqID_65494
  Gene Ontology: Cellular component=endoplasmic reticulum membrane
  Homolog annotation: Hit_ID=B4F879; Match level="QueryCoverage=84%, HitCoverage=26%, E-value=3e-52, Identity=96%"; Hit description =Integral membrane protein
MIIGCRECSHMVLHVLNVQVTHLLGVLGFGGFCYLLGARPQDVPYVYCLFYVIFVPLRWIYYRYKKWHYYLLDFCYYANTFLVVMILFYPKDEKLFMVCFSFAEGPLAWALIVWRCS

SEQ ID NO: 131469 - protein, 68 aa, Setaria italica
  Transcript Sequence Number=SeqID_65495
  Homolog annotation: Hit_ID=B4F879; Match level="QueryCoverage=89%, HitCoverage=16%, E-value=2e-28, Identity=98%"; Hit description =Integral membrane protein
QLIPVGRNPQTFAAMHPEGRAARVTWPYVEDKSYLWTWLFFVPLAAYTLWQLMYFLIVNVLRRQRLLR

SEQ ID NO: 131470 - protein, 34 aa, Setaria italica
  Transcript Sequence Number=SeqID_65496
HRSNNIWWRLSGLLGDRNRQVMYILLQAEWTVGR

SEQ ID NO: 131471 - protein, 55 aa, Setaria italica
  misc_feature (51)..(51): Xaa can be any naturally occurring amino acid
  Transcript Sequence Number=SeqID_65497
FVSVSFRLFFRFRFLISLRPISVDMAARKMTVIGTVDPVDVVSKLRKSWAXTSTP

SEQ ID NO: 131472 - protein, 48 aa, Setaria italica
  misc_feature (1)..(1): Xaa can be any naturally occurring amino acid
  Transcript Sequence Number=SeqID_65498
XPSCTAQRGVLYSRLFPSQISMIWSCCILFLDRYRIQQLQILLVVFLY

SEQ ID NO: 131473 - protein, 104 aa, Setaria italica
  Transcript Sequence Number=SeqID_65499
  Gene Ontology: Mol. function=metal ion binding
  Homolog annotation: Hit_ID=B1PVT0; Match level="QueryCoverage=52%, HitCoverage=25%, E-value=1e-13, Identity=60%"; Hit description=LIM domain protein 2b
  Pfam annotation: Domain name=LIM; Domain location=8-56; Score=19.6; E_ value=3.3e-05; Accession=PF00412.14; Description=LIM domain
TLNIRSLKFTLQITLEGEPYHKTCFKCARGGCLLTTATYASHNGILYCQIHFWQVFKETGSYSNLLKPAPAKNAAGEPEAAKAEAAKEEASPEQVPEAPEDQEH

SEQ ID NO: 131474 - protein, 86 aa, Setaria italica
  Transcript Sequence Number=SeqID_65500
  Gene Ontology: Mol. function=molecular_function; Cellular component =cellular_component; Biological process=biological_process
  Homolog annotation: Hit_ID=O81310; Match level="QueryCoverage=94%, HitCoverage=17%, E-value=3e-28, Identity=79%"; Hit description =F6N15.8 protein
  Pfam annotation: Domain name=WD40; Domain location=25-63; Score=46.7; E_value=8.8e-11; Accession=PF00400.24; Description=WD domain, G-beta repeat
AAAAFTADVKVWEIVYSKDSSVKEVNKVMQLMGHKSAVTSLCFAPNSEQIITASKDGSIRVWNINGMLYLLTSDPYGLEVICYFSS

SEQ ID NO: 131475 - protein, 112 aa, Setaria italica
  misc_feature (36)..(36): Xaa can be any naturally occurring amino acid
  misc_feature (103)..(103): Xaa can be any naturally occurring amino acid
  Transcript Sequence Number=SeqID_65501
  Homolog annotation: Hit_ID=B9RDD1; Match level="QueryCoverage=100%, HitCoverage=25%, E-value=4e-36, Identity=66%"; Hit description =Nucleotide binding protein, putative
ASKDGSIRVWNINVRYHLDEDPKNLLSHAVELIALXGSVCQYDHMSISPDGKILAVTSGSTLQWLCVETGAVLDTAEKAHEGDITGIAWAPRTILNGGVPAFXLGSAGVDKK

SEQ ID NO: 131476 - protein, 74 aa, Setaria italica
  Transcript Sequence Number=SeqID_65502
MIPQARASSKILLYSTEAISFYRKYSVSQIYGHACRILRINLPAGAHPTGVAFSEGSSSVVVAAQALLGSSLYM

SEQ ID NO: 131477 - protein, 68 aa, Setaria italica
  Transcript Sequence Number=SeqID_65503
FIWLFCFLLSFFSFFVLVNCRFTYRDHGEPKHSPGWFGNSINLSSGLISLPEPITSWKMSKWRSCSRS

SEQ ID NO: 131478 - protein, 99 aa, Setaria italica
  Transcript Sequence Number=SeqID_65504
WPHYINRNMKIVQTRYALFHDLRLSAQPVVHRVMCRYGIAKQELTCDTWSAIECKILFHLDIYVDVHPVLFDFLNASATTSKGHQLPQDDVFTGPSCSE

SEQ ID NO: 131479 - protein, 79 aa, Setaria italica
  Transcript Sequence Number=SeqID_65505
  Gene Ontology: Mol. function=argininosuccinate synthase activity; Cellular component=chloroplast; Biological process=arginine biosynthetic process
  Homolog annotation: Hit_ID=Q2QVC1; Match level="QueryCoverage=93%, HitCoverage=12%, E-value=3e-22, Identity=75%"; Hit description =Argininosuccinate synthase
IGRIDMVENRLVGMKSRGVYETPGGTIMAAAVRELEALTLDRETMSFHCMVSLSKVRATMQWKDMVALKYAERVKPAAC

SEQ ID NO: 131480 - protein, 47 aa, Setaria italica
  Transcript Sequence Number=SeqID_65506
  Gene Ontology: Mol. function=argininosuccinate synthase activity
  Homolog annotation: Hit_ID=Q2QVC1; Match level="QueryCoverage=76%, HitCoverage=7%, E-value=3e-12, Identity=94%"; Hit description =Argininosuccinate synthase
GSEGAFSGAKEDMYMMSVAPENAPSEPEYLEIGIIAGVPVSINGRTC

SEQ ID NO: 131481 - protein, 115 aa, Setaria italica
  misc_feature (72)..(72): Xaa can be any naturally occurring amino acid
  misc_feature (81)..(81): Xaa can be any naturally occurring amino acid
  Transcript Sequence Number=SeqID_65507
  Gene Ontology: Mol. function=nucleotide binding; Cellular component =membrane; Biological process=defense response
  Homolog annotation: Hit_ID=Q2QU48; Match level="QueryCoverage=97%, HitCoverage=17%, E-value=1e-24, Identity=47%"; Hit description=NB -ARC domain containing protein
KKGTIRRKRYRFDEPASQVVQIDPQLPALFVEAERLVGIDGPREQVIELMKEDDYGKQLKVVSIVGFGGLGXRTTLANQVXQKIKGSCIDPSDDERQLIDKLRAFLQDKRYFNHC

SEQ ID NO: 131482 - protein, 128 aa, Setaria italica
  Transcript Sequence Number=SeqID_65508
LPTALKKTTMEESLDVDESASTTKIFFLLLGKIGRKPSPSCGQAFTTSRKPSLEFIYIAVTFLPIFPPKLSWYCSSPDKECLLLYTCSNIIICPQNFQCMASNTYEWLYDGIQLTILFLSELSEQNIT

SEQ ID NO: 131483 - protein, 128 aa, Setaria italica
  Transcript Sequence Number=SeqID_65509
  Gene Ontology: Mol. function=hydrolase activity
  Homolog annotation: Hit_ID=Q9LMJ5; Match level="QueryCoverage=99%, HitCoverage=34%, E-value=4e-34, Identity=52%"; Hit description =F10K1.27 protein
NWEEVFLNWVDVSERRKKEYRASPNSDWRPWNFVNKQRGFAARSSLFKRGGPLACELARHPVVLKINDWVFCHGGLLPHHVEYGIERMNREVSMWMKCSGEDSDDETGIPFIATRGYDSVVWSRLYSH

SEQ ID NO: 131484 - protein, 132 aa, Setaria italica
  misc_feature (104)..(104): Xaa can be any naturally occurring amino acid
  misc_feature (124)..(124): Xaa can be any naturally occurring amino acid
  misc_feature (126)..(126): Xaa can be any naturally occurring amino acid
  Transcript Sequence Number=SeqID_65510
  Gene Ontology: Mol. function=nucleoside-triphosphatase activity; Cellular component=membrane; Biological process=proteolysis
  Homolog annotation: Hit_ID=Q6EQ60; Match level="QueryCoverage=92%, HitCoverage=8%, E-value=1e-60, Identity=90%"; Hit description =Putative PDR-type ABC transporter 9
PYYSWYFVLLRAAAIVMRAIRNTVDTGRTVVCTIHQPSIDIFESFDELFLMKRGGEEIYVGPLGQHSCELIKYFEAIEGVSNIKDGYNPSTWMLEVTSTMQDKXTGVNFSDVYKNSELYRRNKXLXKELSTP

SEQ ID NO: 131485 - protein, 76 aa, Setaria italica
  Transcript Sequence Number=SeqID_65511
LHGEEEKPVKRRGRPRKVRDVPEAPNIPDVRGKKLFKDDGHNSSDEESISASDHHGHGEDDDSDDDANQPLNTNNE

SEQ ID NO: 131486 - protein, 107 aa, Setaria italica
  Transcript Sequence Number=SeqID_65512
  Gene Ontology: Mol. function=transferase activity, transferring glycosyl groups; Cellular component=cytoplasm; Biological process =carbohydrate metabolic process
  Homolog annotation: Hit_ID=Q9LKJ3; Match level="QueryCoverage=74%, HitCoverage=9%, E-value=2e-39, Identity=96%"; Hit description=Alpha -glucan phosphorylase, H isozyme
  Pfam annotation: Domain name=Phosphorylase; Domain location=1-107; Score=-623.0; E_value=0.041; Accession=PF00343.12; Description =Carbohydrate phosphorylase
RVSPLFICYTIHDGPYHLFKVWFSFSSQVVFIPNYNVSVAEVLIPGSELSQHISTAGMEASGTSNMKFSLNGCVIIGTLDGANVEIREEVGEDNFFLFGAKADEVAG

SEQ ID NO: 131487 - protein, 88 aa, Setaria italica
  Transcript Sequence Number=SeqID_65513
  Gene Ontology: Mol. function=transferase activity, transferring glycosyl groups; Cellular component=cytoplasm; Biological process =carbohydrate metabolic process
  Homolog annotation: Hit_ID=Q9LKJ3; Match level="QueryCoverage=73%, HitCoverage=7%, E-value=2e-31, Identity=93%"; Hit description=Alpha -glucan phosphorylase, H isozyme
PEKCGAAEKVKPAASPAAEKPADIAGNISYHAQYSPHFSPLAFGPEEAFYATAESVRDHLIERWNDTYVHFHKTDPKQTYYLSMEYLQ

SEQ ID NO: 131488 - protein, 120 aa, Setaria italica
  misc_feature (110)..(110): Xaa can be any naturally occurring amino acid
  Transcript Sequence Number=SeqID_65514
  Homolog annotation: Hit_ID=Q6ASW5; Match level="QueryCoverage=91%, HitCoverage=15%, E-value=9e-43, Identity=78%"; Hit description =Putative microtubule-associated protein
KVVPLFYSGVLSVATIKKTEEEVERLTRLKAGRMKELVLKRRLELENICRNMHVEPDASTVPEKSIALIDSGLVNPSELMANIDEQIARAREELQSRKDIMDRINKWLLXCEEEQWLGGV

SEQ ID NO: 131489 - protein, 32 aa, Setaria italica
  Transcript Sequence Number=SeqID_65515
SERKKPFLYDGARLVAVLEEHKQARLRQEEER

SEQ ID NO: 131490 - protein, 59 aa, Setaria italica
  Transcript Sequence Number=SeqID_65516
KGERLEFEDEPEYEEEAAVDYDEKDLEQYEEQYEDGDEEVEYTVSTLVCKLVVLVIYLV

SEQ ID NO: 131491 - protein, 58 aa, Setaria italica
  Transcript Sequence Number=SeqID_65517
ERPGRSHVGYSGSRSISGHDSAYGSSRHGMGYGGIVLKALLSVRHFWSFTYFNFHVNL

SEQ ID NO: 131492 - protein, 67 aa, Setaria italica
  Transcript Sequence Number=SeqID_65518
VSSKHKENIEEKYSRPFSSELECFSSIVRANTKRTLLSLNYLIMHSTLRCSEVRTSCQIYHYLFQNC

SEQ ID NO: 131493 - protein, 75 aa, Setaria italica
  Transcript Sequence Number=SeqID_65519
TSIGCMPVFLTVTDGIHGRTAQFLVHIYEPFSVLKEQNLCTDTRSYVPSSYKCVLFPTWLLVPLPYCLLYLFLVV

SEQ ID NO: 131494 - protein, 127 aa, Setaria italica
  misc_feature (77)..(77): Xaa can be any naturally occurring amino acid
  misc_feature (120)..(120): Xaa can be any naturally occurring amino acid
  Transcript Sequence Number=SeqID_65520
  Gene Ontology: Cellular component=integral to membrane
  Homolog annotation: Hit_ID=B9SIR5; Match level="QueryCoverage=85%, HitCoverage=20%, E-value=5e-24, Identity=54%"; Hit description =Triose phosphate/phosphate translocator, non-green plastid, chloroplast, putative
  Pfam annotation: Domain name=TPT; Domain location=4-127; Score=44.2; E_value=5.3e-10; Accession=PF03151.8; Description=Triose-phosphate Transporter family
MPSFYSIINFIYFFVYTGLKNPFTLMSHVTPVMAIVTAIISIAMDPWHDFRASHFFDSSAHIIRSSLLLLLGGALAXFFMVLTEYVLVSVTSAVTVTVAGIVKEAVTILVAVLFFNDPFXTWLKGLW

SEQ ID NO: 131495 - protein, 115 aa, Setaria italica
  Transcript Sequence Number=SeqID_65521
  Gene Ontology: Cellular component=integral to membrane
  Homolog annotation: Hit_ID=B9SIR5; Match level="QueryCoverage=86%, HitCoverage=15%, E-value=3e-26, Identity=57%"; Hit description =Triose phosphate/phosphate translocator, non-green plastid, chloroplast, putative
SESCLIFFDCGLTLYLTVAKETEFNLWGFIFIMLAAVMSGFRWSMTQILLQVCYHITLSEFSYFVLLYLILLKEEYGLKNPFTLMSHVTPVMAIVTAIISIAMDPWHDFRASHFF

SEQ ID NO: 131496 - protein, 65 aa, Setaria italica
  Transcript Sequence Number=SeqID_65522
LVQASPNCMFLPLQSVDKTLTCTLASDRCTSFSISDCFPNVYYPRTFKGLAEVLVLFEICWWILN

SEQ ID NO: 131497 - protein, 105 aa, Setaria italica
  Transcript Sequence Number=SeqID_65523
  Gene Ontology: Mol. function=iron ion binding; Cellular component =integral to membrane; Biological process=transport
  Homolog annotation: Hit_ID=Q7XRV2; Match level="QueryCoverage=97%, HitCoverage=15%, E-value=7e-52, Identity=96%"; Hit description =Probable metal-nicotianamine transporter YSL6
FSPTYIGCGLICPHIVNCSTLLGAIISWGFLWPYISTKAGDWYPANLGSNDFKGLYGYKVFISVSVILGDGLYNLIKIIYATIKEIMNARAKQGRLPLGRVQGIE

SEQ ID NO: 131498 - protein, 116 aa, Setaria italica
  misc_feature (79)..(79): Xaa can be any naturally occurring amino acid
  misc_feature (87)..(87): Xaa can be any naturally occurring amino acid
  Transcript Sequence Number=SeqID_65524
  Gene Ontology: Mol. function=iron ion binding; Cellular component =integral to membrane; Biological process=transport
  Homolog annotation: Hit_ID=Q7XRV2; Match level="QueryCoverage=80%, HitCoverage=13%, E-value=2e-40, Identity=91%"; Hit description =Probable metal-nicotianamine transporter YSL6
FRYLTFNFFVFLLGLVLVNWLGLIAGLAACGVMMSIVSTAADLMQDFKTGYLTLSSPRSMFVSQLIGTALGCVIAPLTXFWLYWSAXFDIGNPDGPFKAPYAVIFREMSILGVEGF

SEQ ID NO: 131499 - protein, 80 aa, Setaria italica
  Transcript Sequence Number=SeqID_65525
  Gene Ontology: Mol. function=iron ion binding; Cellular component =integral to membrane; Biological process=transport
  Homolog annotation: Hit_ID=Q7XRV2; Match level="QueryCoverage=96%, HitCoverage=11%, E-value=6e-39, Identity=100%"; Hit description =Probable metal-nicotianamine transporter YSL6
AFKNTFYFDFSPTYIGCGLICPHIVNCSTLLGAIISWGFLWPYISTKAGDWYPANLGSNDFKGLYGYKVFISVSVILMRL

SEQ ID NO: 131500 - protein, 48 aa, Setaria italica
  misc_feature (5)..(5): Xaa can be any naturally occurring amino acid
  Transcript Sequence Number=SeqID_65526
  Homolog annotation: Hit_ID=Q7XRV2; Match level="QueryCoverage=89%, HitCoverage=6%, E-value=4e-14, Identity=83%"; Hit description =Probable metal-nicotianamine transporter YSL6
NETFXKDSVPPWLAGSGYVGLAAISTATVPMIFPQIKWYLVLSDNNVS

SEQ ID NO: 131501 - protein, 77 aa, Setaria italica
  Transcript Sequence Number=SeqID_65527
SWRVWCGCDLTRRCSVCSGACRRGLSKFFDGKSQSFASLAAVAGLEDLPKPPAKRLKASRSCGVGLKDAHRGSLAAP

SEQ ID NO: 131502 - protein, 49 aa, Setaria italica
  Transcript Sequence Number=SeqID_65528
DLPGNGGLRPDRLLAAREQDVGLHSQEDQAGRANNADHSNGRTLEIRMV

SEQ ID NO: 131503 - protein, 70 aa, Setaria italica
  misc_feature (58)..(58): Xaa can be any naturally occurring amino acid
  Transcript Sequence Number=SeqID_65529
PGPFKTSEIGTAQLAGVNLTTTATATLQPLQCNSSIRGCIYRTNQLLTTYRGTNDQKXLLHAPRIKRRGE

SEQ ID NO: 131504 - protein, 44 aa, Setaria italica
  Transcript Sequence Number=SeqID_65530
TNSCLGFLEKKCSGVKLENLPQDIRSAVSGRKANVLREIFFHLL

SEQ ID NO: 131505 - protein, 128 aa, Setaria italica
  misc_feature (11)..(11): Xaa can be any naturally occurring amino acid
  misc_feature (32)..(32): Xaa can be any naturally occurring amino acid
  misc_feature (75)..(75): Xaa can be any naturally occurring amino acid
  Transcript Sequence Number=SeqID_65531
  Gene Ontology: Mol. function=serine-type carboxypeptidase activity; Cellular component=vacuole; Biological process=proteolysis
  Homolog annotation: Hit_ID=P37891; Match level="QueryCoverage=99%, HitCoverage=25%, E-value=1e-50, Identity=77%"; Hit description =Serine carboxypeptidase 3
EAMLTDWMRNXLEVGIPALLEDGINVLIYAGXYDLICNWLGNSRWVHSMEWSGQKDFVSSSESSFVVDGAEAGVXLKSHGPLSFLKVHDAGHMVPMDQPKASLEMLRRFTEGKLKESVPESMVFKAVM

SEQ ID NO: 131506 - protein, 48 aa, Setaria italica
  Transcript Sequence Number=SeqID_65532
DVAIRQRVSSVGLQSLGCFFFIYFYSMVSHHMVGCLFFPFVLLFLLFH

SEQ ID NO: 131507 - protein, 111 aa, Setaria italica
  Transcript Sequence Number=SeqID_65533
  Gene Ontology: Mol. function=serine-type carboxypeptidase activity; Cellular component=vacuole; Biological process=proteolysis
  Homolog annotation: Hit_ID=P37891; Match level="QueryCoverage=98%, HitCoverage=21%, E-value=2e-49, Identity=86%"; Hit description =Serine carboxypeptidase 3
GDKAVKEALGVGDIEFVSCSSTVYEAMLTDWMRNLEVGIPALLEDGINVLIYAGEYDLICNWLGNSRWVHSMEWSGQKDFVSSSESSFVVDGAEAGVLKSHGPLSFLKVVI

SEQ ID NO: 131508 - protein, 48 aa, Setaria italica
  Transcript Sequence Number=SeqID_65534
  Gene Ontology: Mol. function=serine-type carboxypeptidase activity; Cellular component=vacuole; Biological process=proteolysis
  Homolog annotation: Hit_ID=P37891; Match level="QueryCoverage=70%, HitCoverage=6%, E-value=9e-12, Identity=91%"; Hit description=Serine carboxypeptidase 3
CSSTVYEAMLTDWMRNLEVGIPALLEDGINVLAYKVILPSIYKDIDPI

SEQ ID NO: 131509 - protein, 69 aa, Setaria italica
  Transcript Sequence Number=SeqID_65535
  Gene Ontology: Mol. function=serine-type carboxypeptidase activity; Cellular component=vacuole; Biological process=proteolysis
  Homolog annotation: Hit_ID=P37891; Match level="QueryCoverage=97%, HitCoverage=14%, E-value=4e-24, Identity=77%"; Hit description =Serine carboxypeptidase 3
ISSESSFVVDGAEAGVLKSHGPLSFLKVHDAGHMVPMDQPKASLEMLRRFTEGKLKESVPESMVFKAVM

SEQ ID NO: 131510 - protein, 51 aa, Setaria italica
  Transcript Sequence Number=SeqID_65536
TYSWTRTASAWLEQPPRVTHLSISSTGKFMATTFINHWQMLRVEVCRTSRK

SEQ ID NO: 131511 - protein, 36 aa, Setaria italica
  Transcript Sequence Number=SeqID_65537
ALGTAEMVSDMILGNPGKVDYSPFAIKHRFQDDRLS

SEQ ID NO: 131512 - protein, 104 aa, Setaria italica
  misc_feature (52)..(52): Xaa can be any naturally occurring amino acid
  misc_feature (90)..(90): Xaa can be any naturally occurring amino acid
  Transcript Sequence Number=SeqID_65538
  Gene Ontology: Mol. function=oxidoreductase activity
  Homolog annotation: Hit_ID=B6ST46; Match level="QueryCoverage=95%, HitCoverage=15%, E-value=5e-24, Identity=59%"; Hit description =Oxidoreductase
VRYYVDHQVAKSSSTHMASESSEDEHGALSISMTATLDTKGNLVLETRIPFXGTYRKWLNILQLYVTGSSREFKGFSREVDKSVVKCIWXRAGEFFPAMKNVPL

SEQ ID NO: 131513 - protein, 27 aa, Setaria italica
  Transcript Sequence Number=SeqID_65539
YLQKHMANILTLLADSVEGEGDDSLKQ

SEQ ID NO: 131514 - protein, 72 aa, Setaria italica
  Transcript Sequence Number=SeqID_65540
NTVHFLHTSLHKHYRLNNHLLRHSHNQSAWISWMRGMEWLKDNLAHAHLQMNPVLIHLANSRAGGYCLVSRY

SEQ ID NO: 131515 - protein, 76 aa, Setaria italica
  Transcript Sequence Number=SeqID_65541
  Gene Ontology: Mol. function=hydrolase activity, acting on acid anhydrides, catalyzing transmembrane movement of substances; Cellular component=integral to membrane; Biological process=copper ion transport
  Homolog annotation: Hit_ID=Q655X4; Match level="QueryCoverage=100%, HitCoverage=8%, E-value=7e-33, Identity=90%"; Hit description =Putative ATP dependent copper transporter
IDALLVQPGDVLKVLPGSKVPADGVVVWGTSHVNESMITGESAPVPKEVSGVVIGGTINLHGVLHIQATKVGSGTV

SEQ ID NO: 131516 - protein, 59 aa, Setaria italica
  misc_feature (17)..(17): Xaa can be any naturally occurring amino acid
  Transcript Sequence Number=SeqID_65542
  Gene Ontology: Mol. function=hydrolase activity, acting on acid anhydrides, catalyzing transmembrane movement of substances; Cellular component=integral to membrane; Biological process=copper ion transport
  Homolog annotation: Hit_ID=Q655X4; Match level="QueryCoverage=100%, HitCoverage=6%, E-value=3e-20, Identity=86%"; Hit description =Putative ATP dependent copper transporter
VQAIEDAGFEAAFLQSXSEQDKILLGLIGLHTERDVEVLHDILKKMDGLRQFDVNTVLS

SEQ ID NO: 131517 - protein, 66 aa, Setaria italica
  Transcript Sequence Number=SeqID_65543
VIAQKFCTNYTSNGLDLRDRRSRGIDLSGSRQRRNLEEAATQQATQVSSMRGLQSHWTGRSPWLTA

SEQ ID NO: 131518 - protein, 58 aa, Setaria italica
  Transcript Sequence Number=SeqID_65544
KRPAEWNGFGYVIGAFRRLCLASVYTTLFWTIQTGMVSSLRCKVCILSTVLLHIWTGN

SEQ ID NO: 131519 - protein, 37 aa, Setaria italica
  misc_feature (1)..(1): Xaa can be any naturally occurring amino acid
  misc_feature (4)..(4): Xaa can be any naturally occurring amino acid
  Transcript Sequence Number=SeqID_65545
XLFXLLVSLLLVRVFVLNLVLNFSSYLFRWLVSKLVF

SEQ ID NO: 131520 - protein, 70 aa, Setaria italica
  Transcript Sequence Number=SeqID_65546
  Gene Ontology: Mol. function=protein serine/threonine kinase activity; Biological process=protein amino acid phosphorylation
  Homolog annotation: Hit_ID=Q336M2; Match level="QueryCoverage=98%, HitCoverage=14%, E-value=9e-30, Identity=89%"; Hit description =Cyclin-dependent kinase E-1
MVSSCSRYDPRKRITAAQALEHEYFRMDPLPGRNALLPSQPGEKIVQYPVRPVDTTTDFEGTTSLQPTQP

SEQ ID NO: 131521 - protein, 55 aa, Setaria italica
  Transcript Sequence Number=SeqID_65547
  Gene Ontology: Mol. function=phosphoric diester hydrolase activity; Cellular component=anchored to membrane; Biological process =intracellular signaling cascade
  Homolog annotation: Hit_ID=B6TVN4; Match level="QueryCoverage=89%, HitCoverage=11%, E-value=2e-14, Identity=68%"; Hit description =Phospholipase C
MFCILVRRETLCAQNGVRGLMLDMYDFRNDIWLCHSFGGICQNFTAFVSSPSISV

SEQ ID NO: 131522 - protein, 45 aa, Setaria italica
  Transcript Sequence Number=SeqID_65548
  Gene Ontology: Mol. function=metal ion binding
  Homolog annotation: Hit_ID=B6TVQ4; Match level="QueryCoverage=100%, HitCoverage=9%, E-value=1e-13, Identity=80%"; Hit description =Senescence-associated-like protein
MSARREVVSYHPLPAPGAVNSFKDEIQSKVMETVGNAINSFDPKS

SEQ ID NO: 131523 - protein, 49 aa, Setaria italica
  Transcript Sequence Number=SeqID_65549
DHIFICKLSRLQAGTLFVGSAQRSLLKWTLEIVSCLQGTSGYSLVVFLL

SEQ ID NO: 131524 - protein, 86 aa, Setaria italica
  misc_feature (75)..(75): Xaa can be any naturally occurring amino acid
  Transcript Sequence Number=SeqID_65550
  Gene Ontology: Cellular component=integral to membrane
GNFKLVRIDQIVNLQYLMMGSLSPGLKSHAVTLYEAGKLGDSCIAELCSDLASLEGKKFEGVLEEFANHAFSLAXFLECLQSGGVS

SEQ ID NO: 131525 - protein, 87 aa, Setaria italica
  Transcript Sequence Number=SeqID_65551
  Homolog annotation: Hit_ID=Q01JP4; Match level="QueryCoverage=87%, HitCoverage=7%, E-value=3e-25, Identity=69%"; Hit description =OSIGBa0139P06.4 protein
SHHLEVSSARRRHVHDAHTLLRVLCHKKDKIASTFLRIQYHLPRSSDYDDLPVKDVSSKVPMFSRTIDLKKKVTYNYKIKVTKKETK

SEQ ID NO: 131526 - protein, 58 aa, Setaria italica
  Transcript Sequence Number=SeqID_65552
LSPVCLAYLLLRVSEIGHQLGTCRLQVEQSTSPRNKNPSRCFIYFCLGQKFSSYLSKK

SEQ ID NO: 131527 - protein, 74 aa, Setaria italica
  Transcript Sequence Number=SeqID_65553
  Gene Ontology: Mol. function=hydrogen ion transporting ATP synthase activity, rotational mechanism; Cellular component=proton -transporting two-sector ATPase complex
  Homolog annotation: Hit_ID=Q84R40; Match level="QueryCoverage=59%, HitCoverage=21%, E-value=2e-12, Identity=77%"; Hit description=ATP synthase
MQTSCSNAWRGLARCSLLILGMRSCRAMNILNQPINPGGHPVFPAAKESGHLAPSSVRFDGAPAQPSTAAAGCS

SEQ ID NO: 131528 - protein, 79 aa, Setaria italica
  misc_feature (30)..(30): Xaa can be any naturally occurring amino acid
  misc_feature (77)..(78): Xaa can be any naturally occurring amino acid
  Transcript Sequence Number=SeqID_65554
AGDATIIGALLGLSTQMYSNALRKLPYMRXHPWEHVLGMGLGAVFVNQLVKFDDKVKEDLDKMLERAREANERRYIXXD

SEQ ID NO: 131529 - protein, 141 aa, Setaria italica
  misc_feature (66)..(66): Xaa can be any naturally occurring amino acid
  Transcript Sequence Number=SeqID_65555
  Gene Ontology: Mol. function=nucleic acid binding
  Subcellular localization annotation: CTP_CleavageSite=34; ConfidenceScore=5.11e-01
YHAGYAAPGGRPIYGPPPPNTNRAPQGILPCPPVSTHRGSVIPPPPIQTSFVRPVYHGPGSPWENXTPNPPPFSHVSPRMMPGSNFRANPTLPFIPSSVTPIVQLPGGSAQHSEKMPPPTNLLTKIVRLPPTNLTTYQPTN

SEQ ID NO: 131530 - protein, 120 aa, Setaria italica
  Transcript Sequence Number=SeqID_65556
  Gene Ontology: Mol. function=binding; Cellular component=plasma membrane; Biological process=ethylene mediated signaling pathway
  Homolog annotation: Hit_ID=Q9FVD6; Match level="QueryCoverage=100%, HitCoverage=20%, E-value=9e-55, Identity=84%"; Hit description =Ser/Thr specific protein phosphatase 2A A regulatory subunit beta isoform
  Pfam annotation: Domain name=HEAT; Domain location=23-59; Score=22.4; E_value=0.0019; Accession=PF02985.14; Description=HEAT repeat
  Pfam annotation: Domain name=HEAT; Domain location=62-93; Score=4.2; E_value=15; Accession=PF02985.14; Description=HEAT repeat
  Pfam module annotation: Pfam domain module=HEAT::HEAT; Domain location=23-59::62-93
GEWFTARVSSCGLFHIAYPSASESLKAELRTIYGQLCQDDMPMVRRAAASNLGKFSATVEQNHLKTEIMSIFDDLTQDDQDSVRLLAVEVEGCAALGKLLEPQDCAVHILPVIVNLSCEK

SEQ ID NO: 131531 - protein, 75 aa, Setaria italica
  Transcript Sequence Number=SeqID_65557
  Gene Ontology: Mol. function=binding; Cellular component=plasma membrane; Biological process=ethylene mediated signaling pathway
  Homolog annotation: Hit_ID=Q38950; Match level="QueryCoverage=100%, HitCoverage=12%, E-value=2e-35, Identity=93%"; Hit description =Serine/threonine-protein phosphatase 2A 65 kDa regulatory subunit A beta isoform
  Pfam annotation: Domain name=HEAT; Domain location=22-58; Score=28.6; E_value=2.6e-05; Accession=PF02985.14; Description=HEAT repeat
SWRVRYMVANQLYELCEAVGPEPTRADLVPAYVRLLRDNEAEVRIAAAGKVTKFCRILSPQLAIQHILPCVKELS

SEQ ID NO: 131532 - protein, 62 aa, Setaria italica
  misc_feature (29)..(29): Xaa can be any naturally occurring amino acid
  Transcript Sequence Number=SeqID_65558
  Gene Ontology: Mol. function=nucleotide binding; Biological process =defense response
  Homolog annotation: Hit_ID=A0FD19; Match level="QueryCoverage=79%, HitCoverage=5%, E-value=8e-16, Identity=79%"; Hit description=NBS -LRR type resistance protein
  Subcellular localization annotation: CTP_CleavageSite=32; ConfidenceScore=5.34e-01
IISKLDQVNQVMLSRTSGNSSFNKERKIXGRSCSMVASFPNTGAIPIMTEAKAERTCWEWLL

SEQ ID NO: 131533 - protein, 77 aa, Setaria italica
  misc_feature (17)..(17): Xaa can be any naturally occurring amino acid
  Transcript Sequence Number=SeqID_65559
  Gene Ontology: Mol. function=binding; Cellular component=plasma membrane; Biological process=ethylene mediated signaling pathway
  Homolog annotation: Hit_ID=Q8L7J9; Match level="QueryCoverage=100%, HitCoverage=27%, E-value=6e-34, Identity=88%"; Hit description =Protein phosphatase 2A regulatory A subunit (Fragment)
  Pfam annotation: Domain name=HEAT; Domain location=3-39; Score=18.5; E_value=0.028; Accession=PF02985.14; Description=HEAT repeat
  Pfam annotation: Domain name=HEAT; Domain location=42-74; Score=16.6; E_value=0.1; Accession=PF02985.14; Description=HEAT repeat
  Pfam module annotation: Pfam domain module=HEAT::HEAT; Domain location=3-39::42-74
GAEITCQKLLPVIINSXKDRVPNIKFNVAKVLQSLIPILDQSTVKPCLVELSEDPDVDVRYYANQALQACDQMMVSS

SEQ ID NO: 131534 - protein, 135 aa, Setaria italica
  misc_feature (52)..(52): Xaa can be any naturally occurring amino acid
  Transcript Sequence Number=SeqID_65560
  Gene Ontology: Mol. function=binding; Cellular component=plasma membrane; Biological process=ethylene mediated signaling pathway
  Homolog annotation: Hit_ID=Q8L7J9; Match level="QueryCoverage=99%, HitCoverage=45%, E-value=7e-72, Identity=97%"; Hit description =Protein phosphatase 2A regulatory A subunit (Fragment)
  Pfam annotation: Domain name=HEAT; Domain location=14-50; Score=25.9; E_value=0.00016; Accession=PF02985.14; Description=HEAT repeat
  Pfam annotation: Domain name=HEAT; Domain location=53-89; Score=20.7; E_value=0.0063; Accession=PF02985.14; Description=HEAT repeat
  Pfam annotation: Domain name=HEAT; Domain location=92-128; Score =18.1; E_value=0.037; Accession=PF02985.14; Description=HEAT repeat
  Pfam module annotation: Pfam domain module=HEAT::HEAT::HEAT; Domain location=14-50::53-89::92-128
ISKLDQVNQVIGIDLLSQSLLPAIVELAEDRHWRVRLAIIEYIPLLASQLGXGFFDDKLGALCMQWLEDKVFSIRDAAANNLKRLAEEFGPEWAMQHIIPQVLEKINNPHYLYRMTILQAISLLAPVMGAEITCS

SEQ ID NO: 131535 - protein, 138 aa, Setaria italica
  misc_feature (21)..(21): Xaa can be any naturally occurring amino acid
  Transcript Sequence Number=SeqID_65561
  Gene Ontology: Mol. function=binding; Cellular component=plasma membrane; Biological process=ethylene mediated signaling pathway
  Homolog annotation: Hit_ID=Q8L7J9; Match level="QueryCoverage=93%, HitCoverage=44%, E-value=7e-68, Identity=96%"; Hit description =Protein phosphatase 2A regulatory A subunit (Fragment)
  Pfam annotation: Domain name=HEAT; Domain location=13-49; Score=20.9; E_value=0.0053; Accession=PF02985.14; Description=HEAT repeat
  Pfam annotation: Domain name=HEAT; Domain location=52-88; Score=20.7; E_value=0.0063; Accession=PF02985.14; Description=HEAT repeat
  Pfam annotation: Domain name=HEAT; Domain location=91-127; Score =18.1; E_value=0.037; Accession=PF02985.14; Description=HEAT repeat
  Pfam module annotation: Pfam domain module=HEAT::HEAT::HEAT; Domain location=13-49::52-88::91-127
SKLDQVNQVIGIDLLSQSLLXAIVELAEDRHWRVRLAIIEYIPLLASQLGAGFFDDKLGALCMQWLEDKVFSIRDAAANNLKRLAEEFGPEWAMQHIIPQVLEKINNPHYLYRMTILQAISLLAPVMGARKYNLVQKD

SEQ ID NO: 131536 - protein, 55 aa, Setaria italica
  Transcript Sequence Number=SeqID_65562
LNYNINNTTNKGSRPSIYQHGSVDLLLRLEGTFNLKAKLQILQNWNKKSSSYYQT

SEQ ID NO: 131537 - protein, 63 aa, Setaria italica
  Transcript Sequence Number=SeqID_65563
  Gene Ontology: Mol. function=binding; Cellular component=plasma membrane; Biological process=ethylene mediated signaling pathway
  Homolog annotation: Hit_ID=Q8L7J9; Match level="QueryCoverage=100%, HitCoverage=22%, E-value=3e-26, Identity=89%"; Hit description =Protein phosphatase 2A regulatory A subunit (Fragment)
  Pfam annotation: Domain name=HEAT; Domain location=28-60; Score=16.6; E_value=0.1; Accession=PF02985.14; Description=HEAT repeat
NSSKDRVPNIKFNVAKVLQSLIPILDQSTVKPCLVELSEDPDVDVRYYANQALQACDQMMVSS

SEQ ID NO: 131538 - protein, 51 aa, Setaria italica
  Transcript Sequence Number=SeqID_65564
KELFNLKAKLQILQNWNKKIKLYIRLVSSTPSSDRTPAGPGLRSILHPHQG

SEQ ID NO: 131539 - protein, 46 aa, Setaria italica
  Transcript Sequence Number=SeqID_65565
LNYNINNTTNKGSRPSIYQHGSVDLLLRLEGTFQSKGQITDTPKLE

SEQ ID NO: 131540 - protein, 107 aa, Setaria italica
  Transcript Sequence Number=SeqID_65566
  Gene Ontology: Mol. function=binding; Cellular component=plasma membrane; Biological process=ethylene mediated signaling pathway
  Homolog annotation: Hit_ID=Q8L7J9; Match level="QueryCoverage=100%, HitCoverage=38%, E-value=2e-52, Identity=91%"; Hit description =Protein phosphatase 2A regulatory A subunit (Fragment)
  Pfam annotation: Domain name=HEAT; Domain location=33-69; Score=20.6; E_value=0.0064; Accession=PF02985.14; Description=HEAT repeat
  Pfam annotation: Domain name=HEAT; Domain location=72-104; Score =16.6; E_value=0.1; Accession=PF02985.14; Description=HEAT repeat
  Pfam module annotation: Pfam domain module=HEAT::HEAT; Domain location=33-69::72-104
IPQVLEKINNPHYLYRMTILQAISLLAPVMGAEITCQKLLPVIINSSKDRVPNIKFNVAKVLQSLIPILDQSTVKPCLVELSEDPDVDVRYYANQALQACDQMMVSS

SEQ ID NO: 131541 - protein, 141 aa, Setaria italica
  misc_feature (17)..(17): Xaa can be any naturally occurring amino acid
  misc_feature (26)..(26): Xaa can be any naturally occurring amino acid
  misc_feature (56)..(56): Xaa can be any naturally occurring amino acid
  Transcript Sequence Number=SeqID_65567
  Gene Ontology: Mol. function=binding; Cellular component=plasma membrane; Biological process=ethylene mediated signaling pathway
  Homolog annotation: Hit_ID=Q8L7J9; Match level="QueryCoverage=99%, HitCoverage=47%, E-value=7e-70, Identity=94%"; Hit description =Protein phosphatase 2A regulatory A subunit (Fragment)
  Pfam annotation: Domain name=HEAT; Domain location=18-54; Score=20.9; E_value=0.0053; Accession=PF02985.14; Description=HEAT repeat
  Pfam annotation: Domain name=HEAT; Domain location=57-93; Score=20.7; E_value=0.0063; Accession=PF02985.14; Description=HEAT repeat
  Pfam annotation: Domain name=HEAT; Domain location=97-133; Score =14.1; E_value=0.57; Accession=PF02985.14; Description=HEAT repeat
  Pfam module annotation: Pfam domain module=HEAT::HEAT::HEAT; Domain location=18-54::57-93::97-133
LNIISKLDQVNQVIGIXDLLSQSLLXAIVELAEDRHWRVRLAIIEYIPLLASQLGXGFFDDKLGALCMQWLEDKVFSIRDAAANNLKRLAEEFGPEWAIVQHIIPQVLEKINNPHYLYRMTILQAISLLAPVMGAEITCQS

SEQ ID NO: 131542 - protein, 137 aa, Setaria italica
  misc_feature (43)..(43): Xaa can be any naturally occurring amino acid
  Transcript Sequence Number=SeqID_65568
  Gene Ontology: Mol. function=binding; Cellular component=plasma membrane; Biological process=ethylene mediated signaling pathway
  Homolog annotation: Hit_ID=Q8L7J9; Match level="QueryCoverage=94%, HitCoverage=44%, E-value=3e-69, Identity=96%"; Hit description =Protein phosphatase 2A regulatory A subunit (Fragment)
  Pfam annotation: Domain name=HEAT; Domain location=44-80; Score=20.7; E_value=0.0063; Accession=PF02985.14; Description=HEAT repeat
  Pfam annotation: Domain name=HEAT; Domain location=5-41; Score=25.9; E_value=0.00016; Accession=PF02985.14; Description=HEAT repeat
  Pfam annotation: Domain name=HEAT; Domain location=83-119; Score =18.1; E_value=0.037; Accession=PF02985.14; Description=HEAT repeat
  Pfam module annotation: Pfam domain module=HEAT::HEAT::HEAT; Domain location=44-80::5-41::83-119
GIGIDLLSQSLLPAIVELAEDRHWRVRLAIIEYIPLLASQLGXGFFDDKLGALCMQWLEDKVFSIRDAAANNLKRLAEEFGPEWAMQHIIPQVLEKINNPHYLYRMTILQAISLLAPVMGAEITCQKLLPVHSFNFL

SEQ ID NO: 131543 - protein, 47 aa, Setaria italica
  Transcript Sequence Number=SeqID_65569
RPNYRYSKIGIKKIKLYIRLVSSTPSSDRTPAGPGLRSILHPHLGFL

SEQ ID NO: 131544 - protein, 82 aa, Setaria italica
  Transcript Sequence Number=SeqID_65570
  Gene Ontology: Mol. function=binding; Cellular component=plasma membrane; Biological process=ethylene mediated signaling pathway
  Homolog annotation: Hit_ID=Q8L7J9; Match level="QueryCoverage=100%, HitCoverage=29%, E-value=2e-37, Identity=90%"; Hit description =Protein phosphatase 2A regulatory A subunit (Fragment)
  Pfam annotation: Domain name=HEAT; Domain location=47-79; Score=16.6; E_value=0.1; Accession=PF02985.14; Description=HEAT repeat
  Pfam annotation: Domain name=HEAT; Domain location=8-44; Score=20.6; E_value=0.0064; Accession=PF02985.14; Description=HEAT repeat
  Pfam module annotation: Pfam domain module=HEAT::HEAT; Domain location=47-79::8-44
LAPVMGAEITCQKLLPVIINSSKDRVPNIKFNVAKVLQSLIPILDQSTVKPCLVELSEDPDVDVRYYANQALQACDQMMVSS

SEQ ID NO: 131545 - protein, 133 aa, Setaria italica
  misc_feature (11)..(11): Xaa can be any naturally occurring amino acid
  Transcript Sequence Number=SeqID_65571
  Gene Ontology: Mol. function=binding; Cellular component=plasma membrane; Biological process=ethylene mediated signaling pathway
  Homolog annotation: Hit_ID=Q8L7J9; Match level="QueryCoverage=98%, HitCoverage=46%, E-value=7e-68, Identity=92%"; Hit description =Protein phosphatase 2A regulatory A subunit (Fragment)
  Pfam annotation: Domain name=HEAT; Domain location=12-48; Score=20.7; E_value=0.0063; Accession=PF02985.14; Description=HEAT repeat
  Pfam annotation: Domain name=HEAT; Domain location=51-87; Score=18.1; E_value=0.037; Accession=PF02985.14; Description=HEAT repeat
  Pfam annotation: Domain name=HEAT; Domain location=90-126; Score =20.6; E_value=0.0064; Accession=PF02985.14; Description=HEAT repeat
  Pfam module annotation: Pfam domain module=HEAT::HEAT::HEAT; Domain location=12-48::51-87::90-126
VHPLLASQLGXGFFDDKLGALCMQWLEDKVFSIRDAAANNLKRLAEEFGPEWAMQHIIPQVLEKINNPHYLYRMTILQAISLLAPVMGAEITCQKLLPVIINSSKDRVPNIKFNVAKVLQSLIPILDQSTVKP

SEQ ID NO: 131546 - protein, 133 aa, Setaria italica
  misc_feature (8)..(8): Xaa can be any naturally occurring amino acid
  misc_feature (24)..(24): Xaa can be any naturally occurring amino acid
  Transcript Sequence Number=SeqID_65572
  Gene Ontology: Mol. function=binding; Cellular component=plasma membrane; Biological process=ethylene mediated signaling pathway
  Homolog annotation: Hit_ID=Q8L7J9; Match level="QueryCoverage=97%, HitCoverage=44%, E-value=2e-65, Identity=92%"; Hit description =Protein phosphatase 2A regulatory A subunit (Fragment)
  Pfam annotation: Domain name=HEAT; Domain location=49-85; Score=18.1; E_value=0.037; Accession=PF02985.14; Description=HEAT repeat
  Pfam annotation: Domain name=HEAT; Domain location=88-124; Score =20.6; E_value=0.0064; Accession=PF02985.14; Description=HEAT repeat
  Pfam annotation: Domain name=HEAT; Domain location=9-46; Score=11.0; E_value=2.2; Accession=PF02985.14; Description=HEAT repeat
  Pfam module annotation: Pfam domain module=HEAT::HEAT::HEAT; Domain location=49-85::88-124::9-46
LLASQLGXGFFDDKLGALCMQWVXKDKVFSIRDAAANNLKRLAEEFGPEWAMQHIIPQVLEKINNPHYLYRMTILQAISLLAPVMGAEITCQKLLPVIINSSKDRVPNIKFNVAKVLQSLIPILDQSTVETMP

SEQ ID NO: 131547 - protein, 63 aa, Setaria italica
  Transcript Sequence Number=SeqID_65573
  Gene Ontology: Mol. function=binding; Cellular component=plasma membrane; Biological process=ethylene mediated signaling pathway
  Homolog annotation: Hit_ID=Q8L7J9; Match level="QueryCoverage=95%, HitCoverage=20%, E-value=3e-27, Identity=95%"; Hit description =Protein phosphatase 2A regulatory A subunit (Fragment)
  Pfam annotation: Domain name=HEAT; Domain location=26-62; Score=18.1; E_value=0.037; Accession=PF02985.14; Description=HEAT repeat
ERIKVFSIRDAAANNLKRLAEEFGPEWAMQHIIPQVLEKINNPHYLYRMTILQAISLLAPVMG

SEQ ID NO: 131548 - protein, 87 aa, Setaria italica
  Transcript Sequence Number=SeqID_65574
  Gene Ontology: Mol. function=binding; Cellular component=plasma membrane; Biological process=ethylene mediated signaling pathway
  Homolog annotation: Hit_ID=Q8L7J9; Match level="QueryCoverage=97%, HitCoverage=29%, E-value=2e-41, Identity=95%"; Hit description =Protein phosphatase 2A regulatory A subunit (Fragment)
  Pfam annotation: Domain name=HEAT; Domain location=11-47; Score=25.9; E_value=0.00016; Accession=PF02985.14; Description=HEAT repeat
  Pfam annotation: Domain name=HEAT; Domain location=50-86; Score=20.7; E_value=0.0063; Accession=PF02985.14; Description=HEAT repeat
  Pfam module annotation: Pfam domain module=HEAT::HEAT; Domain location=11-47::50-86
NTKLNQVIGIDLLSQSLLPAIVELAEDRHWRVRLAIIEYIPLLASQLGVGFFDDKLGALCMQWLEDKVFSIRDAAANNLKRLAEEFG

SEQ ID NO: 131549 - protein, 110 aa, Setaria italica
  misc_feature (97)..(97): Xaa can be any naturally occurring amino acid
  Transcript Sequence Number=SeqID_65575
  Gene Ontology: Mol. function=binding; Cellular component=plasma membrane; Biological process=ethylene mediated signaling pathway
  Homolog annotation: Hit_ID=Q8L7J9; Match level="QueryCoverage=89%, HitCoverage=33%, E-value=1e-47, Identity=94%"; Hit description =Protein phosphatase 2A regulatory A subunit (Fragment)
  Pfam annotation: Domain name=HEAT; Domain location=18-54; Score=25.9; E_value=0.00016; Accession=PF02985.14; Description=HEAT repeat
  Pfam annotation: Domain name=HEAT; Domain location=57-93; Score=20.7; E_value=0.0063; Accession=PF02985.14; Description=HEAT repeat
  Pfam module annotation: Pfam domain module=HEAT::HEAT; Domain location=18-54::57-93
NTRQNLEYKVKPRLIGIDLLSQSLLPAIVELAEDRHWRVRLAIIEYIPLLASQLGVGFFDDKLGALCMQWLEDKVFSIRDAAANNLKRLAEEFGPEXWAMQHIIPQVLEK

SEQ ID NO: 131550 - protein, 46 aa, Setaria italica; identical to SEQ ID NO: 131539
  Transcript Sequence Number=SeqID_65576

SEQ ID NO: 131551 - protein, 127 aa, Setaria italica
  misc_feature (102)..(102): Xaa can be any naturally occurring amino acid
  misc_feature (113)..(113): Xaa can be any naturally occurring amino acid
  Transcript Sequence Number=SeqID_65577
  Gene Ontology: Mol. function=binding; Cellular component=plasma membrane; Biological process=ethylene mediated signaling pathway
  Homolog annotation: Hit_ID=Q8L7J9; Match level="QueryCoverage=99%, HitCoverage=44%, E-value=8e-62, Identity=90%"; Hit description =Protein phosphatase 2A regulatory A subunit (Fragment)
  Pfam annotation: Domain name=HEAT; Domain location=13-49; Score=18.1; E_value=0.037; Accession=PF02985.14; Description=HEAT repeat
  Pfam annotation: Domain name=HEAT; Domain location=52-88; Score=20.6; E_value=0.0064; Accession=PF02985.14; Description=HEAT repeat
  Pfam annotation: Domain name=HEAT; Domain location=91-123; Score=7.7; E_value=5.6; Accession=PF02985.14; Description=HEAT repeat
  Pfam module annotation: Pfam domain module=HEAT::HEAT::HEAT; Domain location=13-49::52-88::91-123
LTLKRLAEEFGPEWAMQHIIPQVLEKINNPHYLYRMTILQAISLLAPVMGAEITCQKLLPVIINSSKDRVPNIKFNVAKVLQSLIPILDQSTVKPCLVELSXDPDVDVRYYAXNQALQACDQMMVSS

SEQ ID NO: 131552 - protein, 133 aa, Setaria italica
  misc_feature (45)..(45): Xaa can be any naturally occurring amino acid
  Transcript Sequence Number=SeqID_65578
  Gene Ontology: Mol. function=binding; Cellular component=plasma membrane; Biological process=ethylene mediated signaling pathway
  Homolog annotation: Hit_ID=Q8L7J9; Match level="QueryCoverage=100%, HitCoverage=99%, E-value=4e-68, Identity=64%"; Hit description =Protein phosphatase 2A regulatory A subunit (Fragment)
  Pfam annotation: Domain name=HEAT; Domain location=20-56; Score=15.4; E_value=0.24; Accession=PF02985.14; Description=HEAT repeat
  Pfam annotation: Domain name=HEAT; Domain location=59-95; Score=20.6; E_value=0.0064; Accession=PF02985.14; Description=HEAT repeat
  Pfam annotation: Domain name=HEAT; Domain location=98-130; Score =16.6; E_value=0.1; Accession=PF02985.14; Description=HEAT repeat
  Pfam module annotation: Pfam domain module=HEAT::HEAT::HEAT; Domain location=20-56::59-95::98-130
SIRDAAANNLKRLAEEFGPEWAMQHIIPQVLEKINNPHYLYRMTXLQAISLLAPVMGAEITCQKLLPVIINSSKDRVPNIKFNVAKVLQSLIPILDQSTVKPCLVELSEDPDVDVRYYANQALQACDQMMVSS

SEQ ID NO: 131553 - protein, 83 aa, Setaria italica
  Transcript Sequence Number=SeqID_65579
  Gene Ontology: Mol. function=binding; Cellular component=plasma membrane; Biological process=ethylene mediated signaling pathway
  Homolog annotation: Hit_ID=Q8L7J9; Match level="QueryCoverage=78%, HitCoverage=22%, E-value=3e-29, Identity=95%"; Hit description =Protein phosphatase 2A regulatory A subunit (Fragment)
  Pfam annotation: Domain name=HEAT; Domain location=28-64; Score=20.6; E_value=0.0064; Accession=PF02985.14; Description=HEAT repeat
RRSNNPHYLYRMTILQAISLLAPVMGAEITCQKLLPVIINSSKDRVPNIKFNVAKVLQSLIPILDQSVSSYSFCMILHLKFYI

SEQ ID NO: 131554 - protein, 46 aa, Setaria italica; identical to SEQ ID NO: 131539
  Transcript Sequence Number=SeqID_65580

SEQ ID NO: 131555 - protein, 46 aa, Setaria italica; identical to SEQ ID NO: 131539
  Transcript Sequence Number=SeqID_65581

SEQ ID NO: 131556 - protein, 46 aa, Setaria italica; identical to SEQ ID NO: 131539
  Transcript Sequence Number=SeqID_65582

SEQ ID NO: 131557 - protein, 56 aa, Setaria italica
  Transcript Sequence Number=SeqID_65583
LNYNINNTTNKGSRPSIYQHGSVDLLLRLEGTFQSKGQITDTPKLEIKKIKLKYLM

SEQ ID NO: 131558 - protein, 110 aa, Setaria italica
  misc_feature (5)..(5): Xaa can be any naturally occurring amino acid
  misc_feature (41)..(41): Xaa can be any naturally occurring amino acid
  Transcript Sequence Number=SeqID_65584
  Gene Ontology: Mol. function=binding; Cellular component=plasma membrane; Biological process=ethylene mediated signaling pathway
  Homolog annotation: Hit_ID=Q8L7J9; Match level="QueryCoverage=100%, HitCoverage=39%, E-value=1e-52, Identity=90%"; Hit description =Protein phosphatase 2A regulatory A subunit (Fragment)
  Pfam annotation: Domain name=HEAT; Domain location=1-33; Score=2.5; E_ value=25; Accession=PF02985.14; Description=HEAT repeat
  Pfam annotation: Domain name=HEAT; Domain location=36-72; Score=19.6; E_value=0.013; Accession=PF02985.14; Description=HEAT repeat
  Pfam annotation: Domain name=HEAT; Domain location=75-107; Score =16.6; E_value=0.1; Accession=PF02985.14; Description=HEAT repeat
  Pfam module annotation: Pfam domain module=HEAT::HEAT::HEAT; Domain location=1-33::36-72::75-107
QHIIXQVLEKINNPHYLYRMTILQAISLLAPVMGAEITCQXLLPVIINSSKDRVPNIKFNVAKVLQSLIPILDQSTVKPCLVELSEDPDVDVRYYANQALQACDQMMVSS

SEQ ID NO: 131559 - protein, 46 aa, Setaria italica; identical to SEQ ID NO: 131539
  Transcript Sequence Number=SeqID_65585

SEQ ID NO: 131560 - protein, 51 aa, Setaria italica
  misc_feature (15)..(15): Xaa can be any naturally occurring amino acid
  Transcript Sequence Number=SeqID_65586
  Gene Ontology: Mol. function=binding; Cellular component=plasma membrane; Biological process=ethylene mediated signaling pathway
  Homolog annotation: Hit_ID=Q8L7J9; Match level="QueryCoverage=100%, HitCoverage=18%, E-value=2e-17, Identity=85%"; Hit description =Protein phosphatase 2A regulatory A subunit (Fragment)
  Pfam annotation: Domain name=HEAT; Domain location=16-48; Score=16.6; E_value=0.1; Accession=PF02985.14; Description=HEAT repeat
VAKVLQSLIPILDQXSTVKPCLVELSEDPDVDVRYYANQALQACDQMMVSS

SEQ ID NO: 131561 - protein, 95 aa, Setaria italica
  misc_feature (19)..(19): Xaa can be any naturally occurring amino acid
  Transcript Sequence Number=SeqID_65587
  Gene Ontology: Mol. function=binding; Cellular component=plasma membrane; Biological process=ethylene mediated signaling pathway
  Homolog annotation: Hit_ID=Q8L7J9; Match level="QueryCoverage=95%, HitCoverage=31%, E-value=2e-41, Identity=89%"; Hit description =Protein phosphatase 2A regulatory A subunit (Fragment)
  Pfam annotation: Domain name=HEAT; Domain location=44-80; Score=15.5; E_value=0.22; Accession=PF02985.14; Description=HEAT repeat
  Pfam annotation: Domain name=HEAT; Domain location=5-41; Score=15.8; E_value=0.18; Accession=PF02985.14; Description=HEAT repeat
  Pfam module annotation: Pfam domain module=HEAT::HEAT; Domain location=44-80::5-41
EFSPEWAMQYIIPQVLEKXNNPHYLYRMTTLQAISLLAPVMGADITCQQLLPVVIASSKDRVPNMKFNVAKVLQSLIPILDQSVVEKTVKPIDLS

SEQ ID NO: 131562 - protein, 27 aa, Setaria italica
  Transcript Sequence Number=SeqID_65588
LSEDPDVDVRYYANQALQACDQMMVSS

SEQ ID NO: 131563 - protein, 33 aa, Setaria italica
  Transcript Sequence Number=SeqID_65589
  Homolog annotation: Hit_ID=Q8L7J9; Match level="QueryCoverage=100%, HitCoverage=11%, E-value=1e-10, Identity=93%"; Hit description =Protein phosphatase 2A regulatory A subunit (Fragment)
KPCLVELSEDPDVDVRYYANQALQACDQMMVSS

SEQ ID NO: 131564 - protein, 53 aa, Setaria italica
  Transcript Sequence Number=SeqID_65590
KELFNLKAKLQILQNWNKKIKLYIRLVSSTPSSDRTPAGPGLRSILHPHQVLA

SEQ ID NO: 131565 - protein, 78 aa, Setaria italica
  Transcript Sequence Number=SeqID_65591
  Gene Ontology: Mol. function=binding; Cellular component=plasma membrane; Biological process=ethylene mediated signaling pathway
  Homolog annotation: Hit_ID=Q8L7J9; Match level="QueryCoverage=98%, HitCoverage=26%, E-value=9e-39, Identity=97%"; Hit description =Protein phosphatase 2A regulatory A subunit (Fragment)
  Pfam annotation: Domain name=HEAT; Domain location=22-58; Score=20.7; E_value=0.0063; Accession=PF02985.14; Description=HEAT repeat
DWRVRLAIIEYIPLLASQLGVGFFDDKLGALCMQWLEDKVFSIRDAAANNLKRLAEEFGPEWAMQHIIPQVLEKINNP

SEQ ID NO: 131566 - protein, 105 aa, Setaria italica
  Transcript Sequence Number=SeqID_65592
  Gene Ontology: Mol. function=binding; Cellular component=plasma membrane; Biological process=ethylene mediated signaling pathway
  Homolog annotation: Hit_ID=Q8L7J9; Match level="QueryCoverage=96%, HitCoverage=35%, E-value=5e-50, Identity=92%"; Hit description =Protein phosphatase 2A regulatory A subunit (Fragment)
  Pfam annotation: Domain name=HEAT; Domain location=44-80; Score=20.6; E_value=0.0064; Accession=PF02985.14; Description=HEAT repeat
  Pfam annotation: Domain name=HEAT; Domain location=5-41; Score=17.0; E_value=0.077; Accession=PF02985.14; Description=HEAT repeat
  Pfam module annotation: Pfam domain module=HEAT::HEAT; Domain location=44-80::5-41
YGTKKWAMQHIIPQVLEKINNPHYLYRMTILQAISLLAPVMGAEITCQKLLPVIINSSKDRVPNIKFNVAKVLQSLIPILDQSTVKPCLVELSEDPDVDVRYYAN

SEQ ID NO: 131567 - protein, 61 aa, Setaria italica
  Transcript Sequence Number=SeqID_65593
  Gene Ontology: Mol. function=binding; Cellular component=plasma membrane; Biological process=ethylene mediated signaling pathway
  Homolog annotation: Hit_ID=Q8L7J9; Match level="QueryCoverage=100%, HitCoverage=22%, E-value=5e-25, Identity=89%"; Hit description =Protein phosphatase 2A regulatory A subunit (Fragment)
  Pfam annotation: Domain name=HEAT; Domain location=26-58; Score=16.6; E_value=0.1; Accession=PF02985.14; Description=HEAT repeat
SKDRVPNIKFNVAKVLQSLIPILDQSTVKPCLVELSEDPDVDVRYYANQALQACDQMMVSS

SEQ ID NO: 131568 - protein, 76 aa, Setaria italica
  misc_feature (9)..(9): Xaa can be any naturally occurring amino acid
  misc_feature (31)..(31): Xaa can be any naturally occurring amino acid
  Transcript Sequence Number=SeqID_65594
  Gene Ontology: Mol. function=binding; Cellular component=plasma membrane; Biological process=ethylene mediated signaling pathway
  Homolog annotation: Hit_ID=Q8L7J9; Match level="QueryCoverage=100%, HitCoverage=25%, E-value=2e-35, Identity=93%"; Hit description =Protein phosphatase 2A regulatory A subunit (Fragment)
GFFDDKLGXLCMQWLEDKVFSIRDAAANNLXKRLAEEFGPEWAMQHIIPQVLEKINNPHYLYRMTILQAISLLAPV

SEQ ID NO: 131569 - protein, 64 aa, Setaria italica
  Transcript Sequence Number=SeqID_65595
  Gene Ontology: Mol. function=binding; Cellular component=plasma membrane; Biological process=ethylene mediated signaling pathway
  Homolog annotation: Hit_ID=Q38950; Match level="QueryCoverage=100%, HitCoverage=10%, E-value=2e-31, Identity=96%"; Hit description =Serine/threonine-protein phosphatase 2A 65 kDa regulatory subunit A beta isoform
  Pfam annotation: Domain name=HEAT; Domain location=23-59; Score=20.7; E_value=0.0063; Accession=PF02985.14; Description=HEAT repeat
RHWRVRLAIIEYIPLLASQLGVGFFDDKLGALCMQWLEDKVFSIRDAAANNLKRLAEEFGPEWA

SEQ ID NO: 131570 - protein, 74 aa, Setaria italica
  Transcript Sequence Number=SeqID_65596
  Gene Ontology: Mol. function=binding; Cellular component=plasma membrane; Biological process=ethylene mediated signaling pathway
  Homolog annotation: Hit_ID=Q8L7J9; Match level="QueryCoverage=100%, HitCoverage=25%, E-value=4e-36, Identity=93%"; Hit description =Protein phosphatase 2A regulatory A subunit (Fragment)
  Pfam annotation: Domain name=HEAT; Domain location=1-37; Score=20.7; E_value=0.0063; Accession=PF02985.14; Description=HEAT repeat
  Pfam annotation: Domain name=HEAT; Domain location=40-73; Score=2.3; E_value=26; Accession=PF02985.14; Description=HEAT repeat
  Pfam module annotation: Pfam domain module=HEAT::HEAT; Domain location=1-37::40-73
GFFDDKLGALCMQWLEDKVFSIRDAAANNLKRLAEEFGPEWAMQHIIPQVLEKINNPHYLYRMTILQAISLFGP

SEQ ID NO: 131571 - protein, 70 aa, Setaria italica
  Transcript Sequence Number=SeqID_65597
  Gene Ontology: Mol. function=binding; Cellular component=plasma membrane; Biological process=ethylene mediated signaling pathway
  Homolog annotation: Hit_ID=Q8L7J9; Match level="QueryCoverage=98%, HitCoverage=23%, E-value=2e-33, Identity=95%"; Hit description =Protein phosphatase 2A regulatory A subunit (Fragment)
  Pfam annotation: Domain name=HEAT; Domain location=1-29; Score=6.3; E_ value=8.4; Accession=PF02985.14; Description=HEAT repeat
  Pfam annotation: Domain name=HEAT; Domain location=32-68; Score=18.1; E_value=0.037; Accession=PF02985.14; Description=HEAT repeat
  Pfam module annotation: Pfam domain module=HEAT::HEAT; Domain location=1-29::32-68
RLCMQWLEDKVFSIRDAAANNLKRLAEEFGPEWAMQHIIPQVLEKINNPHYLYRMTILQAISLLAPVMGA

SEQ ID NO: 131572 - protein, 65 aa, Setaria italica
  Transcript Sequence Number=SeqID_65598
  Gene Ontology: Mol. function=binding; Cellular component=plasma membrane; Biological process=ethylene mediated signaling pathway
  Homolog annotation: Hit_ID=Q8L7J9; Match level="QueryCoverage=100%, HitCoverage=22%, E-value=5e-30, Identity=92%"; Hit description =Protein phosphatase 2A regulatory A subunit (Fragment)
LCMQWLEDKVFSIRDAAANNLKRLAEEFGPEWAMQHIIPQVLEKINNPHYLYRMTILQAISLFGP

SEQ ID NO: 131573 - protein, 72 aa, Setaria italica
  misc_feature (65)..(65): Xaa can be any naturally occurring amino acid
  Transcript Sequence Number=SeqID_65599
  Gene Ontology: Mol. function=binding; Cellular component=plasma membrane; Biological process=ethylene mediated signaling pathway
  Homolog annotation: Hit_ID=Q8L7J9; Match level="QueryCoverage=100%, HitCoverage=24%, E-value=2e-33, Identity=93%"; Hit description =Protein phosphatase 2A regulatory A subunit (Fragment)
  Pfam annotation: Domain name=HEAT; Domain location=21-57; Score=18.1; E_value=0.037; Accession=PF02985.14; Description=HEAT repeat
FSIRDAAANNLKRLAEEFGPEWAMQHIIPQVLEKINNPHYLYRMTILQAISLLAPVMGAEITCQXLLPVIIN

SEQ ID NO: 131574 - protein, 56 aa, Setaria italica
  Transcript Sequence Number=SeqID_65600
  Gene Ontology: Mol. function=binding; Cellular component=plasma membrane; Biological process=ethylene mediated signaling pathway
  Homolog annotation: Hit_ID=Q8L7J9; Match level="QueryCoverage=96%, HitCoverage=18%, E-value=3e-24, Identity=96%"; Hit description =Protein phosphatase 2A regulatory A subunit (Fragment)
DKVFSIRDAAANNLKRLAEEFGPEWAMQHIIPQVLEKINNPHYLYRMTILQAISIS

SEQ ID NO: 131575 - protein, 79 aa, Setaria italica
  misc_feature (70)..(70): Xaa can be any naturally occurring amino acid
  Transcript Sequence Number=SeqID_65601
  Gene Ontology: Mol. function=binding; Cellular component=plasma membrane; Biological process=ethylene mediated signaling pathway
  Homolog annotation: Hit_ID=Q8L7J9; Match level="QueryCoverage=100%, HitCoverage=28%, E-value=1e-33, Identity=90%"; Hit description =Protein phosphatase 2A regulatory A subunit (Fragment)
  Pfam annotation: Domain name=HEAT; Domain location=16-52; Score=20.6; E_value=0.0064; Accession=PF02985.14; Description=HEAT repeat
TILQAISLLAPVMGAEITCQKLLPVIINSSKDRVPNIKFNVAKVLQSLIPILDQSTVKPCLVELSEDPDXVDVRYYANQ

SEQ ID NO: 131576 - protein, 78 aa, Setaria italica
  misc_feature (21)..(21): Xaa can be any naturally occurring amino acid
  Transcript Sequence Number=SeqID_65602
  Gene Ontology: Mol. function=binding; Cellular component=plasma membrane; Biological process=ethylene mediated signaling pathway
  Homolog annotation: Hit_ID=Q8L7J9; Match level="QueryCoverage=100%, HitCoverage=28%, E-value=7e-35, Identity=91%"; Hit description =Protein phosphatase 2A regulatory A subunit (Fragment)
  Pfam annotation: Domain name=HEAT; Domain location=11-47; Score=15.3; E_value=0.25; Accession=PF02985.14; Description=HEAT repeat
  Pfam annotation: Domain name=HEAT; Domain location=50-78; Score=1.3; E_value=34; Accession=PF02985.14; Description=HEAT repeat
  Pfam module annotation: Pfam domain module=HEAT::HEAT; Domain location=11-47::50-78
ISLLAPVMGAEITCQKLLPVXINSSKDRVPNIKFNVAKVLQSLIPILDQSTVKPCLVELSEDPDVDVRYYANQALQAC

SEQ ID NO: 131577 - protein, 52 aa, Setaria italica
  Transcript Sequence Number=SeqID_65603
  Gene Ontology: Mol. function=binding; Cellular component=plasma membrane; Biological process=ethylene mediated signaling pathway
  Homolog annotation: Hit_ID=Q8L7J9; Match level="QueryCoverage=100%, HitCoverage=19%, E-value=2e-19, Identity=87%"; Hit description =Protein phosphatase 2A regulatory A subunit (Fragment)
  Pfam annotation: Domain name=HEAT; Domain location=17-49; Score=16.6; E_value=0.1; Accession=PF02985.14; Description=HEAT repeat
FNVAKVLQSLIPILDQSTVKPCLVELSEDPDVDVRYYANQALQACDQMMVSS

SEQ ID NO: 131578 - protein, 65 aa, Setaria italica
  Transcript Sequence Number=SeqID_65604
  Gene Ontology: Mol. function=binding; Cellular component=plasma membrane; Biological process=ethylene mediated signaling pathway
  Homolog annotation: Hit_ID=Q8L7J9; Match level="QueryCoverage=100%, HitCoverage=23%, E-value=5e-27, Identity=88%"; Hit description =Protein phosphatase 2A regulatory A subunit (Fragment)
  Pfam annotation: Domain name=HEAT; Domain location=30-62; Score=16.6; E_value=0.1; Accession=PF02985.14; Description=HEAT repeat
IINSSKDRVPNIKFNVAKVLQSLIPILDQSTVKPCLVELSEDPDVDVRYYANQALQACDQMMVSS

SEQ ID NO: 131579 - protein, 43 aa, Setaria italica
  Transcript Sequence Number=SeqID_65605
  Gene Ontology: Mol. function=binding
  Homolog annotation: Hit_ID=Q8L7J9; Match level="QueryCoverage=90%, HitCoverage=14%, E-value=5e-13, Identity=88%"; Hit description =Protein phosphatase 2A regulatory A subunit (Fragment)
MVSLIPILDQSTVKPCLVELSEDPDVDVRYYANQALQACDQTS

SEQ ID NO: 131580 - protein, 75 aa, Setaria italica
  Transcript Sequence Number=SeqID_65606
  Gene Ontology: Mol. function=binding; Cellular component=plasma membrane; Biological process=ethylene mediated signaling pathway
  Homolog annotation: Hit_ID=Q8L7J9; Match level="QueryCoverage=98%, HitCoverage=25%, E-value=1e-34, Identity=95%"; Hit description =Protein phosphatase 2A regulatory A subunit (Fragment)
  Pfam annotation: Domain name=HEAT; Domain location=1-32; Score=1.5; E_ value=32; Accession=PF02985.14; Description=HEAT repeat
  Pfam annotation: Domain name=HEAT; Domain location=35-71; Score=20.6; E_value=0.0064; Accession=PF02985.14; Description=HEAT repeat
  Pfam module annotation: Pfam domain module=HEAT::HEAT; Domain location=1-32::35-71
HIIPQVLEKINNPHYLYRMTILQAISLLAPVMGAEITCQKLLPVIINSSKDRVPNIKFNVAKVLQSLIPILDQST

SEQ ID NO: 131581 - protein, 57 aa, Setaria italica
  misc_feature (10)..(10): Xaa can be any naturally occurring amino acid
  misc_feature (26)..(26): Xaa can be any naturally occurring amino acid
  Transcript Sequence Number=SeqID_65607
  Gene Ontology: Mol. function=binding; Cellular component=plasma membrane; Biological process=ethylene mediated signaling pathway
  Homolog annotation: Hit_ID=Q8L7J9; Match level="QueryCoverage=100%, HitCoverage=20%, E-value=1e-18, Identity=85%"; Hit description =Protein phosphatase 2A regulatory A subunit (Fragment)
NIKFNVAKVXLQSLIPILDQSTVKPXCLVELSEDPDVDVRYYANQALQACDQMMVSS

SEQ ID NO: 131582 - protein, 52 aa, Setaria italica
  misc_feature (35)..(35): Xaa can be any naturally occurring amino acid
  Transcript Sequence Number=SeqID_65608
  Gene Ontology: Mol. function=binding; Cellular component=plasma membrane; Biological process=ethylene mediated signaling pathway
  Homolog annotation: Hit_ID=Q8L7J9; Match level="QueryCoverage=100%, HitCoverage=18%, E-value=3e-18, Identity=87%"; Hit description =Protein phosphatase 2A regulatory A subunit (Fragment)
PVIINSSKDRVPNIKFNVAKVLQSLIPILDQSTVXKPCLVELSEDPDVDVRY

SEQ ID NO: 131583 - protein, 46 aa, Setaria italica
  Transcript Sequence Number=SeqID_65609
  Gene Ontology: Mol. function=binding; Cellular component=plasma membrane; Biological process=ethylene mediated signaling pathway
  Homolog annotation: Hit_ID=Q8L7J9; Match level="QueryCoverage=100%, HitCoverage=15%, E-value=2e-18, Identity=95%"; Hit description =Protein phosphatase 2A regulatory A subunit (Fragment)
PQVLEKINNPHYLYRMTILQAISLLAPVMGAEITCQKLLPVIINSS

SEQ ID NO: 131584 - protein, 43 aa, Setaria italica
  Transcript Sequence Number=SeqID_65610
  Gene Ontology: Mol. function=binding; Cellular component=plasma membrane; Biological process=ethylene mediated signaling pathway
  Homolog annotation: Hit_ID=Q8L7J9; Match level="QueryCoverage=100%, HitCoverage=14%, E-value=9e-18, Identity=97%"; Hit description =Protein phosphatase 2A regulatory A subunit (Fragment)
KRLAEEFGPEWAMQHIIPQVLEKINNPHYLYRMTILQAISLLA

SEQ ID NO: 131585 - protein, 44 aa, Setaria italica
  Transcript Sequence Number=SeqID_65611
  Gene Ontology: Mol. function=binding; Cellular component=plasma membrane; Biological process=ethylene mediated signaling pathway
  Homolog annotation: Hit_ID=Q8L7J9; Match level="QueryCoverage=100%, HitCoverage=15%, E-value=2e-18, Identity=97%"; Hit description =Protein phosphatase 2A regulatory A subunit (Fragment)
RLAEEFGPEWAMQHIIPQVLEKINNPHYLYRMTILQAISLLAPV

SEQ ID NO: 131586 - protein, 43 aa, Setaria italica
  misc_feature (9)..(9): Xaa can be any naturally occurring amino acid
  Transcript Sequence Number=SeqID_65612
  Gene Ontology: Mol. function=binding; Cellular component=plasma membrane; Biological process=ethylene mediated signaling pathway
  Homolog annotation: Hit_ID=Q8L7J9; Match level="QueryCoverage=100%, HitCoverage=14%, E-value=7e-16, Identity=95%"; Hit description =Protein phosphatase 2A regulatory A subunit (Fragment)
EEFGPEWAXMQHIIPQVLEKINNPHYLYRMTILQAISLLAPVM

SEQ ID NO: 131587 - protein, 80 aa, Setaria italica
  Transcript Sequence Number=SeqID_65613
PCPNSSSPGSAEELSLEDKEDSYIIAEEVPTNNEHVVFPGIQNGEPDSCGNLKDIFNIQEFSGHHTKETGTHPYPSVLDV

SEQ ID NO: 131588 - protein, 62 aa, Setaria italica
  Transcript Sequence Number=SeqID_65614
SLQSDVYNMLMGGLVHPLSSVTLVLLSEDRSAQTNVSSGIVCADLSSDSRTNVTEESCSWEG

SEQ ID NO: 131589 - protein, 98 aa, Setaria italica
  Transcript Sequence Number=SeqID_65615
MTLMFSPSYQYELRKKEEREAAEALKREEELREAKRQQQRLNFLLSQTELYSHFMQNKTGASAPPDEEDVPDEDEEEDPEEAQLKREALRAAQHAVSQ

SEQ ID NO: 131590 - protein, 79 aa, Setaria italica
  misc_feature (20)..(20): Xaa can be any naturally occurring amino acid
  misc_feature (34)..(34): Xaa can be any naturally occurring amino acid
  Transcript Sequence Number=SeqID_65616
MPIAGKIFWYRKLARDMLIXWKRVDKEQYELRKXEEREAAEALKREEELREAKRQQQRLKLSAFNKQSLYSLFHDKTRL

SEQ ID NO: 131591 - protein, 73 aa, Setaria italica
  misc_feature (24)..(24): Xaa can be any naturally occurring amino acid
  Transcript Sequence Number=SeqID_65617
  Gene Ontology: Mol. function=ubiquitin thiolesterase activity; Cellular component=intracellular; Biological process=ubiquitin -dependent protein catabolic process
  Homolog annotation: Hit_ID=B6U7Y7; Match level="QueryCoverage=73%, HitCoverage=9%, E-value=1e-22, Identity=92%"; Hit description=USP39 protein
VTVVLLSTYLKLFLYSFHMRRFTXNNFFVEKNPTLVNFPVKNLELKDYIPLPKPKENHKIRSKYDLIANIVHD

SEQ ID NO: 131592 - protein, 86 aa, Setaria italica
  misc_feature (48)..(48): Xaa can be any naturally occurring amino acid
  Transcript Sequence Number=SeqID_65618
  Gene Ontology: Mol. function=catalytic activity; Biological process =trehalose biosynthetic process
  Homolog annotation: Hit_ID=B9SNF1; Match level="QueryCoverage=60%, HitCoverage=6%, E-value=2e-12, Identity=69%"; Hit description =Trehalose-6-phosphate synthase, putative
RKQKVTENERKQIVTKTTIRPTAACGDSLASKAEVFACTVGRKPSKAXKYYLDDAAEVVRLMQGLSYVSEELALANHRDERRGLVS

SEQ ID NO: 131593 - protein, 37 aa, Setaria italica
  Transcript Sequence Number=SeqID_65619
TTTNEPVSVRTTPHSVEVKPQGVSKGLVARRMLASMQ

SEQ ID NO: 131594 - protein, 95 aa, Setaria italica
  Transcript Sequence Number=SeqID_65620
  Gene Ontology: Mol. function=single-stranded DNA binding; Biological process=DNA replication
  Homolog annotation: Hit_ID=B6TNE0; Match level="QueryCoverage=68%, HitCoverage=21%, E-value=1e-29, Identity=90%"; Hit description =Single-strand binding protein
LQQKNPRYPDFKHKHTGEALWVDGRNNPNWVISHLAVLDSRMGSLQDNERKPVSYMYADDFMTLDGSRYSPWRRKPRTLHSTVRLTVMSKACYRG

SEQ ID NO: 131595 - protein, 46 aa, Setaria italica
  Transcript Sequence Number=SeqID_65621
  Gene Ontology: Mol. function=single-stranded DNA binding; Biological process=DNA replication
  Homolog annotation: Hit_ID=B6TNE0; Match level="QueryCoverage=91%, HitCoverage=13%, E-value=2e-16, Identity=95%"; Hit description =Single-strand binding protein
LYYRVTLQFWDDLALVASEHVKKGDRIFVSGRLVSDTVDEGPEKRH

SEQ ID NO: 131596 - protein, 72 aa, Setaria italica
  Transcript Sequence Number=SeqID_65622
SANNGTKSFFWRPGDAAWSSLFEQPTAGVVSVVFHGGRMFYMDLRQLIAAYDLNLGAPNRHPASAGMSSCIG

SEQ ID NO: 131597 - protein, 69 aa, Setaria italica
  Transcript Sequence Number=SeqID_65623
PIPSCALLSPRCVSQLYAENDDCQNEDPLLDCSVVACEVASDEVVKDMSTSDEVAKKMSTSDELGKEIS

SEQ ID NO: 131598 - protein, 73 aa, Setaria italica
  misc_feature (34)..(34): Xaa can be any naturally occurring amino acid
  misc_feature (47)..(47): Xaa can be any naturally occurring amino acid
  Transcript Sequence Number=SeqID_65624
  Homolog annotation: Hit_ID=B6SL30; Match level="QueryCoverage=61%, HitCoverage=7%, E-value=3e-10, Identity=84%"; Hit description=Metal ion binding protein
LQRAFLVLVLFILVDHLTGLHDLCNFGQLILQSXAIGVLVLVLCFVXRKEFSVQIVSKLGSSFSLVPFVIVVV

SEQ ID NO: 131599 - protein, 101 aa, Setaria italica
  misc_feature (82)..(82): Xaa can be any naturally occurring amino acid
  Transcript Sequence Number=SeqID_65625
  Gene Ontology: Mol. function=pyridoxal phosphate binding; Biological process=metabolic process
  Homolog annotation: Hit_ID=Q5Z8Z0; Match level="QueryCoverage=96%, HitCoverage=19%, E-value=8e-19, Identity=52%"; Hit description =Putative cysteine synthase
EAMDVARRLAREEGLLVGISSGANAAACLKAFSLLCKFCSHPYLLVAWSSDLWTTLQVAAREENKGKMIVTMFSSGGERYLXNSELFAQAKEECVNINMAF

SEQ ID NO: 131600 - protein, 98 aa, Setaria italica
  misc_feature (66)..(66): Xaa can be any naturally occurring amino acid
  Transcript Sequence Number=SeqID_65626
LFLFFLFRLLSLLVFCLQEDRSRDIFHALQELYGQHLDRLCQKYCRSHSVKEDDSAGVANLEEAKXISRFEILRFQEKIHGSYTTFVESLVEQFAAVS

SEQ ID NO: 131601 - protein, 79 aa, Setaria italica
  misc_feature (46)..(46): Xaa can be any naturally occurring amino acid
  Transcript Sequence Number=SeqID_65627
  Gene Ontology: Mol. function=nucleoside-triphosphatase activity; Cellular component=membrane; Biological process=protein catabolic process
  Homolog annotation: Hit_ID=Q6A167; Match level="QueryCoverage=100%, HitCoverage=13%, E-value=4e-31, Identity=67%"; Hit description=Ftsh -like protease
RHIVVPSPDVRGRQEILELYLQDKPVANDVDINAIARSTPGFNGAXLEFAKDRIIMGTERKSMFISDESRKLTAYHESG

SEQ ID NO: 131602 - protein, 131 aa, Setaria italica
  misc_feature (29)..(29): Xaa can be any naturally occurring amino acid
  Transcript Sequence Number=SeqID_65628
  Gene Ontology: Mol. function=metal ion binding
  Homolog annotation: Hit_ID=B6SPK3; Match level="QueryCoverage=98%, HitCoverage=26%, E-value=2e-51, Identity=76%"; Hit description=Zinc ion binding protein
GMNMKVEQQVPLLLVERQALNEAMEAEKXGHHLPETRGLCLSEEQIVRTILRRPIIGPGNRIIDMITGPYKLVRRCEVTAILILLLTGSILAHEMMHAYLRLKGYRTLSPEVEEGICQVLAHLWLESEITS

SEQ ID NO: 131603 - protein, 52 aa, Setaria italica
  Transcript Sequence Number=SeqID_65629
RKINTSFFCNGRYKLNPYLSSRIYFVYCRRYIPFAMRNMNQEFSKSYTHVRT

SEQ ID NO: 131604 - protein, 44 aa, Setaria italica
  Transcript Sequence Number=SeqID_65630
PHIQVQGLNMEFSSSGTKNNITLFGTVFPVILNFLFSNYGKNSI

SEQ ID NO: 131605 - protein, 75 aa, Setaria italica
  Transcript Sequence Number=SeqID_65631
  Gene Ontology: Mol. function=metal ion binding
  Homolog annotation: Hit_ID=B6SPK3; Match level="QueryCoverage=89%, HitCoverage=10%, E-value=5e-09, Identity=53%"; Hit description=Zinc ion binding protein
LSLSEQDQRKGKAIDTEHHLDEDEQLARALQENTSPTLDEDEQLARALQESMNDEHPPRQHIPIEDVHSESAPAS

SEQ ID NO: 131606 - protein, 74 aa, Setaria italica
  Transcript Sequence Number=SeqID_65632
RTGHTIDQRRGRYKIFTDLHHCTSLFYAQQMMYAIKRNDTLSWQASLHNMHAREKLFTGLTEKGRKGKPTDSSR

SEQ ID NO: 131607 - protein, 90 aa, Setaria italica
  Transcript Sequence Number=SeqID_65633
  Gene Ontology: Mol. function=carbamoyl-phosphate synthase activity; Cellular component=chloroplast; Biological process=nitrogen compound metabolic process
  Homolog annotation: Hit_ID=Q6YV24; Match level="QueryCoverage=75%, HitCoverage=14%, E-value=8e-28, Identity=81%"; Hit description =Putative carbamoyl-phosphate synthetase small subunit
MLCIVLNHNLFSLQNHNYAVDPDSLPEGAKVTHINLNDNSCAGLQYPKMKLMSLQYHPESSPGPHDSDTGTFLLVLASSVYNMLWSSLLS

SEQ ID NO: 131608 - protein, 74 aa, Setaria italica
  Transcript Sequence Number=SeqID_65634
  Gene Ontology: Mol. function=carbamoyl-phosphate synthase activity; Cellular component=chloroplast; Biological process=nitrogen compound metabolic process
  Homolog annotation: Hit_ID=B6TA70; Match level="QueryCoverage=77%, HitCoverage=12%, E-value=3e-26, Identity=91%"; Hit description =Carbamoyl-phosphate synthase small chain
MVQSAEHLILKSFRPPKNIQAQNHNYAVDPDSLPEGAKVTHINLNDNSCAGLQYPKMKLMSLQYHPESSPGPHD

SEQ ID NO: 131609 - protein, 73 aa, Setaria italica
  misc_feature (65)..(65): Xaa can be any naturally occurring amino acid
  Transcript Sequence Number=SeqID_65635
  Gene Ontology: Mol. function=carbamoyl-phosphate synthase activity; Cellular component=chloroplast; Biological process=nitrogen compound metabolic process
  Homolog annotation: Hit_ID=B6TA70; Match level="QueryCoverage=87%, HitCoverage=14%, E-value=1e-30, Identity=93%"; Hit description =Carbamoyl-phosphate synthase small chain
VKILFGSLYLISGVTCDAPYEWSDKTDSEWEFKKDQSSETFHVVAYDFGIKHNIMRRLTSYGCKXTVVPANWP

SEQ ID NO: 131610 - protein, 89 aa, Setaria italica
  Transcript Sequence Number=SeqID_65636
  Gene Ontology: Mol. function=cinnamoyl-CoA reductase activity; Biological process=cellular metabolic process
  Homolog annotation: Hit_ID=B6TR31; Match level="QueryCoverage=98%, HitCoverage=25%, E-value=1e-20, Identity=61%"; Hit description =Dihydroflavonol-4-reductase
LSRGYAVHATVRDLSDEKTAHLKRLPGASDPQGLRLFRADLLDGGAMAAAIARCQGVFHVATPVPSGNLTDPEREMLDPAVTGTKNVLG

SEQ ID NO: 131611 - protein, 84 aa, Setaria italica
  Transcript Sequence Number=SeqID_65637
  Subcellular localization annotation: CTP_CleavageSite=30; ConfidenceScore=5.27e-01
NGTSRERKRAAPCTTSTQPIHQSKQTAPPLAASARAPSAARPAALGLPAGLLVARAWGLLGRIALPYPAALIIQRDYKMGASRP

SEQ ID NO: 131612 - protein, 97 aa, Setaria italica
  misc_feature (10)..(10): Xaa can be any naturally occurring amino acid
  Transcript Sequence Number=SeqID_65638
  Gene Ontology: Mol. function=hydrolase activity
  Homolog annotation: Hit_ID=B6UI84; Match level="QueryCoverage=98%, HitCoverage=29%, E-value=8e-44, Identity=84%"; Hit description=Zn -dependent hydrolases, including glyoxylases
IRKWAQRLKXERIMHSGDVEEGTANVEWKLDGNGPWNIGTDFELIHTPGHTQGSVCLYYKPLKVLFTGDHVAKSEESDDLNLFRMYSKQSVTLLIAS

SEQ ID NO: 131613 - protein, 63 aa, Setaria italica
  Transcript Sequence Number=SeqID_65639
DKNMMKCDLFRWIIAYDNKLMYTNRTNKASLVSQTITSCQHLETTRTFLAQTKAFSTSYSSMC

SEQ ID NO: 131614 - protein, 46 aa, Setaria italica
  Transcript Sequence Number=SeqID_65640
TNHISSYFCLTSCSGAFRIYFDYMGLILRKILSRSRMLAPMYDAIS

SEQ ID NO: 131615 - protein, 65 aa, Setaria italica
  Transcript Sequence Number=SeqID_65641
EKKRQRDQKKIQDQIKAEQEALYGSKPSPSKPQSTKKVPRNSMGGANRRLSLGGATMQAPKTDIL

SEQ ID NO: 131616 - protein, 91 aa, Setaria italica
  Transcript Sequence Number=SeqID_65642
PMEKFGCIRYNYKLLEDSHLQLRSYVHGGDLVQAGIGIADTEFNLLGGAMFQLNLLFGPTRRSGDHCGVKFLRESALILEEHATKGLPSLR

SEQ ID NO: 131617 - protein, 122 aa, Setaria italica
  Transcript Sequence Number=SeqID_65643
CFSFLLVYLFPINEVKELDSPGSEKEPGDDNCLKELNNHINLNDLDSCRTDKELKNHSYLNELDGQYNWKGLNDHNSQGELDGIASSKFAAEETRDSLTGPVSGVTTNASLPDILNVVEVFS

SEQ ID NO: 131618 - protein, 34 aa, Setaria italica
  Transcript Sequence Number=SeqID_65644
MGAYKILNETRPMSQTQPQSTRWRSIIKMTQVNS

SEQ ID NO: 131619 - protein, 111 aa, Setaria italica
  Transcript Sequence Number=SeqID_65645
  Subcellular localization annotation: CTP_CleavageSite=33; ConfidenceScore=5.02e-01
WDLGMDSRGIFTWGQQQPESNINDCSFSGGSSRSSTAGRDSIDSPLHWGSKFTSSVSSRLYYQIILQLWDLHQRGKEFTEVKMISQYLFPRIEWCAGDCIEQQIVLHHVCL

SEQ ID NO: 131620 - protein, 111 aa, Setaria italica; identical to SEQ ID NO: 131619
  Transcript Sequence Number=SeqID_65646
  Subcellular localization annotation: CTP_CleavageSite=33; ConfidenceScore=5.02e-01

SEQ ID NO: 131621 - protein, 82 aa, Setaria italica
  Transcript Sequence Number=SeqID_65647
  Subcellular localization annotation: CTP_CleavageSite=32; ConfidenceScore=5.38e-01
TLLTSGPSSSCSASPDARGRRQPCGPPPSVRRCQWREEVMTRNVHMNHRQLVQACIGINGSQMCFQQARLRPSFCTSGAWLR

SEQ ID NO: 131622 - protein, 42 aa, Setaria italica
  Transcript Sequence Number=SeqID_65648
ILLHRLKYLALCGFKTKFVYCTSGPAANPENGDISLPPGRRL

SEQ ID NO: 131623 - protein, 61 aa, Setaria italica
  Transcript Sequence Number=SeqID_65649
TLAAFYYSPACIPHPGRAQDASVNRVAVDAGADLVGQGDAALCLGSSRRSVVGSYCLRCSG

SEQ ID NO: 131624 - protein, 51 aa, Setaria italica
  Transcript Sequence Number=SeqID_65650
  Homolog annotation: Hit_ID=C0PBZ6; Match level="QueryCoverage=82%, HitCoverage=18%, E-value=6e-09, Identity=70%"; Hit description=Non -specific lipid-transfer protein
AMSCTTVYNTLMPCLPFVQMGGAMPPQPCLGASLLVPRSHVQDGGEQRAKA

SEQ ID NO: 131625 - protein, 51 aa, Setaria italica
  Transcript Sequence Number=SeqID_65651
  Gene Ontology: Mol. function=lipid binding; Biological process=lipid transport
  Homolog annotation: Hit_ID=C0PBZ6; Match level="QueryCoverage=100%, HitCoverage=21%, E-value=7e-13, Identity=76%"; Hit description=Non -specific lipid-transfer protein
PDRRTIVRLPQDVANSAAGGSGTYIDRAAALPSKCGVSLPYKISTSVNCNT

SEQ ID NO: 131626 - protein, 69 aa, Setaria italica
  Transcript Sequence Number=SeqID_65652
  Subcellular localization annotation: CTP_CleavageSite=44; ConfidenceScore=5.24e-01
YAFPRESTYHCSIMATIHGRTHRSMTTLVVAGVRNRLKFLMVCRGSVPASRVVMDLCVLHVFYSHTMTK

SEQ ID NO: 131627 - protein, 57 aa, Setaria italica
  misc_feature (38)..(38): Xaa can be any naturally occurring amino acid
  Transcript Sequence Number=SeqID_65653
  Gene Ontology: Mol. function=dioxygenase activity; Cellular component= plasma membrane; Biological process=methionine salvage
  Homolog annotation: Hit_ID=Q10RE5; Match level="QueryCoverage=82%, HitCoverage=23%, E-value=1e-17, Identity=89%"; Hit description=1,2 -dihydroxy-3-keto-5-methylthiopentene dioxygenase 2
QTCRYASAHSYRFTLDTDNYIKAMRLFVGEPVWTPYNXRPHDHLPARKEYVDRIINR

SEQ ID NO: 131628 - protein, 92 aa, Setaria italica
  Transcript Sequence Number=SeqID_65654
  Gene Ontology: Mol. function=oxidoreductase activity, acting on single donors with incorporation of molecular oxygen, incorporation of two atoms of oxygen; Cellular component=plasma membrane; Biological process=oxidation reduction
  Homolog annotation: Hit_ID=Q10RE5; Match level="QueryCoverage=77%, HitCoverage=35%, E-value=8e-34, Identity=92%"; Hit description=1,2 -dihydroxy-3-keto-5-methylthiopentene dioxygenase 2
  Pfam annotation: Domain name=ARD; Domain location=1-92; Score=37.7; E_ value=3.5e-08; Accession=PF03079.6; Description=ARDARD' family
  Pfam annotation: Domain name=Cupin_2; Domain location=21-92; Score =6.7; E_value=0.066; Accession=PF07883.3; Description=Cupin domain
  Pfam module annotation: Pfam domain module=ARD::Cupin_2; Domain location=1-92::21-92
RRTYYLLMDICDVCPEKLPNYEAKIKNFFEEHLHTDEEIRYCLEGSGYFDVRDENDKWIRVAVKKGGMIVLPAGMLSPSFYYFGYFTLVLLF

SEQ ID NO: 131629 - protein, 82 aa, Setaria italica
  misc_feature (57)..(57): Xaa can be any naturally occurring amino acid
  Transcript Sequence Number=SeqID_65655
  Gene Ontology: Mol. function=dioxygenase activity; Cellular component= plasma membrane; Biological process=methionine salvage
  Homolog annotation: Hit_ID=A1L4T4; Match level="QueryCoverage=91%, HitCoverage=41%, E-value=8e-24, Identity=66%"; Hit description=1,2 -dihydroxy-3-keto-5-methylthiopentene dioxygenase 1
  Pfam annotation: Domain name=ARD; Domain location=1-59; Score=-31.8; E_value=0.0051; Accession=PF03079.6; Description=ARDARD' family
IRYCLEGSGYFDVRDQNDQWIRIAVKKGGMIVLPAGMYHRFTLDTDNYIKVSLTSFXVPTTAFCLLNLVLSKLIKHDVSACS

SEQ ID NO: 131630 - protein, 46 aa, Setaria italica
  Transcript Sequence Number=SeqID_65656
  Gene Ontology: Mol. function=oxidoreductase activity, acting on single donors with incorporation of molecular oxygen, incorporation of two atoms of oxygen; Cellular component=plasma membrane; Biological process=...
  Gene Ontology: Biological process=methionine biosynthetic process
  Homolog annotation: Hit_ID=Q10RE5; Match level="QueryCoverage=100%, HitCoverage=36%, E-value=4e-16, Identity=61%"; Hit description=1,2 -dihydroxy-3-keto-5-methylthiopentene dioxygenase 2
EHLHTDEEIRYCLEGSGMYHRFTLDTDNYIKAMRLFVGEPVWTPYN

SEQ ID NO: 131631 - protein, 40 aa, Setaria italica
  Transcript Sequence Number=SeqID_65657
TPYKCCRIRCATAICLLCYTLQVLPNKMCYRNLLKLLNGT

SEQ ID NO: 131632 - protein, 73 aa, Setaria italica
  Transcript Sequence Number=SeqID_65658
  Subcellular localization annotation: CTP_CleavageSite=23; ConfidenceScore=5.25e-01
ATAICSYHNHARVPFSSLHKTCRYASAHSTSFNSLVSTSVDDSIDILLPRKSNPWLGRSMSIESSTEVETKLL

SEQ ID NO: 131633 - protein, 77 aa, Setaria italica
  Transcript Sequence Number=SeqID_65659
  Gene Ontology: Mol. function=ribose phosphate diphosphokinase activity; Cellular component=cytoplasm; Biological process =nucleotide biosynthetic process
  Homolog annotation: Hit_ID=Q6ZFT5; Match level="QueryCoverage=72%, HitCoverage=17%, E-value=2e-20, Identity=83%"; Hit description =Ribose-phosphate pyrophosphokinase 4
  Subcellular localization annotation: CTP_CleavageSite=25; ConfidenceScore=5.02e-01
KFHILLVLPATDFSPQLCHVFQKALASHGAAKVSAYVTHAVFPKQSYERFMTSNSAGPGDQFAYFWITDSCPHTVKA

SEQ ID NO: 131634 - protein, 37 aa, Setaria italica
  Transcript Sequence Number=SeqID_65660
FCSFCEFSQDLTNPLLAKAIQAFSPLRIRVGGSLQDQ

SEQ ID NO: 131635 - protein, 89 aa, Setaria italica
  misc_feature (17)..(17): Xaa can be any naturally occurring amino acid
  misc_feature (66)..(66): Xaa can be any naturally occurring amino acid
  Transcript Sequence Number=SeqID_65661
  Gene Ontology: Mol. function=transition metal ion binding; Cellular component=integral to membrane
  Homolog annotation: Hit_ID=B9SCC9; Match level="QueryCoverage=73%, HitCoverage=36%, E-value=1e-15, Identity=58%"; Hit description =Steroid binding protein, putative
  Pfam annotation: Domain name=Cyt-b5; Domain location=33-88; Score =26.8; E_value=9e-05; Accession=PF00173.20; Description=Cytochrome b5- like HemeSteroid binding doma
PPPAGAPKQREEKEQRXEGSDAVRVSDPVEVGEVTLEQLRAYDGKDPAKQILIAIRGQVYDVSRGXGPYSLFAGRDATRALALMSFDPN

SEQ ID NO: 131636 - protein, 56 aa, Setaria italica
  Transcript Sequence Number=SeqID_65662
RRESRAEDIAPAIMNFLETISGDRDLETALEESLQVGINTNLIHLFGICSLMVTFS

SEQ ID NO: 131637 - protein, 48 aa, Setaria italica
  Transcript Sequence Number=SeqID_65663
  Homolog annotation: Hit_ID=Q25A77; Match level="QueryCoverage=91%, HitCoverage=7%, E-value=9e-14, Identity=86%"; Hit description =H0413E07.5 protein
MCNSYVRLELLEGVVAYYNGRTEKARGSLTSAQAKYLQLQVPDEAISM

SEQ ID NO: 131638 - protein, 88 aa, Setaria italica
  Transcript Sequence Number=SeqID_65664
TNPEQNCILQENSGKEEPGISWDWCRIVKLEGSCCQDCSYQQFSGFLLVLHHMLWMEMLLHMLEMETQPRRENRIDKIGKPRPRRENR

SEQ ID NO: 131639 - protein, 37 aa, Setaria italica
  Transcript Sequence Number=SeqID_65665
  Gene Ontology: Mol. function=threonine-type endopeptidase activity; Cellular component=proteasome core complex; Biological process =ubiquitin-dependent protein catabolic process
  Homolog annotation: Hit_ID=P30186; Match level="QueryCoverage=100%, HitCoverage=14%, E-value=1e-13, Identity=97%"; Hit description =Proteasome subunit alpha type-7-A
  Pfam annotation: Domain name=Proteasome_A_N; Domain location=4-26; Score=42.3; E_value=2e-09; Accession=PF10584.1; Description =Proteasome subunit A N-terminal signa
MSRYDRAITVFSPDGHLFQVEYALEAVRKGNAAVGVR

SEQ ID NO: 131640 - protein, 61 aa, Setaria italica
  Transcript Sequence Number=SeqID_65666
LEYLVNPPPMLCAAGCFVYLRTYKFLNLPSLVISVFMFNIYLHHGRASHTRDLTTHYVCNL

SEQ ID NO: 131641 - protein, 51 aa, Setaria italica
  Transcript Sequence Number=SeqID_65667
GCLCLLPLALERKVCIITNMGADQMKTIIKKEVLITVQGSGQAIVPQSWIF

SEQ ID NO: 131642 - protein, 84 aa, Setaria italica
  misc_feature (12)..(12): Xaa can be any naturally occurring amino acid
  Transcript Sequence Number=SeqID_65668
  Subcellular localization annotation: CTP_CleavageSite=16; ConfidenceScore=5.19e-01
GSNLIKADQNFXQSVLASSLWQYWQRGFCASFPLPLSVQRVLPSDAPFLQAGDGSISDFHRNRQLSKFRMLDSWKVGRVHLLFY

SEQ ID NO: 131643 - protein, 102 aa, Setaria italica
  misc_feature (94)..(95): Xaa can be any naturally occurring amino acid
  Transcript Sequence Number=SeqID_65669
LNLSYFLFSSLLNYAAYKMAEDISECVKNGDPSYLMLSQFLAVNHIGCLAAVEGFKSSADMLVKYMKEYPMCPQILLISARLDRKHGACPGLKXXDELILNW

SEQ ID NO: 131644 - protein, 79 aa, Setaria italica
  Transcript Sequence Number=SeqID_65670
  Gene Ontology: Mol. function=transporter activity; Cellular component= membrane; Biological process=transport
  Homolog annotation: Hit_ID=B6U234; Match level="QueryCoverage=72%, HitCoverage=10%, E-value=1e-22, Identity=94%"; Hit description =Permease
KNVGLLGSTRVGSRRVIQISAGFMIFFSMLGKFGALFASIPFTIFAAIYCVMFGIVGKHHSRRSEIPCCCNLFYFEQYN

SEQ ID NO: 131645 - protein, 144 aa, Setaria italica
  Transcript Sequence Number=SeqID_65671
  Gene Ontology: Mol. function=transporter activity; Cellular component= membrane; Biological process=transport
  Homolog annotation: Hit_ID=B6U234; Match level="QueryCoverage=79%, HitCoverage=21%, E-value=8e-60, Identity=95%"; Hit description =Permease
  Subcellular localization annotation: CTP_CleavageSite=60; ConfidenceScore=5.04e-01
ILSCPILLVVYCFGNLFVLSVGVFFLLLQFTNMNSMRNLFIIGVSLFLGLSIPEYFSRYSTSSRQGPAHTKAGWFNDYINTIFSSPPTVALFVAVLLDNTLDVRDAARDRGMPWWARFRTFRGDSRNEEFYTLPFNLNRFFPPS

SEQ ID NO: 131646 - protein, 46 aa, Setaria italica
  Transcript Sequence Number=SeqID_65672
MLLLSATLKYFPPNQINTEISLILTAPQITIRYDIENTLQNCYAWF

SEQ ID NO: 131647 - protein, 97 aa, Setaria italica
  Transcript Sequence Number=SeqID_65673
  Gene Ontology: Mol. function=metal ion binding; Cellular component =chromosome
  Homolog annotation: Hit_ID=Q336R3; Match level="QueryCoverage=95%, HitCoverage=8%, E-value=2e-21, Identity=61%"; Hit description=E3 ubiquitin-protein ligase BRE1-like 2
LFARDVVELKEAIRIKEAEGDAYISDIEVTYFSFLISTFFGIYVKAYDICIQTIGQAYEDMQTQNQHLLEQLADREDFNIKLVSDSVKMKQACSSLS

SEQ ID NO: 131648 - protein, 40 aa, Setaria italica
  Transcript Sequence Number=SeqID_65674
TNSQLIEIKSLKALVEELEKEKQELQFIADMYTKECSESR

SEQ ID NO: 131649 - protein, 42 aa, Setaria italica
  Transcript Sequence Number=SeqID_65675
  Gene Ontology: Mol. function=metal ion binding; Cellular component =chromosome
  Homolog annotation: Hit_ID=Q336R3; Match level="QueryCoverage=69%, HitCoverage=3%, E-value=6e-11, Identity=93%"; Hit description=E3 ubiquitin-protein ligase BRE1-like 2
MVSRIGDYQMFHLFCSPCIQRNLEIRHRKCPGCGTHFVQMGF

SEQ ID NO: 131650 - protein, 54 aa, Setaria italica
  misc_feature (54)..(54): Xaa can be any naturally occurring amino acid
  Transcript Sequence Number=SeqID_65676
  Gene Ontology: Mol. function=metal ion binding; Cellular component =chromosome
  Homolog annotation: Hit_ID=Q336R3; Match level="QueryCoverage=88%, HitCoverage=5%, E-value=2e-10, Identity=64%"; Hit description=E3 ubiquitin-protein ligase BRE1-like 2
RIVSTVIKQTITIYETKIEELENQIKIFMSEKNDLETKVEEALQDSGKKDFKNX

SEQ ID NO: 131651 - protein, 96 aa, Setaria italica
  misc_feature (65)..(65): Xaa can be any naturally occurring amino acid
  Transcript Sequence Number=SeqID_65677
  Homolog annotation: Hit_ID=Q5N7I2; Match level="QueryCoverage=100%, HitCoverage=24%, E-value=2e-40, Identity=84%"; Hit description=Wound- responsive protein-like
QRNMKEMVESGLSAKLEKADRFQRIKMEINEMIKARVAAKSKVNEQQDGSADDFQVANDERRANXKGKSVMDSALEDRICDLYDLYVEGMDEDKGP

SEQ ID NO: 131652 - protein, 171 aa, Setaria italica
  Transcript Sequence Number=SeqID_65678
  Homolog annotation: Hit_ID=Q5N7I2; Match level="QueryCoverage=61%, HitCoverage=27%, E-value=3e-41, Identity=81%"; Hit description=Wound- responsive protein-like
KPSETYDYGSAYRDKGTSVQLDFQQRKASRENHDSSNRIYRKGKCGTSEYPVVAMGTAVYSTQTVNPIVGREGSGTKPKGTRLERAIRDLQKIVAEYRPPTIDINEVDPNGHAAVKRRLPQEVKQKLAKVARLSANQGKIQEHELMDRLMGIVGLPLLFFSFRFSFCFYFF

SEQ ID NO: 131653 - protein, 41 aa, Setaria italica
  Transcript Sequence Number=SeqID_65679
IQCFVCLMWCQKKSRNMKEMVESGLSAKLEKADRFQRIKME

SEQ ID NO: 131654 - protein, 46 aa, Setaria italica
  Transcript Sequence Number=SeqID_65680
  Gene Ontology: Mol. function=Rab GTPase activator activity; Cellular component=intracellular; Biological process=regulation of Rab GTPase activity
  Homolog annotation: Hit_ID=B9SGD5; Match level="QueryCoverage=95%, HitCoverage=5%, E-value=5e-18, Identity=86%"; Hit description=Run and tbc1 domain containing 3, plant, putative
PWFLSIFINMLPWESVLRVWDVILFEGNRTMLFRTTLALLDLYGIR

SEQ ID NO: 131655 - protein, 81 aa, Setaria italica
  misc_feature (54)..(54): Xaa can be any naturally occurring amino acid
  Transcript Sequence Number=SeqID_65681
  Gene Ontology: Mol. function=Rab GTPase activator activity; Cellular component=intracellular; Biological process=regulation of Rab GTPase activity
  Homolog annotation: Hit_ID=Q10N37; Match level="QueryCoverage=82%, HitCoverage=15%, E-value=3e-29, Identity=74%"; Hit description=TBC domain containing protein, expressed
RNQVYRNTRLLFSLQDLPRTFPGHPALDEDGRNALRRLLTAYARHNPSVGYCQXALVGVIDDYFDGYYTEEMIESQVDQLV

SEQ ID NO: 131656 - protein, 76 aa, Setaria italica
  Transcript Sequence Number=SeqID_65682
  Gene Ontology: Mol. function=Rab GTPase activator activity; Cellular component=intracellular; Biological process=regulation of Rab GTPase activity
  Homolog annotation: Hit_ID=Q5QMF8; Match level="QueryCoverage=69%, HitCoverage=6%, E-value=1e-13, Identity=75%"; Hit description =RabGAP/TBC domain-containing protein-like
RGEELETALMEMVEHDNRRMLSAKVEKLEAEVSELRKAFAGKQEQEQAMLQVLSYCIHSVSIIYVFFSMILHGPPT

SEQ ID NO: 131657 - protein, 126 aa, Setaria italica
  misc_feature (126)..(126): Xaa can be any naturally occurring amino acid
  Transcript Sequence Number=SeqID_65683
RKVRQYLFFLLLGTLTIDNLNETNRRKFTPMTYNSFPDLPKKLYLTTELNMIQGTLPAKLGKYQLDFPMEKTSLLFSTHCYSNQAIQPLMNTPDLVGSYDFLQYSTSLASSCFSGILPCLLKAIQX

SEQ ID NO: 131658 - protein, 148 aa, Setaria italica
  Transcript Sequence Number=SeqID_65684
  Gene Ontology: Mol. function=Rab GTPase activator activity; Cellular component=intracellular; Biological process=regulation of Rab GTPase activity
  Homolog annotation: Hit_ID=B9SGD5; Match level="QueryCoverage=91%, HitCoverage=16%, E-value=3e-37, Identity=60%"; Hit description=Run and tbc1 domain containing 3, plant, putative
EELETALMEMVEHDNRRMLSAKVEKLEAEVSELRKAFAGKQEQEQAMLQILLRMEQEQKVTEDARIAAERDAAEKKHAAHLLQEKYEEAMAALSQMEKRAVMAETMLEATKQYQAGQFKANQSFTSSSPRADHVPGKNEITKEKKTKK

SEQ ID NO: 131659 - protein, 75 aa, Setaria italica
  Transcript Sequence Number=SeqID_65685
  Subcellular localization annotation: CTP_CleavageSite=29; ConfidenceScore=5.04e-01
PGNVRGKSFSICPFHFSGCATFLGALICSLSTGSTNLETYLSTSSMLENDLDQGVDLQDQVSWLKVELCKLLEEK

SEQ ID NO: 131660 - protein, 56 aa, Setaria italica
  Transcript Sequence Number=SeqID_65686
  Gene Ontology: Mol. function=transferase activity, transferring glycosyl groups; Biological process=nucleoside metabolic process
  Homolog annotation: Hit_ID=B9SV47; Match level="QueryCoverage=83%, HitCoverage=19%, E-value=2e-14, Identity=85%"; Hit description =Uracil phosphoribosyltransferase, putative
MINHFEPLQPTITGEIETPVAVASVEFIDPREPVLVIPILRAGLALAEQASSVLPA

SEQ ID NO: 131661 - protein, 93 aa, Setaria italica
  Transcript Sequence Number=SeqID_65687
  Gene Ontology: Mol. function=protein tyrosine kinase activity; Cellular component=integral to membrane; Biological process=protein amino acid phosphorylation
  Homolog annotation: Hit_ID=B6SVW1; Match level="QueryCoverage=93%, HitCoverage=16%, E-value=6e-27, Identity=67%"; Hit description=ATP binding protein
HYVSALYRRKKDTTVMPWSTGLSGPLRKAFVAGVPSLGRAELQTACEDFINVIGSSSECTLYKGTLSSGVEIAVVSTSADSAKDWSDRSEEKF

SEQ ID NO: 131662 - protein, 51 aa, Setaria italica
  Transcript Sequence Number=SeqID_65688
GTVSILYDRKGYINYVLPPSQKTSHSRVILSQTFLTLTKFIEKNINVYGIK

SEQ ID NO: 131663 - protein, 79 aa, Setaria italica
  misc_feature (47)..(47): Xaa can be any naturally occurring amino acid
  misc_feature (69)..(69): Xaa can be any naturally occurring amino acid
  Transcript Sequence Number=SeqID_65689
  Gene Ontology: Mol. function=phosphoglycolate phosphatase activity; Biological process=metabolic process
  Homolog annotation: Hit_ID=B9SZX9; Match level="QueryCoverage=100%, HitCoverage=25%, E-value=8e-34, Identity=83%"; Hit description=N -acylneuraminate-9-phosphatase, putative
YEQPWGGSRLRYVDDGRPFWQHIVTSSTGCSDAQYFEELYQYFMTEXAWKLCDPDAENVFKALRKAGVXTAVVSNFDTR

SEQ ID NO: 131664 - protein, 125 aa, Setaria italica
  misc_feature (113)..(113): Xaa can be any naturally occurring amino acid
  Transcript Sequence Number=SeqID_65690
  Gene Ontology: Cellular component=mitochondrion
  Homolog annotation: Hit_ID=B9REF1; Match level="QueryCoverage=99%, HitCoverage=20%, E-value=9e-35, Identity=56%"; Hit description =Pentatricopeptide repeat-containing protein, putative
  Pfam annotation: Domain name=PPR; Domain location=40-74; Score=26.2; E_value=0.00014; Accession=PF01535.12; Description=PPR repeat
CFQLVPQQFCQSVFPFILQTDEACNVFEHISTLGVKPNATTYSLLVDAHLANKDPKAALAIIDKMVDAGFTPSKDTLKKVRRRCSRESDFDSDEKVQSLAKQFNYRMGGENRXEMLYNIEYNPVY

SEQ ID NO: 131665 - protein, 80 aa, Setaria italica
  misc_feature (43)..(43): Xaa can be any naturally occurring amino acid
  Transcript Sequence Number=SeqID_65691
LCNNGVGSSVQNTQEASFMEVDVASSTNGEVKMSLKCNLDPSXFSISMEEVFKMVEEKCLHSYKVLPPDFSIGKLMSEVC

SEQ ID NO: 131666 - protein, 84 aa, Setaria italica
  Transcript Sequence Number=SeqID_65692
  Gene Ontology: Mol. function=protein serine/threonine kinase activity; Cellular component=plasma membrane; Biological process =protein amino acid phosphorylation
  Homolog annotation: Hit_ID=Q10EA8; Match level="QueryCoverage=82%, HitCoverage=11%, E-value=1e-23, Identity=82%"; Hit description =BRASSINOSTEROID INSENSITIVE 1-associated receptor kinase 1, putative, expressed
  Pfam annotation: Domain name=LRR_1; Domain location=30-52; Score =17.8; E_value=0.045; Accession=PF00560.25; Description=Leucine Rich Repeat
  Pfam annotation: Domain name=LRR_1; Domain location=54-76; Score =17.2; E_value=0.071; Accession=PF00560.25; Description=Leucine Rich Repeat
  Pfam module annotation: Pfam domain module=LRR_1::LRR_1; Domain location=30-52::54-76
TTLLLLSQITEFHVQGLTGVLSPRIGELQYLSVLSLAGNRITGSIPEEFGNLSSLTSLDLEDNLLAGEIPASLGNLSKLQLLIL

SEQ ID NO: 131667 - protein, 48 aa, Setaria italica
  Transcript Sequence Number=SeqID_65693
SSKVGLILGTVGGVIGLLIVGVLFLICNARRRSHLREVFVDVAGSMPL

SEQ ID NO: 131668 - protein, 49 aa, Setaria italica
  Transcript Sequence Number=SeqID_65694
  Gene Ontology: Mol. function=protein serine/threonine kinase activity; Biological process=protein amino acid phosphorylation
  Homolog annotation: Hit_ID=Q75I96; Match level="QueryCoverage=89%, HitCoverage=7%, E-value=1e-11, Identity=81%"; Hit description =BRASSINOSTEROID INSENSITIVE 1-associated receptor kinase 1, putative, expressed
  Pfam annotation: Domain name=LRR_1; Domain location=23-45; Score =17.2; E_value=0.071; Accession=PF00560.25; Description=Leucine Rich Repeat
SCRSLAGNRITGSIPEEFGNLSSLTSLDLEDNLLAGEIPASLGNLSKAT

SEQ ID NO: 131669 - protein, 58 aa, Setaria italica
  misc_feature (42)..(42): Xaa can be any naturally occurring amino acid
  Transcript Sequence Number=SeqID_65695
  Gene Ontology: Mol. function=protein serine/threonine kinase activity; Cellular component=plasma membrane; Biological process =protein amino acid phosphorylation
  Homolog annotation: Hit_ID=Q75I96; Match level="QueryCoverage=98%, HitCoverage=9%, E-value=1e-21, Identity=85%"; Hit description =BRASSINOSTEROID INSENSITIVE 1-associated receptor kinase 1, putative, expressed
SAGEDDRRIAFGQLKRFAWRELQIATDNFNERNVLGQGGFGXKVYKGVLPDATKIAVK

SEQ ID NO: 131670 - protein, 84 aa, Setaria italica
  Transcript Sequence Number=SeqID_65696
  Homolog annotation: Hit_ID=B9RR11; Match level="QueryCoverage=94%, HitCoverage=13%, E-value=3e-18, Identity=58%"; Hit description =Electron transporter, putative
NFSIPYKVNGKEPKRYWNYRSAAEVSWMSVGKDQLEYASEALKMFRFLVEQLSKVNPSSMNRDQRLAFWINLYNALIMHVSMTC

SEQ ID NO: 131671 - protein, 84 aa, Setaria italica
  misc_feature (12)..(12): Xaa can be any naturally occurring amino acid
  Transcript Sequence Number=SeqID_65697
  Gene Ontology: Mol. function=electron carrier activity; Biological process=response to oxidative stress
  Homolog annotation: Hit_ID=B6SMR2; Match level="QueryCoverage=91%, HitCoverage=24%, E-value=1e-17, Identity=64%"; Hit description =Peroxidase 52
  Subcellular localization annotation: CTP_CleavageSite=59; ConfidenceScore=5.20e-01
ALAARDSTFLLXGPTWAVPLGRRDSTTASQSLANSDLPSPASDLATLITAFGNKGLSARDMTATTPDDDNNQYGLTTTSRPRNL

SEQ ID NO: 131672 - protein, 62 aa, Setaria italica
  Transcript Sequence Number=SeqID_65698
  Subcellular localization annotation: CTP_CleavageSite=46; ConfidenceScore=5.56e-01
GSSQIAMIRSTLFSIYQGQPPITTLQATRSSVGYRSFPLPSSHAKRSSHSSNSGVTQATSVY

SEQ ID NO: 131673 - protein, 34 aa, Setaria italica
  Transcript Sequence Number=SeqID_65699
  Homolog annotation: Hit_ID=B6TJT4; Match level="QueryCoverage=91%, HitCoverage=11%, E-value=9e-10, Identity=87%"; Hit description =Rhomboid family protein
AFQIRQIKALYLYHACPTWYQFVTSTFCHANWLV

SEQ ID NO: 131674 - protein, 30 aa, Setaria italica
  Transcript Sequence Number=SeqID_65700
TIFDNILNRKIPWPHVPEEMSVEARDLIAK

SEQ ID NO: 131675 - protein, 129 aa, Setaria italica
  Transcript Sequence Number=SeqID_65701
  Gene Ontology: Mol. function=protein serine/threonine kinase activity; Biological process=protein amino acid phosphorylation
  Homolog annotation: Hit_ID=Q10E09; Match level="QueryCoverage=91%, HitCoverage=16%, E-value=9e-56, Identity=89%"; Hit description =Protein kinase, putative, expressed
  Pfam annotation: Domain name=Pkinase; Domain location=2-125; Score= -62.1; E_value=8.6e-05; Accession=PF00069.17; Description=Protein kinase domain
  Pfam annotation: Domain name=Pkinase_Tyr; Domain location=1-128; Score=-124.8; E_value=2e-05; Accession=PF07714.9; Description =Protein tyrosine kinase
  Pfam module annotation: Pfam domain module=Pkinase::Pkinase_Tyr; Domain location=2-125::1-128
LFAIKVLRKADMIRKNAVESILAERDILITVRNPFVVRFFYSFTSRENLYLVMEYLNGGDLYSLLRNLGCLDEDVARVYLAEVVLALEYLHSMQIVHRDLKPDNFVCISRLLYGHIKLTSIFGFVPKVW

SEQ ID NO: 131676 - protein, 29 aa, Setaria italica
  Transcript Sequence Number=SeqID_65702
SNSFVCYLVFMTIAMPSSSRNTNTLEPKI

SEQ ID NO: 131677 - protein, 91 aa, Setaria italica
  Transcript Sequence Number=SeqID_65703
  Gene Ontology: Cellular component=ribosome
  Homolog annotation: Hit_ID=Q704V3; Match level="QueryCoverage=79%, HitCoverage=44%, E-value=2e-22, Identity=73%"; Hit description=Zinc finger protein
  Pfam annotation: Domain name=Ribosomal_S27e; Domain location=29-83; Score=-5.2; E_value=0.1; Accession=PF01667.9; Description=Ribosomal protein S27
  Pfam annotation: Domain name=zf-LSD1; Domain location=19-43; Score =28.9; E_value=2.1e-05; Accession=PF06943.4; Description=LSD1 zinc finger
  Pfam annotation: Domain name=zf-LSD1; Domain location=57-81; Score =44.1; E_value=5.5e-10; Accession=PF06943.4; Description=LSD1 zinc finger
  Pfam module annotation: Pfam domain module=Ribosomal_S27e::zf -LSD1::zf-LSD1; Domain location=29-83::19-43::57-81
RHRRPFGSVCLYEMGQMVCGRCRQLLAYPRGVVHVQCFGCWTINLVLEEHQVGKVYCGQCDTLLMYPFGAPAVKCSNCLFVTEIEMVSQMI

SEQ ID NO: 131678 - protein, 51 aa, Setaria italica
  Transcript Sequence Number=SeqID_65704
FTCSDFSDKRHLEHLTAGAPKDTSTMYHTVHNTTYQLDVLARKGKKGTTIF

SEQ ID NO: 131679 - protein, 64 aa, Setaria italica
  Transcript Sequence Number=SeqID_65705
  Homolog annotation: Hit_ID=Q704V3; Match level="QueryCoverage=79%, HitCoverage=31%, E-value=2e-17, Identity=82%"; Hit description=Zinc finger protein
  Pfam annotation: Domain name=zf-LSD1; Domain location=11-35; Score =44.5; E_value=4.2e-10; Accession=PF06943.4; Description=LSD1 zinc finger
LEEHQVGKVYCGECDTLLMYPFGAPAVKCSNCLFVTEIGERNVRPRISTEQSVSPHPQEVAHQS

SEQ ID NO: 131680 - protein, 72 aa, Setaria italica
  misc_feature (61)..(61): Xaa can be any naturally occurring amino acid
  Transcript Sequence Number=SeqID_65706
  Gene Ontology: Mol. function=protein serine/threonine kinase activity; Cellular component=intrinsic to membrane; Biological process=protein amino acid phosphorylation
  Homolog annotation: Hit_ID=B9RJB4; Match level="QueryCoverage=94%, HitCoverage=12%, E-value=1e-21, Identity=73%"; Hit description =Mitogen-activated protein kinase kinase kinase, putative
EITLLSRLEHENIVQYFGTDKEGGKLYIFLELVTQGSLAALYQKYHLQDSQNSAYTRQILXNGLLYIHTSEM

SEQ ID NO: 131681 - protein, 75 aa, Setaria italica
  Transcript Sequence Number=SeqID_65707
GPGRGGATCCVKETARAARSRRGRVPDEGCDGVGAQGEKRRLGIREATSARTTGAAAVDGRRRLGGADFARGREE

SEQ ID NO: 131682 - protein, 67 aa, Setaria italica
  Transcript Sequence Number=SeqID_65708
FASVFFSGYIASWFHDKAIFFYHFQVPVYLQTVTKKLCFALPWSHGSKDTCRDEVFYEPKQQSLRVF

SEQ ID NO: 131683 - protein, 136 aa, Setaria italica
  misc_feature (109)..(109): Xaa can be any naturally occurring amino acid
  Transcript Sequence Number=SeqID_65709
  Gene Ontology: Mol. function=pyridoxal phosphate binding; Cellular component=peroxisome; Biological process=metabolic process
  Homolog annotation: Hit_ID=Q3S2I1; Match level="QueryCoverage=95%, HitCoverage=32%, E-value=1e-55, Identity=82%"; Hit description =Serine-glyoxylate aminotransferase
SSLGLSNVGTLVGRATWGRGADLDVLEAKLRQDTAHTIKAIAIVHNETATGVTNDLATVRKLLDTYRHPALILVDGVSSICALDFRMDEWGVDVALTGSQKALSMPTGXGIVCASPKALEASKTAKSVRVFFDWND

SEQ ID NO: 131684 - protein, 121 aa, Setaria italica
  misc_feature (78)..(78): Xaa can be any naturally occurring amino acid
  misc_feature (93)..(93): Xaa can be any naturally occurring amino acid
  Transcript Sequence Number=SeqID_65710
  Gene Ontology: Mol. function=pyridoxal phosphate binding; Cellular component=peroxisome; Biological process=metabolic process
  Homolog annotation: Hit_ID=Q3S2I1; Match level="QueryCoverage=99%, HitCoverage=29%, E-value=3e-40, Identity=72%"; Hit description =Serine-glyoxylate aminotransferase
VLTKILLEDVKKIFKTTTGTPFIIPTTGTGAWESALTNTLSPGDRIVSFLIGQFSLLWIDQQQRLGFNVDVVESDWGXGADLDVLEAKLRQDXPHTIKAIAIVHNETATGVTNDLATVRKL

SEQ ID NO: 131685 - protein, 67 aa, Setaria italica
  misc_feature (57)..(57): Xaa can be any naturally occurring amino acid
  Transcript Sequence Number=SeqID_65711
MPWQVYADGAGPTSTAVCLTGLLPTHTVTPLQQTKMADYVYGPGRTHLFVPGPVNIXPDPVIRAMNP

SEQ ID NO: 131686 - protein, 103 aa, Setaria italica
  misc_feature (16)..(16): Xaa can be any naturally occurring amino acid
  misc_feature (47)..(47): Xaa can be any naturally occurring amino acid
  Transcript Sequence Number=SeqID_65712
ASDIGDAVETETILIXSRKDAALQQRKIAMRIASRRSSSASCDEIAXLAEAKAANNAITSVSRRVKSAKSELRSLQATANRMILSQEEMEEVVLKRCWLGPLL

SEQ ID NO: 131687 - protein, 61 aa, Setaria italica
  Transcript Sequence Number=SeqID_65713
QVCYLLKYTIYYQCLSHILKHIFNLAHRKDAALQQRKVCFHRKLLLLKVLRNTRETCLLLF

SEQ ID NO: 131688 - protein, 93 aa, Setaria italica
  Transcript Sequence Number=SeqID_65714
  Subcellular localization annotation: CTP_CleavageSite=51; ConfidenceScore=5.47e-01
FHYANTKNFHFLYRPANKSSFTAAKMGRQKRSRHNCYLRCRGHRQHSDSVLQQARRCRFIMQFILLVLLYTRIFLGNLVMMRYYTQSHAEPTN

SEQ ID NO: 131689 - protein, 89 aa, Setaria italica
  Transcript Sequence Number=SeqID_65715
  Gene Ontology: Mol. function=protein binding; Cellular component =chloroplast; Biological process=iron-sulfur cluster assembly
  Homolog annotation: Hit_ID=B9RXM8; Match level="QueryCoverage=59%, HitCoverage=9%, E-value=9e-18, Identity=81%"; Hit description =Protein sufB, putative
QGNQEIATVQRCPWILIRLREFLPLWIISKGISAGKSRNCYRGLVQMNAGAENAYNSSQCDSLLIGDNAAANTYPTIQVGCTSGSACLM

SEQ ID NO: 131690 - protein, 66 aa, Setaria italica
  Transcript Sequence Number=SeqID_65716
  Subcellular localization annotation: CTP_CleavageSite=37; ConfidenceScore=5.35e-01
QFGIVLSQTNIPSFSNTASYVVMPLQSPTNGAYHPISAACHGAFSSGSVSYSAPYGTVGLPITAWG

SEQ ID NO: 131691 - protein, 107 aa, Setaria italica
  Transcript Sequence Number=SeqID_65717
  Gene Ontology: Mol. function=nucleoside-triphosphatase activity; Biological process=defense response
  Homolog annotation: Hit_ID=Q2QZF1; Match level="QueryCoverage=72%, HitCoverage=7%, E-value=4e-29, Identity=79%"; Hit description=NB-ARC domain containing protein, expressed
VKFCLVVLLLLILVFYCSKVSLITFLVEHNSNGKVKTFLVHDMVLEYIVSKSSEENFITVVGGHWMMPPPSNKVRRLSMQSSGSKHENMTKNINLSQVRSVTWFLEA

SEQ ID NO: 131692 - protein, 67 aa, Setaria italica
  Transcript Sequence Number=SeqID_65718
KYTVPWDGYTCRPYLFSKQQPNYFAISSIDGIVHDYLQLISSVVLQIFDQEVGDFSGFCLLCSFIPS

SEQ ID NO: 131693 - protein, 68 aa, Setaria italica
  Transcript Sequence Number=SeqID_65719
  Homolog annotation: Hit_ID=B6U3R7; Match level="QueryCoverage=45%, HitCoverage=26%, E-value=8e-10, Identity=93%"; Hit description=NTGP5
GTDIGPSKYDPNTTVAALKEFVLARWPQGEETLSLSLFSLSARRARLRRVYIQLCSAFVCNCPSLFSG

SEQ ID NO: 131694 - protein, 78 aa, Setaria italica
  Transcript Sequence Number=SeqID_65720
MTIHQRRSFILLLLLLCPCGGLHLHLVNGGALLDITLHPRRKRERKAIVSAWKHVEHAQIKLLRPCPCVQVERCLTSG

SEQ ID NO: 131695 - protein, 53 aa, Setaria italica
  Transcript Sequence Number=SeqID_65721
ELCLIVAKLNSVQGTKKSPETSQGSALLQVPVYKSSGTPELCSFHCCSDNIGC

SEQ ID NO: 131696 - protein, 85 aa, Setaria italica
  Transcript Sequence Number=SeqID_65722
IDLPLHQHLCHTSVTMPERAEQNGVGTLRRLFRCTRQFFFPVDSPVDLKDNKLMRTIYHVEWEWHQRREGQVDIVTSSRLLVKFV

SEQ ID NO: 131697 - protein, 39 aa, Setaria italica
  Transcript Sequence Number=SeqID_65723
ASPIVAVTVSEVEALHDLFRKISNTVVKDNLIHKVVLNA

SEQ ID NO: 131698 - protein, 88 aa, Setaria italica
  misc_feature (55)..(55): Xaa can be any naturally occurring amino acid
  misc_feature (68)..(68): Xaa can be any naturally occurring amino acid
  Transcript Sequence Number=SeqID_65724
  Gene Ontology: Mol. function=calcium ion binding; Cellular component =plasma membrane
  Homolog annotation: Hit_ID=C4P7Y2; Match level="QueryCoverage=95%, HitCoverage=55%, E-value=6e-28, Identity=57%"; Hit description =Calcineurin B-like protein 04
ASPIVAVTVSEVEALHDLFRKISNTVVKDNLIHKEEFHVALFRNKKKQNLFVDRXAFKLYDLRQTGFXERNELKEMVCALLDESELDI

SEQ ID NO: 131699 - protein, 74 aa, Setaria italica
  Transcript Sequence Number=SeqID_65725
  Gene Ontology: Mol. function=calcium ion binding; Cellular component =plasma membrane; Biological process=abscisic acid mediated signaling
  Homolog annotation: Hit_ID=C4P7Y2; Match level="QueryCoverage=95%, HitCoverage=32%, E-value=1e-24, Identity=77%"; Hit description =Calcineurin B-like protein 04
TITKQKHAGQSPDSLDRREAVALAAETSFTVSEVEALHDLFRKISNTVVKDNLIHKEEFHVALFRNKKKQNSFC

SEQ ID NO: 131700 - protein, 67 aa, Setaria italica
  misc_feature (13)..(13): Xaa can be any naturally occurring amino acid
  Transcript Sequence Number=SeqID_65726
  Gene Ontology: Mol. function=catalytic activity; Biological process =metabolic process
  Homolog annotation: Hit_ID=B6U172; Match level="QueryCoverage=98%, HitCoverage=10%, E-value=2e-17, Identity=75%"; Hit description=Gl1 protein
WKVVQEWREQGGXPLGSWWLHLLVLFAVRGLIYQFWFTYGNMLFFTRRRRVVADGVDFRQIDAEWDW

SEQ ID NO: 131701 - protein, 77 aa, Setaria italica
  misc_feature (59)..(59): Xaa can be any naturally occurring amino acid
  Transcript Sequence Number=SeqID_65727
  Gene Ontology: Mol. function=phosphatidylinositol phosphate kinase activity; Biological process=phosphatidylinositol metabolic process
GANSTKDSSSVLAIEIFGKMESLHVEVSEFLHRTEKNIETEDEPVKEGVQRQIIEMKDXLKKWKRNEYEILLLPVIR

SEQ ID NO: 131702 - protein, 86 aa, Setaria italica
  Transcript Sequence Number=SeqID_65728
  Gene Ontology: Mol. function=inositol or phosphatidylinositol phosphatase activity
  Homolog annotation: Hit_ID=Q852L1; Match level="QueryCoverage=80%, HitCoverage=12%, E-value=1e-25, Identity=79%"; Hit description =Putative inositol polyphosphate 5-phosphatase
TPSPVLDPVVELDADFEGSARRQENFPFFHRRSFHNLSRSLRMDGDYMFPQPRLDRRFSVCDPVNLGGRSYETMTEESTKKSKLFV

SEQ ID NO: 131703 - protein, 75 aa, Setaria italica
  Transcript Sequence Number=SeqID_65729
  Gene Ontology: Mol. function=inositol or phosphatidylinositol phosphatase activity
  Homolog annotation: Hit_ID=Q852L1; Match level="QueryCoverage=94%, HitCoverage=13%, E-value=7e-27, Identity=80%"; Hit description =Putative inositol polyphosphate 5-phosphatase
MNRCDRILWYGNGLNQLSYVRGESRFSDHRPVYSIFLAEVDIVHQRRRNMGYFSSRIEVEELLPHSQSYREIKFY

SEQ ID NO: 131704 - protein, 68 aa, Setaria italica
  Transcript Sequence Number=SeqID_65730
LNLPLLEEALNRIKVIRELELRGLDDAKRKLYPSAEESLKHLLWLTDTEAVFGAALGLYDLNLAAIVA

SEQ ID NO: 131705 - protein, 132 aa, Setaria italica
  misc_feature (108)..(108): Xaa can be any naturally occurring amino acid
  misc_feature (122)..(122): Xaa can be any naturally occurring amino acid
  Transcript Sequence Number=SeqID_65731
  Gene Ontology: Mol. function=transferase activity, transferring glycosyl groups
  Homolog annotation: Hit_ID=Q5NA53; Match level="QueryCoverage=99%, HitCoverage=20%, E-value=2e-64, Identity=88%"; Hit description =Glycogenin-like protein
  Pfam annotation: Domain name=Glyco_transf_8; Domain location=1-132; Score=3.6; E_value=3.9e-06; Accession=PF01501.12; Description =Glycosyl transferase family 8
MVSSTRITRSLVDDTISDHHRKGLESAGWKVRIIQRIRNPKAERDAYNEWNYSKFRLWQLTDYDKVIFIDADLLILRNIDFLFAMPEITATGNNATLFNSGVMVIEPXNCTFSLLMEHINEXTSYNGGDQGY

SEQ ID NO: 131706 - protein, 72 aa, Setaria italica
  misc_feature (14)..(14): Xaa can be any naturally occurring amino acid
  Transcript Sequence Number=SeqID_65732
  Gene Ontology: Mol. function=transferase activity, transferring glycosyl groups
  Homolog annotation: Hit_ID=Q5NA53; Match level="QueryCoverage=95%, HitCoverage=10%, E-value=6e-29, Identity=88%"; Hit description =Glycogenin-like protein
FGANPPILYVLHYXLGRKPWLCFRDYDCNWNVEILREFASDVAHARWWKVHNKMPKKLQSYCLLRSRLKDRN

SEQ ID NO: 131707 - protein, 77 aa, Setaria italica
  Transcript Sequence Number=SeqID_65733
  Gene Ontology: Mol. function=translation elongation factor activity
  Homolog annotation: Hit_ID=B9RPP6; Match level="QueryCoverage=94%, HitCoverage=7%, E-value=1e-16, Identity=55%"; Hit description =Translation elongation factor, putative
GLAFIVEPYLFADGSDAANHFDQYNISSGQVITAVKEACRAAVLQNKPRIVEAMYFCELTAPYDQSGSTYGVLPSII

SEQ ID NO: 131708 - protein, 46 aa, Setaria italica
  Transcript Sequence Number=SeqID_65734
VLMLFGSYLNLLCSLFANRSSVFILITYLGLGRSRRPKLHQEEEVQ

SEQ ID NO: 131709 - protein, 63 aa, Setaria italica
  Transcript Sequence Number=SeqID_65735
  Homolog annotation: Hit_ID=B6TJ55; Match level="QueryCoverage=85%, HitCoverage=22%, E-value=4e-20, Identity=90%"; Hit description =Cytochrome c oxidoreductase
KAAKLAAALDIGGFGVVFAATTFAISELDLRTMVIGMICACLNVLMYGSPLAAMGYRNPSAGD

SEQ ID NO: 131710 - protein, 47 aa, Setaria italica
  Transcript Sequence Number=SeqID_65736
  Gene Ontology: Mol. function=structural molecule activity; Cellular component=viral capsid
  Homolog annotation: Hit_ID=Q2PYY1; Match level="QueryCoverage=97%, HitCoverage=15%, E-value=1e-11, Identity=63%"; Hit description =Protein transport SEC13-like protein
RDFGAPVWRVSWSLTGNILSIAAGENNITLWKEGSDGQWEEVMKVEP

SEQ ID NO: 131711 - protein, 103 aa, Setaria italica
  Transcript Sequence Number=SeqID_65737
  Gene Ontology: Mol. function=protein serine/threonine kinase activity; Cellular component=plasma membrane; Biological process =protein amino acid phosphorylation
  Homolog annotation: Hit_ID=Q5NAH8; Match level="QueryCoverage=85%, HitCoverage=20%, E-value=2e-41, Identity=92%"; Hit description =Protein kinase CDG1-like
AGSDKGASRLDWDARLKIALGAARALAYLHEDSSPRVIHRDFKSSNILLEHDFTPKVSDFGLARTALGEGNEHISTRVMGTFGYVEFEFIVFTVHSFIAYSIS

SEQ ID NO: 131712 - protein, 52 aa, Setaria italica
  Transcript Sequence Number=SeqID_65738
QRPFMGEVVQALKLVCNEGSELHRYLMSPELLVRVVLGVSMKVFLRTLIATR

SEQ ID NO: 131713 - protein, 100 aa, Setaria italica
  misc_feature (33)..(33): Xaa can be any naturally occurring amino acid
  Transcript Sequence Number=SeqID_65739
  Gene Ontology: Cellular component=nucleus; Biological process =regulation of transcription, DNA-dependent
  Homolog annotation: Hit_ID=B6TWZ7; Match level="QueryCoverage=84%, HitCoverage=38%, E-value=8e-32, Identity=82%"; Hit description=ZIM motif family protein
  Pfam annotation: Domain name=CCT_2; Domain location=53-79; Score =55.2; E_value=2.5e-13; Accession=PF09425.2; Description=Divergent CCT motif
  Subcellular localization annotation: CTP_CleavageSite=81; ConfidenceScore=5.65e-01
NRPSKTSKPTVAPAAVSPALTRSLSLQSTSVAXGQPQVVADPSSMCKLQADLPIARRHSLQRFLEKRRDRIVNKAPYSPAKSSEGMESPGMEVAAEGKAQ

SEQ ID NO: 131714 - protein, 86 aa, Setaria italica
  Transcript Sequence Number=SeqID_65740
RCGKGRDVSLSYVEAQDRTNNWTGTSIIAVLLSCARLVYSAVNSFTRIPNCYDMMCRSVVVHHAGRLSDYVCHNDHLVMKYHLCYT

SEQ ID NO: 131715 - protein, 68 aa, Setaria italica
  Transcript Sequence Number=SeqID_65741
  Gene Ontology: Mol. function=protein serine/threonine kinase activity; Cellular component=plasma membrane; Biological process =protein amino acid phosphorylation
  Homolog annotation: Hit_ID=B6STX9; Match level="QueryCoverage=95%, HitCoverage=15%, E-value=2e-21, Identity=73%"; Hit description =Serine/threonine-protein kinase NAK
IGYCAVDSEAGKHRLLVYEFMPNKSLDDHLFNRSHPPLSWRLRLQIMIGAAWGLDYLHEGVPEVQSAG

SEQ ID NO: 131716 - protein, 84 aa, Setaria italica
  misc_feature (73)..(73): Xaa can be any naturally occurring amino acid
  Transcript Sequence Number=SeqID_65742
  Gene Ontology: Mol. function=protein serine/threonine kinase activity; Cellular component=plasma membrane; Biological process =protein amino acid phosphorylation
  Homolog annotation: Hit_ID=B6STX9; Match level="QueryCoverage=83%, HitCoverage=16%, E-value=2e-32, Identity=90%"; Hit description =Serine/threonine-protein kinase NAK
SLFSFDSSGACGLVSQVVGTHGYAAPEYIDSGHLTAKSDVWSFGVVLYEILTGRRSLDRNKPVAEQKLLEWVXQFPPDSRNFRM

SEQ ID NO: 131717 - protein, 85 aa, Setaria italica
  Transcript Sequence Number=SeqID_65743
  Gene Ontology: Mol. function=protein serine/threonine kinase activity; Biological process=protein amino acid phosphorylation
AAEKAAKVAHQCLQSVPKARPSMRDVVGALEPLLALDDDVPMGPFVYTVGGGAEAAEAAPAPARADDEAAANDEEAEAGSRQGKR

SEQ ID NO: 131718 - protein, 71 aa, Setaria italica
  Transcript Sequence Number=SeqID_65744
  Gene Ontology: Mol. function=protein serine/threonine kinase activity; Biological process=protein amino acid phosphorylation
  Homolog annotation: Hit_ID=B6STX9; Match level="QueryCoverage=76%, HitCoverage=13%, E-value=7e-15, Identity=71%"; Hit description =Serine/threonine-protein kinase NAK
DHLFRRANPPLSWNGRLQVILGAAEGLAYLHEGVEVQVFFKPAQLLACFQFTSKKIAYLPWFLKWKSVLAS

SEQ ID NO: 131719 - protein, 64 aa, Setaria italica
  misc_feature (32)..(32): Xaa can be any naturally occurring amino acid
  misc_feature (51)..(51): Xaa can be any naturally occurring amino acid
  Transcript Sequence Number=SeqID_65745
  Gene Ontology: Mol. function=oxidoreductase activity; Cellular component=chloroplast envelope
  Homolog annotation: Hit_ID=B6TYB4; Match level="QueryCoverage=79%, HitCoverage=13%, E-value=6e-17, Identity=90%"; Hit description=Aldo -keto reductase yakc
MWLLCVLNRGCQVVLNWLVCQGNVVPIPGAKXNAEQAREFAGALGWSLTGXEVEELRSMARPGQ

SEQ ID NO: 131720 - protein, 100 aa, Setaria italica
  misc_feature (18)..(18): Xaa can be any naturally occurring amino acid
  misc_feature (36)..(36): Xaa can be any naturally occurring amino acid
  misc_feature (49)..(49): Xaa can be any naturally occurring amino acid
  Transcript Sequence Number=SeqID_65746
  Gene Ontology: Mol. function=binding
  Homolog annotation: Hit_ID=B9RT64; Match level="QueryCoverage=100%, HitCoverage=7%, E-value=1e-29, Identity=66%"; Hit description =Condensin, putative
FLPCLVDESEKIRHLADXLFGNILKAKAPLLAYNSXFIEAIYVLNDCTXGHGAYSESQGSSDRRPALFAIRGTDERSRSKRMHIYASLLKQMAPEHLLAT

SEQ ID NO: 131721 - protein, 97 aa, Setaria italica
  misc_feature (71)..(71): Xaa can be any naturally occurring amino acid
  Transcript Sequence Number=SeqID_65747
  Gene Ontology: Mol. function=binding
  Homolog annotation: Hit_ID=B9RT64; Match level="QueryCoverage=89%, HitCoverage=6%, E-value=1e-24, Identity=63%"; Hit description =Condensin, putative
FLFEAIYVLNDCTGHGAYSESQGSSDRRPALFAIRGTDERSRSKRMHIYASLLKQMAPEHLLATSAKLCAXILAAVCDGLLSVDDAGGRACTFRMLC

SEQ ID NO: 131722 - protein, 69 aa, Setaria italica
  Transcript Sequence Number=SeqID_65748
  Gene Ontology: Mol. function=tryptophan synthase activity; Biological process=tryptophan biosynthetic process
  Homolog annotation: Hit_ID=A6N0G7; Match level="QueryCoverage=65%, HitCoverage=67%, E-value=3e-15, Identity=84%"; Hit description =Tryptophan synthase beta chain 2 (Fragment)
RQRGGGGGGGREWRRRWKRTGEEKVILMAMCGHGHFDLAAYEKYLRGDMVDLSHSADKLEASLAAVPKV

SEQ ID NO: 131723 - protein, 75 aa, Setaria italica
  Transcript Sequence Number=SeqID_65749
  Gene Ontology: Mol. function=tryptophan synthase activity; Biological process=tryptophan biosynthetic process
  Homolog annotation: Hit_ID=Q9FFW8; Match level="QueryCoverage=82%, HitCoverage=11%, E-value=2e-19, Identity=72%"; Hit description =Tryptophan synthase beta chain
RYLYVTFRSYYRPGSTPLMKMHTLGHGFVPEPEYQRQGGLRYHGMAPLISHVYELGFMDAVAIQQTECFQAALQF

SEQ ID NO: 131724 - protein, 61 aa, Setaria italica
  Transcript Sequence Number=SeqID_65750
  Gene Ontology: Mol. function=signal transducer activity; Biological process=response to light stimulus
  Homolog annotation: Hit_ID=B6UC07; Match level="QueryCoverage=63%, HitCoverage=6%, E-value=4e-11, Identity=76%"; Hit description =Transposon protein Mutator sub-class
MESRFDTPAMKRTSDWVLSQEYPSDITIQVGEATFNLHKVTSRITSLPFVFLAGIRRKFRS

SEQ ID NO: 131725 - protein, 83 aa, Setaria italica
  Transcript Sequence Number=SeqID_65751
  Gene Ontology: Mol. function=signal transducer activity; Cellular component=plasma membrane; Biological process=response to light stimulus
  Homolog annotation: Hit_ID=B6UC07; Match level="QueryCoverage=80%, HitCoverage=11%, E-value=2e-28, Identity=85%"; Hit description =Transposon protein Mutator sub-class
YHPVGEATFNLHKLPLASRCGYIRKQVSGINGSKFTTHIDLTGMPGGSRAFELVTKFCYGENLEITEDNVRRIVLFGLFVPFR

SEQ ID NO: 131726 - protein, 101 aa, Setaria italica
  Transcript Sequence Number=SeqID_65752
SSFCFETWLVVEHEKQDQKQDLLFDTFWVMTFFESVSLIGSQEITNVLVSNDDNGFLLPYAFAATLSVVGILYMSWLVMMTMDSCFPMHLLATLSVWGFCI

SEQ ID NO: 131727 - protein, 87 aa, Setaria italica
  Transcript Sequence Number=SeqID_65753
SSNISYNNFFANVYRGPRRACIFYWVLQLAVGALKSFSALGCAWINNFILTLASSLFSFCFETWLVVEHEKVCVFKTICAITVFFML

SEQ ID NO: 131728 - protein, 85 aa, Setaria italica
  Transcript Sequence Number=SeqID_65754
  Gene Ontology: Mol. function=oxidoreductase activity; Biological process=oxidation reduction
  Homolog annotation: Hit_ID=Q53PA3; Match level="QueryCoverage=62%, HitCoverage=31%, E-value=2e-21, Identity=84%"; Hit description =Similar to b-keto acyl reductase
MLRLYISLLVYANFVVYHLFVIRPFCGGPIQIPLYVATKMSPVKGDCPFIPSPEEYAKAALRCIGYEARCVPYWRHSVQWFLAFV

SEQ ID NO: 131729 - protein, 57 aa, Setaria italica
  Transcript Sequence Number=SeqID_65755
GKGSALAAATTTKEEAMDMTTSHSHSQSHSHSWGETRTPESEIVDNDPFPELDDSFP

SEQ ID NO: 131730 - protein, 30 aa, Setaria italica
  Transcript Sequence Number=SeqID_65756
SISLQLDDWVLCRLYNKKNEWEKMQMGKGS

SEQ ID NO: 131731 - protein, 81 aa, Setaria italica
  Transcript Sequence Number=SeqID_65757
CICRVTSVSLPIGMMIESISAKQNDYPKGKKRGSVLVGGQLKQMDHLHKLNKMNFLSRTKYIHQKGFHQLFYFLGFLLGIR

SEQ ID NO: 131732 - protein, 55 aa, Setaria italica
  Transcript Sequence Number=SeqID_65758
NAFSSRILCKLKNKEVCLFFNCANEKCRLLHQLNPLSWIHLKISVNIDKCQIRKL

SEQ ID NO: 131733 - protein, 42 aa, Setaria italica
  Transcript Sequence Number=SeqID_65759
SFFLLFSSITTTSYLAHVLFFFCIMDDYDRCLPKDMDPSMDR

SEQ ID NO: 131734 - protein, 64 aa, Setaria italica
  Transcript Sequence Number=SeqID_65760
  Subcellular localization annotation: CTP_CleavageSite=50; ConfidenceScore=5.29e-01
VSVLQGFGRIPVKLSFATSVCFTFAKLNLTGIRPNPCKTENSWKRMRHVRVHGRARLSHGRWQH

SEQ ID NO: 131735 - protein, 59 aa, Setaria italica
  Transcript Sequence Number=SeqID_65761
  Homolog annotation: Hit_ID=Q6Z4N7; Match level="QueryCoverage=69%, HitCoverage=10%, E-value=1e-16, Identity=87%"; Hit description =Putative r40c1 protein
RHSKQHKSGSIAHTTVVLIYLNFDALHGDKDHGGVRDGTTLVLWEWCEGDNQRWKIVPW

SEQ ID NO: 131736 - protein, 58 aa, Setaria italica
  Transcript Sequence Number=SeqID_65762
FATTDLKVKVVRIQYFAAYIPSTRQASTTFQILYSVLILVLCVFIFFSLVCWCVCEQK

SEQ ID NO: 131737 - protein, 111 aa, Setaria italica
  misc_feature (8)..(8): Xaa can be any naturally occurring amino acid
  misc_feature (93)..(93): Xaa can be any naturally occurring amino acid
  Transcript Sequence Number=SeqID_65763
  Gene Ontology: Mol. function=electron carrier activity; Biological process=oxidation reduction
  Homolog annotation: Hit_ID=B6ST66; Match level="QueryCoverage=100%, HitCoverage=20%, E-value=1e-41, Identity=72%"; Hit description =Cytochrome P450 CYP92C5
HPVGPLMXYPHGGREDAVVGGYDIPAGTRVVINAWAVGRDPASWPDEPDEFRPERFLAGGGAEGVDVRGAHFQLVPFGSGRRMCPAYNLAMKXMAATVANLVHGFSWRLPD

SEQ ID NO: 131738 - protein, 69 aa, Setaria italica
  Transcript Sequence Number=SeqID_65764
  Homolog annotation: Hit_ID=Q5SND4; Match level="QueryCoverage=62%, HitCoverage=9%, E-value=3e-16, Identity=93%"; Hit description=GAMYB -binding protein
VAPAEKHPGSLLEGFSGVQVSTLAVNEGLLVAGGFQGELICMVRHQLRLGCIFASVVFVDEFSFPLTRM

SEQ ID NO: 131739 - protein, 79 aa, Setaria italica
  Transcript Sequence Number=SeqID_65765
  Homolog annotation: Hit_ID=A9LLI8; Match level="QueryCoverage=98%, HitCoverage=8%, E-value=8e-17, Identity=52%"; Hit description=RRP6 -like protein 3
PSDKINFFFEASHRSNMVSMQLYAKEIECPPGASSAASILTRNLQTHGLDSKRSSEVKDLVWKFCAWRDLMARMHDESL

SEQ ID NO: 131740 - protein, 48 aa, Setaria italica
  misc_feature (25)..(25): Xaa can be any naturally occurring amino acid
  Transcript Sequence Number=SeqID_65766
  Gene Ontology: Mol. function=transferase activity
  Homolog annotation: Hit_ID=Q6YVS8; Match level="QueryCoverage=93%, HitCoverage=11%, E-value=2e-14, Identity=84%"; Hit description=N -acetyltransferase and Transcription factor-like protein
KTADLEFVDGILEEGDLLYIPPKWXWHYVRSLSISFSVRFWWRTSGSS

SEQ ID NO: 131741 - protein, 84 aa, Setaria italica
  misc_feature (63)..(63): Xaa can be any naturally occurring amino acid
  Transcript Sequence Number=SeqID_65767
  Gene Ontology: Mol. function=transferase activity
  Homolog annotation: Hit_ID=Q6YVS8; Match level="QueryCoverage=100%, HitCoverage=31%, E-value=1e-18, Identity=52%"; Hit description=N -acetyltransferase and Transcription factor-like protein
LIMGGGLLRAELEDAIARVVADRSGGEAEAVTGGNVERWKEGIAGDRDPADVLKLLPVKALSXGCIDHWPARTKWKDINYLERI

SEQ ID NO: 131742 - protein, 91 aa, Setaria italica
  Transcript Sequence Number=SeqID_65768
  Gene Ontology: Mol. function=nucleotide binding
  Homolog annotation: Hit_ID=B6U9L6; Match level="QueryCoverage=36%, HitCoverage=6%, E-value=7e-12, Identity=100%"; Hit description =Growth regulator like protein
SRLAAIDFIVCDESDVFVTNNNGNMAKVLAGRRYASLSFVWNILVCDAKGHDAERCTLQCAFVLLVVYILVLILMLCRIYLCSVGLYLVDS

SEQ ID NO: 131743 - protein, 58 aa, Setaria italica
  Transcript Sequence Number=SeqID_65769
  Homolog annotation: Hit_ID=B6U9L6; Match level="QueryCoverage=60%, HitCoverage=7%, E-value=5e-12, Identity=85%"; Hit description=Growth regulator like protein
SIGSWVLRFSSSKVTSKVPSRGSLLGEPDDIRPKQDDFHEFPSACICLRKPGNVSVTT

SEQ ID NO: 131744 - protein, 57 aa, Setaria italica
  Transcript Sequence Number=SeqID_65770
  Gene Ontology: Mol. function=protein serine/threonine kinase activity; Cellular component=plasma membrane; Biological process =protein amino acid phosphorylation
  Homolog annotation: Hit_ID=Q4LB28; Match level="QueryCoverage=78%, HitCoverage=8%, E-value=1e-16, Identity=82%"; Hit description =B0222C05.2 protein
LTRSVKKALLVALRCVDPDASKRPRIGHVIHMLEVDDFPYREDRRGTIRTAVGLMVT

SEQ ID NO: 131745 - protein, 69 aa, Setaria italica
  misc_feature (13)..(13): Xaa can be any naturally occurring amino acid
  misc_feature (28)..(28): Xaa can be any naturally occurring amino acid
  Transcript Sequence Number=SeqID_65771
  Gene Ontology: Mol. function=protein serine/threonine kinase activity; Cellular component=plasma membrane; Biological process =protein amino acid phosphorylation
  Homolog annotation: Hit_ID=Q4LB28; Match level="QueryCoverage=91%, HitCoverage=11%, E-value=8e-27, Identity=93%"; Hit description =B0222C05.2 protein
LGSERSYVTTRVXGTFGYVAPEYAGTGXMLNETSDIYSFGILIMEIISGRVPVDYNRPPGEVSHGCASI

SEQ ID NO: 131746 - protein, 95 aa, Setaria italica
  Transcript Sequence Number=SeqID_65772
ARSSDKNGGAGGWDTSAANWNKSSVVAEAQEGGWGKGKGASDQAGLGDWDKPKSFGGGGSSSWNEGEEETMVGETVIEAIPGLEGKMMVLMDKKW

SEQ ID NO: 131747 - protein, 73 aa, Setaria italica
  Transcript Sequence Number=SeqID_65773
WGEACRVADMGTGGDADPWGNKVKAVDMEGTDSWDKATMPPDNKLEGVSQGWGQPLGNSMKAKEKIIFLKLRA

SEQ ID NO: 131748 - protein, 76 aa, Setaria italica
  Transcript Sequence Number=SeqID_65774
  Gene Ontology: Mol. function=protein binding; Cellular component =plasma membrane; Biological process=ubiquitin-dependent protein catabolic process
  Homolog annotation: Hit_ID=P0C030; Match level="QueryCoverage=80%, HitCoverage=79%, E-value=3e-23, Identity=85%"; Hit description=NEDD8- like protein RUB1
  Pfam annotation: Domain name=ubiquitin; Domain location=10-73; Score =67.5; E_value=4.9e-17; Accession=PF00240.15; Description=Ubiquitin family
DRVSGFECRSTLNALLDPVDRVSGFNERVEEKEGIPPVQQRLIYAGKQLADDKTAKDYNIEGGSVLHLVLALRGGY

SEQ ID NO: 131749 - protein, 53 aa, Setaria italica
  misc_feature (42)..(42): Xaa can be any naturally occurring amino acid
  Transcript Sequence Number=SeqID_65775
LLLLLSDCSLLTLLYRFSMALEFLGCMDGRRQNNSIKTKIKXKGIIDELGQIT

SEQ ID NO: 131750 - protein, 74 aa, Setaria italica
  Transcript Sequence Number=SeqID_65776
SKIKVNKVNKVTYNSKFREDKLEIRREEQGQGQIKKRRGPSWINQDFLICPCHLSGGGEDLLVIGLGGREVGIS

SEQ ID NO: 131751 - protein, 45 aa, Setaria italica
  Transcript Sequence Number=SeqID_65777
RKLLAPWRKRRGVRQGYLVLTASTAAAAAVAMASPPWPRCAYNTK

SEQ ID NO: 131752 - protein, 62 aa, Setaria italica
  Transcript Sequence Number=SeqID_65778
MLLKLNSKKSDQLGLNHKWNHRDICTKPSCATTSYREYQTSLDIGMTISAFHSDDQNADGQC

SEQ ID NO: 131753 - protein, 67 aa, Setaria italica
  Transcript Sequence Number=SeqID_65779
CMVNWLLILLLPQDFFIWVLVLPILLLYVYAFQYEYALLGLDFSFLKVISYFALTELGNMNTNGTNT

SEQ ID NO: 131754 - protein, 46 aa, Setaria italica
  Transcript Sequence Number=SeqID_65780
  Gene Ontology: Mol. function=serine-type carboxypeptidase activity; Cellular component=extracellular region; Biological process =proteolysis
  Homolog annotation: Hit_ID=P55748; Match level="QueryCoverage=80%, HitCoverage=8%, E-value=1e-14, Identity=97%"; Hit description=Serine carboxypeptidase II-2 chain B (Fragment)
PIEGRTGQTKSINLKGYMVGNALTDDFHDHYGIFQFMWTTGLISDQ

SEQ ID NO: 131755 - protein, 46 aa, Setaria italica
  Transcript Sequence Number=SeqID_65781
CKFILRLAVTSTVQHAVSVPWQQKLFHSFSPSLFVGLCWCLVPIIP

SEQ ID NO: 131756 - protein, 76 aa, Setaria italica
  Transcript Sequence Number=SeqID_65782
  Subcellular localization annotation: CTP_CleavageSite=32; ConfidenceScore=5.10e-01
PPQESFLMNYKARTQPWSTRSSTKTIRSLPKRCMIVGKLRRREENGDICIGYQNRQQSRELLRRIDFNKNTRILNP

SEQ ID NO: 131757 - protein, 119 aa, Setaria italica
  Transcript Sequence Number=SeqID_65783
  Gene Ontology: Cellular component=apoplast
  Homolog annotation: Hit_ID=Q2R178; Match level="QueryCoverage=94%, HitCoverage=8%, E-value=4e-47, Identity=78%"; Hit description=Lipin, N-terminal conserved region family protein, expressed
  Pfam annotation: Domain name=LNS2; Domain location=1-74; Score=29.0; E_value=1.3e-10; Accession=PF08235.5; Description=LNS2 (LipinNed1Smp2)
HDSNIPLLVSVIRRAPHEFKIACLEDIKALFPSDYNPFYAGFGNRDTDELSYKKMGIPKGKIFIINPKGEVAVNSSVDVKSYTSLHTLVNDMFPPTTLVEQEDYNNWNYWKVPLPDVDL

SEQ ID NO: 131758 - protein, 129 aa, Setaria italica
  misc_feature (53)..(53): Xaa can be any naturally occurring amino acid
  misc_feature (86)..(86): Xaa can be any naturally occurring amino acid
  Transcript Sequence Number=SeqID_65784
  Gene Ontology: Cellular component=apoplast
  Homolog annotation: Hit_ID=Q2R178; Match level="QueryCoverage=95%, HitCoverage=10%, E-value=9e-43, Identity=63%"; Hit description=Lipin, N-terminal conserved region family protein, expressed
  Pfam annotation: Domain name=LNS2; Domain location=53-129; Score =39.1; E_value=1.5e-11; Accession=PF08235.5; Description=LNS2 (LipinNed1Smp2)
MSKLWRNNKSQSPRKQFVRTLIPTSEQVASLNLKEGQNLVTFSFCTRVLGKQXDGTITRSDVLGQVMPLVGRDWSHSGVARLFSAXKENGYQLLFLSARAIVQAYLTKNFLFNLKQDGKALPNGPVVIS

SEQ ID NO: 131759 - protein, 68 aa, Setaria italica
  Transcript Sequence Number=SeqID_65785
SMATSDKDKLGSIPEHSEEEEQDKEEHSESPKGLGVEISLCGNMLRPGMGRESAEEAFLQHLCSVEVG

SEQ ID NO: 131760 - protein, 65 aa, Setaria italica
  Transcript Sequence Number=SeqID_65786
NWLLMASASVIVFSMILIFLCLSQLYGELHMNSRLHVWRYFSFRQFQFFSLMLLPDCVQFFPPES

SEQ ID NO: 131761 - protein, 52 aa, Setaria italica
  Transcript Sequence Number=SeqID_65787
  Gene Ontology: Mol. function=nucleic acid binding
  Homolog annotation: Hit_ID=B9SVZ5; Match level="QueryCoverage=96%, HitCoverage=7%, E-value=2e-17, Identity=76%"; Hit description =Splicing factor, arginine/serine-rich, putative
AARLWPWEIIYYRRRKKGPISTENYAKRVEQNKEFGIVDQYVRSSTGWWECP

SEQ ID NO: 131762 - protein, 75 aa, Setaria italica
  Transcript Sequence Number=SeqID_65788
  Gene Ontology: Mol. function=protein dimerization activity; Cellular component=nucleus; Biological process=regulation of transcription, DNA-dependent
  Homolog annotation: Hit_ID=B6U9M3; Match level="QueryCoverage=92%, HitCoverage=12%, E-value=1e-22, Identity=81%"; Hit description=DNA binding protein
ETLPALLYLPKNGKHVKINGNLVIKSIVASEKASSRMSGYDGKSPRNQGKEETSLAIPGYVAPLGAKAISLFFIP

SEQ ID NO: 131763 - protein, 93 aa, Setaria italica
  Transcript Sequence Number=SeqID_65789
  Gene Ontology: Mol. function=protein dimerization activity; Cellular component=nucleus; Biological process=regulation of transcription, DNA-dependent
  Homolog annotation: Hit_ID=B6U9M3; Match level="QueryCoverage=73%, HitCoverage=12%, E-value=6e-27, Identity=86%"; Hit description=DNA binding protein
LNHCRSVNSIILPIHVSICGSQSHQFIEAMSGPLLSSGMCTEVFQFDVSPSSAHANGIVPVYSNAMSNSSQNFTENLPSRPHTVKNRRISYSE

SEQ ID NO: 131764 - protein, 48 aa, Setaria italica
  Transcript Sequence Number=SeqID_65790
NTKNKDKTAKDGLLNNIMQLKVEMAALIQTSSSKGNSHIRRTSSSTQL

SEQ ID NO: 131765 - protein, 89 aa, Setaria italica
  misc_feature (51)..(51): Xaa can be any naturally occurring amino acid
  misc_feature (81)..(81): Xaa can be any naturally occurring amino acid
  Transcript Sequence Number=SeqID_65791
  Gene Ontology: Mol. function=hydrogen ion transmembrane transporter activity; Cellular component=integral to membrane; Biological process=proton transport
  Homolog annotation: Hit_ID=B2J4S2; Match level="QueryCoverage=94%, HitCoverage=19%, E-value=2e-15, Identity=45%"; Hit description=CemA family protein
  Pfam annotation: Domain name=CemA; Domain location=1-89; Score= -132.7; E_value=0.0075; Accession=PF03040.6; Description=CemA family
LNNISDSGKAFLIILISDILLGYHSESGWHTLVEVILEHYGLEADEAAVTXFFVCLVPVAFDVLIKFWVYKYLPRLSPSVXTILDEITR

SEQ ID NO: 131766 - protein, 129 aa, Setaria italica
  misc_feature (110)..(110): Xaa can be any naturally occurring amino acid
  Transcript Sequence Number=SeqID_65792
  Gene Ontology: Mol. function=receptor activity
  Homolog annotation: Hit_ID=Q9SR02; Match level="QueryCoverage=96%, HitCoverage=7%, E-value=3e-24, Identity=44%"; Hit description =F7O18.23 protein
YLLESEEALNKGSSTAIEVFVSLRTKSILHLFAATGRFLGLKVFSQSQVTLKIPKSVLHGSDFVVMGFPQSANAYYLLIQLDNYLRPVFHLLETQTDESNNSNADANQVXRFNRIDISHMQIGEDEYSV

SEQ ID NO: 131767 - protein, 76 aa, Setaria italica
  Transcript Sequence Number=SeqID_65793
LAHMKQTNSICGHWTATPRNACAGAYSCGLVANERIITAPGIIWLRHRGHCTNRTGISELVEALTSYIHERRELKK

SEQ ID NO: 131768 - protein, 45 aa, Setaria italica
  Transcript Sequence Number=SeqID_65794
  Gene Ontology: Mol. function=nucleotide binding; Cellular component =intracellular; Biological process=small GTPase mediated signal transduction
VCVSAFDLLQIYVVDSLDRERIGDARQEFQTIIKDPLMANSIILV

SEQ ID NO: 131769 - protein, 62 aa, Setaria italica
  Transcript Sequence Number=SeqID_65795
TLFFSYTMYLRKIRFTTFIFDILLYDFPNMNVVNLIFLLYHVSEVLCSRRFVLSFNILISLM

SEQ ID NO: 131770 - protein, 120 aa, Setaria italica
  Transcript Sequence Number=SeqID_65796
  Gene Ontology: Mol. function=nucleotide binding; Cellular component =intracellular; Biological process=biological_process
  Homolog annotation: Hit_ID=Q7X864; Match level="QueryCoverage=67%, HitCoverage=10%, E-value=2e-37, Identity=87%"; Hit description =OSJNBa0006A01.22 protein
  Pfam annotation: Domain name=DUF59; Domain location=15-94; Score =54.2; E_value=5.1e-13; Accession=PF01883.11; Description=Domain of unknown function DUF59
LYHVSEVLCSRRFVLSLTFLHHIRDIKDPEHPYSLEQLNVVTEDSIELNDESNHVRVTFTPTVEHCSMATVIGLCIRVKLIRSLPPRYKVDIRVAPGSHSTEAAGICLQLLHYSILRISN

SEQ ID NO: 131771 - protein, 48 aa, Setaria italica
  Transcript Sequence Number=SeqID_65797
NANPVIHEKKERRVRQAPETTDENAVEPIDQLEIFDILLYDFPNMNVV

SEQ ID NO: 131772 - protein, 50 aa, Setaria italica
  Transcript Sequence Number=SeqID_65798
NTQLSSPTRAEPQRRPNRRPNHAKRTAAICWICLTYLKLVHCASWKWLWG

SEQ ID NO: 131773 - protein, 76 aa, Setaria italica
  Transcript Sequence Number=SeqID_65799
MAGGCALSGGCPTDFAAFAIASAVLALLIFRALFPFIYRKGKRTGVWLVIVQIIGSTDLLLSLVVRYFDSFDAFGM

SEQ ID NO: 131774 - protein, 64 aa, Setaria italica
  Transcript Sequence Number=SeqID_65800
FIHINSDLMCTMEILLKRQTHITFNSNTSRHIAQTKPLHHKYVFIFFFTWPTVTHGPFIDVTQI

SEQ ID NO: 131775 - protein, 64 aa, Setaria italica
  Transcript Sequence Number=SeqID_65801
YTFTSNSLILLTSLVMQQLLQLRVHFFDAPCEGSFPEATAGKSVIFKRRMDAEAAFAGAGKISA

SEQ ID NO: 131776 - protein, 40 aa, Setaria italica
  Transcript Sequence Number=SeqID_65802
KVDGDVKNLAIPSGHDHLSATVSAALLPSANVGAGYAAFA

SEQ ID NO: 131777 - protein, 105 aa, Setaria italica
  Transcript Sequence Number=SeqID_65803
  Gene Ontology: Mol. function=nucleic acid binding; Cellular component= ribonucleoprotein complex; Biological process=ribosome biogenesis
  Homolog annotation: Hit_ID=Q9S826; Match level="QueryCoverage=68%, HitCoverage=24%, E-value=5e-26, Identity=72%"; Hit description =Putative U3 small nucleolar ribonucleoprotein
  Pfam annotation: Domain name=Brix; Domain location=3-105; Score= -16.7; E_value=0.0022; Accession=PF04427.10; Description=Brix domain
TELQHDITDLILVHEHRGKPDGLIVSHLPHGPTAYFGLLNVVTRHDIKDRKAMGKMSEAYPHLVLDNFSTKVYTLFHVNSYYFAFIMVSSSLCVLEKLNQHFRTR

SEQ ID NO: 131778 - protein, 67 aa, Setaria italica
  misc_feature (51)..(51): Xaa can be any naturally occurring amino acid
  Transcript Sequence Number=SeqID_65804
  Gene Ontology: Mol. function=nucleic acid binding; Cellular component= ribonucleoprotein complex; Biological process=ribosome biogenesis
  Homolog annotation: Hit_ID=Q9S826; Match level="QueryCoverage=94%, HitCoverage=21%, E-value=7e-20, Identity=71%"; Hit description =Putative U3 small nucleolar ribonucleoprotein
MTNISFRHHVYEKPGGPKSIDLKEVGPRFELRLYQIKLGTVEQDEAQSEFXLRPYINTAKKQKALGS

SEQ ID NO: 131779 - protein, 61 aa, Setaria italica
  Transcript Sequence Number=SeqID_65805
  Gene Ontology: Mol. function=nucleic acid binding
  Homolog annotation: Hit_ID=B9SHJ5; Match level="QueryCoverage=88%, HitCoverage=11%, E-value=6e-15, Identity=70%"; Hit description=RNA binding protein, putative
SVVCNFCFYLLSPGSLFESMDSVRSGLSIKLMQEGRMRGQAFVTFPTVELAQRALNLAHGY

SEQ ID NO: 131780 - protein, 77 aa, Setaria italica
  Transcript Sequence Number=SeqID_65806
  Gene Ontology: Mol. function=nucleic acid binding
NNAHAKPQDQLEHGVSPAPSICSENQKNPTSTAEPIAPKLGVDYPFPPHLEYDISSLLHYVTLSFDVDVKMPSLFLR

SEQ ID NO: 131781 - protein, 79 aa, Setaria italica
  misc_feature (21)..(21): Xaa can be any naturally occurring amino acid
  Transcript Sequence Number=SeqID_65807
MKSTSSHAQFLMGDELECLLXSNSLALEHLDLTNCDEIIILKIPSVLQQLCQVDTPMLPTKFLNLKHLYIQTIAPTFSP

SEQ ID NO: 131782 - protein, 83 aa, Setaria italica
  Transcript Sequence Number=SeqID_65808
  Gene Ontology: Mol. function=transferase activity
  Homolog annotation: Hit_ID=Q8LGN5; Match level="QueryCoverage=93%, HitCoverage=33%, E-value=3e-23, Identity=67%"; Hit description =Glutathione-S-transferase 19E50
  Pfam annotation: Domain name=GST_C; Domain location=1-70; Score=41.8; E_value=2.6e-09; Accession=PF00043.17; Description=Glutathione S -transferase, C-terminal domain
EERLQGKVLDVYEAHLSRTKSKYLAGNFFSFADLNHFPFTFHIMTATPHASLFDSYPHIKAWWARVMARPSLKKISTHMEIKP

SEQ ID NO: 131783 - protein, 38 aa, Setaria italica
  Transcript Sequence Number=SeqID_65809
MPDVYLQPFGQIPAFQDGDIMLFESRAISKYVLRKYAK

SEQ ID NO: 131784 - protein, 35 aa, Setaria italica
  Transcript Sequence Number=SeqID_65810
  Homolog annotation: Hit_ID=Q2HW44; Match level="QueryCoverage=100%, HitCoverage=13%, E-value=6e-09, Identity=85%"; Hit description=TPR repeat
RPAADLWQRGLSLYYLDRFEEGAEQFRLGVAANPN

SEQ ID NO: 131785 - protein, 82 aa, Setaria italica
  misc_feature (38)..(38): Xaa can be any naturally occurring amino acid
  Transcript Sequence Number=SeqID_65811
  Homolog annotation: Hit_ID=B6TIT4; Match level="QueryCoverage=64%, HitCoverage=15%, E-value=7e-19, Identity=84%"; Hit description =Cyclin-H
YLETIFSRQHSDCTVEQFVQSINAIHYLVDQLKIPTVXKDMRYVDRKLKHCWDRSSHDEHKKKEKKSKHKSKRTSTDAQLNG

SEQ ID NO: 131786 - protein, 83 aa, Setaria italica
  Transcript Sequence Number=SeqID_65812
  Homolog annotation: Hit_ID=B6TIT4; Match level="QueryCoverage=61%, HitCoverage=15%, E-value=1e-19, Identity=86%"; Hit description =Cyclin-H
LSADNLETIFSRQHSDCTVEQFVQSINAIHYLVDQLKIPTVKDMRYVDRKLKHCWDRSSHDEHKKKEKKSKHKSKRTSTDAQL

SEQ ID NO: 131787 - protein, 49 aa, Setaria italica
  Transcript Sequence Number=SeqID_65813
LGLFVLLPFLSLVNYCWDRSSHDLYRHKKKEKKSKHKSKRTSTDAQLNG

SEQ ID NO: 131788 - protein, 59 aa, Setaria italica
  Transcript Sequence Number=SeqID_65814
  Gene Ontology: Mol. function=structural constituent of ribosome; Cellular component=ribonucleoprotein complex; Biological process =translation
  Homolog annotation: Hit_ID=P49397; Match level="QueryCoverage=72%, HitCoverage=16%, E-value=3e-17, Identity=97%"; Hit description=40S ribosomal protein S3a
FSASQFSSFFFQIASEGLKHRVFEVSLADLQSDEDQAYRKIRLRAEDVQGKNVLTNFWE

SEQ ID NO: 131789 - protein, 54 aa, Setaria italica
  Transcript Sequence Number=SeqID_65815
  Gene Ontology: Mol. function=structural constituent of ribosome; Cellular component=ribonucleoprotein complex; Biological process =translation
  Homolog annotation: Hit_ID=P49397; Match level="QueryCoverage=96%, HitCoverage=19%, E-value=2e-17, Identity=86%"; Hit description=40S ribosomal protein S3a
RSFIRKVKILKAPKFDLGKLMEVHGDYKEDVGTKVERPAEADEAMGGQEVAAAE
